United States Patent Application Publication US 2004/0031072 A1 - sequence listing, part 23

SEQ ID NO: 104924 - DNA, 591 bp, Glycine max
  Clone ID: PAT_MRT3847_65762C.1
ctctttttcttagacaggctctgctcctccgcgtttgcttccacaactaccaacgcttcaccgccggaggcgtcgccgcacgtcaccggatgtggtgcagcgccgccgccaacctaccgtcggacgaagcggagaagaaaacaaactccggcggcatcagcaacagctcctttgcacggaaagctcagtatcctccgtcaagtgaagcgcggtgggaggacgaccccgattaccgcaaatggaaggacaaagaaaaggagattctcagcgacattgaacctatcgttgttctcgccaaggatattctccattcacgaaggtcacttcttaatttcataaaaaaaaatgtgaagtgattttttatttatttattctatattgcacacactgcaggtacatggatggagcgcgattgaatgaggaggacgagaaggctatagttgagaagctccttgcataccatccacattctgaagataagattgggtgtggccttgaatccattatggttgaccgtcatcccccatatcgacaatcaaggtgtctttttggtgtaagaactgatggtggctggattgatttctcctatca

SEQ ID NO: 104925 - DNA, 298 bp, Glycine max
  unsure (1)..(298): unsure at all n locations
  Clone ID: PAT_MRT3847_65763C.1
ggagcatgcacgcgtacgtaagctcggaattcggctcgagggacaaggcagatgttcagtccatcatcggcctccagcgcttctttgagacacgaatgaatgatgcctttggtgacaccaagttttctgctgtgctggtagaaccaccaccactgaaccttcccagtgctggcctaagttctcaggagctgtctggtcctggtnatggccctgaatctgggncnnttgnggncagcccatcnnncnctgnccccgaatttgnaccccatacctgtcanccnntggtggctgattacct

SEQ ID NO: 104926 - DNA, 247 bp, Glycine max
  Clone ID: PAT_MRT3847_65764C.1
ggaaaccaaaatgctagaaaaggctcgggctattggggcccttatggggcgtttggataatgattgaaatgggcaattcattgcctagcaaaattttcccccagggaacaaaaaaaaaaaaaattcttccaaaaatcccatcgggaaaaaaccccttatttttggaaattggcttttaagggaaactaaatcccatcaagggtcaatgactgaaaagccctaaacataactttgcaggttttttttt

SEQ ID NO: 104927 - DNA, 470 bp, Glycine max
  unsure (1)..(470): unsure at all n locations
  Clone ID: PAT_MRT3847_65765C.1
aattcggctcgagcggctgcgagaagacgacagaagggtcttggttttgtttattaactttcgatctctttaaagacaactttacaacactagtgatcgattaagattgaaatttacaaagaaaacaagatcaccgatgatagatggagatgatgaatgtgcacaaaacacaagggggacccctaagggtgcatagatcacattcaaatatcaaaagcaaaactaaccaacggtcacttgaagaacaccgaacaaggaacgatgtaggcttcgatcacggtcgcgattcggtagcgcctcagcttcatttccttttctttcttcttcttctctctcaattctctcaatatccttcaatgctaaaccttggaacccttccctcagcctccttcacccctatttatagccaaaaatggtatttggtggacctgcaactcgcccaggcgagctgagacttatncatgaagtaa

SEQ ID NO: 104928 - DNA, 345 bp, Glycine max
  Clone ID: PAT_MRT3847_65766C.1
cctataattctcttcttggaatcatcttggttaagctgcagatcagaatataataatgctacataaagataagatggagactcatttggttttcttgcttggttggatcttcactctagttgccgtcgatgcagcccaatcccaaggcccatccagctctcctgcgcctgcaacacgcgaagcatctccacctcctgtccagtcttgtacgtcacctgttccctcatgacctacaccctctcagtatccaccaccaagcttcactcgctttacattcggactcagctcttctcttgcttcctctcctcgacacctcctgctctgctacttcttatccacaccgtg

SEQ ID NO: 104929 - DNA, 691 bp, Glycine max
  Clone ID: PAT_MRT3847_65767C.1
cccacgcgtccgaaaacacagcgcatttgtagagaaaaaaagaaagaaccgattttagagagagaaacagcggagggcgcatgcgcgatggttcagatcgcgaggaggaagaagggacggccgtcgaaggcggatctggcgcgccgctccggcgagtctcaatccgatccacggcggagcctccggcgccggagcgtgaggtacaacatcattgactacgacggagattatcttgacgacgacgaggaggacgagaggaggcgcgagaagaagaagctcaagctcatggcgaagctgaaccaggacggcggagaagaagaagaagaggaagagcgggaagaagaagaagaaaacgagactgcaacgaaccacactcgtgccgagtcgcgtgaggagcacgcgccggtagaagaatacgacgacgaaaaagagcaagaggaggagaacgaaaacgaacaagaggaagagaatgaagaagacaaaaacacagcgcatttctagagggagaaaaaaagaagctgaaccaggacggcggagaagaagaagaagaggaagagcgggaagaagaagaagaaaacgagactgcaacgaaccacactcgtgccgagtcgcgtgaggagcacgcgccggtagaagaatacgacgacgaaaaagagcaagaggaggagaacgaaaacgaacacccaacacc

SEQ ID NO: 104930 - DNA, 284 bp, Glycine max
  Clone ID: PAT_MRT3847_65768C.1
aattcggctcgagcttgatatttgatctcctaattctttctcatccatctactatgctttatttattttgttttttatttgcacttcaggaaagattagctctgaaaggagggggagctgaacttggcccttcagttttattctttggatgcaagaaccgtcaaatggtgagttatctatcctccatgtaagtttatgagttctttttctgaaaagagatttatgagttaattataatttaagtcggcttaccaatattattttaataatttttattaaaggac

SEQ ID NO: 104931 - DNA, 413 bp, Glycine max
  Clone ID: PAT_MRT3847_65769C.1
ttccgatcgaccagctccagcttcttccttctctgagctatatctagacggccctgtataaaagctataatgactaaggctctcatgctacataggatactatcaatagactccatctatatgctatctactaagcgttgagctacagcacttgaacactgaaaacagaatcactatttaacgaaatgatcgttcaatgcagactatcttgacagtcagctgattgaatactggagagagacaggcttatcaggctatagaactatgccgcattctgaattgcgatattgactcacactatagcttggcatcaagcatacctgttatggaggattcacaccacatgaccaatacgcttaaacacatgctagtgcaagctgatcaagctgaacgtcctggctttatggaaaggt

SEQ ID NO: 104932 - DNA, 434 bp, Glycine max
  Clone ID: PAT_MRT3847_6576C.1
gtagaattggcggtgataggcgaaggaggtggcgactgactagtgaataggcttgttgatggattgatagcaataattgctgttagcgaagcttgggaattgacatttatgggtcgcaatcgcaggtcgcagtcgcagtgtgtcacgctctcctttcaattcccgcaaaagacggtactctgcatcccctgattctcatcgccactcgagaacttccaggcgccgatctccttgccacaagcgccgtctaaagcacagaacctcttcctacccctctctttcacgcaaccccactcccaaacccaagaaagatcaaaacataagcaagcgtcaacactaggaagaattgaaactattctaagaagaaactgcaagacgactggaagaagcaattccaaaaaatgctgacgaaaatcttaacacagaggaaagta

SEQ ID NO: 104933 - DNA, 1020 bp, Glycine max
  Clone ID: PAT_MRT3847_65770C.1
gtacggccaacaagcattcagtttttcatttccaaaatagaaatttttaagataacaacttggataattgcccactgaccaactaaaattacatacaatggcagcactgggcataaaattctcagtccgagttcatttcccacaacaaaattgggtctaagcagatggggaaaagatgctacaatttaaaaaaggaaagagtaattttgaacaaattacatcagtgtaatttgctctttcgtttatatttacaaataataatataatatagaaagcatagactatcatagaggattcgttgttattttttgaggaacaaggaatttagaggtatgggatgatagccaactacagtaaatgcatcctttccacataagagtggttcaaccattggcaaagaggctccccacatcccacaaaacaccctgaatttcccttttcagccaaaaatgggaaactgaatgtgtgcaacaggtcctgcactgcctgtctcaccagagaagatcctgtcaccttgctccgacgaccccatcctgtgataatgtctacccgactagggcgaatcccggataccagcatacgttggcgaaaccaagcaagtgtcctagacaatgctgtcacagcagttccatcagacatgacatgaagatttataagccaatagcgagagcttttttccttaacagcatctggatacacattcctttgtgcagcagcctcccaaactgaaccagcttcctccttgagcccagacttgtttagaaaattcaccactgaatctacaagcccccttttgccctctctatcctcggtgtgcatcatatccaagaatttgcttacatgatcccgcacattttgaccatcaggtcctgctgctggcataggatgtaaaaatgcatgtgcaggatggccagagactgccataagctcacaacaaaatcccatatcatacggtgattgtgcctccgtacaacaactgagaagcaaagtgtaagtctgcaaagaggggtttaagccaag

SEQ ID NO: 104934 - DNA, 229 bp, Glycine max
  unsure (1)..(229): unsure at all n locations
  Clone ID: PAT_MRT3847_65771C.1
gttctataataaaataaaattaatgttggaccattatgtgaagtgaacattacaacagataccatattttagcattgaacatcaacttaagctatagtacaggctacaaattattcctctatgggcaattgacaccaatgtattaaacaaatcattctcactacagggttttcaacataaaagaagaaaacatgggttttttattgttttggggaggagnggggtgtgt

SEQ ID NO: 104935 - DNA, 765 bp, Glycine max
  unsure (1)..(765): unsure at all n locations
  Clone ID: PAT_MRT3847_65772C.1
cggtccggaattcccggngtcgacccacgcgtccggggtttcatatctcgggatcccaagctacaagtgttaatatgcgacctagaagttgttatgaggccttcaaataaaagcccagggaagaagaaaactaggaaatctcgtgcttcaggcaggggaaagtggatgattgtgggcaatattgcaagatatttgtcagtttgtgtgactgatctggttctgaagacaccaaaatttacagttgagatcaaggaattgaatgtggatatatctaaagatggaggatccaagtcaaatttattagttagactgcaaatattacctatttttgttcacattggtgaaccacgagctagctgcgactttttatctaatttaagtggtggaggatgcagttcttcaggccaggcatccattactgctttagaaaggtcttcagctccttttatctgcgaaacgttctctgtctcgtgtgaatttggtcataatagagaagtgggcatagttattaagaatatggacatttccagtggagaggtcactgtgaatttgaacgaagagttgcttttgaagagcaagagtccatcaaagtcttcttctggttctgacagtaaagtggggtcacatgctgattctacaagcacaaaaaggccatcaaagaagcagcaaacacttgcagctntctccaatacagctctttgtttcctgaagagtcagcttcaatctaccaaactggatgtgagttttgtgcttcggagcatggtc

SEQ ID NO: 104936 - DNA, 250 bp, Glycine max
  Clone ID: PAT_MRT3847_65773C.1
cccacgcgtccgaaaaaaacatgtataactttgcttaattaaaatggaaaggtttttcgcggtgggagaagaggatgtcctgggatgaattctggaattgcttctatcgagtatgtgcttgctagtctcctttattggcctgattggaagttgcctgatacactagatgtagatattagcgaggtatttgtacttgttgtcttaaagaaagtgccacttctccttaaaccataaacctttccattttaat

SEQ ID NO: 104937 - DNA, 159 bp, Glycine max
  Clone ID: PAT_MRT3847_65774C.1
ttttattgctttcatgtacatgcccaagattaatcagcctatagactcctgtgcaatgctgaggtagttggggagagaccttctcacataccagtgttggtgctgtgacctattatccacctgattttgctgggaaagcatatccgcttgaagcgattg

SEQ ID NO: 104938 - DNA, 379 bp, Glycine max
  Clone ID: PAT_MRT3847_65775C.1
gccatgtcgatcttttggggacgccaggggccgacgggggacaggttgtggatgaggatgggtctgacgttcacccttacagggtactggccgcgcaatacgggggcgaagaacctctacatgatatcgtggaaagcgatcaaagggcatatgaaccatgtacgctgggctcgcggtggcgacatggtcatagccaccgggcagaatgggaaaccccatctgaagaaaaaaggcttgccagctgacattgttcgccagcgcaagccatggtgccaaaaggacggggtctacatgtatatcgaagaaatgctcgtgtagttgtcatcccaaaggagacatgacaggccctgctatcactggccccactgggaaagagtgt

SEQ ID NO: 104939 - DNA, 437 bp, Glycine max
  Clone ID: PAT_MRT3847_65776C.1
ggctcgagctcgagccgaatcgggtcgagggatcaatggccaactgctttgaaggagttcatcctaaaaataagggctatgggattgcggcaagaacaagcagatatagacatggcattacctgacctgcagacactctcatctcacactgatgttgcacaggccatgaacggctggtattgacatgatgcagcagttcgatcggcaggtacctgatcgggtgattgcgcctggaggccaccttggcaacatgaatgcggtgctcgtcagggttatcatgcgcaaatacttgcctctcgatatcaacatcccgaggtctgtatgggcgcatgctggcaacgctgaacgtttgcatgatgcactgtcaataacgatggaaagagtctaagcctgagaagtcataaaatctgaatgacgcatgcggagaatgaatgagc

SEQ ID NO: 104940 - DNA, 408 bp, Glycine max
  unsure (1)..(408): unsure at all n locations
  Clone ID: PAT_MRT3847_65777C.1
gaaggggtttttaaacaaaacttccaactctaggaagaccacttggggagcatccntgggccctctnnnnnnaacgctttacactatgtgccatacagactgggaccatctgactcggaccattttttgccttaccatattggccttacccaacnnggggagatcttaagttggatactatatgctgaaggctataatgttaagggtaacatgtcggattacgaaactctgtcngggacagcctcagggtgcctgctttaggctgagacttttgggctgctagtacagtgatcttagganggcctggaaagaaacctttnntaagantcggttcctgnaatttgcatccgggactttgcatcattgacttcgncgcttcgacagcagggttcctactgtggggtgcgt

SEQ ID NO: 104941 - DNA, 220 bp, Glycine max
  Clone ID: PAT_MRT3847_65778C.1
tcctctagagcggccgcttttgggttttttttttttttttttttttcttctcaaacaaactgtcaagattgaaactttgggacctacaaatgagcccaaaagcattcatggagaccgggtttctcttttctctctggcactaaattttcctataaatcaaagggaatgaataaacaacaggagttcccgccactgatgaaaaaaggtgaatacaaatatt

SEQ ID NO: 104942 - DNA, 433 bp, Glycine max
  unsure (1)..(433): unsure at all n locations
  Clone ID: PAT_MRT3847_65779C.1
gacgatgctgccatccgattaggcgttgagaggaggcggatctatgacattgttaatgtcctcgagagtattgggttgctatcaaggaaggcgaaaaatcagtatatttggagaggttttgtcgcaattcctcacactcttcaggagctcaaggaagaggggttgaaggataattccaatttcttgcgtggttctggaaacgacaacgacaaagtgtccgacgacgaagatgacgaggaaacactgtctaatcccgctactggaagtcaaagcgacaagttgaaccctaattcttctactcttactaaatctctgaaaaatgcggaaccaactgttgcattttgaaaatcgaagggaaaaatctcttgctctgcttacccanaattttgttaagctctttgtctgctctaatgtggaattgatctcccttgac

SEQ ID NO: 104943 - DNA, 353 bp, Glycine max
  Clone ID: PAT_MRT3847_6577C.1
ggaagaaactttcgaccataaacatagtttggattaaatattaaacccttctttaatgataccttcttaacttttattcatgggaatattggtaacatggcctggcccaaacccattaaaaccaccggttctttaaatattttaacattgaagcctattttggacctaaaaggtagaagccccttctggggaccatggatgggccagacctattattatcaactttaaaaattcaaatttggtggaaggggcctgaggattccagggttggatcttccattcagaaccctatatttttttttgggggaacctccaacctaattcttaagcctgttgggaccaggaccagggat

SEQ ID NO: 104944 - DNA, 359 bp, Glycine max
  Clone ID: PAT_MRT3847_65780C.1
ggcaagcctgctctgatctttgacgagacagccctcccatggttcagagcgggtgtgtacccacctgtaggaacctacaactactgagcatactcctacacactgttcgcgtcagataaggcactgatatggatttgcagagcacagaagattccaagactgggccaaaccatgctctatagtcaaacaatacttcctatgactagagaagggtctctatatgttctagagagccagcttattcatgaagacctttattgaaaccactaagctaaacgttgaatgagacgatcttcaaaaatatcgaatcttaatgaagtgaacaatggaatgttgcttatcttggcgatcttgggtta

SEQ ID NO: 104945 - DNA, 854 bp, Glycine max
  Clone ID: PAT_MRT3847_65781C.1
ctggaatatgcatggagccacgcggttatatcagaccagcaatacgacaaagcaaaacaattatgtgattttaaacaatttgaatggtctaatgaatgcaacaaggccatgaatgaagtgttccaagattacttagaaattgacatatacaacatttatgccccggcatgtcttctaaacagcacatcctcaatagctgatgatggcgacagtaacggccctgaatcattaactaaggagagaaatgattatagactaaagaggatgagaatttttgggggctatgatccttgttattccaattatgcagaagaatacttcaatagaaaagatgttcagtcatcttttcatgcagatactaaaagagacactaacgtagcatggaaggtgtgcaagtggccttaagatttggatttacagtggagatgcagatggaagaataccggtgatagggacacgatattgcgttgaggctctgggattacctctcaagtctaggtggcgaacttggtaccatgataatcaggttggaggaagaatagttgaatacgaaggtctgacatatgtgacagtgagaggagcaggtcacttggtgccactgaacaagcccagtgaggctctctctctaattcattctttcttaacagaagaacatcttcctactcgtggataatcagcgtaatatatatatatgtacttgtgccagtattttgggttggcaatttttctcacaagaatgaagacccttgtatgatcaatataaataaatgaacagcaatgatatgtagacatcccttaactacaaatattcatttgattcgtctcataaaattataatcatttattatacctgc

SEQ ID NO: 104946 - DNA, 468 bp, Glycine max
  Clone ID: PAT_MRT3847_65782C.1
ggggaaaaaatgggaaaaaggttttatttggttcctggtttttcccaaccaaaatttccgggggtcttttttaattttttggaaccccgaaaccccgttaaaccttggattccctatttttgcccctccagggggaaaaaaaatttggggtaaaatttttccaaacccggcctccggggggggggggggccttttcccccccccccaaaattggcaaagccaaaaggaaaactttttaaccaatttcccctggccccctacttcccttccaattttaaaaactcctgggaaaaaaaaaacggcattacccttcaccccccaaggggggggggccctcctttttaagcagaaacgggaattttttcctttttttttttaaaaggtttgggaggcttttaaggcaaaccatttggagggttccaaatccctggaaaataagttttccttaactaagcaaatcccgggcaa

SEQ ID NO: 104947 - DNA, 1905 bp, Glycine max
  Clone ID: PAT_MRT3847_65783C.1
tacctgcgagaagacgacagaagggggaggtcaaacaacttaatgaattgatgggctcgtgtgggcaaggcttccaagtgtacattattggccatttccaacaattccaattgatctcaattctcgcagtcaccattgttagaactataagagtaactaatcaaatagtgttttgaccaaagaggtcgatttattttagtagcagttatgaacacgaacatgaatgttattttgtgtctccagttcctatgtttctttcttttaagtactttgttcattaaagcatctgcaataaatgtggaaacatatgaatctgatagaataattgatcttcctggccaaccttcaagcccatcagtctcacacttttcaggttacatcactgtcaatgaaaaccatggaagggcccttttctactggttctttgaagctcaatctgaaccatccaagaagcctctccttctctggctcaatggaggacccggatgctcctctattgggtatggtggagttgttgagattggacctcttatagtcaacaaaaatggggaaggactacatttcaacacacactcctggaatcaagaagcaaatttgttatttgtggagtcacctgtgggagttggattttcttatactaatacatcttctgatctcaccaaattagaggataattttgtggctgaggatgcctacattttcttggtgaattggctacaaagattcccacagttcaaatcccgggacttttttatatcaggagaaagctatggtggtcactatatccctcagcttgcagagttaatcctcgagccgattcggctcgagagcaaatacccctttattaatcttaaaggttttattgtagggaacccagaaactgatgattactatgactataaaggccttcttgaatatgcatggagccatgcggttatatcagaccagcaatacgacaaagcaaaacaagtatgtgattttaaacaatttgattggtcaaatgaatgcaacaaggccatgaacgaagtcttccaagattactcagaaattgacatatacaacatttatgccccgtcatgtcttctaaacagcacatcctcaatagctgatgatagcaacggtaacggccctgaatcatttactaaggagagaaatgattatagactaaagaggatgagaatttttgggggctatgacccttgttattccaattatgtagaagaatacttcaatagaaaagatgttcagtcatcttttcatgcagatactaaaagagacactaacgtagcatggaaggtttgcaataattccatattgaggacttacaacttctctgttttctcggtcctacctgtctacactaaactcatcaaaggtggccttaagatatggatttatagtggagacgcagatggaagagtgccggtgataggaacacgatattgcgttgaggctctgggattacctttaaagtctaggtggcgaacttggtaccatgataatcaggttggaggaaggatagttgaatatgaagggttgacatatgtgacagtgagaggagcaggtcacttggtgccactgaacaagcctagtgaagctctctctctaattcattctttcttaactgggcaacatcttcctactactcatggataatcatcgtaatatatgtacaattgtgccagtattttgggttggcaatttttctctcaagaatgaaaacccgtgtatgatcaatataaataaatgaataacaatgacatgtagacatcccttaactacaaacattcatttgactcttctcataaaattataatcatttattatacctgcatttcttctcttgcatgtaaaaaaaaaaaaaaaaggacggccgccgacaaattagcgagccggtccagcaag

SEQ ID NO: 104948 - DNA, 293 bp, Glycine max
  Clone ID: PAT_MRT3847_65784C.1
ccttccacgtctgagaggacaccgcagagttagagactatgctgggatagctacaaattcctttttgctgatttgggaaaattacacggtgattagcactttgccatgaggattgctggtcctctaatcaatgtacacagactactgccatctctggatttaaggaccggggacatggattctatgtgcattaccattggctctggcgaggccaagagaatttcacatcaccctgcactgaaaggtgtgaacacacgtcaagctcttggaaagttccgagaattttagctgat

SEQ ID NO: 104949 - DNA, 199 bp, Glycine max
  Clone ID: PAT_MRT3847_65786C.1
cgccacgcgttccgccaagcgtcggatttctgaattagctaggtaggtaggtagagaatgggtatggaaagaaaaataaagctacacagaaactggaaagtagagtagtgaagaaatgaagcattgtttttcgtgtatatatttagggaaatgcaatgcatggtagagatggatggatggcaagtacaaatttccttgg

SEQ ID NO: 104950 - DNA, 718 bp, Glycine max
  Clone ID: PAT_MRT3847_65787C.1
actcacccttgttgcatgttccttacttcctttgaaacctttggccaccaacaaacacacacacacacacacttggatcaactttcctcgtcccttgctttccactccaacacggtaccaaccaacctaccaaatggcagccaaaccagctgaagaagctcctcaaggagaaaccctcaagtaccagacgtgggttttgaaagtattgatccactgcgatggctgcaaaaggagagttaagaaaattcttcagggaattgatggggtttatacaacagaggttaattctctgctgcacaaggttacggtcaccggtaacgtggacgctgagactctcatcaagaggctttcaagatcagggagggtagtggagctttggccagaaaaaccacctgagaagaaagataataagaagtctgggaaatccaataagggtggtgctggtgatgctaataaggagaaggaagaccaaaagaatagtgaaccagattctgatggtggtggttcaaatgagggttctaaagacgctcccggtgaagattctgacaaagaaggtcatagttatgaatgtgaggagggaggtggtggtggtgaaggtggcaaaaagaagaaaaagaaaaagaaaagaagaacaaaggggaaaacggtggttctgcatctgctcctcctaatatggaggaggaggagaagaattagtaaagttgatgcattagtccct

SEQ ID NO: 104951 - DNA, 250 bp, Glycine max
  Clone ID: PAT_MRT3847_65788C.1
attcgatggtgtcttgattcagattttgtcattggtttgtgctttttattttgtttcttaatctcgatttcaattcattgattttgtgttttgttcttgttattgtctctttggtgtaatagcatgttttagattcaaatattcgtgcacataaacacaatgctcccccctgtcggtggaggatttggcgtccctgccgttgctagacatggcggcggagaagcgaatcgaggggctggcgatgaaggtc

SEQ ID NO: 104952 - DNA, 661 bp, Glycine max
  Clone ID: PAT_MRT3847_65789C.1
ccacgcgtccgcttgctttccactccaccaaggtaccaaccaacctaccaaatggcagcaaagccagctgaagaagctcctcaaggagaaaccctcaagtaccaggtcatgatcaacttttccttgctctctcaattccgttttctcttttaaatttgcatgtgtgcatatataatatttctctccatttgttcagttttgttctgatcaacttcactctaattaccgattactccgttcattctgcagtcgtgggttttgaaagtattgatccactgcgatggctgcaaaaggagagtcaagaaaattcttcagggaattgatggggtttatacaacagaggttgattctctgcagcacaaggttactgtcactggtaacgtggacgctgagactctcatcaagaggctttcaagatcagggagggtagtggagctttggccagaaaaaccacctgagaagaaagataatcagaagtctgggaaatccaataggggggtggtgatggtaataaagagaaggaagaccaaaagaatagtgaaccagatgctgatggtggtggttcaaatgagggttctaaagaccctcccggggaagattctgacaaaaaaaggcatagtgatgaatgggaagagggaaatggtgggtggtgggcgggcca

SEQ ID NO: 104953 - DNA, 630 bp, Glycine max
  Clone ID: PAT_MRT3847_6578C.1
ccacgcgtccgctttgggtaagctatggaagggttactgaattctttgcataaccaaagttgcttaaaaccctttggtttcactcccagacttggttataccttccccgtgatcacaagaactgggcatttaaatcgaaaacccgaatcctgcaccttgagaagtaactgtgcacaattaggtagagacaccagcactagctctagaggggctattgttgctgcattgtatagtaatgataaaggagagggttctaatacagactgggaatcggagttcctcggggaacttgatccgtttggttaccgagctcctaagaaaagggaaaaagaaaagaggtcaatgttgcttgaagccactgacggaatggattggtgtgtgagggcgagaaaggaagcactgaaatcaattgaagcgaggggcatggctcatctgatggaaaatatggttactgttaagaagaaaaagaagaaggataagaaaaagttggaaagcaagaagaaagtagttaagaaaattgagaaaatagaagatcttgactttagtttggaggaagacttgccacagcctatggaaactgagatttgatgtggtgatttgaaaagagagtgagtatatttaatgatggaa

SEQ ID NO: 104954 - DNA, 257 bp, Glycine max
  Clone ID: PAT_MRT3847_65790C.1
tcggtgattaccaacaaatacagttattgtgtccctggtgcaagatattattggggaaaggtttttatggacgtggcgtgagacactattccaaaagcgtgccctgtaagcgtttaaattggatcccgctaaatggcgaatgaacgtgcaacctcttgtcattgtcttctgcaatattccatgtctacactgcattgatttaacctcatgaaataatcatggtacttgatcttcctcatagaggccatatttcttat

SEQ ID NO: 104955 - DNA, 799 bp, Glycine max
  Clone ID: PAT_MRT3847_65791C.1
caaagcatctttcaacgaatcaccaaaggatttctctatcagagccgatggaatcgtgatcttctctatgtagccatctgcatcagagctctcctcaggagaatccatggttatcagagactcctcaatgctgtcagtcaccaaaactgccgcagcaccagcctgttcggcatgccaaaccttcaaggcaaagtaacactctccacgatcaaggagaacaatagtgggacgataagagtgaattttgaagggcttatcgccctcgaagacctgacacccgtgggagcctttggtgggatacagcacagagccaacgatgaatcctccgtagtccggaagaccgaagtttccgatggcgccatcgcgcttcgccctcagcttatgaggtgacagaacagttatactgctcttctccaccacaaacctcgcatcaacaaacaccaacaacaacgcaaacagagccacagccacgaaagctttcatggcttgtgttgtgaggaagagaacagagaacagagaagaagaaaaaacaggggaaggaggatgcgtgtgaaggaagactttctcgagcccttggtcttaacggtggaaagttttatatatatatatatatatattagagggtgttgttgtgtgttggtttatggtgtggagggttgcgtttcgcaatcaaaacggtgacgtaaagggagggtaaacaaacgacaggtgaaaggaagaggggaggtggtggtggtggtggtggtggtggacggagtcaggggagctaacttccacataataaacagagacaaagcga

SEQ ID NO: 104956 - DNA, 286 bp, Glycine max
  Clone ID: PAT_MRT3847_65792C.1
tacgggacgacagaagggggagtatgtaaacacttataagggttgaaataaagtaaatgttgagttttgtactacaaaatctatttgaacataaacagaatatttaaagctataaaaagtgataactatcaagttaaaagggttggggagtgtcctactgaatttctcttgctgtatcaaatgtatttttctctaatattatcatagtattcttataccgagaaactactcaaaccatgattcctcacatgaatgagcctaactctctttaaactttgtctttaat

SEQ ID NO: 104957 - DNA, 471 bp, Glycine max
  Clone ID: PAT_MRT3847_65793C.1
tttatttttgtttttttttttttttttttttttatttgtttttgttattttttttaaaaagaaagggagagcaaaagttttagaaacaaagatctttgaagaataaaaatttaatgccgtcgtcaaaaacaactgtcataagaaaaaaatgtaaggaaccgaaaactcaacaaggggtattggcaaggggaatctcacactaaaaaaactggttaaacgacaaaaaaaaaaaaagtatacaaaaaaaagattcagagagacaaggcgagggggattcctgcccataagagggctgtgctgggaaaagaaagaaaaggttggcgaaaatccaaaaggcttaaagatatgaaaacacgtcaggctctaaaaaccaacattgacacgcatacttgataaagatttgtccaatttgcgcaagctcaggcaaaccagggtagccctgaatgtgagggcaccagaggttggggggga

SEQ ID NO: 104958 - DNA, 1486 bp, Glycine max
  Clone ID: PAT_MRT3847_65794C.1
aatgttgctacacccaacaagggtagaagcattggcttccagctaagatcatgcatattgttcttcaagatgagggaggagataacatagtttaagctacaatgggaaataaactatcaagaaaaaattactcaacattttgaatgagaaataaaaatttgtagaataataggttcactagactttggttgctacatgtctcaatgtctaggatttaaacaattcttgaatgatctcggagagggctgagtatgatcccaaacaacttgaaacaatgcctactacaataattgtaacacaaattgatacctgaaagcgcgtgattctgccaccccttatgcttaagaaacaagcagcgggaagaatcaaggacacaaacattgtgagcaaagatccagttaatgacatcaccaaaccgaaaaagggaactgagagaccaacaagcagtgtagaaactactagagctgttctgatgagcttggaatatatgaaaaagttgggactgttggctggtatcaactcctctagacacattgctactggagatagactcaatgcatatttggtaaatggattaaccaccgtagtccacacagctatcttggtggccaccaagtgttggggcatgttaagagtatactgagagagtgttgcttttccaaacgctgtgtaacccataatagccactgcacaatacatacttgtacaaatagcaaaacatactaagagcactccagggaattgattccgatttgccatggcagtatagatgtttggaaacacagcatgccctgcatagcagtaaccatagagacctattgcaacaggaaaagttgccaaattgaatgtttttgttgttccttgggtatgaatatcagcattgtctaacaaaccaacccagaacaagcagagaaccactagaatcgttgcaataactccgcaagctgagatgtaactgagaatgcgtaggtcacgtagccaaacagtagggagaagagccactgcggtcaatattgcaaacaaaatgtgtgcattgagttcaactccacccaaactaatgtgcgcatttggaaataatgtagataagttgtcgctctccacaattatgtactcaatgcagcaagcatataattccatgtataagattatcgagatgatgacacgtccagtagtaccaaaagctgcttggccaatgtcagggtatgtctcaagacccggtgcactatccaagcagtaacgcaagagcaacccggtataaaaggaaaaaactgcatacaataacaatatagaaagaccaatccatccaccttctttagctgcataaggggttgaaaggattccaatgccacaaagggcatttatgccattaagcacagcttgtccaaaagtgcattggccaggaatgtgaggttcatgagaaaccttggaaattcttaatggaagacttcctagatattggggaggaagcaaggtatgtcgcggttgc

SEQ ID NO: 104959 - DNA, 1344 bp, Glycine max
  Clone ID: PAT_MRT3847_65795C.1
ctgaaaccttgaattcatgtctggttcatcttttgagtaccactaccaatggtgatttttgttcaagggaaaatatttttcaatggttaaagccaacagtagcacatgctcccacgcgtccgtacggatgctagaagacgacagaagggggtacaaaacataaatttgtttgctattatggcttcttcattaaacaatggccgtaaagcaagtgagatttttcaaggtcaagctctcttgtacaaacatttgcttggcttcatagattctaagtgtctaaaatggatggttgagcttgacatacccgacataatccacagccatagccatggccaacccattactttttcagagttggtgtcaattctacaagtcccaccaactaaaactcgtcaggtgcagagcctcatgcgttatctagcacacaatggattctttgagatagtaagaatccatgacaacatagaagcatatgctctcactgctgcttcagagttacttgtcaaaagcagtgagcttagtttagctccattggttgagtattttacttgaaccaaattgtcaaggtgcatggaattcagttgaagtcgtgggttcatgagggagctttcacagtatttgaggtcgcctttggaacacctttctgggatgttatcattaaagatcctgcatataacaagtcattcaatgaggcaatggctcgtgatgctctgatgtggaacttgtcggacagcaactgcgattgggtctttgggggactggaatccaatgtgaatgttgttggtggaactggaatcacagcaaagattatctgtgaggcttttcttaagctgaaatgcatggtgttggaacgtccaaatgttgtggaaaatttgtcaggaagcaacaatttgacatttgttggtggggacatgtttaaatgcatccccaaggctgatgcagttctgcttaagttggttttacataattggaatgacaacgattgcatgaagatattagaaaattgtaaagaagctatttcaggtgaaagcaaaacaggaaaagtagttgtcatagatactgtgataaacgaaaacaaagatgagcgccaagttactgaactaaagctccttatggatgtacacatggcatgtattattaatggaaaagagagaaaagaagaagattggaagaaactcttcatggaagcagggttccaaagctacaaaatatctcccttcacaggatatttgtctcttattgagatctatccttgaatactgacgctgcaatattccatttagtagttaatttgcatgttatcaataaaataaaagttatctttgtgttcaaaaaaaaaaaaaa

SEQ ID NO: 104960 - DNA, 351 bp, Glycine max
  Clone ID: PAT_MRT3847_65796C.1
gccgaacatggagtggacaagaaaaaaacatgatggttctgctgctgctgcacggaatgggtctgatcatttctatcatggaatcccacgggttactgattctttttcctacaagtctaggtccataaaatcaaagcatgctgttgcgaaaggctcaaaggtgagtttacgcctgggcacagctggtattgacgttttcgacactcttggcagcatcatgacaaatttaagggctggagggtttgcatctggagctgcgaccaaggggaatgacaatgggattttagcactcgaggctgcaaacactatagtcgacggttctagtcttatggaatctgtatcgacaaaaag

SEQ ID NO: 104961 - DNA, 196 bp, Glycine max
  Clone ID: PAT_MRT3847_65797C.1
cagcagcacacgacgacatgggggtgcagcatacaaatcgatatgggaaaccgtccagattcaaaacattaagggactgaggctctcacaggtgaccagcaattacaccaggtgcaacacttccctcttgctagtctgcattgcagttccattgtcgctactaccgctctacactcgctatctgatcgggacctat

SEQ ID NO: 104962 - DNA, 337 bp, Glycine max
  Clone ID: PAT_MRT3847_65798C.1
gggaaccttacttcggcgaactaaaaggcttggggggcataatatggttctccacgacgggcccgagaatccatgcatttatcattaaacaagggatcatccattcagcaaacagtggacacccatttgcatattctaacaaaatcaattccctaattgctaactttagaaattttgacaccctttgccttgttatttataatcaccactgatgcatccaatttacctattcccactcctttttctttctaacaaaaggacatttgaaaagaaccttatgaagtaacatttcctaatcttactacaaggaaaacttatttgaatcgtctttcccaaa

SEQ ID NO: 104963 - DNA, 335 bp, Glycine max
  Clone ID: PAT_MRT3847_65799C.1
aaaacagagtaccctacacgtatcagagagagaatatttttgttcgtgcaggtgcagaagatggctcggagctccacaagaatgaaatgggtctctatcttcacacttctattcctctcccactcgcccctcacaatctccgcagaagatgggctagtggcgaatggagattttgaggctaccccaagaaacgggttcccaaacgaggcgattgtggagggccccagcgaggtcccaaactggaagtcaaacggcaacgttgagcttgtggaatcggggcaaaaacagggtgggatgatcctcatcgtaccgcagcgtagacacgcggtcaggct

SEQ ID NO: 104964 - DNA, 447 bp, Glycine max
  Clone ID: PAT_MRT3847_6579C.1
acaagggggggggggggtgtttattgaagtttaaaacttttgaaccttcaattgctgatgctttttacacgaacacattggggaaaatgaaaactttcagggcattcctggttcttggaggaacggttctacctatttttctctcattggacttagctgaaacctgagattcttctttagcttcatatgctggcccatcccttacttaggggtcatttactttgctttaaaccagttttttgaccctttgcatgaactaggggcttggagtaagggaacgcaaaaattacttcttttccaacacacctgtatgcgtgcatcatcaccttatcaccaagaaactcattttcagcgttacctaggcttatatcctctaatgcttggaaatattgaccttatgagctaccttacgcaggcttaaagacccaaataaatgtgaaattttag

SEQ ID NO: 104965 - DNA, 482 bp, Glycine max
  Clone ID: PAT_MRT3847_657C.1
gggtggtaagtgtaagctgccagatggtaagtgtaagctgccggatggtatttgtacatttgagcattggaagtgaggcagtgcctgaaggaattattgctagaatatctaacttggaaatgcagcccttatgggactctggtaaagataatagtattttaaagcgcccattgaacttgttggctatgacagtaggacttaagcagaaagaaattgtcgacaaaattgctgaaaaggtggtttgtgaaacggtttttgcattcagacatagttgctgaatacatttacgtatttctttgggatgaggacctccttgttcttgttgataatattgacaccaaaaggcagcttggctattgtgcacagggtgattgcatgagaaatattggtgtggcttattctgagtgcatagttcatctgggttctcttggggactcaattggcgacgaggtgcaatcagactccccaggagataatagagc

SEQ ID NO: 104966 - DNA, 2529 bp, Glycine max
  Clone ID: PAT_MRT3847_65800C.1
aggggccacaccctctctctctctcgggcgccattctcttttttcctttcaaaaagcaaagctaccatctttctatccatattctctctctcattgttaccctgttggtggatagcaaaacttcagcaacccttttgcatctgatctaagaatcccaacctcaaatacccattttttgtcatttcatgatctaggttatagttcgtgaaaatgacgaggatgacccgtgattttggggatactatgcaaaaagatgcagtgccggcggtgtcggctgatataatatttgcttctcttcggtttcctaattacaaaatcggagttaacaatcagatcatggagacaaaggatagtccaaaagtgctatctatgaaggaggttgttgcgcgagagactgcacagctgttggaccagcagaaacgtctgtctgttcgcgatcttgccagtaaatttgagaagggtttggcagctgcagctaagttgtccgaagaggctagactcagagaagcagcttcactggaaaagcatgttcttttgaagaagcttcgagatgcactgcaatccttaaaagggagagtggcaggaagaaacaaggatgatgtagcagaagctattgctatggttgaagctctagcagttcaattgactcaaagggaaggggaattaatacaagagaagtctgaggtgaagaagctaacaaattttcttaagcaggcttctgaagatgcaaagaaacttgtgaatgaagaaagagcttttgctcgttttgaaatagaaaatgccagagcagcagttcagagagtggaggaagcacttcaggagcatgagagaatgtctcaagcttcagggaagcaggatctggaacagttaatgaaggaagttcaagaggcccggagaatcttgataaaagcacattcactcctcttactctcattgcctttgcgctcctcaaaaacagagtagcctacacgtatcagagagagtgagagaagagagagaatatttctgttcgtgcagatagatagatagatggctcggagctccacaagaatgaaatgggtctccatcttcacacttctattcctctcccactcgcccctcacaaccttcgcagaagatgggctagtggcgaatggagattttgaggttagcccatcaagtgggttccctaacgaggcgattgtggagggccccagcgaggtcccaaactggaagtcaaacggcaacgttgagctagtggaatcggggcaaaaacagggtgggatgatcctcattgtaccgcagggtagacacgcggtgaggctcggcaacgacgctgagatcagccaggagctaccggttgagaagggttccatttactcgctcaccttttgtgcggctcgcacctgcgctcagctggagtccatcaacgtgtcggttgcgcctgcatcgcagacggtagacctgcagacactctataacgtccagggatggaacccttacgcggtttctttcaatgcggatgaggacacttttaggttggtatttaagaatcccggcatggaggatgaccccacttgtggccccatcattgacaacattgctattaagaagcttttcactcctgataaacccaaagacaacgcagtgatcaatggggattttgaagagggtccatggatgttcaggaacacttcactgggtgtgttgcttcccacaaatttggatgaagaagcgtcctcactacccggttggatagtcgaatccaaccgtgccgtccggtacattgattctgatcattactctgttccacaaggcaggagagccattgagttgctctcaggaaaggaaggaatcatatctcaaatggttgagaccaaaccagacaagctctacagcttgaccttctcattgggtcatgctgatgacaagtgcaaggagcctcttgctgttatggcctttgctggtgaccaggctcagaacattcactacactcccaattccaattccaccttccaaactgctaacgtcaatttcactgccaaggctgagaggactagaattgcattctatagcatatactacaacaccagaagtgatgatatgagttctctatgtgggcctgtggtggatgacgtcagggtctggttttctggctccaacgggcttcgtgggttgggcttaggaaggcttgtgcttgtaattttgggtctagttttggttctgatgtaaaagggtttcatttggtcttgctttatttattattaccattaccatatgcctaataggttgttttgggttgaggggggtgtaggtaaagtcacactctccatgtcaacaatgttgtatgtgaactggccttaagtttttagtttatagtttaagctatgacaaatgaaattgtcttaatttgtgctttttcgctggccaagactttcttttcttgtttggggatggtggaaaacaatgcgaccaaggatctgttcgtttgaattgaaaaagagaaaataaataaaagggaaacgagtagtaagataaaaaaaaaaaaaa

SEQ ID NO: 104967 - DNA, 478 bp, Glycine max
  Clone ID: PAT_MRT3847_65801C.1
cccccctaaacgggaattggaaaggccgggacccaaattttaggggaaaaagaaaaaaaaaaactaacccgggttatttttttgaacaaaacaagggaaccaacaatcggctatactttttttggacaataattttttttccctaattctaattttttttgccatcaactggaatataggcggaaattttaatattgccagggccctttcggaaactgaagcctaatctaaggaatcgggggagggaaattggggttggttcatagttctattatatccaaaaccaaaaaaacttccatttgtttaacacagttttgggagctcacccaaatgtcgaaatcggaattcatttatagtggctgcaatctctgagggggggagttaaccctgaaaaaccacagcagctgctatttaaaaacttggttccaaggtctccggaacaacagaagaacctccagccttttctaaattaaaccca

SEQ ID NO: 104968 - DNA, 507 bp, Glycine max
  Clone ID: PAT_MRT3847_65802C.1
tgcttttgttctgccaatgctgaggcatatcaaggatcagccacctgttgttgctggagatggacctattgggctcattatggcccctacaagggaactagttcaacagattcacagtgatataaagaaatttgctaaggtactgggtctgaggtgtgtgcctgtgtatggaggatctggtgttgctcaacaaattagtgagttgaaacgtggtgctgagatagtggtttgtactccaggtaggatgattgacatactatgtaccagtagtggaaaaataactaacttgcatagagtaacttatctggtaatggatgaggctgatcgaatgtttgacatgggttttgaacctcaaatcacacgtattgttcagaatattcgtccagatcgtcaaacagttctgttttctgctactttcccccgtcaggttgaaattctggctcgtaaggtcttgaataaacctgttgaaatacaagttggtgggaggagtgttgtgaacaaagacat

SEQ ID NO: 104969 - DNA, 295 bp, Glycine max
  Clone ID: PAT_MRT3847_65803C.1
tggccacctgatttacaagcttggaggcattgacaagagtgaaattgagaggtctgagaaggaagctgctgagatgaacaagaggtctttcaagtggggctgggtgttggacaaactaaaggctgagcgcgaaagaggagtcactattgatatcgattagaggaagttagagacaaccaagtattattgcacagctatagatgcgccaggacatagggaaagcgggaagaatacgatgactgggacatcccaacctgagggagatggtcttatcattgattggacgactgggggg

SEQ ID NO: 104970 - DNA, 247 bp, Glycine max
  Clone ID: PAT_MRT3847_65804C.1
aacacgcatacacaaacacttcgccaacacttacaccaccaccacccctcctactcaaacgggcacattcaaaagacaaacggccccaccacacatcaatcactacctacgcaagaccgctcacgccagcaaacgtcgaactaacatgcacctcaccgtaaacactactcctcacaccacttattatacccctaacccaaccaaaaacctgcaaccatcctccgagcacattccatcatacctaacc

SEQ ID NO: 104971 - DNA, 2025 bp, Glycine max
  Clone ID: PAT_MRT3847_65805C.1
agttcgtggaattttgcacctttttaggtcataatcctttcaaaattccgtgcttcggcttgacatcgatttctctgcacttcccaaagaattggttgtgcagtccttgttttcagacaccgtctttaagttactgtcgacgtttgagttctataatgcccagtgattcttctgtaatctccaatggacacagcaatggcagtgtcaatccactacctaacctgcaaaggacttaccaagtggtagtggctgccactcaagattggggcatcggtaaggatgggaaattaccctggagattgcctactgatctcaagttttttaaggagatcactatgaaaacatctgagcctgggaagaagaatgccattgtaatgggaaggaaaacatgggagagcatccctcttgagtacaggcctctttctggtcgccttaatgttgttcttactcgctcaggaagttttgatattgcaacagcagagaatgttgttatatgtggaagcatgtcttctgcattggaactgttagctgcttctccttactctctgtcaattgagaaagtttttgttatagggggtggtcagatatttagagaggctctcaatgtgcctggatgtgaagctatccacttaacggaaattcagtcaagcattgagtgtgacacttttatgcctccagttgatttcactatatttcggccatggtactcatcctttcctaaagtggaaaacaacatccgctattctttcaccacttatgtgcgtgtacggagttctgctgcagagtccgcgggtcagaacattgatccacttcttgataataattctgagtccatgaaatttgaggtcaaggatttttcttttcttcctaaaatgatttctgagagacatgaggagtatctgtatcttaagctggttcaggacatcattgctgaaggtacaactaagggtgataggacagggactggtaccttgtcaaaatttggttgccagatgaggttcaatctgcgtggaaactttcctcttctaacaactaagaaagtattttggcgaggggttgttgaagagcttctttggtttatcagtggctcaacaaatgccaaggtgctacaggaaaaaggcattcatatttgggatggcaatgcatccagagaataccttgatggtgttggtttgacagagcgggaggagggtgacttgggacctgtttatgggtttcaatggaggcactttggtgccagatatactgacatgcatcatgactactccggccaagggtttgatcaacttttagatgttattaacaagataaagcgtaatcctgatgatcggcgaatcattctctctgcatggaatccagtggatcttaaattaatggcacttccaccctgccacatgtttgcacagttttatgtagcacacggggagttatcatgtcaaatgtatcagcgatctgctgatatgggcctgggcattccatttaatattgcatcttatgcccttttgacatgcatgattgctcatgtttgtgatctcattcctggtgattttattcatgttattggggatgctcatatttaccgcaatcacgtgaggcctttgcaggagcagctccataaccagccaaagccttttccaactttgaagataaatccaaagaagaaagatatagattcttttgtggctgctgatttcaagctcataggctatgatcctcaccagaagattgatatgaagctgtctgtctaaaatctggggattctcactccttcaggcacaaccttaggaagattatgttaaatctgtgtacaattaaagaacatatcgtagcacatacttcatcgcataaatactgttacttaagtgggaattctctggctccacctgttatgcctctaaggtgatttagattaacttaatttccttcctttccaaggtacacgctctattgtacttttgagggatctgaaactcgatgtttaagataaagccggtgtttttatgtccaccattactattttttaaa

SEQ ID NO: 104972 - DNA, 864 bp, Glycine max
  Clone ID: PAT_MRT3847_65806C.1
cggctcgagctcgagccggctcgagacggctgcgagaagacgacagaagggggatcattctctcagcgtagaatccatctgatcttaaattgatggcacttccaccctgccacatgtttgcacagttctatgtagctaatggggagctatcatgtcaaatgtatcagcgatctgccgacatgggcctgggtgtcccatttaatattgcatcttatgcactcctgacatgcatgatcgctcatgtttgtgaccttgttccaggtgattttatccatgttattggggatgcacatgtttaccgcaatcatgtgagacccttgcaggaacagctccagaaccaaccaaaaccttttccaattttgaagataaacccaaagaagaaagatatagattcttttgtggcagctgatttcaagctcataggatatgatcctcaccagaagatagaaatgaagatggctgtttagggatcttgtgagattctcaatccctgcttcaggccgttatgctttctgatgtgaggcgcaatcataggacgtatatgataaatttatggacaaataaaagaatacttgctggacatacttcaagctttgcatgttactatagtattgggaatcctttaggtccacatcacatgtatcgtggctctaaggtgatttaggttaatttcattttcatttattttcgatgtagacgttctggtatattattgagggatcagcgacttgacgctttaagattagagatgtcttattttgtgtttggcaattttaatttgagagaaaggagggacagcctagattcactattcgaatgttgcattgctacatccttttttctggctatgtttcatcgttttac

SEQ ID NO: 104973 - DNA, 305 bp, Glycine max
  unsure (1)..(305): unsure at all n locations
  Clone ID: PAT_MRT3847_65807C.1
aattagttnctttagncatggagaaagcagtaagagtananatacttgaaanttggcttgggtnangatcacaggaaanaacgncnagaganaacatctnggtctgtcagattntntgagttatatggctgaggcttcccccagttgagcgtcttgtcttctangaattccccanccaaagcatntnattcttcganaccagncnnccaantcncaaacactctctttngcctcagactccaanactntcnancttttgctggctccancanttggcgcttgactcanccnagcccatcatcant

SEQ ID NO: 104974 - DNA, 422 bp, Glycine max
  Clone ID: PAT_MRT3847_65808C.1
tgacatgcatgctgactactctggccaaggatttgatcagcttttagatgttattaacaagataaagcataatcccaatgatcgaaggatcattctctcagcgtggaatccatctgatcttaaattgatggcacttccaccctgccacatgtttgcacaggtccgcagctatatttgggtttctctttggaagagctctctctttttctctcatgaagttttgtcaacttccttttattgttttttccctgtagttctatgtagctaatggggagctatcatgtcaaatgtatcagcgatctgccgacatgggcctgggtgtcccatttaatattgcatcttatgcactcctgacatgcatgatcgctcatgtttgtgaccttgttcaggtgattttatccatgtaatgggggatcacatgt

SEQ ID NO: 104975 - DNA, 2298 bp, Glycine max
  Clone ID: PAT_MRT3847_65809C.1
tgggaattgggctcgagtttttttcccgtttctctgcgaaaaaaaaatccatagcggtttttctcactctcagcagctacctttattcctcactttttctttcattttcttatgacctcttctccttcttattattaatatataatataaatataaacattcttttgatattgttcctgagttgaaaaagttcgtggaattttgcacctttttaggtcataatcctttcaaaattacgtgcttcggcttgacatcgatttctctgcacttcccaaagaattggttgtgcagtccttgttttcagacaccgtctttaagttactgtcgacgtttgagttctataatgcccagtgattcttctgtaatctccaatggacacagcaatggcagtgtcaatccactacctaacctgcaaaggacttaccaagtggtagtggctgccactcaagattggggcatcggtaaggatgggaaattaccctggagattgcctactgatctcaagttttttaaggagatcactatgaaaacatctgatcctgggaagaagaatgccattgtaatgggaaggaaaacatgggagagcatccctcttgagtacaggcctctttctggtcgccttaatgttgttcttactcgctcaggaagttttgatattgcaacagcagagaatgttgttatatgtggaagcatgtcttctgcattggaactgttagctgcttctccttactctctgtcaattgagaaagtttttgttataggaggtggtcagatatttagagaggctctcaatgcgcctggatgtgaagctgcccacttaacagaaattgaagcaagcattgagtgtgacacttttatgcctcgagttaatacctctgtatttcggacatggtattcatccttccctttggtggaagacaacctccgctattctttcaccacttatgtgcgtgtaaggagttctcctccagagtccccggatcagaatgctgatccattttttgataataattcagactctttgaaatttgaggtcaagaaattttcttttcttcctaaaatggtttatgagagacatgaggagtttaagtatcttaggttggttcaagaaatcatttctgaaggtacaactaaggatgataggacagggactggtaccttgtcgaaatttggctgccagatgaggtttaatctgcgcagaaactttcctcttctaacaacaaagaaagtattttggcgaggggttgttgaagagcttctttggtttatcagtggctcaacaagtgccaaggtgctgcaggaaaaaggcattcatatatgggatggcaatgcatccagagagtaccttgatagcattggtttgacagaaagggagaagggtgacttaggacctgtttatgggtttcagtggaggcactttggagccaagtatactgacatgcatgctgactactctggccaagggtttgatcagcttttagatgttattaacaagataaagcataatcccgatgatcggcggatcattctctcagcgtggaatccatctgatcttaaattgatggcacttccaccctgccacatgtttgcacagttctatgtagctaatggggagctatcatgtcaaatgtatcagcgatctgccgacatgggcctgggcattccatttaatattgcatcttatgcccttttgacatgcatgattgctcatgtttgtgatctcattcctggtgattttatccatgttattggggatgcacatgtttaccgcaatcacgtgaggcctttgcaggagcagctccataaccagccaaaaccttttccaactttggagataaatccaaaaaagaaagatatagattcttttgtggctgctgatttcaagctcataggctatgatcctcaccagaagattgatatgaagctggctgtctaaaatctggggattctcactccttcgggctgtttctgctttttgaaatgagaaccatggtgagcatggatgctgatgtgctgtgcaagatagctcataatttattatcaacaccttaggggctgtatggcaagctaaatgacaggcacaaccttaggaagattatgttaaatctgtgtacaattaaaagaacatatcgtaggacttaattcatcgcattcatactgttagtgggaattctttggctccacctgatatgcctctaaggtgatttagattgacttttgagggttctgaaactcgatgttcaagataagcggtctttttaagtgggccatttctattttgtttatttgataaaaccc

SEQ ID NO: 104976 - DNA, 318 bp, Glycine max
  Clone ID: PAT_MRT3847_6580C.1
cacaaactatgactcactcgtcttcaactgtcacatcactcactgtgactggtggtggtgacagtaatggaactgtaaacttccaaaaccttcccacaaatgcctttggtaatctccagggtactgattctggaactgaccgcacgaattatcatctagattccattccctatgcgattccaagtaaagaatacaggtgtcttcaaggacttaaatctgagggtggtgaacactgcttcttttctgaagcttctggaagcaacaaggttctccaaatggagtcacaactggaaaacacatggccttcgatgtcaacca

SEQ ID NO: 104977 - DNA, 379 bp, Glycine max
  Clone ID: PAT_MRT3847_65810C.1
aaaaatattatttttttggggtggttttttttttgtgggtttgggtttttttttttttaaaacaaaaggccccatccattaatttccagggggggccgaaaacaggaaccaaaaatccgggggggggaaatctaaaaagggaaaaacaaagggggggggtgtttaaggccaaacaaacaaggggggggggggggtaaaaaggggtgggaaatttttaacacttaaaaaccggggggctggggggggaaaaaactgatccactgaacttggggaacggggggaaatccgatgatacgggtgaaaccggggggggttgcaaatttaaccttttgaagcttcttcaacaccggggaagggttggggcacccaaacagggggg

SEQ ID NO: 104978 - DNA, 478 bp, Glycine max
  Clone ID: PAT_MRT3847_65811C.1
gtcgactggacgttctataagtctacagagcgcttcttacagtacctgatttgtatacaccggctaatgttaaccctgcggcatcgaattctgtatcgcgcttgcactcaagtgtccaaagcttgcaagcatcagcgtacgactcatggaggaatatagtacgaagactgagttggagctatgacgttcagttaccagagtccatgaggtagtacccttatagatggatgcgactgagaggaaagagaggtgccgacattatgatgagtcgaatgatattcctaggctgaggataggcatctgccgtataaagtagagagaattacgtatgctataatggatagggtattacatgagctgtcagggaacgaagataagagccaggagataactcgaacacatggaggctcggagctagatgcgccgcaatggcctgaaacacttcataatgctcctggacaaaccgatggaaaatata

SEQ ID NO: 104979 - DNA, 448 bp, Glycine max
  Clone ID: PAT_MRT3847_65812C.1
gataacccacatatactacatcctatccaccataggcctgctctcgaactgcagcctataacccctaccttggcacctttggatcattgtctctctacgttttaccataactttgtattactgcccacacccctgtggtgctgcctgtggcaattacttcactgactctccatcccttccaatattatcctgtcccgcctgctttccttttcatgtacgcaagtgcctgatgattgtactagaccatcgccggatcttagactcagacatcacatgcgaactcaaacacctaatggactttggtctggagaacgcacatgtgcgcataacatgccgaccgcgctatgtcaggatatatttacatctccagctatcccgatcgtgccctctattataacgaaacagccgtatgtttaatctcaccatcggcttatgctcttacggagtg

SEQ ID NO: 104980 - DNA, 350 bp, Glycine max
  Clone ID: PAT_MRT3847_65813C.1
tacggctgcgagaagacgacagaagggggccaggcaactaaagaaacatgccttattatatggtgtgaatcgccaggctacatttgacaatactaccatgacttttgaaattatctacccacatacatacactactcccaaccatccacatcatgcttattattaaatctgtcaagatcttcaacaccgttactgctcttcccaacaacatgatcctaaatttacgaccttactgataattatctacttcatcaaaacttctgaataacacacatccaatgctctaattgcattgacatatgttattcataaaatataccccataatgagcatgaacactgtgcaacacc

SEQ ID NO: 104981 - DNA, 1383 bp, Glycine max
  Clone ID: PAT_MRT3847_65814C.1
tggaaacactggtgtgagaaacagagaggactgagttctgagtctaatatccaatctgaatccgaacataacattcagaaggaagaagaagaaggtgtgttggagaatgaaaactgaaacagagccaaatgaaaccgagtcagattggagcgagttgactcgcgagtgcctcatcaacatcctctctcgactcagcgtcgaggatcgatggcgcggcaccatgctcgtttgcaagtcatggttcagcgtcttcaaggaaccctctcttcacttcgtcttcaacctcgaccctcaattcgactcgcccaccgaatcaactcgctggtggacccccgagttcgaggccaagatcgataacatgcttcgatctgtcgtcgaatgggcccaatcctctctcacccatatacgcattcgccactgttctgatcgttctctcgccctcgtcgcccaaagttgcccaaaccttgaggtgttgtttatcagaagctgtcctcgtgttaccgatgattctatctctaggatagctttgagttgtccgaagcttagggaattggatatcagctattgttatgagataacccatgaatcgttggtgctgattggaagaaattgtcccaaccttaaggttctcaaaagaaatctcatgaattggcttgatccttcccaacaccgagggattgttcctgacgattatctaaatgcttgtccgcaagatggagacgatgaggctgctgcaattgctaattccatgcctggtctagagcagcttgagattaggttctccaagttaacagctaagggcctcaattccatatgtcagggatgtcccaaccttgagttcttggatttgtctgggtgtgctaacttgactagtcgagacattgcaaatgcatcttctagtttggtgcacttgaaagaaattaaaaagcctaatttctatatccccaggtctgtcttccacactgaaaggtatggtcattggagtttgtatgatgagagatttcaaacggatattttccaaatctgagcagtgatgggaagatcgatctaagatgtaaacactgagttcatcacttaatcttctttccgctgctttttggatatcttagcagggtctctatggttattttcacagtcaaatatgtatagtagaaattataatctctgtctatgtagttatatgttgttttccttccatcattttgatgtatttgcaatgtatttgtgttgtctcaagttctcataatagatttatctcgtaatattgtaattatttcttttaccttaaaaatgctgcattacttatatctttctcctagcaaccttccataaaatgtctcaggaatctatgttcttaaatgcattatttttcttactggcctt

SEQ ID NO: 104982 - DNA, 349 bp, Glycine max
  Clone ID: PAT_MRT3847_65815C.1
gggggccacaagaaaatggccccaatttttttccaccaatgtcaagagtggccaccaaccgaggctgggaattatcaatacgattgggtatgaccaaattatggggaaaagcacatcagaatttgtcttgtcttttattagccccctaatgggggaaatttgaaatccaacaaatttttcccaatattacttccaaactgaccttgatcacgcaaggaggggttattcttcaaacaccgataaaaacattctcacctgagctcaccgaagtgttttctttagaaaatgcttaaagataaaccccaccttaattagcaccctttattgtaattttacttgttgcaggttg

SEQ ID NO: 104983 - DNA, 480 bp, Glycine max
  Clone ID: PAT_MRT3847_65816C.1
gcgagaagacgacagaagggtcggtcatttactttgcaagtcatcttttaatgagtttgaaagtaaataagcgaaaccaaagttaaaatcaacacataaacaagcttttatccataaaaattgcttgaatctgttcaaaggtccaatgccttaatggtctctttcacttttattggttaaaatgaaactttcaaaagtttaaaatcaaccctgcgcgtaagtttcttgctttttaagaactacgtgggtctgagttcctcaccgcacttgaggatacgtaggagcaagaaccatgctcttgtcgaccccaaaagacaataaaacataaaagggaaaaataaacaaatattgaagtcatgattttgcacatttgattaaaggatgccatcccttgtgacaaacacgtgggatgctaataccttccccgcacataaacaactcccaaagccttattcttaaaattcatagaccccccttttt

SEQ ID NO: 104984 - DNA, 1814 bp, Glycine max
  Clone ID: PAT_MRT3847_65817C.1
taccggttgggagattccggctcgaaaccacaaggagagacccttttccttctctctggctttcctttgacgcttcgggctaccgctcctcggaagcaaacgcagcattgggagatagaaagagagagagaaagagagagagagaaagacccttacccttctctatcgctcgctttcctttgacgcttctgacccttgctttgtctgcgtcttccttctttctttctttctttctctgtgtgtcgtaatggctctcccagactcttcttcccgtcgcaactccctgatcccctccttcatctactcctcttcctccaaaacgctccctctccaccacatgctcaacaccgcctccgctgccgccgccgccgctccctccccgccgccggccaatctcgacgccggatcgcgtggcctcatgattccctctcccagcgagtcacgcaagatcgagttgtactcccccgccttctacgccgcctgcaccgccggtggaatcctcagctgtggcctcactcacatgaccgtcactcctcttgacctagtcaagtgtaatatgcagattgaccctgctaagtacaagagcatctcgtctggttttggagttttgcttaaggagcagggattcaggggcttttttcgtggctgggtgcctaccttgcttggttatagtgctcagggtgcttgcaaatttggattttacgagttctttaagaagtactattctgatattgctggcccagagtatgcaagcaagtacaagaccttgatctaccttgctggttcagcatctgctgaggttattgctgatattgctctttgcccatttgaggctgtgaaggtccgtgtccaaactcagcctggttttgcaaggggtttgtctgatgggctcccaaaatttgtcagatctgaaggaaccttagggctgtacaaggggttagtgcctctctggggacgacaaattccatacacaatgatgaagtttgcttcttttgagaccattgttgagctgatctataagcacgccatcccaacaccaaagaatgagtgcaccaaaagcctgcaacttggtgtcagttttgctggtggatatgttgctggtgtactttgtgcaattgtgtctcatcctgctgataatcttgtctcttttctgaacaatgcaaaaggagcaacagttggtgatgcggtgaagaagcttggtttgtggggtctctttacgcgtggtctccccctccgaattgttatgattggaactcttactggagcccaatggggaatatatgatgcattcaaagtcttcgtcggattgccaaccactggtggtcctgctcctgcagctgctccagctcctggttctgagctagcaaaggcatagaatgtccaatgatgacaagcaacaatgttgtacgaaacttagaaagccagtgaatagggaccataaataaatagaggactgctgaatgaagttgcttgagtggaactcaagcttggttggataatattcttttaaagttcagacattgtttccatttttcttatatttaagtattttgaatttttgggaggatggttttgctctcatccttccacttgctgaaaactttgtaggtaggaatgatataattttgcatgttaggttctctacatgccaattgtcaaacgggaacacatttgttttcttgtctgtgcataagcaccgacacatatgcaatgcctagattgagatcatttatactccctttatttgattaaaaaaaaaaaaaaaaaaaaaaaaaaaggcccgcgctgctcacgagtataccagaggactcaca

SEQ ID NO: 104985 - DNA, 1621 bp, Glycine max
  Clone ID: PAT_MRT3847_65818C.1
cggtccggattcccgggtcgacccacgcgtcgagagagacccttttccttctctctggctttcctttgacgcttctgacactgctccttttctttctctccgtgtcctaatggctctccccgactcttcttcctgccgcaactccctgatcccctccttcatctactcctcttcctccaaaacgctccctctacaccacatgctcaactccgcctccgccgccgccccctcccagccgccggaaaacctccacgccggatcgcgcggcctcatgattccctctcccagcgagtcacgcaagatcgagatgtactcccctgccttctacgccgcctgcaccgccggtggaatcctcagctgtggcctcactcacatggccgtcactcctcttgacctagtcaagtgtaatatgcagattgatcctgctaagtacaagagcatctcttctgggtttggagttttgcttaaggagcagggattcaggggctttttccgtggctgggtgcctaccttgcttggttacagtgcccagggtgcttgcaaatttggcttctatgagttctttaagaagtactattctgatattgctggcccagagtatgcaagcaagtacaagaccttgatctaccttgctggttcagcatctgctgaggttattgctgatattgctctttgcccatttgaggctgtgaaggtccgtgtccaaactcagccaggttttgcaaggggtttgtctgatgggctcccaaaatttgtcagatccgaaggaaccttagggctgtacaagggattagtgcctctatggggacgacagattccatacacaatgatgaagtttgcttcgtttgagaccattgtagagctgatctataagcacgccatcccaacaccaaagaatgagtgcaccaaaggcctgcaacttggtgtcagttttgctggtggatatattgctggtgtactttgtgcaattgtgtctcatcctgctgataatcttgtctcttttctgaacaatgcaaaaggagcaacagttggtgatgcggtgaagaagcttggcctgtggggtctctttacccgtggtcttcccctccgtattgttatgattggaactcttactggagcccaatggggaatatatgatgcattcaaagtgtctgtcggattgccaaccactggtggtcctgctcctgcagctgctctagcttctgatgctgagcttgcaaaggcatagaatgtccaatgatgacacattcaacagtttgtttacgaaacttagaaagccagtgaatagggacaccataaataaacaggaggattgcagaagttgcttgagtggaactcgagcttggttggataatatattcttttaaagttcagacatcgtgtttccatttttcttaaatttgagtattttgaatttttaggaggatggttttgctcgcatcctcctcttgctgaaaactttgtaggtaggaatgatataattttgcatgctaggttctctacatgccattgtcaaacgggaatactcatttgttttcttgtctgtgcataagcacagacgcatttgcaaatgtctagattgagataatttttactccctttatttgattatttcttttgg

SEQ ID NO: 104986 - DNA, 912 bp, Glycine max
  Clone ID: PAT_MRT3847_65819C.1
tccggaattcccgcgtcgacctcctcgttctgtctcctacccctgcctcatagcctcagcttctgccccaaattcacatcttttccttccacaaatcaaacctccatcgccaacaaagcccaagccctttgaactcattctaccttccttaaaaacacaaaatccccaaattcacatcactcattcccttccattccacgccacaaaacaatggccacccccaccctcataggcccacctgaactctacaatccctaccccacccaaaccccagccccaaccccaaccccaaccccaacccaaccccaaacagtcacaagaaccactccaattgaccctttcatagatcaaatggtggtcaaattcaacaccatgtcatccccaccacccccaaacatgaccctaacagaaaacatgtctcccacattcttcacaacgggaaatccatgtctggacttcttcttccacgtggtccccgacaccccaccagagactatcctccaaagactcgaacttgcctgggccctcaacccccttaccgccctcaaactcgtctgcaacctccgcggtgtccgcggcactggcaagtccgaccgtcagagcttctaccccgccgccctctggctccaccgccgtcaccccaaaaccctcgctgccaacgtctcctccctcgccgaatttggatactttaaggatctccctgagatcctctacctccttctagaaggatccgatgcccgcaaggtccaaaaagaagcgtggcagaatcgcaagagaggggctcacaataacaaaaagaaaaaccctaggacccagaagatgcagaaggtgaaaacgaaatctttggcccaaagggtcaacgtagaaaaggaaaaggagtcttccgagaaggagattgcgcatgttgccaga

SEQ ID NO: 104987 - DNA, 313 bp, Glycine max
  Clone ID: PAT_MRT3847_6581C.1
cacgcgtcagtacaactgtgagacaagcctcagtggagagtcgacatcatgtcctcctgagtgccacattcaggtgtgcttaccattggttttgacaccatcgttgacatgctcggctctgctctgtctgtgcggtctcttgcagtcggactggcttctatatcatttcctagtgcataagcagatctggtcaatgtaattttacgcgagggttgtgttgaccacatcctaacacctagctactaccactgcgttttgtatctacagctcaactgcttacaagatttactcctcgatggtattgcagtttttt

SEQ ID NO: 104988 - DNA, 2190 bp, Glycine max
  Clone ID: PAT_MRT3847_65820C.1
gtccggaggcacgagggcgacccacgcgtccggttacatttgatgattttgctgtctagtgttatataaagaatgaactacaagagattgtccgaaatttaaggaatgatgagagcttacaagattaaggtatttattgtccaaaagatgtacttcttcatgggcctcctgaaactggtaatattctgctggaaaaaccaaaagcagtcgaaacagggatgcctttttttgcacctcttggcacagattctgtagagatttttgtaggggcttctgcattccgagttaaaaacctttttacaaatgcaagagcattttcaccttctataatctttattgatgagatagatgctattggtagcaagcgtggaggccctgacactggcggaggaggtgctgaaagggaacaaggtttacttcagatactgactgagatggatggattcaaagtttccacagcacaggttctcgtgataggtgccacaaatagattggatattcttgatcctgctctattgaggaagggtcgttttgacaagatcattagagttggtttgccatcagaggatggaagatttgccattttgaaggtgcatgcgaggaataaattttttcgctctgaggaggaaaaggagactctacttaaggaaattgctgaactgacagaagattttactggggcagagctacaaaatatactgaatgaagctggaattttgacagccaggaaggatttggactacattggacgagatgagctgcttgaggcattaaagaggcaaaagggaacatttgaaacagggcaagaggatagtaccgaaattcctgaagaattaaaactgagattggcatacagagaagcagctgttgctgttctagcatgttattttcccgagccccaccgtccttttcttgagactgatataaattctatccgcagccagccaaatatgcgttatgctgaaatttctggccaggtttttgcaaggaaattagattacataaactctatagtgcgtgcttgtgctccaagagtaattgaggaggagatgtttgggattgacaatttgtgttggatctctgcaaaggcaacattagaagcttcaaagcgtgcagagtttttaattctgcagacaggcatgactgcttttgggaaagcatattacaaaaactatagtgaccttgtgcccagtcttgcaatgaagcttgaagcacttcgagatgagtatatgcgttatgctacagagaagtgctcatctgtgctaaaagagtaccatttggctgttgagacaatcacagatattttgcttgaaaaggggcaaatcaaagctgaggagatttgggacatttataggggtgctcctcgtgtagctcagcctgctgtcagtccagttgatgaatttggggcactgatttatgctggacgatggggaatccatgggatcagtcttcccggaagggttacatttgcgccaggcaatgttggatttgcgacctttggtgctcctcgccctacagagacacaaattgttagtgatgaaacttggaaattagtagatgatatctgggataaaaaggttcaaaacattaaagatgaagcttcaaaggtgattgaagaagagaaggaaaagccacaacttttgatggcaagccattttctttgagaggaacttaaatttgacctacagctgcaccatcaggatgctatccttcgctttgcccagagctctttttcagcatgaatatcaacttggaatgcatattatcaaaatgaagattgatacattctcgaactagctgaagggtacctaaaagactcattcaaatcattcaattttgtgaacgagagaccttttttttgccacagatgaagcaccgagggttttgaactgagctgttaagttaaatgcattactacccacattgtaatttatcagagtaaatgtatcaattatctcaaatgtttctatatagttgttactttgtgatcgtagttaatgataaattaaagggtgaaaattgttgcaccacttttcctttacatgcttttttcatcaccaaccctgcacagtagacagcggttagccatatctaatgatgtaaatgatagtgatgcacaccaaaagtgatgtgcctaaattattactctgatattgattgagttatacattttagttttttgaatgttgg

SEQ ID NO: 104989 - DNA, 1260 bp, Glycine max
  Clone ID: PAT_MRT3847_65821C.1
ccacgcgtccgggtatataatgcatgatttgaaagtattctcacatttcaagatagtgatttgacagatgtttattacttgtaactcgtaagtcagtcatatgtaggattttttaagcgatatgaacttaaaaaagtttttgtatggcaggctctacacacaattttttattctttctttttctaatatcattctccttggtttgaataaatgataatcttttgagattctatttttttcttgggtcttgtttagcctcctgtcagtccagttgatgaatttggagcactgatttatgctggacgatggggaatccatgggatcagtcttcccggaagggttacatttgcaccaggcaatgttggatttgcgacctttggtgcacctcgccctacagagacacaaattgttagtgatgaaacttggaaattagtagatgatatctgggataaaaaggttcaaaacattaaagatgaagcttcaatggtgattgaagaagagaaggaaaagccacagcttttgatggcgagccattttctttgagaggaacttaaatataacttacatacagatgcatctactgggaaaagaatacaaacatcaattatgtcacagaaatagcaacaatgggtcaaactaattacacgcttgttttcactcctttgatctaatttgcactgtaaaatttcatgctgcccttctatttgagaagctgcaccatcaggatgctacccttccctttgcccacagctctttttccgcatggatgtcaacttggaatgcatattatcaaaatgaagattgacacattctcgaacaagctgaaggatacttaaaagacttattcaaatcattcaactttgtgaacgagacatttttttgccacagatgaagcaccgagggttttagtctgagctgttaagtgaaattcattactacccgcattgtaatttatcacagagggatactttattgagacaattgtaaatgtatcaattatatcaaatgtttctatgtaggtgttgttactttgtgatcgttgttaatgataaaataaagggtgaaaattgttgccccgcctgtcctttacaggctttttttatccccaaccctgcacagcagacaacggtaagcccttgtagacccctcatattatatttgatgatgtaaaagatagtgatgtacccccaaagtgatgttcctaaattattactctggtattgattgagttaaacattttagttttttgcaatgttggac

SEQ ID NO: 104990 - DNA, 216 bp, Glycine max
  Clone ID: PAT_MRT3847_65822C.1
atttgttcaaacttttaccaatctttggttattgggggcccaccctggttggttgaccatatccacaaacattggcccttgggagccaaccatttcaaactttattaaggaagcatttaacttttggttaaaaaggaccattctcaaacttttcttttctttcattacataatctcataccttttttttttacccaccagaagtttaccttttggc

SEQ ID NO: 104991 - DNA, 509 bp, Glycine max
  unsure (1)..(509): unsure at all n locations
  Clone ID: PAT_MRT3847_65823C.1
cggaattcccgggtcgacccacgcgtccggagagttttataacgagatctgtttatgctgtttgaagaatgaagggtctatgcttgattgtggagatgcctttggtctaagagctcatcaactcttaacctctctgataccaccgtgaaggtgattgcagcagctcatatggatcggaggatcaggaatggacctgaagagcacaagcaaggactctcccaggaccagttagcgatctttcacatcttnccaagtgggactatgatggttgcaggacaggtcaagctcctggtgacagacagtgagagcgattgtatagccacactccattttctgggatccattcatacgggggaacaatatcttggctatatgcgatgcctacactgctggtggagaacctattccgacttacatgaggcacgctggtgccaagggtatgagccatcctgatgttggtgctgaaatgccatggtacatgattgaacaagaatacaccttgctgctga

SEQ ID NO: 104992 - DNA, 451 bp, Glycine max
  Clone ID: PAT_MRT3847_65824C.1
tttggtgctttgtcgccaaccgtaaacaatatgagcgcatatgggctcaatcctggtgttgcaggacctcgtcttaagggcaccattcctcagaccatttcacagcatactgtatggaatctaacggcaacagagagaacaccattgcatattgcacctagcaagcagagcttttgtcaactatctattgaccttctcggtgggggaattttagagcaccaaactggagattggatcacacttatacaaaataatccaattatggacttgcagagagcacctgctaggaacacaggctgcgtaatggtctaagattgagatgtctgggaatgcagcagtcaaaaagagtgagtgggcctcattggcacaagtgtttttaacagacagcatcagttcatagcatcatgatgcatgtcagtggacacaaccggaaccacatgcctgggaattg

SEQ ID NO: 104993 - DNA, 211 bp, Glycine max
  Clone ID: PAT_MRT3847_65825C.1
atgagagtacgtcgcttacctacataaggactatgtacattgctggtgcctgacagttgctcggattgctagatgtgtggatgataacacatctcattagagcgctctttatgccctcacgcatgtcatgaacaaatgatcgatgcccatgacatagcgcctactagcgacggaaactatcctgtccaagggatatccattgtgtagatgc

SEQ ID NO: 104994 - DNA, 1527 bp, Glycine max
  Clone ID: PAT_MRT3847_65826C.1
aaacatagctggtgacatctggttttgtgcaagtgtcttttgttgtctgccatggcccctggtccctcctagtcctcagtgcccacctcgttcttgccgtgagcctcagccagaacaacgtttcaccagtttcatcttttcatgtgctctggaatggagttgcgctgatcagttacgcaaatgtgttgttgcgtagaaaggaagctgtttcttttactttttcgatataacgtcaagtgacccaagtgccaccactttcgatccaagttcacattacatccaactccatctaggttcattggattctcaaaacccagcaaccactactgcatattcagattgttcgtttaaaaggaagcattggtcggtacttggtcgctacaaaaaatgccaattgttcagaaattgtatgatacctgcaaggcatctttgtctcctgaggggcccatttcagaagaagctctggaaaaagttcgaacccttttagatgaattgaagccttctaatgtgggtcttgaacaagaggcgcaattggtgcgtggatggaaaggttctttgaatggcaccaatggcaaaaaggggcgcaatggaagttatcagtatccaccctccattaagtacattcacttgcatgaatgtgacaaattctctatgggaatcttctgtatgtctcctggttccgttattccgcttcataaccatcccggaatgactgttttgagcaagcttctttatggttcattacttgtgaggtcatatgattggctggatttacctgggccagatgatccatctcaagctagaccagcaaaacttgtgaaagattgtcagatgagtgccccctgtaacaccacagttctttatccaagcaagggtggcaacattcattgtttcaaagccttaaccccttgcgctctctttgacgttctttcccctccttactcatcagaagatggaagacactgctcatatttcaggaagtcaactaggaaagatcttccaggtgttgagcttgatcagctgagtggtgtaaagccatctgaaataacctggctagaagagatccaagcacctgaaaacctggtggttagaagaggtgtttacaaaggccctactataagacgatgaaggatacaactaatttgtatttacataacattagccaggcatgactagaaactaaatatgatggggatataaattaaaggtggtatatcttgggaataattgaccatctgctttatatgattgttaactgtacatactgtgataaatgatggcagttaatgttgatcaagccttgtgtatccttgttctaactagcccctttttagattattagaggaatagcaccaacatggtgatctttggtgatgtttagatcttccttaaatatagcattgtggctttcttttgcactgcctttgaatggggtatgctccgacatctatatcaccaagtactcattgtggctagaaatggcaaccgaaaacagttctgaaactcatggttaatctgagcctctga

SEQ ID NO: 104995 - DNA, 220 bp, Glycine max
  Clone ID: PAT_MRT3847_65827C.1
gacgatttagacagatttgtcacgtgatgatgttgacactcctaaaggttccatgttggatcgtaaaatttctcactctaaaattgcagttcccaagaacgcagaatagttccaccaactgtgttcttgggaaatgcaattttgcctagtgatctattggcaaattttctgacagacggcaggtttacagcaagtgttgatttgcagcgcaatcatcgta

SEQ ID NO: 104996 - DNA, 207 bp, Glycine max
  Clone ID: PAT_MRT3847_65828C.1
gctgtgggaccacgttggggtcagttagatttcactccctcaattttcaacactgtcgcacagtgggaatcttcgtgtgcgcaatctgctgaagctttcaaatatactcccgcacgtttcggttcatatgtacgcgctgtttcctcaacagtgtgtgcctctatctcttctttgaaggaattcatctgtattatttgttaaatgatt

SEQ ID NO: 104997 - DNA, 393 bp, Glycine max
  Clone ID: PAT_MRT3847_65829C.1
ccgggactccatggtgacctccgaagtctgccgcaagctccgtcgtgcctttactctcgtcccaccatgatagctagcgcattccatctattgcttccagctgcctctgtcgtgcaggttattgtgctttatcatgctcgtggaccattatatctccttcaggcattaaattcttggtacccacgtggtggtggatcttgatggccaaattgaaaaaagttggactagcaacttcttgattttgtaacaaatgaatttcaacctatttgtcttttgaggtttttgctaatgctttagtcttgtttctactttatatgtataagcacgagtaatcccatcattccatatgcttttgagaaatagaaaatgttagtaatgtgatttttctcgttt

SEQ ID NO: 104998 - DNA, 454 bp, Glycine max
  Clone ID: PAT_MRT3847_6582C.1
gttaaaaagaacaaacctgcatgatagcctagattcttttggaatccattcctcaaacatggattattcatgacttatccatgtcccttgcgcctcgccccatacagaactcaaccatccacaactgaagaaggaaggaggctcctcctgtttgaccttgagccaatgccagggaccgttcttgcgcttccatacagccggtggatccacaccctgcagggaattcctatgacagcctacccctactcactagaaggacctgagcagagagtacggcattctatccggcccatagcggctacccaatggctcatctattgtcccacactataagctcttttccaatctcttcaagattccatccaaacctaccacaggcctcgagtggcccggccccctaagccccgttggcaccgtcatctctctgcccaagggcgagctcttcccacgcgcg

SEQ ID NO: 104999 - DNA, 440 bp, Glycine max
  Clone ID: PAT_MRT3847_65830C.1
ctcaatactcattatttttatactaaatactaatcataaataaatagaaaaacttaaatctaatcactcttacataatcaattacatatatgctagttgacataagtggtagcaatttgtatttcttaactaagtgatttaagaattaaattttagttgacccttattggatataaaataaattgtgttaatatgatacattatttgtactcacgatcttcgataaatatttgtcattactccccgaccccaggaatttcgtaacaataacatggtcaacataaaaagataacttctacataatcaactttacgggggggcgagcaactcaaatttaagtgtacgtataattttatcctaaaaaaaataagtgtatatttctcattttttttgagagattgattgaaaaataagttattatttcattaaaagaaaactaa

SEQ ID NO: 105000 - DNA, 1880 bp, Glycine max
  Clone ID: PAT_MRT3847_65832C.1
gtacgcctgtacggctgcgagaagacgacagaaggggagaaagagaaagaaagaaaaagagaaaaagaaaaaggagaaagacctaattttgtcactgtaattcttcttcttcaaagaaaaccccaatttcgaacgcttcaaattcaattcaggaaaccctagtgattaatttcgttgcgaaacggcgattcaagattatcgtgagccagaagatggtagcggaagcggaaattatctgtcagcagaacattccgatgttggacgtgaagtatcatatttgcgtggctcaagaacacaacgtgaaggttgaggtttcacccaaatcaccttcacctcctgttccgatctttggccaagcagtgagttgctctgagatcattaaagattccattttggaggcccctgcgatgaattttttcccaaatgtgcgttctggtagctatgccgagattggaccgcgcgtttctatggatgatgaacacatttgtattgatgatctgggagctcatcttggatttgtgttcaagtgtccgataccgagtgcattttatgcagtttttgatggccatggggggcctgatgcagcagcctttgttaagaggaatgctatgaggttgttttttgaagatgcagacatgctgcagtcgtatgatgctgatgcgttttttctacagaaattggaggattcccatcggagagcttttctacgggcagatcttgccttggctgatgaacaaactgttggtagttcttgtgggactactgcattgactgcccttgtgcttggaaggcatttgcttggttgctaatgctggtgactgccgagcagttctttgccggagaggtgtggctgttgagatgtctaatgatcacaggccaagttatctaccagagaagaggagggtggaggagttaggtgggttcattgatgatggatatctcaatggttatctttcagtaactcgagcccttggggattgggacttgaaatttccacttggtgctgcatcccctcttattgctgagccagatgttcggctggttacattgactgagggtgatgagttcttgatcattgggtgtgatgggatttgggatgtaatgtctagccaagttgcagttagtcttgttcgccgaggattaagaaggcatgatgacccacagcaatgtgccggagagctagtcaaggaagcattgcgcctaaatacatcagataatctcactgtaattgttgtatgcttgtcgcccattgaaagcattgttgaatcatgtccaccccaaaggagaagattcaaagcttgcagtttgtctgaagaggcccgtaatagattgaagagcttgattgagggaaattgattgtaaatgcaattcttgtgattgacaaatgttcctttcttaaaaaattaatctgttttttaggctgtttcagagagagctaaaaagcagccagcagttttgtagggatagaagggatatttggttagggggtagaaggtgtttggatttatttaattgggaggtgttttttctgggttatgtttggtacatgtagagacaattgctagctaattttggcggattagattcggtccccaccatggccgttcccattttacattgttgctgcttctgtaaataaaaatgaggggttgtctgagacataggatagccgaatgcatggttgagtttcttgtttgttgttcttggatcctccatgttatatggatggatatgcttggcccatcttatcaactggtagggctatggcctatgtcatgggacaacatcatcctttggcatcacacaaactaaatcgcttatcttatgtgatgaatttttctccgttatcctttatttattaataaaaaaaaaaaaagaca

SEQ ID NO: 105001 - DNA, 331 bp, Glycine max
  Clone ID: PAT_MRT3847_65833C.1
cttgggggggggggggggggggggccaacaatttgactggcagtgttagtaaggaaagggtaaaggatagggggtgtgtagtcaatccaaacagtcacacaaacaaggagatgaggagtataataagtgctcaaaggacccgggtggattcacacgctgtggcggaggcgctagttaaatgggcacaatcgggtctggtataggcagtgtactatacaatgcggttatactacaggtagtcccgggtgccaggtgttatttgacggcggtgctcaagctcagtagtggagtgggggccgtggctcgcaattgaacgtccaatttggggggc

SEQ ID NO: 105002 - DNA, 303 bp, Glycine max
  Clone ID: PAT_MRT3847_65834C.1
ccggaaaaaaaaaaaatataaaaaataaaaaaaaaataaataaataaaaagagggaaaaaaaaataaataaatagcagaacatgtcctgcaccttttcttgcgccaccgtcttttcatgacccatgcaagattattcttcactttaaattgatttccttggatatgtttacaaaggtctatcaatgcccaattcttggatttaccgattttatcatattctcatctagttcccacacataaccgttttgtaaattgttacaatagataaggggtcagaattataaaaattttcctacatttta

SEQ ID NO: 105003 - DNA, 180 bp, Glycine max
  Clone ID: PAT_MRT3847_65835C.1
cttaacacaaggcagatagcaaggtcatcctagggttttgaaaatggcagcagcgtcctccatggctctctcttctcgatccttggctggcaatgccgtgaagctgggcccatcagctgccgatgtcgggagggtcagctatgaggactgaccgtgcaccacagcagcgacctcctaccg

SEQ ID NO: 105004 - DNA, 386 bp, Glycine max
  unsure (1)..(386): unsure at all n locations
  Clone ID: PAT_MRT3847_65836C.1
ttctaaaatctatatacttactattttcaacaccaagataaaagnaattagaacttataaaattactctattaccataaaatatatgtaatccatcctttttcttcttataaatttctaatttactattataaaaattctaaataatatnaaaatcaccataatccattttttaatatttataataatccattaatatcttaatttttaccaataattcattaaattacttcatactcctaatatacatatccattatttatttttaaataaaaacttactaaaattctaaattaatattccctattaaatctaaataaatttgaccaaactttaaaaattctatattattattattaatttttttaatttccttttccttactta

SEQ ID NO: 105005 - DNA, 235 bp, Glycine max
  Clone ID: PAT_MRT3847_65837C.1
caacaggatccgatcttacgctccattgttctctgctcgagatgcttccatgcatagagagcgtggtacgtaactactcagctgtcgcatattctgagccatcaataggactacatagacaccaaccaaacctaataatagcctctttgaatgtacaacgcttacttctaatgcactcagcaaatgaactcgataaactctgctactactatgcgactatataatacactgcaat

SEQ ID NO: 105006 - DNA, 463 bp, Glycine max
  Clone ID: PAT_MRT3847_65838C.1
ctaactcctcgccctctaaaatttctaattgttaacctttctttgggccaaaaaaaaaaaacccttacctcccctttttgggggtggggccaaaaaaaaaaaacctttatggtttcttcaaaacttttaacaagggggttccccccttgttgggctttttttttggcactcaaccaattgaggagattctgcaatatttttcaaccaaaatccgaaacagctctccggttatcacattccttttggccttccttggcaaactttcaaattaattcaccctttccttgagtcaggtttgtggggatttttacattaaaaaaaacattttggtccccacatgtgcaaaaattttgagttctgacccctttctttttcaaaacctctttttaaccaggttgggtgcctgggcaaaccttaagtacaacatctcccttactatgggcgacctgaatagctcccccca

SEQ ID NO: 105007 - DNA, 341 bp, Glycine max
  Clone ID: PAT_MRT3847_65839C.1
agtttttgttgcacgtgctgctcagggcgccgcaccttgttaccctccacctacactgtcggtacttggtttgcagaatgacacagggtctatctgcgtatagttgtgcaggatgttatgggtaagtcataacctctatgagccccacacgaactacgtgaatgatggaattttccactctgatattaaatgcttgctcatctatcgtataaggtatactactctaaggcacatttagactgtggatgatccttcctcagtgatatgcttggtgctaggttacagctgttagaagattggactggtgctgacactctactatcacccatagggcttgatgc

SEQ ID NO: 105008 - DNA, 471 bp, Glycine max
  Clone ID: PAT_MRT3847_6583C.1
ctacagccgattcggctcgagaggactacaagaggcatgacctgatgatcgattctatccgtagtacatcactggcatggcgtcaatgaccggctcgacatcatacacatctcacatattttgagagcaggctgacatctgatctggcgtgagatcctgaatacaaacacggctgaccctgatagctacatcgcaggaggtggaagtgcagggactgaatctgggagctactgttccagaatgagacaactcagaggcacgtagatgaaggatactacaccatctgaaggggaaccggtatcagattcagaggatgaagctagccatggagaatcacatgcatagtcagacgatgatggccaggaacaaccacaggaggattcgtaggaagcagaatggatagacatgtgaagaactggagatggaagcaagcaatgcagatcgcaatggagagactgagtccaacagtgc

SEQ ID NO: 105009 - DNA, 570 bp, Glycine max
  Clone ID: PAT_MRT3847_65840C.1
cccacgcgtccgacgcaaagttcatctcaccgacatatctatattgggcatagataacaccggactcgctaatatcccatactatgaaaaacatggatatggggcggaggaatgtaatgagcccttatatgaggaatggcactaacaagggcgacgcaccgggattgacagagactctcaaaaatgacaacaagctagagtctctcggcttgaagatcgtattcttgccaggacagagatctagactcaatggccgcaacagaatcagacctgaagaaggctggctttcacacatggaagcaagcgatactcaaggatccacatcttgtcacttcaaatgcactttcatacaggtcagcactcaaagagaagctgtagaggcagggatacagaatggatggagtcactgaagaccatggtgacgggctggttggagaccacagatgcgaaagctagacctttaagcttactaatgccatgtactacattgagtagtacctgtgcctctcttaacagtctaactagagaatgctcctatctatatgtaatagggtatgctgatatgcacta

SEQ ID NO: 105010 - DNA, 311 bp, Glycine max
  Clone ID: PAT_MRT3847_65841C.1
agcaaatggccgactagattcccttcagcatgatctgcatgctcgcccgtcacgttcccgaaagcggagcacatcctcctctgctgagccctcgattgacacgaccgcaccgacgattggatcactcgcatgatacagatccggactgaatgcgtcacgaatcagagtgtcgtgaaaatcatcaccaccgacgacgccgtcgattccagtcacggcaacaatgacggtgccaccattttctccggcgatactagtcactctactctcatgtgtgccctgatgtcggtttattcccgggacattgtcgttca

SEQ ID NO: 105011 - DNA, 391 bp, Glycine max
  Clone ID: PAT_MRT3847_65842C.1
aaccggtccggagacccacgctggaccgcacgcatgaaagggtacaaccttcttggcacttcgtattcattcaagcttaactgcgcggaattgtttgcttgaagaaaatccaagccgaggcacttctgtaacatttccgtaacgcttccgtgggtgatttcgcgaagattttcaactgttcttcatcattcatcgtccgttcttcattgttcttcggtcttcaaccggtaagtacccgaaatcgaacttttcaattcattctatgtacccgtggtggtccccatttgtttcgtgtacttttattctcgtttcatttactttctgtacccccttttgacgcgcttcagtcatttacttaagtcattttctcgcctaatcgaaaaataaaata

SEQ ID NO: 105012 - DNA, 469 bp, Glycine max
  Clone ID: PAT_MRT3847_65843C.1
catgaaactaaaggtgaagattgccagaaacaggacgggaaggaaccattttaagcagcaacactgtgctgatgggagcatgtggatggagagtcagggtcagtagcacatctctgccttgcaagatgagtttcggagccctgataacaactctggccacaaccacaagccattcccaggcatgcacatgaacatgaacaacaacaacaacaacaacaaaaggctatggtgcttatgctggtgtggactctgacttcacagtgcaaaaacatcatgatgggcatggcaacggcgtacgagccatgcacatgaacatgaacaggtatggtggaaagataggaggcatgtgacacgaaggcatgcacagtgaccaccatggtggcacaaagcacgcttatggtggtcatcataatggtgactataacgcctctgaacatcattttcgaaaccatggtgggcaccatgagta

SEQ ID NO: 105013 - DNA, 263 bp, Glycine max
  Clone ID: PAT_MRT3847_65844C.1
gccggttccctatctttttatcccgttttttaaccagctaaaacctcatctcaagatgctctcaccactgtcaggccaacaacccttggccctcctattcaatcacctctccatatattatcctactcatctcatactaacctcaaacacaatatcgccctttccccccttaacgactataactactacctatatgccaccctttccatctctatattacccccaacaaaaattatcataaatactcaaaaacactttaaaat

SEQ ID NO: 105014 - DNA, 382 bp, Glycine max
  Clone ID: PAT_MRT3847_65845C.1
gttttatgaagaagaagaagcaactccttcgaaccctagcaatcacagtcaacactcgcgccaacgacgatgtggaacctggtgacgacaaagacatctaagaagacgatgacgacgtccttcaagaacgcgatcgcggaattccgcaatgcgcatggtcctagttgcgggagcagcgcttgaaggtgggaagcctatcgtggcgcttgttgttggagctggttccgatccgagtccacgacgttgtcgtgaacgggaacacgaagactatcgattgggtgattgaagcggagctgagagacatcgagagctgccacagcatgcaggagcgttatgcaagcctcgcatatggtcgctgccaggcttcagggcctcgaaatct

SEQ ID NO: 105015 - DNA, 470 bp, Glycine max
  unsure (1)..(470): unsure at all n locations
  Clone ID: PAT_MRT3847_65846C.1
ctagaaactatgggggaagtggagcagttaaaaatgtgataaaccagttatgcagtccagaggctggtaggagtgtaagggagcagacatagtggctatggggaactgggatatatgggagtgtaagggaccagattcagtagctatggtggaacttgggagtgtagatgagcacgctgaaaagctatggtgcaactgcaacaggttgtcagggtgtaaagaaccagacccagcagccatgggaaacctggggaaagtagcgatgtgggggaccagatttggcacctataagggagctggggcatgtggacatatgaggggccagaagcagcagttatagggaaactttgaaatatnnncnnntgtnccnnnnnnccnnnntggagctgaaacagatcctaggtcctatggaggagctgaagaaggtgggagtgtgagggaccaggccgagcatctgtggaagggctgag

SEQ ID NO: 105016 - DNA, 307 bp, Glycine max
  Clone ID: PAT_MRT3847_65847C.1
ccggaccggaaaacccgggccgacccacgccgcccgacttatatcagccccccacgaaaacccacaggggggcaaaagaagcagcaaggggtgagaccacacgcccccacgcacgaaccacccaccgaaccgccgaacccccacagagagagaccagaccccagaccagggcagcggaccagaagaacaaggacgccaaccccaccgacgagacggaccgggacgaaacgaccagggcacaccggaagacaaccaagggcaagcgcacaccgcccccaccggagcaggacaaggaagcagaagaccc

SEQ ID NO: 105017 - DNA, 478 bp, Glycine max
  unsure (1)..(478): unsure at all n locations
  Clone ID: PAT_MRT3847_65848C.1
cnantctttcggtttttcgtttttaaaccctgggggtcgagctcactgtaattttggttgaattgtaagcgaacggacaaatgatacaggcggggtgataaaaggaaggaaggaaaaaaaaagactaattatccccatacacagggcaagatgatctctcatgcgggcaaaccaaataaataccagaccggaggccaaatggtgaccacgacatcgccttgggaactagttggaagggttgctcctgaatgaacccaaggccttaacagcccctgctataaggctgtactgaagggatgcacccgccgtgaaagctaccaccaatggcccaacccggagtatccaatggtggtcccaacctctgccattggggagataacagctgcacccaagctcctgggtgggctgatcccggcaccggagaagggaatgggggccaagtgaaccatgaaaacgggaaacccaaagggcaatgggg

SEQ ID NO: 105018 - DNA, 346 bp, Glycine max
  Clone ID: PAT_MRT3847_65849C.1
tcgtccatttctccttccattgcgcttctcgtgcctactggaattccacttctccgtccaaccatcgcaacaccaccaaattcgcacgaccaccaccatccaaacaccaccgcttccgcatgctaccaccgttgacaccacaaccacccaaacactatcgtacctgtgcgtcggccctgaaataatgccagatctgtaccctaaacccccccttcatgtagcagatctattccctaaaccaggagtgcgctcaatgtctgcttcactttgcgaaatcgagccccgtacatttcctaatcttgttaaaagtttgttttatatgtacagcctactttggacttgctcc

SEQ ID NO: 105019 - DNA, 586 bp, Glycine max
  Clone ID: PAT_MRT3847_6584C.1
ggctcgagatttcagttaccttgaaccacctccacttccaaacagagtctattattcagagagaattccaagggagcaggcagatttgctgaaccgatctacaaagtcagatgatgctcatggttctcacttactcatgtcagatttgctttctgacttcagccagaagaattcaattacagaatccagtgacatattgcacagtgggaatatgtcaaatctgaacatgatgtccagctcagcagcaaagcctttgcaagcagatggccatactattaatgatgtcccgccacagacatacaaacagttgcctgatacgacaagtaaggtgaattcgaagttattgcagcatgtgaattctgagtcgaagcaagtgttagaagataataaagtttctagaaatgaggatcaggtccttagttctgaaaacagaaccaaaggtgctgaacatcttgcatttcatcgggttccttctgttgaacacaatcagaatctaacatctaaacttccagacctcaatttgtctgaggtttctaccagggagtctgataatgatactaaggtccaatcccagacttttccttta

SEQ ID NO: 105020 - DNA, 169 bp, Glycine max
  unsure (1)..(169): unsure at all n locations
  Clone ID: PAT_MRT3847_65850C.1
gatcccgaatagcgggcgcgacccacgcatacgcgcacgcgtgcgcttatttatcgcgagcttccgctatagacgaacncgaagccaggaacgcgacgcatgcgacgctatagcgagtcctatagagagaccgtaagaacaaatgactggaccgggttccagagcgaaa

SEQ ID NO: 105021 - DNA, 133 bp, Glycine max
  Clone ID: PAT_MRT3847_65851C.1
cacttattaaattactccttcaaatcaatcttaaccttcaaattttaaaaaacttgataaccttcaacttttgttcaaacaacatagctggcccggtttaaaacaactttcccaaccttaaaaaactacattt

SEQ ID NO: 105022 - DNA, 569 bp, Glycine max
  Clone ID: PAT_MRT3847_65852C.1
cggccggcggttttttttttttttagaatgaaacaaaaccagataatactggtacaacagacggggcctggttgaaattggggcaccaccaccgtcaccaactggcgggggcagaaatacaccgggggcacccgacacaatgaaggcctcaatccaaacattctctgctgatctctgtaggagagccggcccaggcaaaattcagatactggccttgaggggatcgacacagacactgaccacttgcccatcaccacgctgcgaggccaacaggggaagcaactcggagcatcattgtcctgctaggggcgcgaagaaggaatggaaccatacggagaggctgtgccggcaacgggcctgataactgaaaaggggggggctactttaaggcactccaagacaccggacctgagaatttaaggaagctaatgcgcttaatgccaccacaacatggtgttttgccctgccgggctgtcactttaacagaggatgctatgatgacctgtttctagcctagatgatggaacttggaaatgaggtattgtaccaagttatatagcgtcgcgcgg

SEQ ID NO: 105023 - DNA, 365 bp, Glycine max
  unsure (1)..(365): unsure at all n locations
  Clone ID: PAT_MRT3847_65853C.1
gagctctatcaattatcntttttttatcttttccacgcacatttattaatgaggttttgaaaattttaaggacctaaatctctatattcttatcctttcaactcactttgaaatacaatgttaattttctgttgactaattatgatttctcttttatgttgaattatttcattttccaaatttattacatgaacccaacctaaatttacaactatcctctattttttcaaacttatactattactttttaccacatcatatacaattattaaccatgacaccactctaaaccaatcattttaaacaatctacaatgaaatttcttataatcacaaaatcatgaacccttactttcaaattatcaa

SEQ ID NO: 105024 - DNA, 252 bp, Glycine max
  Clone ID: PAT_MRT3847_65854C.1
ctggagcgtacggtcaacacggcggcggttccgggccaccgtcctcatggatccagcggcggatacagttccgtcggtggttacggtgctactggtggtggtggtgccggcgggggtgacagttatggtggcggaggctatggaggaggaggaggcggtgccggatacggtggtagtgatggcggtggaggttatggaaccaaaggcagcggaaacggcggtggatatggcggtaacgatagtggaggttat

SEQ ID NO: 105025 - DNA, 657 bp, Glycine max
  Clone ID: PAT_MRT3847_65855C.1
cgcgttagcctcgtatttcggctcgagaacgtgaagggttctgctggaagccttgtgactttggttagctggctgtgttcttggattatatcatattcttttaacttcctcatgagttggagttcagcaggtatgttatcatttaatcttggtcctgagggtaaaaataaaaagaaaaagttaagaatttttaagaaactagggaagaaaaatagaaacgtaaggagtccttattttacatatggaataaaatttattttatgttatgtttgggcaggaactttcttaatgttctctagcatatgtggcttcactgtgctattcgtagcaaaactagtaccagagaccaaggggcgtacactagaagaaattcaagcttctttgaactcattttcttctaagagatagagattctgaatcaagaaaattacattcagcaatcatcacacaagtttttatcgagactcgtgatgtacacatattcttacaattaattgtctatattatagatagatacttaatatgtagatttattttgtatatttttttgagtgtcattatgtagagttgaatatttgattttaaactcaaatgtcatagccatgggacatgtttcgctccgtaaatgaaattgcaagttaatgtattttacaaaaa

SEQ ID NO: 105026 - DNA, 653 bp, Glycine max
  Clone ID: PAT_MRT3847_65856C.1
gaagccaaaacaatttgatatttattattataagacaaaggtttgatttaccccgacgaagtacccataaaacatatatattacagaactgcaagcttattttgactttgagcgcacccttaaagcgcgtctctacgcgaagttatattttattctctgctacgaggaattaagctatgcagggatcatcacaaccacgtggcaccgattctctatactcctctatggcaattggactggttcaatgttccatatctctcgggcatattcatgaatcgtgcggtcactgctaaacttgtatgaacctgctgtgttcaatattgacattcttgtccatttctttccctctgctctttctttcctcagcccagcaatttcatgagccttggcaccaaagaggaagaagttgtctgcaccaacctcttcccttatttcaacattggccccatctaaagttccaatcaatatgcagccattcattgcaaatttcatattgctagttccacttgcctccattccagcagtactgatatgttgtgacaattcacttgctggaataagcatctcggcaacactgacattataatcagggacaaaaacaaccttaagtagatctcctatttcagggtcatgatttactgtagccccaacat

SEQ ID NO: 105027 - DNA, 173 bp, Glycine max
  Clone ID: PAT_MRT3847_65857C.1
tccgagaggacttctgactgaaacacaacagagtttaacgatggagataactaacaacaccgtgatgaatatgaacgttcatgcttaattatgggctacgctgaaggtggcatggaaccactatacgaacaagctgtaccatatatgtatgctcacttgctgtctgacctcaa

SEQ ID NO: 105028 - DNA, 2472 bp, Glycine max
  Clone ID: PAT_MRT3847_65858C.1
cacgcgtccggattattagaaatgatgtttcatatcctgtaaagttctatggcaaggttgtttcagggtcagatggtaaaaaacattggattggaggagaagatataaaagctgttgcacatgatgttcccataccaggatataaaactaagactacaatcaacttgagactttggtctacaaaagctgcatcggaagaatttgatttgtctgcttttaatgctggaaggcatactgaagcatctgaggctctagcaaatgctgaaaagatatgctatatactctaccctggggatgaatcaatagagggcaagatccttcgtctcaagcaacaatatactttatgttctgcttctcttcaagacatcattgctcgttttgagagaagatcagggacaaatgtgaattgggaagagtttcctgaaaaggttgcagtgcagatgaatgatacacacccaaccttgtgcatcccagaactgatgcgaatcttaatagatgttaagggcttaagttggaaggatgcttggaatattacacaaaggactgtagcatatacaaaccatactgttcttccggaggcattagagaaatggagcttggatcttatgcaaaaactgcttccacgccatattgagattatagaaatgattgatgaggagctgattcggaccataattgcagaatatggcacagagaattcagacttgctggagaaaaaattgaaggaaatgagaatactagaaaatgttgaattgcctgcagaatttgcagatatagtggttaagtccaaagaggccattgatattcctagtgaggagctgcaaagttctgaacaagcagaagcagaagacgaaaaagatgatgatgaagtggaagcagttgctaaaaagaatggaacagatgaaagttccattgaggatgagaaagaagagttgcctgagccagtaccagaaccaccaaaattggttcgtatggcaaatctgtgtgttgtaggtggtcatgcagtgaatggggttgcagagatacatagtgaaattgtaaaagatgaagttttcaatgcgttttataagttgtggcctgagaagttccaaaacaaaacaaatggtgtgacaccaaggagatggatcaggttctgcaatccagatctgagtaaaataataaccgagtggataggcactgaggattgggtcctaaatactggaaaattggcggagctacggaagtttgtagacaatgaggatctacaagtgcagtggagggaagcaaagaggagtaacaaagttaaagtggcagcattcatcagagaaaaagcagggtattctgtcagtcctgatgcaatgtttgacatccaggtgaagagaatccatgaatataagcgacaattattgaacatatttggaattgtttaccgatacaagaagatgaaagaaatgagtgctgcagaaaggaaagcaaattttgttcctagagtttgtatatttgggggaaaagcatttgctacatatgtgcaagccaagagaattgtgaaatttattacagatgttggggcaacagtaaatcatgatcctgaaataggagatctacttaaggttgtttttgtccctgattacaatgtcagtgttgctgagatgcttattccagcaagtgaattgtcacaacatatcagtactgctggaatggaggcaagtggaactagcaacatgaaatttgccatgaatggctgcatattgattggaactttagatggggccaatgttgaaataagggaagaggttggtgctgacaactttttcctctttggtgccaaggctcatgaaattgctgggctgaggaaagaaagagcagagggaaagtttgtccctgatccaagatttgaagaagttaaagaatttgtcagaagtggtgttttcggatcttacaactatgacgaattgatggggtccttagaaggaaatgaaggttttggtcgagcagattatttccttgtgggcaaggacttccccagctacatagaatgccaagagaaggttgatgaagcataccggaaccaaactaaatggacaagaatgtcgatattgaacacagcaggctcatacaagtttagcagtgaccgcacgattcatgaatatgcccgagagatatggaacattgaaccagttcaattgccgtagaaaaagtatatataataatgaatgaatagcagagaattggtgccacgtggttgtgatgatgatcactgcttagcttaattcctcgtagcagagaataaaatataacttttgcatagagacgcgcttcatgggggtgcgctcttggtcaaaataagcttgcagttctgtaatatatatgttttatgggtacttcgtcggtgtaaatcaaacctttgtcttataataataaatatcaaattgttttggcttcaaaaaaaaaaaaaaaaaaaaaaaaaaaaaagcggccgctctagaggatcca

SEQ ID NO: 105029 - DNA, 615 bp, Glycine max
  Clone ID: PAT_MRT3847_65859C.1
ccacgcgtccggggttatctcctcgggctggctcgagcagagaagcttgaggagttaaaccgcgtcgctaacgtggtttctaggttgggaaaaaagtgttctttgcccgctttgcaaggctttgagcatgtttatggggacattgttagtggagtcatagatgtgagggaattggggttcctagttaagcacatggaaggaatggtgaggaaaatggataggtatgttagtgctaccaggagtttgcacagtgaaatgggggttctgaatgatttggagcaagcggtgaagaagtttcagcataacctgcatgaggagagtagaagggcgtttgagcagaaacttacatggcagaagcaagatgtgaggcatctaaaggagatttcactttggaatcagaattttgataaggttgttgagttgttggccaggacagtttgtaccatttatgctagaatatgtatgatctttggtgattctacatggagaaaaagtaatagtcttgggcttagtgggaggttctccaagtccaacattgcagaatgagtgtgggttaagtgtctggccagattagtgttcttgtgagtcttgagaagttgaaaagcaatcatggca

SEQ ID NO: 105030 - DNA, 480 bp, Glycine max
  Clone ID: PAT_MRT3847_6585C.1
ctacttcggtctttgaatacactagctgcgtagcacactagctgcgacctaacactgatgggtacaaagtatgctaaccctccttgcgcttatagccttttgagagagaccagcaaatgccgtgcttattccagaagctcacttacttctacggccagaatgcataagttcctccggagagtagactcgaatgggacttgtaacattaatccatctagatgaacatggttcatctagttgcatgggagaagcgcgttgcgaccataaattgcgcaatcgcttcaactaccctagccgcatccaaccctgacaaactcttgctaaactctgccgctacaacagcagcttatgtcatcactgaaccacctagccgtgctgaaccgtgatccctacttgcgacagcagctgctttgctgcaggctacttcctgtgatgaacgttactgcataccagtaacaataagctctggccctgcttatg

SEQ ID NO: 105031 - DNA, 401 bp, Glycine max
  Clone ID: PAT_MRT3847_65860C.1
caggcaccagaaccggaagggcccgggccgacccaagccctccgcctcccaaggcgcaaggaacgacccaggggcaggaggaaaagaaaaaaagccgacccccccgacagacaggaggcacagaaaacgagggaacagacccgagcccgagggggaaagggaaaaaaaaccacacccagagggcccacaggaagaaaaaccacccaagggggccacaagaaaaggacgaagagagcaccgaccgagccgacgaggaggagcccgccgaagaagaacggcaaaaggcacgacaaaagggcgaggaggggcaggaccaaaaggaaagagaaaccacggaccagggcgacgagccccccaaagggcagaaaagcaaaaagggagaaaaaagcaaaaggagaccc

SEQ ID NO: 105032 - DNA, 561 bp, Glycine max
  Clone ID: PAT_MRT3847_65861C.1
tgccactctctctgacccttcatcaccatcattattattaccccctcattgctaccaactctaattcctttatcataaacatcatcatcatcatccaccatccccttattgcacttgatgatcataatcaccttcaccaacacaacaaggagctaccttcacacactaaacaaggtcacaagcaagcacaaggggaagttgatgacaaagtgaaaaggtaatgtttgcttatgcttatgagtgaaccctagttgcttttttggttggagtgaaaagggtctttgttggttttactgcaagatccaacaactcctcctggggaatcaagcatcttggtccgatccgtttcagttttggctatgactatgagtatattccgtgttactaagtaacccttttttctccttttagaataatcatgtagcaatattcagctttaatttgattcgcatgacaattaattaaacaccggtttctttttcaattatgttgttctttatccctctcctcatttcccactttctgggtgtgtatgtgtttctctgattaatagatctctgc

SEQ ID NO: 105033 - DNA, 225 bp, Glycine max
  Clone ID: PAT_MRT3847_65862C.1
ccagccgtcagaacacgagtcagtgggactgcgtaaacgaaatcttgcgatagtgcacagtaactctcgtaacagatctctcgaatccgctctaaatgagaatcccatttgatcaacgtcgaccttggttgatcccccgatatctcatcacacgattcagacatcaccacgactcatatcacgatcgttcagcgcattgtttatctcagagattccgtctatttc

SEQ ID NO: 105034 - DNA, 267 bp, Glycine max
  Clone ID: PAT_MRT3847_65863C.1
gaatccagcccgagagcagaaggaggaacacgaatggcatcgcaaggaggaaaaacacggaggaaagggaagtgacgaggacaagatgaacgtgaacacccacgcccacaccaacctcatcaaaaggaagaggaaaagcacgaatggcaacacaagcaggaaaagcaccaaggacaggaaagtgaagaagaagaagaagaccaagacgaggatgaggagcaagacaaagagagccaagaaagtgaaggttctgagtctcaaagagaa

SEQ ID NO: 105035 - DNA, 187 bp, Glycine max
  Clone ID: PAT_MRT3847_65864C.1
gagttatcgtcacgaggggtaagaaagaatagatgttcgccgcgatattaaatggagcaacctgttgctcagaaagacggggaatgcgaaggaaccagactttggcctcgaaaaactccttggttctgacagcagccagagcacaacccgcgccatgggcacatccggatatgacgccccagaatat

SEQ ID NO: 105036 - DNA, 139 bp, Glycine max
  Clone ID: PAT_MRT3847_65865C.1
aacagatctaatgcacacacaatgaccttaaatcacaacaatgtcctagtcttatctgcggtgctcacgctgctcttctatctactactgacactacgcgagctcggagaggaacatccgctagtcctgcagtaccaca

SEQ ID NO: 105037 - DNA, 543 bp, Glycine max
  Clone ID: PAT_MRT3847_65866C.1
gcgccctttttttttttttttttttttttttttttttttttttttttttttttttttttttttttttttttttttttttttttttgggggaaggaaagcaggggtcaattaaaaccccctaaagggggaaaaaaaaacaaaaattttgtatttaaaaggggtttaaacttaaaaaccctattcaaccccccacaaggggggtaagcaaaaaaacaaacaggagtttttaaaggccaagactacaaaactacttttttttaaaaaaaaaaacaggggtttttaattttaattcccccccaaatccccaaaaacaactgggggggggttaaacttcattttggggaaccaggggacccacgggttccctaaaaaaaaccatggggggggggtggaattccccccggcccaaactaaaaaaactgggaagaattttttccaaggtccgaaaaattttaaaacctggaaaaaaagttcccaaacgcaggaagggggattttttaaagggaaattttaattttttcccggagcggggcatcaaaaaca

SEQ ID NO: 105038 - DNA, 140 bp, Glycine max
  Clone ID: PAT_MRT3847_65867C.1
atgtttaccctataacgtgttgtatatatgagctcgtaagtaaaattggctgtagcgtggtttctgagcgaaattgctgtgaaatcacatgtccacacacaattcaatccgctagcatacagtgaaatttctgcagtgtg

SEQ ID NO: 105039 - DNA, 915 bp, Glycine max
  Clone ID: PAT_MRT3847_65868C.1
atcagaattgcccacttcacaaaaacttcaattcagacctcacctgcccgcctttcccgcaacttctttacccgcccacccctcctcgcagcctacaacatgccgcaatccccgcaaatcctcaaaatcgaagacctccccgcgtccgaagcaaaatgggtttcatttcaaaaaatctcctggcaagaccaaacaggccgcgagcgcgtatgggaagccgctgcgcgcaaaacgcggggcacatctggtgttgacgccgtcgctatcaacgctattatccggcacccgtcgcgaccaccgtctactatcatcattctgcagtaccgcccgccagtgaacgcggtatgtgtggagttacctgcaggactagtcgatgagaaagagagtccgggagacgcgagcgtgcgggaacttcacgaggagacgggatataaagggaaattggcatgtatttcaccgtcgatggtgagtgatccgggactaagcgcggcgaacatgcagctcgcgacggtggaagtgaatttaaaggagggagatgaagagccggagcaggcgctggatgatggagagtttattgagagggtggtggtcccgctgaatgagttgtatgagagactggtcaagtatgatagggaggggaagccggtgtatgcaaggttgtggcattgggcggcggggtggcatgctgcgaagacgatgaagctttgagatggcgggggtttggggggttgaagggtgcatatgtgttagcaaggatgaaacggagcacggctgtcgcttgtaaaagagaaagaagacttagaggatatttacatttccaagcaataggaggaagattgaatatgagatgatatgcagcaagtcagtcactgctagggacatgccatagatgggcaagagaagagacataacccg

SEQ ID NO: 105040 - DNA, 119 bp, Glycine max
  Clone ID: PAT_MRT3847_65869C.1
ataccgctctgaaagtcattgagtgggcagagaagagtgggattgtgaagagaaaggtgaattacaagttaagggactagctttttgctcggcaacgtgactggggtgaacctatccgt

SEQ ID NO: 105041 - DNA, 212 bp, Glycine max
  Clone ID: PAT_MRT3847_6586C.1
tttacactgtgacttaaatagaaattatgctaagaatgacttttaaagataattattataaacgttaataaaattactgtatatggtaatttctaattggttggtggtataaaacttctaccttattggtacatatattttttaactaataaaacatataggtactaactaataatattaatttagagttcattggctattttgggctttga

SEQ ID NO: 105042 - DNA, 551 bp, Glycine max
  Clone ID: PAT_MRT3847_65870C.1
caaggtgtgccagtggtcgcagggcaaccccaagggcgagcctagcattatcggaaacggtccttccggtacgctgtgccagtactcgaccagcgacgtccacatcaaccaggacatgaagcaggccaagcagggctcgcccgagcagtcgtcccccaacccggacgacgagtacaccgcccagagcgatatcacgcccgcccccaagacgaagaagcccaaggcttcgacccctacggtgacgaccgcccctctgaagaagacgaaggccccgaagaccacgacgcccgttactactgccccgttgaagaaaaccaaggctcccaagacgaccgcccctctcaagaagacgaaggctcccagcccgaagcagcaggacgaagacgaggagcagcaggacttcgtgcagcaggaccaggttgaccaggatctcctcggttaaaggggttaagcatttacaggggcagaactttctacagcaacacacgttgacgacttacactgcgatactgggtgcacaagctagccgcctttttgagtagtgtacaagt

SEQ ID NO: 105043 - DNA, 528 bp, Glycine max
  unsure (1)..(528): unsure at all n locations
  Clone ID: PAT_MRT3847_65871C.1
catgagcatcgtctagctatctcgatcgaactgtccaaggtcctgtcaccaaagataatacagtaactaaacagcgaattaaaagagtagtagtggcaccagtacccgatcggccggctacagtaggacaggtgcccatagtgaccaagaacaaaaaggcacccagaacgtcnagggacaccaaccaaaagccacaaataggacaggacaggcggcctagttatcgggcctgtgctaggctgcgtgcgggacagtggggaggagggccacacaccaaacgacacggagatgtgacagtggtttgcgttttggtcccagtagggtggtggggtaggcatggtggtgcattcagttaggtacgcccgcggaatatgggggggtgttgtaattaacatagggcatcgcggagaggtgaaggtggggtttttgagagaagaggtggagtagagtgagtaggcgaaaaaaaaaaaaaaaccctccttcttcatgacgcagtgtcgtcatttccaaggaaggttcgattcgatt

SEQ ID NO: 105044 - DNA, 353 bp, Glycine max
  Clone ID: PAT_MRT3847_65872C.1
gactcggctcgaggcaaccgcgtgccgcaggagcttgctgccgaaaaggtggatttgtaggaggcgaccatcgagagccagctggagaccatccatgcttcccgcatacttatcttgtctgaggggatcaagatggcgccctagatcgtggacgagttgagggtggtgatatccgttaacgccattttgaagcgttatttcgcgctagcaagtcttgaaggggtgggctagtgctgcaactaaaacagcaatttctcaattacatacacgagtttttcaacatgtacgaaacgccacaaataagtctaattcctattctgtgtattaggcacacgcttgttttgcgtatgctt

SEQ ID NO: 105045 - DNA, 389 bp, Glycine max
  Clone ID: PAT_MRT3847_65873C.1
ctgattggttgatggaatgggacgaagaacaccctgtttccaagctaatctcataaaccctaagcacgctcttcgcaccgaaacaaaaaccttcctccttgcactcttccttttcaccactcaaatgctactactctcgcttgctcacaaaaccccttcaattttctcaggtctctcttcccctcatctccctaatattctcacgcatttcctcttcaacaccgttctcaatcttcgtgctttttattaactatttcatttgccgtttctcccttttcattctcttctactattactctgttatgtacctacactctaccatagtacacttccttaattatttctcacttgccctaatgtttcggccattatttgttttatttattttc

SEQ ID NO: 105046 - DNA, 750 bp, Glycine max
  unsure (1)..(750): unsure at all n locations
  Clone ID: PAT_MRT3847_65874C.1
gtttgtttggtgttcaactcaggaacccaccaagattggacccagttgagggagttccaataggaacccacattttcttttactagattttcttcattatttgactcttcaagctcacatagtcatatgaaagccacattgccaatgttgtagttgtttaagcctcaaaggtttagaagaagtcaagggagttttggaatttcatgngtaggtgatgtgagtcagtgcagcgcaccttgtctggtgggtgggtagataacattttttgccttagaataactacagtccacaggtcaaattggcttggctttattagcatttatttcaggtttgaggatccaaatgtgaagtggcattatatagtttagtcttggtttctgggcatttactaagtatcactaagttcaaggagttttataagattttgatgagttaagttgaagtgatagtgtgataccaaatcaatggtgttgaaattggcaaaagactactgctttgacagtaaagggataaagatggagctcaaagttttggctacagacaaagttgagaagcatgagagttttattataaggccaagaatcaaggtgtggatggctagggccattacatttgtggtgctttggactagtcttgttcagctgattgcactgggagaattgttgggacctagtttgttaaagggcatgccttattgnttcagttccccacctgtagaaaagtctttggctcaagccaaagttgtgctcc

SEQ ID NO: 105047 - DNA, 1220 bp, Glycine max
  Clone ID: PAT_MRT3847_65875C.1
ccacgcgtccgtgtaattcaattctagatgtacacatcaggcttacataatttagttatgttgcaagttctttactctggtaatatttttttaaaacatttgattattggaaacagaaattaatgaggaattaggctttacactatactggcaggctttgactttctgtttgaaggctaaagatggaaataccttccatcacccaccccaaatccaaattctcaccaagaaaagcttggttccatgctaatgaaactaactctgaacatttctttttttgttttttaaaaatagggccgattgcctgctcaaaaatctgatcatattcttgcaaaaagctcagaaattggcttgcttaaggcagggggactgccaagtagtggcttgccaaatcaatttcttgataatgtttctaggtctgcaggcactaatggtggtttgactagaagcaactttcttccaacatcttattcttttgtgagcaacacaggtaagctaatctattatcgagttatctttttatttttgttgttatactaaattgcatgtgctatttatagtgtatgctaaattaagaaaaaacagtaatcatcaagagtgtctctaactatatgactgctagtggattcagtgttttagtgctgtgatataagtggtagtcttgaagtggaaactttgacatgaagcagacagattttgcagtgatactttcattgcatttagataagctgtagcatgttttacttgtagtttttcaatctcattttttttgtttttgttttgttaacttttaatttacattacgatttattggaataagtcgtagattggaattttttgttctgtttttgcaggaaatccactgggaacaatgcagcaaccaaatgggagtgttcctgttatttagtaaccttggtggaatttttttgggtaggtgaaggtacaggtaaccaatacatgacgttaggatttagctccttttttgaagctgataaagtaaattattcaaattgtgtatcctgtcatctgctttgtacatgaaaacttctattatataatgaatggaaatgaagaaattgttagctctatatcctcaagtagttactttttcttctgttatctatgctgaacttatacctgtaagtcaggcccattgcataacagattgcatcattgacattacaaggtttctcaatataagaatatatttgtaattgttc

SEQ ID NO: 105048 - DNA, 832 bp, Glycine max
  Clone ID: PAT_MRT3847_65876C.1
gaagcagagtgacagagatttgacaccaccatttgttgatgatggccttctagaaattgttggttttagaaatgcatggcatggacttgttttacttgctccaaaaggacatggaactcgtcttgctcaggcacatagaatccagtttgagtttcgcaaaggtgcagcagatcatacattcatgaggattgatggggaaccttggaagcaacctcttccagttgatgatgatactgttatggttgagatttctcaccatggccaggttaacatgctatccactcataattgcaagtctaaaagtgtgtatgatccttcatcaccacaccatgaggatgaggaagacgacagtgatgaagaagactctgtagcagaggaatttcggaagtttggagcagctgatacatttagaatcccagatgaggttgatgtttctcatcttagttaggtccttcattattaagccattctagtgttatgcagctgagatttcctatactaattagtagttaaccccttcaaatatttgtggcttctatcaatgtgacaaccaatttgttcatttctagcagcattatggccgcaaacgtgataattgatacaataattgcagttgaaatacatagatttcaagtagactcgatgtatgaggactagtttggcgtgagattgtgaaagacttgagtagaaagattgttgattagaagtaaattcaatctcttctcagtcccggacttgtcacatgttacaattgccctgtaattatatatgaagaaactaatgcgttaacttcatatagagctttgattacaataaatttgtcttaaattta

SEQ ID NO: 105049 - DNA, 153 bp, Glycine max
  Clone ID: PAT_MRT3847_65877C.1
gctcggaattcggatcagcataaacgctctaacttcctcaaacatattttcaccttttcaaatccacatattttattaccaggggctgctcaaatttcatatctccctatacctcttacataaccattcctacactatacaattacgccttta

SEQ ID NO: 105050 - DNA, 617 bp, Glycine max
  Clone ID: PAT_MRT3847_65878C.1
acccactcgtccgtccggttgtgaaaacacgaagcaaggggcacgtacatgcggtttcactgaaagcactcaggggggcttgcggtttcagattttgtgacgcacgcattcatggtcaccaccaccaaagccggcgaagcccgcctgcgccagctctaccagaaagaagcccacatccagatgatgttagccgtcgagaacgactcgcaccacaaaactgtgtacttccaacaggatcgatctatgttcaagcgccgcaacgtcgggattgacattattatccttgggaacacatgggagaagcttcacataacaactctgggtatagatgcaattgagaaccctcaagatatcattgtttattgcggaaggccttatccccaaagatctgttttgaaattcgctcagtacactggtgctaatgctattgctggaaggcacactcccggtgccttcacctgttatcgttagactgtcctcagtgagcactcttctccttatccttctgatccaaaaagagcccagcctattaatgatgctgctcttgggaatattcccaccattgctttctgagactctgattcgactatgacgtatgtggacattggaaacactgc

SEQ ID NO: 105051 - DNA, 738 bp, Glycine max
  unsure (1)..(738): unsure at all n locations
  Clone ID: PAT_MRT3847_65879C.1
ttgaactctaagaagggaataatatgtagaggggtttgaggaacactctcttgttggttaaaattattgaaaacttggttgatacactcttccatgttggttaaaatttattgaaaactacaaaatcaagagaggttattatcatttctcatgtatgtgttgatttcatcatgccctgatgaaaaaaaatacaggttgcttcatctacataccattgccatcctacttttcttaatcataacataaaacttggttgatacatccttattccaagtctactagaaatttggaactttggaagagtaagcatgggttgaacttgaatgggcccagaaatgtggttggatcactcttatattcaaggagtaataagggagaaatgtggttggaaggcttggggagatggaggngagtagggatctgcaccaggacttgggacacagattattgtttggggagattgggagcaaagggttgagaagttaggcaacaattgagtgctctggcacttggaaccccttcttatctttctccagatcatttcttttttgtagttgttaacattgntatgcattttcccaggtctcccttgtattcatgaactagtttgccaatacatatactcctattattagtccctgatacaaacttgataataaattcctaatttagatttatgggatttggaattgaaacaggttgaatcaaagaattttggtcttcttgcaaattggcaac

SEQ ID NO: 105052 - DNA, 529 bp, Glycine max
  Clone ID: PAT_MRT3847_6587C.1
cctaaaaaagggggctggggaaacccaaacgggggcagccagccagaaaagcaaaacgccaattaaaaaaaagaaaacaaaaaattgggtggcattcaggaacagaggggggggggggaaaaaagttagcttaaaaagaaacggttttcccaaaaaaaagcaggatttgtcccgggacccggaagaatgggaatggggcaggcttcaactaattcaaccttttggctagactgggcgtcagcactctctggaggggaatgggcagtcttggactcatcgaaccccaacaacggggggacatcaccattccataagcaaggggcagccaaaaacccaattacagaggggccaatatacaaaagagcaggcggggcagccggaaaccagttcatcacaccaatgggagggaccaagccaacaggggatcctacaaaggcacccttgaaatacgggggcgggttccctctagaacatcaaacgcgaaagccaaggctacaaaaataccgggggtaacaatatcaccaaggcc

SEQ ID NO: 105053 - DNA, 125 bp, Glycine max
  Clone ID: PAT_MRT3847_65880C.1
ctactagtgcgcgtcgggctcccagaagactacaccagaccgagacctgcaggcataccattatatccctatagacgagaactttattagagcgtgagacgtaactataggtcagagcgagatgg

SEQ ID NO: 105054 - DNA, 174 bp, Glycine max
  Clone ID: PAT_MRT3847_65881C.1
attaacaacactccattccataaaacccatgttggcctcaatcccttaaccattaatcgcattgtcctcagacgaccacattacacgaacagaacggtcgcaacctacaaacagaatggtaatgcaaaacttgtgcataagatatcggggttgtcctaacactgattaagagcc

SEQ ID NO: 105055 - DNA, 242 bp, Glycine max
  Clone ID: PAT_MRT3847_65882C.1
tactgttcagtgcttagagaattactatccccgggtggggtttttacaaggctagagagcgtgacaaacaattgacaacttggcaagggacataatgctgaacgcacccttgaatgtatatgaaatgtgtcgttgatactcaccgtattcaattatacaccaagtaaatagacatgatcactcgccgcgcatacggacatagggaggttattaaaggaaaattgatattacccaaatttact

SEQ ID NO: 105056 - DNA, 577 bp, Glycine max
  Clone ID: PAT_MRT3847_65883C.1
ggctcgagctcgagccgaatcggctcgagctgaaagtcaaaacagtaatagttcaagtagtgacaaagatactttgatgtcaaatgagaaaaacattgcaacagcaggaccaaagtgtgataacgaagccactgagatggatcaaacatcaatcgatgatgatggctcagatgaagaaagtggttcttgtaatgtcaatgccaaaacagctgagcaagaggtggttgaaccatctcataacaaacaccattctaacgttgaatctaagcagccaaaaacaattagaaatataatgatggcattgaaggaaggaaaagttagagaagcaacttctccaatgagaggcaaccgcataaagcctagtggcctatcaacacataaaataagcacagagacattatctaaattgcctaagcctacttttattgctcctagtatgaagcctaatttagaatcacatgctgcacttgcaagggcaagccctgaccctgcataaagaatgatgggatcacattatccaaagcatcagattctgatgacagaagcctcaccaaaagtaaagctagacatgatttac

SEQ ID NO: 105057 - DNA, 186 bp, Glycine max
  Clone ID: PAT_MRT3847_65884C.1
catcacttcatctcatcataatgctcggtttcatttaaagaagatgcggatcataaacatctccttcttaataccttaattaactactaacctcaacacctttaacacacttctttctaacttcatctcaaccttcatatactcaatcacactctcaatcttctacatctcctacaacaatctcac

SEQ ID NO: 105058 - DNA, 415 bp, Glycine max
  Clone ID: PAT_MRT3847_65885C.1
ggggaccacccaaaaatgccgggcatatggttggaattttacttcccctaatttataccgggggggaataataaaagaggggcccgttaaaaatgcaaaaggccatgaaactcgaaacatctaccggggaacaaatttaaaacttgaagggccacggcccccacgtggattaaccaagaatttttttttttcaagttaaaacctaggggtgggtttaaaaggctggcaccgccccttttgaccccttaaagccgtttcaataaataaggcaggccaagcttctttttatcaaggggcccaccataaataaccagtagaaaccgaaatttttcctgtccaccgttggcccaaaggaccaagctgggtctatttaaccccccctaaaaggcccctgctcataaaatggtggcccccc

SEQ ID NO: 105059 - DNA, 628 bp, Glycine max
  Clone ID: PAT_MRT3847_65886C.1
cttggatgctggacgctctctacaggtagatggtccttatctacgggctacatgacaagctccggcagcaccacgacgcaacatcagcaagatacaaaaggaactcttagattatcttggaccccaggcactatagggactactagtttccatgctccaacctcaccctagcaaccctttagcaggcgccatgtatagaaacataccaactgctacggtctccgaacacggcggggatcaggtgatgatgatacacatcaccctattgcctcaacaccaccaccattatcagaagtatatgttgtaggcgtaactgatagcaaatgctgtgacggtcagggaacactacgagatgctaacccaggtgtcccaaagtgctggttttgctgatcatatgactccttcttcggctaggggaacatacaataacgtttaccagatgcagcagcaacaacaggacggggcacttcaccaacataatcatcctcttcacatgcgctattgcggctcatctacttcttcctccgaagatgtaggcaacaaacacatcatgagtcacaacttgatctacatcggcaaccttctgaaagcgaggagtgttagagtgttgctccatcttgttgacttt

SEQ ID NO: 105060 - DNA, 432 bp, Glycine max
  Clone ID: PAT_MRT3847_65887C.1
accacgcgtccggttttagtttttaatcctaaaaaattcaaaacaacaatcaacatatgcacgggtgttaccaagaatatgactatatgcatgtgtaaacattctaaatgtgtttaagctcactgcatatgttgagattgttatgccttgatggatatgaacttgcgatgaatctttcttctttttgcttactctcttgaaaatatatcatttttaaaattaggcttgctgctataagaatttggtttggttaccaaacacaagaaaggtaatattttttgtaatatatcccttgctgttctaagaatttggtttggttatatggacctggtacgctgtagagaagaggttagccttcccccaaaaatgaggttccttttaaattttccgtgctatcaatgagcaaacatctatcatgaaagtttttccctt

SEQ ID NO: 105061 - DNA, 419 bp, Glycine max
  Clone ID: PAT_MRT3847_65888C.1
ggttttagggttttttcctcctttattaattttttgcacttttttgttttttttcttaccctaaccctctttgagcaactgaaacaagagaacttcgctcatactgcgaatattttcaagggtactgtaaacaataaatggttccctccccctcgtcatcggaaggggcgtgtttctggcaattgaaagagattcccgaatccatacatggtttcaaagggtatggatactgaacgtgatgtgaccattttcattgaccactgctttgagatcaaggccccttctctagcaaccttggatggcgggcttcttggcctcattaatcacttcacagagcctgggtgttgagggggtttgatcggagaaacaaggacccgctttctttgtatcttgagaatggcgctttgtcttttagcctt

SEQ ID NO: 105062 - DNA, 318 bp, Glycine max
  Clone ID: PAT_MRT3847_65889C.1
gaaggttttgtgccgttgtcgctgctcatcctccataacctccgaactctactcctaataacgacgccatgctgaagacacatggttcgtcacctgctcgcatcctcatgtctcacctcatgaggtactggtgggctgagaggtcgatttcaatctcccatcttgagaatgattttcaggtcccttttgccggttgagcgcatgccaggggaattgtccgtgaggggcgaggtattgaaactaagcaggggaactctgctattcgtaagtgtgccagcgttcaacttatcaataatgggaactgaattgcagcttttg

SEQ ID NO: 105063 - DNA, 440 bp, Glycine max
  Clone ID: PAT_MRT3847_6588C.1
tcatcactgtatgacgtcctccttctttgggggggggggggggggggggggggggggggggggggggggggggggggggaccttagcccccccaaaagacagcactacaaagggaaaacggggagtaggaataacgctgaactgtaaggaggctgggtaacgagagcccaaacaagcccagtagggaccctaaggtttaaattataccggccaaggatcgcaataggcccttaatgagggccccaaagactggagcttttgggtagctaaaaccgaacgcggcattaactactattattgccgggccaacagtaggaattatggggggcgttaataccggctttgggcagtgctatgcggccaccttggctaggccggctgcaaaccgcctggctttggtgaggtgggcagcctataaaaaagccttggaaaactggggg

SEQ ID NO: 105064 - DNA, 339 bp, Glycine max
  Clone ID: PAT_MRT3847_65890C.1
tcgcccacgcgtttggaatgatgttggtgttcctactgccattgatacaaagcaaaaggatgctcttaaggaagaacccgttgacaacagtccttcaaagtcaacatcatctggacctgtttgtggaacaactttttttaaagttttcaaaggggatgagataattaaatgatcaagcaatgtcattttaatactgcacctttcaaataaagtgaaggttgaaaatgaaccaaaagttgtcaccaaagatggaaatgggttctgtatctaaaaataattgaccttcaaataggttcacccttcatattttaaaaggccgggtctttcaaaaccactttt

SEQ ID NO: 105065 - DNA, 455 bp, Glycine max
  Clone ID: PAT_MRT3847_65891C.1
cccacgcgtccgcatttatggaatttagtctgcttttaattttaaaaaaaaaaaaaaaaaaaaaaaaaaaaaaaaaaaaaaaaaaaaaaaaaaaaaaaaaaaaaaaaaaaaaaaaaaaaaataaaaaaacaaaaaaaaaaaaaaaaaaagaagccaacaaaaaaaaggtaaatatatgatgcaaagccaaatgctaaacaaaagctagcctaggaaaaccctaaaaataggcgactgctttgtctataacaaaatcctttttgggacagaaggggtaataactatattatcggcacaaaaaatacatcccaataggggcggcattaaaaaaagggaatgtgacaaaacctttggcggtaaaaaaaaaaaacggcgggttaaaaaagaccacccctttaacgcaacctggaaaaaaaatcaaaaaaaaacccctacaaaaaaaaaatccttttttc

SEQ ID NO: 105066 - DNA, 494 bp, Glycine max
  Clone ID: PAT_MRT3847_65892C.1
cctaggtctggacagtcctcttctaggcagcatgcatcaaggccggaagcaacacctttggattttgtggtccggcccgagtctaaaattgatccagaagaaattagagcacgagcaaaacaagctgcacaagatcagcagcgtatgaaggttggtgttttattttttaagttctgacatttatgattgttttaatcctgttttgtggctctttaagcacaatatattgtgcaaatggcttttaactgaatgatttttttgagttttatctttgctccatctttacaactttcaaccaaatcctagccagatccacttaaactttttgttggtttgggaccgtagtggtgaagtttctagcatacgggactaataagaatgtggctttttagctaatatatgtatgtataaacaaaacactagaattatagtcatttcatatcaatctttgataaaatctgcaatatcatctgcggtgtcttcctctaattctt

SEQ ID NO: 105067 - DNA, 579 bp, Glycine max
  Clone ID: PAT_MRT3847_65893C.1
caaagagaaaattgtatattaactcaggatataatctgaagcatttacaccccttgttaccaaagtacaagtttccttcccttccccctcattgcatttttgcaaggtaaggcacgtcatattttggttttgacccttgttttcataaaaaccctgtagtatattgagaagaaaatctaataaaaacataacttttaagagacctaatcaaaactgagtgagagatccttatggttgcttttctggcttccataaaaatttcattgccttgtgttccttgaaaatgtcaaacctaaatttctaccatatatgagtctctcttgcggagttttggttgtaatggtatatcctggttcctgctgtttcctttgatctttttccatgatctggacgtgaaagccatttggaaactgtaaacccggagttcgaaggatgtttcctcctttgatgggtcgccacctaaaatattcatatattaattacttagagagattttgcatgtcaatttaagttcacacgcatggcggttggcatttcataatcttacctgtacttggttaccaagctatgaataaacat

SEQ ID NO: 105068 - DNA, 454 bp, Glycine max
  Clone ID: PAT_MRT3847_65894C.1
ccctcccttaatttcaccttcaatttcttattagtatatattttaaactttgctagattgtttcctaaacacacaacactctcttattttcccctctgcttgtagaaagcagaagggcgaaatatttcgttaatttagttaattatttccctttcgttctccatagtccataatctctctctccacataacacgatggctgaaaattctatgatcattagcattgaccaaaaagcaatggttacccctcatgaagaacctaattataacatcactcgttcttccctcaagaattccatgaggccgaagaacttcttcaaggtggcgctgttcatgatgcgagggcgttctcgtaaatccaaaatgctcgctgtggatgacgagtccaagagcatatggaggaagctcgtggggtccatgaggccattgcacctacaaagcaaccatgacgatga

SEQ ID NO: 105069 - DNA, 1490 bp, Glycine max
  Clone ID: PAT_MRT3847_65895C.1
ctcactaccaaaaagtaatatcttctgaaaaggaaaggaagaagaaaactcccaagtatcattgtctgattgacaaattgtatctggaactgtttttatcaaacatttacatgctctgagtagaatgaacatcctatattttctcttttcacacctacggctctcatttatgctaatccagctattatggatggattaggttcgccatcccagtggctgagggagctgagatgggactcccagggcttaaatccaataagccttcttattgactgtgccaaatgtgttgcatctggaagcatcaagaatgcagatattggccttgagtacatatctcagatttcatctcctgatggtaatgcagtgcaaaggatggtcacttatttcagtgaagcacttggttacaggataataaaaaatttgcctggtgtatataagtctctcaatccatcaaaaacatcattatcttctgaagatatccttgttcagaaatacttctatgaactgtgtccatttttgaagttctcatacctgatcacaaaccatgccattgctgaggccatggagtgcgaaaaggtggttcacattattgatcttcactgttgtgagccaactcaatggatagatcttctactaactttcaaaaaccgtcagggaggtccaccccatctgaaaattacaggaattcacgagaagaaagaagtattagaccaaatgaactttcatttgacaactgaagctgggaaattggattttcctttgcagttctatccagttgttagcaaactggaagatgttgactttgagaagttgcctgtaaagataggagatgctcttgcaatcacttctgttcttcagctgcattctcttcttgccactgatgatgatatggcagggaggatctcaccggctgcggcagcatctatgaatgtgcagagagcactgcatatgggtcaaaggacttttgcagagtggcttgagagagatatgatcaatgcatataccttgagtcctgattctgctttgtcaccgctttccttgggtgcctcacctaagatggggatctttctcaatgctattagaaaacttcaaccaaaactagtagtgattactgaacaagaatcaaatctgaatggttccaatttgatggagagagttgatagagcattgtacttttacagtgcattgtttgactgcttggactctactgttatgaaaacatcagtagagaggcaaaaacttgagagcaagcttcttggagagcagataaagaacatcattgcttgtgagggtgttgatagaaaggagagacatgagaaactcgagaaatggattcgaagacttgaaatggctggttttgaaaaggtacctttgagctacaatgggaggttagaagcaaagaatctgttgcagagatatagtaataaatacaaatttcgagaagagaatgattgtttacttgtctgctggagtgacagaccattgtttta

SEQ ID NO: 105070 - DNA, 400 bp, Glycine max
  Clone ID: PAT_MRT3847_65896C.1
accaggtcttccttttcggggggcggtgcgcggccccctcgacttttctacctctatttgcacttccattcaccacttccaccttatcctgactggcttctcccaacaattcattatttttttgcaccttaccaatgaagaccaaaccttccggttcccccctcccccccttacccgacatttttaatttctcccagaccttctccttttattccaccgtcaatttgcccttttctgcttctgggactgataacttccccttttggaccttccggcttgcaccttttcccccccgttcgtttgtcacaccaaagaccttcttttcgttgcgttcttcattcacaacccgcaaattcttgtcggcttttcttaaccgaccaataaactttttaacaccctt

SEQ ID NO: 105071 - DNA, 319 bp, Glycine max
  unsure (1)..(319): unsure at all n locations
  Clone ID: PAT_MRT3847_65897C.1
gaaaagagggtcgaccgcacgcgttcgcccacgcgtccttcacaacagtggtttgtgtttccaaaaagagagagtggaaaagatggcgcggttgatcacagtggggtggtgcacanatactgaactattattctccgcggccggtgcgtcttgggtggaggaggcggctaatcctatacgaatggtgttttgtctttatgccgatgttgttctgttgatcggggagtgccggcgtgcgttgaaattatctaggtttgtgagcaggtactgtaagagttatcaaatctttgaatatatgaacgataggtactatatattt

SEQ ID NO: 105072 - DNA, 1637 bp, Glycine max
  Clone ID: PAT_MRT3847_65898C.1
ggctcgagaaaagtgcttatagagaagcttggttatatgagataacaagatcatggaattggaagctgatcatcaaaatgggattcgaagcagactcaatttccctctgcagctgttagagaaaaaggacattgatgacgtcacggaacaaccttgttccaccaccagcgtggtaactgctactactactgctattactactactactacttcagataacaacgacctccacttggcggagcagtccaagaagcctccgccgaaacggagttccaccaaggaccgccacacgaaggtcgatgggcgaggccgccggatccgcatgccggcggcctgcgctgccagagtgttccagctcacgcgtgagctgggacataagtctgacggcgagaccatcgagtggctcctccagcaggcggagcccgccgtcatcgccgccactgggacaggcaccattcccgccaacttcacctccctcaacatctccctccgcagctctggctccaccatgtcggccccgtcgcactacttccgcggaaactacttcaaccctagcacgttctccacgtccgccgccgcggcggcggcggctcagctgagaagccgcgcagagtgggaccggagcatgagcatggtgatggaggattctcgaaggagcatgctggagaacacttcttcaatctccgcaattttgaatttcaaccctatgggtaacgttaatgtaattcaacaagcgaaacaagagcttcgggaagaatccggcgggggcggcggtcttgaatcggtggcttctgattccgatggaagcttagggagaaagagaaggccagagcaagaactatcacaaatgggaagctatttgatacaatcaagcacagggtcgcttccggcgagccacgcttccaatacggcggcgttttggatggtggcgggtcacggcaaccaagccatgagtggtggtggcagcggcggcggtggcaacaatggtagcagcgataataatcccatttgggcaattccctctgttgggaatagtggtgtgtatagaggagctatgtctgctccaggtggcattcatttcatgaatttcgcttctccgatgaaccttatgcccggaggtcaactaggttccggtatcgttggtggcggtggcggcggtggtggcaacggcggtgctcaacttctaagtgaaagtaacttaggcatgcttgcagcccttaatgcctacaggcagattccggcgaacggcgtctcggagcctccgggcagtgccgggcaacatcacggcggagacgatggacgtgattccaccagtcaacattcctgagggtcaaaataatcacaagtgtatgatctgatgctagcttcttaatttttcttttaattactatattattcctagtgctattattactactattagctctactactaattagtgatttgcataatatatattaaatacgtaattatatatgttatgtccatttgcaaaaatatgcaagaagcgcaagtttgattgctttggtatattgagttcagtttgcggttttggttggacctttggtgtgattttgctgaggttgatcatgttagggtttaattcgagaagaaattaatacacgtatattttaacc

SEQ ID NO: 105073 - DNA, 190 bp, Glycine max
  unsure (1)..(190): unsure at all n locations
  Clone ID: PAT_MRT3847_65899C.1
gcnaggttttttgaancggttgccgatgatttgctaactctcaatanaaatcttcantcgattgnnngngcagaaaatcctgttttgatatccgcngnngagcagatttttagtgcggtgggaagaggntgagaccagctctggtgtncttggtgtcaagggcgantgccnganttacttgggnttganc

SEQ ID NO: 105074 - DNA, 321 bp, Glycine max
  Clone ID: PAT_MRT3847_6589C.1
cccgggagaccacaaggggccaagggggccagaggaacgaacaaggggcggtcgccccgagcccaggcaggcaaggccaaaaagctcggcccaccagcccccgaaaaacggggagggccaagcacgaggaagaccgacaccacaacaaacacaccccggaagcccaaggaacggaccagaccgggccaagcaccagggcccaaccccgacgaaacaaacgacaaccgcacggcgaaaccccagccaacaacaccggaacaccgatggcgccgagaccgaaccagaaacccgggccagaaaccgcgagcccggagggaccca

SEQ ID NO: 105075 - DNA, 343 bp, Glycine max
  Clone ID: PAT_MRT3847_658C.1
agctcgagcttgcgtctcttccccttcttatcttattggacggattcttgccgtcggctattgaggcttcggggccaatcaccccgagacacgtgtctttcttgctgggggttattccaggacttgatgcctggatatatccacattgctaatagtacaggacactctcatcttcttcgaaggttcatacctatgctagtcttcaatagttcagcaacgttgcaagacaagaagattatcggtccatgtatctggaactctggcttacacgatcacgcataacttaaattccgttcatgctctgtcaaagaaaattggaataaccctttgaccagggatgact

SEQ ID NO: 105076 - DNA, 2000 bp, Glycine max
  Clone ID: PAT_MRT3847_65900C.1
accattggtaaagtatacgtattgaaccctaacatgatcatcctcagcaaaaaaatcacaccacaatctgaactcaataagcaatcaaacttgcgcttcttgcatgtttttgcaaatggacataacatatataattacgtatttaatatatttatatatatatatatatatatatatatatatatatatatatatatatatatatatattatagaaaccactaattagttgtagaactaatagtagtaatagtagcactagtaataatatactagtaattaaaagaaaaattaagaagctagcatcagatcatacacttgtgattatttttaccctcaggaatgttgaccggaggaatcacgtccatcgtctccgccgtgaggttgcccggcgctggccggagactccgagacgccgttagccggaatctgcctgtaggcattaagggctgcaagcatgcctaagttactttcacttagaagttgagaaccactgttgccgccaccacttccgcccccaaccatggcggaacctagttgagctccggggataaggttcatcggagaagcaaaattcatgaaatgaatgccacctggggcagacatagctcctctatacacaccgctattcccaacagagggaattgcccaaatgggattatcgctgctaccatcgctgccaccaccaccactcatggcttggttgccgtgaccggccaccatccaaaacgccgccgtattggaagcgtggctcgacggaagcgaccctgtgcttgattgtatcaagtagcttcccatttgtgatagctcttgctctggccttctctttctccctaagcttccatcggaatccgaagccaccgaatcaagactgccgccgccaccggcggcggcggattcttctcgaagctcttgtttcgcttgttgaattacattgacgttacccatagggttgaaattcaaaattgcggagatggaagaagtgttctccagcatgctcctacgagaatcctccatcaccatgctcatgttccggtcccactccgcgcggctccttagctgtgccaccgccgccgcggaagcagcggcggctgaggtggagaacgtgctagggttgaagtagtttccgcggaagtagtgagaaggcgccgacatggtggagccggagctgcggagggagatgttaagggaggtgaagttggcgggaatggtgccggtgcctgtggcagcgatgaccgccggctccgcctgctggaggagccactcgatggtctcaccatcagacttatgtcccagctcacgcgtgagttggaacactcttgcggcgcaggccgctggcatgcgaatccggcggcctcgcccatcgaccttcgtgtggcggtctttcgtggaactccgctttggcggaggcttcttcgactgctccgccacgtggaggtcgttgttaccagaagtaatagtagcagcagcagtagttaccacgctggtggtggaacaaggttgttcggtgacgtcatcaacgtcctttttctctaacagctgcagagggaaattgggcctgcttcggatcccattttgatgatcagcctccaattccatgatcttgttatctcatataaccaagcttctctataagcactttttttttttaatgaaaaaaaagaagaaaaataaatgaattggtggggtattaaaaaaaaaaagtctcactctttctctttctcctatctggtagctagcagctatagtggaagtagtagtagtactgccactagatttctttttctatattttttttttcctatgtatgttgttgtgtttgtgtgtagtagctaggaggtgatgaggtgaccctcaatttgtatcgcttagtgggctagtgggtctctcttttctctgtttgtgtgttttgtggagcatggaattcctttcagatgggagattgcagctgagttgttctctgtgtggagagagagagagagagagagagagagacgaatt

SEQ ID NO: 105077 - DNA, 3930 bp, Glycine max
  Clone ID: PAT_MRT3847_65901C.1
actgagcctataccttgtgtgcacgaggttgggttggagctgaatccgcgaaagcttgttggatggcaggttcagaacgcagtagtagtagggtttggcactacgaattcgacgttttcctcagctttagaggagaagacaccaggctcggtttcgttggaaatctctacaaagctctgacggaaaagggatttcataccttctttcgcgagaagcatgtgagaggagaagaaatcgcagcatcaccatatgtggtggagaaagcaattcaacattcaagagtttttgttgtagtgttctctcagaactacgcttcttctacacggtgcttggaggagcttctcagtatccttcggttctcccaggataaccgtcgaccggttctgccggttttctattacgttgatccctccgatgtgggacttcagacggggatgtatggagaagcgctcgctatgcatgagaaaagattcaactctgagtcagacaaagtcatgaaatggaggaaagcactctgtgaagctgctgccttgtctggttggcctttcaaacatggggatggatatgaatacgagttgattgagaagatcgttgagggtgtctccaagaagattaaccgcccggttggcctccagtatcgaatgcttgaactgaacgggcttctggatgctgcatctctcagtggagtccatttgatagggatatatggtgtgggaggcattggtaaaacaacacttgctcgtgcactctatgattctgttgctgttcaatttgatgctttatgtttccttgatgaagtgagagaaaatgcaatgaaacatggcttggtgcatctccaacagaccattcttgctgaaacagtcggagagaaggatattcgactgccaagtgtcaagcaaggaattacactactaaagcagaggctccaagagaagagggttcttttggttcttgatgatatcaatgagtcagagcagttgaaggcacttgttggaagcccaggttggtttggtcctggaagcagagtcatcattacaacccgagacagacagttgcttgagagtcacggggttgagaaaatatatgaggtagaaaatttagccgatggtgaagctctcgaattgctatgttggaaggctttcaaaactgacaaagtatatccagatttcattaataaaatataccgtgcactaacttatgcttctggccttccattggctcttgaagttataggttcaaacttgtttggaagagaaatagtagaatgggaatataccctagatctgtacgaaaaaatacatgataaagatatacaaaagatacttaagatatcctttgatgctttggatgaacatgagaaggatctttttcttgacattgcatgcttcttcaagggatgtaaattagcacaagttgaatcaatagttagtggtcgttacggtgacagcttgaaagctaccattgacgtgttgcttgaaaaaacacttataaagattgatgagcatggtcgtgtgaagatgcatgatttgatacaacaaatgggaagagaaattgttcgacaggaatcaccaaaacacccaggtaattgcagtaggttatggtctcctgaagatgtagctgatgttttgtaaggaaatacggtgagtaatactgatgtctttaaccttacttttacgtattgattttttaccattacaattatgcacgttagatgacatcgcattactttacagttacattacattgagtttctaccattttattgactgtattattcactattgattttttcccctttataatttgtaaacttcttgaaatatgcatgtcaatttccctacatacatacatacatgtattgtggttgactcgtgttttttgtgttaaaagggaacacgtaatattcaaagtatagttctagatttctccaaacctgaagaagtggtacaatgggacggaatggccttcatgaagatgaaaaacctcacaacacttattattagaaaggagtgtttttctgaagatccgaaaaaacttccaaatagcttaagagtgctggaatggcggggttatccttcaaagtctttaccatctgatttcagccagagaaactagctatattgaaattaccttctagctgctttatgtcacttgagttgccgaagttttctcacatgagtgttttgagttttgataagtttaaatttttaacacagatacctgatttatctggcacccccaatttaaaagaattatcttttgttttatgtgagaatttagttgaaattcatgaatcggttggattcctagataaacttaaaagcatgaactttgagggctgcagcaagcttgagacttttccaccaatcaagttaacctctcttgaaagcatcaatctttcatattgttctagtcttgtgagttttccggaaatattaggaaaaatggaatacactgccataagtatattgccataacttttccgactttgaagtttacaactacacagatgtggaatggttcagttgccaagtagcattgtcatgttgtcagaacttgaggtgttgagtatttcgcaatgtgaaggactgcaaaaatcaaaacaggacaaagatttaaaaaatgagagattaattgtgtcgtcttcaaatgtggaacatattgatttccaacaaacatagagttattgtctgcaacaaactgtagatccttgactgcctcgtgtaggagaatgttgcaaaaacaggagttgcacgaggctggaaacaagagattttgttttccaggaactaggattccagaatggtctgagcattctagtgatatttatctgccttgctggactcgtgcataagcacccttttggatttaaatctattgtgtccattaatggtgataaaatgaagacagagttgcaagctaaatggttttattttgagttcccagtattaactgatcatatacttttggtggaagacagatagaatttcaaataatgtggatgaggtactttcggaaaatgaatggaagcatgtagtggtctctattgatatttgatttcaaatggaacccaatagaaccatttgttgtgcaaattggactccatgtaatcaagccaaaaagtagcatggatgatattcgattcactgatccttataaaccaaccattttttaaagaaaaacatattgttggacatgggagtttcgcagagaccattgtgcagatgcagaaagatttggtgtcacttgattcattgcaaccacttttaaaagggtggagagtggtattcattgcttcaacctctagactaaaagataatgtcaattgggattcaaatttgatagtatcatcccggatgagtagcactgctggtgtctaaggcaggtttgcttgatttttttttccctgtgtgctatcactactagtaatgacaagaaaatgtcaaaaattattctttgtgaaatatatatgttttgacaaatatgtttgaaacataatgtgttgaagaggaatgctaactacattctctttgacactttttaatactttttcaatgattagcttaaatttattagaaatcacctattttgatgggttccacttttaaatcaggagatagaagtgggacccaccaaaattggtggtttccaataaatttcaatccatcattgagagggtgtttgagagtgttgttcacagtcccctcttttgagatatcttattcaaatcaatatttgcaccaagctaaaacacttgcatgaaaagagtaaaataggtacactaatgttgaacagttaaaccattgagccgttttctcatgcaccttcaaaagtggttttggattctgttgtgtttttgctgtaatattgccagtgatggagacaagcgatatgttggcatttatttccccttctgtatgaataacttcg

SEQ ID NO: 105078 - DNA, 127 bp, Glycine max
  Clone ID: PAT_MRT3847_65902C.1
accactacaaaaagaggaaggatgggtgcgtggcaaaacctaaaggacagaatatcgactgggctgagtagataccttacttagacatgggcatgagtgacaaatacttcatctggcagggaacact

SEQ ID NO: 105079 - DNA, 277 bp, Glycine max
  Clone ID: PAT_MRT3847_65903C.1
gataattttttgcaaacatttccaagctcttaatgatttcagaagcaaagagaacccgttgtttcttgtatataactcaataaatctgaaagcgtgtctaaggctctatcatcgtcttctttggatccatagttgatgcttagatctcatcaggtgcaaagctgacagcttgcaacttgtaatcttcaattaactgaaggtagggatcaaccttctttaagagaaatattccataaagaaaaagcaagctgaaaactccgaactagtacctcatgaa

SEQ ID NO: 105080 - DNA, 205 bp, Glycine max
  Clone ID: PAT_MRT3847_65904C.1
ttctacagaagttgacgcagatgataagaatccatggtttgataggacatagtcccttgttgctgtggcttctaacaccactgacagatcaaaggatagatcatattataagagtgtacggaggcttgctcataatcacgaggctgcaagaacaagtctgttaagaaacaaagcacatgttcgacagctcgtaagtagtcgcata

SEQ ID NO: 105081 - DNA, 529 bp, Glycine max
  Clone ID: PAT_MRT3847_65905C.1
ctaatatttaatgttctcgtctttcgggcaccattcctcagggggtttcacacaagactgtttggaatcaaatggcatcagttagaacaccattgaattttgattctagcaagcagagcttttgtcaattctctattgaccttctccgtggatgaatcttagtggacaaaactgcacaccggatcacacttatacaaaattctccaattagtaacttgttgagagttgctgcttggaacaaaggctgtttaatggtcaagattgtcatgtctgtgaatgcatccatcaaaatgagtgattgggcctcattggtactagtatttctatcaaacatcaacagctcagagcattgtgatgcatgtaagtggacaaaatcagaaccacattcctgtgaattgatcttaccaatagaggtatgtggacctaataatggttaaagaaacgtggacctctgagtggacaaatcaaacttcatagaatttaattttccttattgacattcccaaacagtctacagtattcgtttttc

SEQ ID NO: 105082 - DNA, 512 bp, Glycine max
  Clone ID: PAT_MRT3847_65906C.1
tggtgtctactttacccatcaagatctcacgggcaaaagccagctggcgggaattctacagttgtcacttgatcatcttccctatgcggattcacaacatactacatctgacttgtctaaggggagttgctactggctctaggaaccctttatagttataatgcatgtcaaacaatacaggagttgttatgcctactccggctccatatgacctatcctcaagatcccggcctcaatacatttatggagggggatggaaaagcacaaacagacaatcgatctctgactgctgaatcattggataatgctgatgataaacacacagctgactagcgcccccagattaccatagcgtgattcgtctgggaccccatatgctccagttgatacagatgctatcagaggcggtgatcactattacatgtgatcttgctgatcccgatggcctactacagcagctcaaggggttgccatcaccacatgcagatggggctatggtcaactgtgggtgg

SEQ ID NO: 105083 - DNA, 450 bp, Glycine max
  Clone ID: PAT_MRT3847_65907C.1
aaatgttattatttttttgaccgacaccacactttttgggttttttttttgggggccaaaatggaaccccattccaattaattaaaaaaaaacccaatagcttgggggagggggggaaaaaaatttttaaaaccccaaaaactaacggcccaaggttgggccctaaaaaataacatttacatttataccggggccttcgggtttttggaccatatacccagggcaagccccatttttttttttttttaacccccggggaggttttttttgaagggggagaaaagcccccttcaaaaaaaacttctggtggggtcaaagccaaagccccccggagttttgttatttatgccggatcctgaagggcccaatcccctggcaatggcctctaaaaccccaagggttgtgccttttggaggggggcccttgcccgggcccgggccccggccgggg

SEQ ID NO: 105084 - DNA, 280 bp, Glycine max
  unsure (1)..(280): unsure at all n locations
  Clone ID: PAT_MRT3847_65908C.1
gtgtggtggttttttttttgttggttttttnttgcaccaagcccccctttttttccataaataatatacccctgccaccaagtttacagaagcaacgttttttcccaaaacaaatttttgggccccaaagggggcaaaaataggggtaaaattttgggtgggtgaggcccacccaatttgggaaacctttccttttacagtttttagggcgcgaacggggtgaaacgcggaacagggttgcacttgggggggttgggcaaaaaaacagtcccccttcttt

SEQ ID NO: 105085 - DNA, 508 bp, Glycine max
  unsure (1)..(508): unsure at all n locations
  Clone ID: PAT_MRT3847_65909C.1
agaacataatggtatagcagtttcatcattccacgtaatactgtgcatgctttaaacactacagagggattcataaatcacaatacaaggtgagtataaagaaaacagtagtaaaagtagcagaaaatatttgacaacctaatcgttcttgttgctattgttagtcgtcatctccagctagctcggtgtcacatggggagtgaaagtagagactctatatacacagccacttgggatggatatggatgattggaataggatctatgctcttgcacctgtcccttgtcattacattttgccaatccagttccaccatatgtcccaacaatatcaccaccttttgtagagcataggggaaacaaaagaatgttttcagaagacacaacaatagtcttagtccaagacgagngcactttgtattccttcattacccatacttgaactgagnggttccggcccacagcacttatactatgcaattcttcgagcacccccaaccccaattcgc

SEQ ID NO: 105086 - DNA, 205 bp, Glycine max
  Clone ID: PAT_MRT3847_6590C.1
tgttctccaaagcaaggatggctccccgcaaatccttgactactgtgtcactgccactcaacatgttgaatcggaggatccctttgccaatacttgttccatgttggtgacacaatcggctgccaagacaaacgactgggctggtgatggaaccactacctcggttggtcttgctcatggtcttataccataaggagtccgagtt

SEQ ID NO: 105087 - DNA, 1096 bp, Glycine max
  Clone ID: PAT_MRT3847_65910C.1
gccaattaaggattgtctgtttgtgcctatgatgtttgggcacgccagaaaagcaaggaattccagtagcctcaatccaatcagttgcatgaaaaaacttagatggtcagaaccaacgtgcagcttatgaattgaggttccgaatcccagcccatttcacacgcttggatttgtgtgaaccggggccaatgttgtggtactcggcatagaagcaagtatccataccagaaggaccctctggtccttgccatggcaaatacccatcagcgtcaatcaaatcatcattgtatgtgtccatgatgttggtcctagagtaattcttccattggcgagctaggtattgtctttttgtgcctatggtgtttcggcacgccaggaaagcaaggaattccagtaacctcaatccaatcagttccatgaaaaaacttagatggtgagaaccaacgtgcagcttttgaattgaggttccaaatcccagcccatttcacacgcttggatttgtctgaaccggggccaatgttgtggtactcggcatagaagcaagtatccataccagaaggaccctctagtccttgccatggcaaatacccatcagcgtcaatcaaatcatcaatgtatgtgtccatgatgatggtcctagagtaattcttccatggacgagctaggtaagccttgttctcaaatctcacagagtagaactcagggtcagacacaatggatcccccttggattactattccagatggttgttgtatctcttttctaccttgtgcagtcacaatgcattgttggttctccaatggctttcggaccacgaaagtgcaattttggaaaatagcaagtgcattaccaaacacaaagtcaatggtacctgaaatcgtgcaatctctatagaattgacgcatggtgtgtacataaagagtgtcctgatacccatccattgagcaattgtagaaaatggacttatttgcttggactcttaatgatactgcttgatgcttctgtggtccagcagaattctccaaccccatattgatggccacaaagtaatctccttgaatagcaacagtggcagttctgtaagtgtttgttccat

SEQ ID NO: 105088 - DNA, 330 bp, Glycine max
  Clone ID: PAT_MRT3847_65911C.1
ccggaatttcctgttcttcccacgcgtttttctacgcgcccgcccacgcgaccgcccacgcgggcgtttcattcaaaacgctggacgctgtggttaacaactagggacgtagagtgcaatatgattatgctctcgataattttcctctggggacaacagtgctcacttgagaataacaactctttactttgcaagagaatttgggaccatcttggttgattatttatacaattagcaaccttaattttagaaatattcctaaccgcattacaattaggtgggcatcttgaatacctttgatggaattacaatcccccatcttttctaact

SEQ ID NO: 105089 - DNA, 285 bp, Glycine max
  unsure (1)..(285): unsure at all n locations
  Clone ID: PAT_MRT3847_65912C.1
anctanannccccanactnncnaannacagacaccagaatacacancacatatacacncatacanaaacaacacacacaaacacaccannancatccanaanantaacacanaancaaccacananaaaaaanccacacanacanntncanaccnacnannanaataannaaaacnanannacacacnnaanancnncaacnaataacnngnntnaaccacnagaancaccananaanagacaatcacncanacaaannacnnnnnananncacncgncacaaan

SEQ ID NO: 105090 - DNA, 729 bp, Glycine max
  unsure (1)..(729): unsure at all n locations
  Clone ID: PAT_MRT3847_65913C.1
catgaacgtacgtggattcgggatggtgagacaaccacgcaccctaccatttattggcatttaatttgtcatagttcacttgctccacggtgatattgttattgcatcggttaatgagaattgttttatatccccaaagggtaatactaatactcctttcatttcaaattgatggacgttttaaccttaaaaaaaatgcatattcattgttgcttttggttttaataaaacttttattttaaatttaaatcttaataaatatgattttctcggtcctttatatgaaaattaaataattaatttatcaagatcaataaaaatacactttaatgacactacaccttcaccataaactttatttttattcttaaaaatacactttaaattgtacgtagttattaacatttaatgacactacactttcaccaataaataagcatcacttgtattgttaatagatcaataaatgtgtcttgataatnggatttacaaaatgaatgataaaaacaatttaacaattaatgcatcttaaaatgagtttatgtttctttatcattatgagaaacaaatattttttcttataaaaaagnataaggagtattattttttaacaaataaatattaaatattattatcttgaaatcataataatgtatttatagaattaaaaaaagtgagtaagaattttttagtaaaaattgacccattataattattattacttcccta

SEQ ID NO: 105091 - DNA, 287 bp, Glycine max
  Clone ID: PAT_MRT3847_65914C.1
atgggcggtgtgggtaagaccacgcttgcccaacatgtatataatgacccaaggatagagggtaaattcgatatcaaagcttgggtttgtgtttcaaatgaatttgatgttttcaaggtaacaagaacaattcttgacacaattactaaatcagttgatgatagtagagagctagaaatggttcatggaagactgaaagaaaaattgacaggaaacaaattccttcttgttttggatgacgtatggaatgaaaaccgacataaatgggaaactgttcagagacctct

SEQ ID NO: 105092 - DNA, 369 bp, Glycine max
  Clone ID: PAT_MRT3847_65915C.1
cttacctcggctttcaactccgccataggaggtttctttctgaagtgtgcctttctcaaaacaggttggacgaagtcaatcatctcgttcttcaagccattctctgacaccaacttactcatctaaatgttctaactgtcctaaatgaacattctgcaccctgaacagactaacaccctactgctaccatgccatatgcgtcacacgattgtctccatttacaggtacaaacttctattccactgcacattttcacacaatctgcagtctcttaataataatacctgacatcgctcaccggttaagccatactattgccttgcgctttatccctatcttcctcactgtctaacgtatctgcttctatct

SEQ ID NO: 105093 - DNA, 187 bp, Glycine max
  Clone ID: PAT_MRT3847_65916C.1
gcccaatcctacattgtgataacaatcttgatagcaataacagagatcttgttcagtctctccctcaacaaatgctaggttgatagaaactcttagacaccatgggaatatctgaattatcgagcgaatcctgctctgatcgcatcctcgaatacataagcggcgccttcggcatgggagccgtggg

SEQ ID NO: 105094 - DNA, 204 bp, Glycine max
  Clone ID: PAT_MRT3847_65917C.1
gtggggttcatgagatcactatcctctgaagccacatagagggactccatatgagggagccggccttgcgtccgcaatttgagctccttggtgaaatgatggaacaggaacctttgcttttaaacgcccaccacatctggactctggatattgatcccgctgagctcttgagtagacagttcccttcacaagataccgttacta

SEQ ID NO: 105095 - DNA, 473 bp, Glycine max
  Clone ID: PAT_MRT3847_65918C.1
gaaggatacctatagtgttttagtgtgatggctgtgactagactcaatcgaaatgtttacgtatatcccttttagccgatttttttctctttttatattgcatttagtgttctcttcctctctatgctctaaagtctaaacttagggtttgtctaaggaatcatattgtgtgtttggtttgcagttgattacttaatggaatagataaaaaagcttgattgattcctatttgagtgttttggagagcgaatccctgtttgcattgatacaaacaggtttccaaacactaatatttgttattactcacagaagatacatcaaatcacagtaagatacatcaaatcacagtaaacaagagaacacacaaatataaatgcttgtctatttattttcccaactgtagttcactttgatgatgtatattgtatgttgtaatagaggcttgtagaataaactgatctttacacttcaat

SEQ ID NO: 105096 - DNA, 474 bp, Glycine max
  Clone ID: PAT_MRT3847_65919C.1
cttttttttttttttttttttttttttttttttttttttttttttttttttttttttttttttttttttggaaaaaggcccggtttaaaattgaatgggggggaaaaaccaccccaattggaagtttttccaatcaaaacccaaatcttgcaacaccaaaaaaaaaagcacctttttttttccttttttttctccccttttatggaaggcttaatcccaaaactaaaaccccggcctttttttataaaactcaggggcgaaaaaccccaaaggaaaaaaaaaaagccggtccccccttttttttatccaactttttatccccagttaactcagcaggagggggcccaaactcacccaattgggggtacttgaaagcaaaaaacatttcaaaatagggggggctttcacggggggaaaggttaaaaccatgcttccaaaacccataaacaccggggagagggagaaccctctgag

SEQ ID NO: 105097 - DNA, 323 bp, Glycine max
  Clone ID: PAT_MRT3847_6591C.1
agtttttattttttttttttttgttttttttgttttttctcttttttaaaaaaaaaaaggggaaggattaatgaaaaagttcacttcattttattgggaattccccatgtggtccctgggaaatccactaccgctggacaactgatttacaagcttagaggctttgaaaagggtgtacaacccaggggggcgaaggaaggtaaaaaaaaaaacagcacttttttgaagtttgaactaattctttacagacttttagataaccgggaatgtaaaaccacggacaatcattgttttggaaacatttgtttcgctaaggaggaaaa

SEQ ID NO: 105098 - DNA, 461 bp, Glycine max
  unsure (1)..(461): unsure at all n locations
  Clone ID: PAT_MRT3847_65920C.1
ggaaccaacgagttgaaactattaccttttttttccttaataattatcattatttgaatataagagacccaaatcctaatcactttaacttgatcctttcagcgggataaacccccttcgttgtacttctctttactttccgagtagattttttctgaatcttctctttgcctttatgactagatgccatacttggttgtggagctttttccccgccattcctccttaggtgcataatcatgaataacaaaccaacagcagctgcaccacccaatactgatcttagcagtagcctcttttgaggttttgcttttggtatttctttaccttcctcttctgttccagctaaattttcaaatatgtgcaccctctcatcttctggntttatttcttttttaagatgcaccacacgagtatgttctgaacgataaacaggatccttttcatattgacatgcttga

SEQ ID NO: 105099 - DNA, 548 bp, Glycine max
  Clone ID: PAT_MRT3847_65921C.1
aattgaatcaatattgattacaagatcattcgattattgattaataggaaatagaatattctaataataaatacaatattaggaataatatcaaaacataatctcactctccctcaagttggagcatatgtgtgatatgccccaaacttgttacaaacgtggtcaaccagatagaaaagaaggcccgcagtgacgatggagactagcgtgacgctcgttggagatgtgccatgcatcgtgtgcatgaacttcacacaccagggccctgcgtggggccgtgtgcaacggtgtttttagttggctgcgtgcattgacggcattgcggtcttcgacaatggcaacaggtattgttcacttgcgaaaaaagcaaaaagatccaccagggatgccttgagatggagggagagaagtcagtgtggcactagctggagatgcgtcacacgttgtgtgcgtgaacttcatgcgccaagacactatgactgttttttgagttggttgcgcgtggatgatgtgctgatcttcagaaaggtcattggtgcagaatgaca

SEQ ID NO: 105100 - DNA, 390 bp, Glycine max
  Clone ID: PAT_MRT3847_65922C.1
gtttgtgacagcttctgcagcaactgagaaggaaattttgcttgaattcaagggtttgtggagagaattgtgctttggaacactagcttggggggggtgttgtcctcgtcactttcggggttgaagaggttgaggatattggcgttgttcgggaaccgtttttcgggtggtattccagaagggtatggtgaacttcactcgttgtggaagatcaatttgagttccaatgctttgtctggttcgatccctgagttcattggtgattttcctagcattcggtttctagatttgtccaagaatggcttcactggggagataccttcggctttgtttaagtactgctacaaaaccaagttcgtttctctttctcataacaaccttgctggttca

SEQ ID NO: 105101 - DNA, 289 bp, Glycine max
  Clone ID: PAT_MRT3847_65923C.1
ttgacgcgtgggtaaaagctgcatcgaatattcccattagcaaggcttccgctactgcgacgcccgtgggcgctatcgaaattttcagcgatagtttgacctggacgaactatatgagaacaagggcaatccttaagacttacactattcatatcaaaactgtacttgcatatactcacctacaagttgaggccttcatagaaggctagaccatcttgaacagaacattaccgacatccatctagaacattcaaccaatcatgagcccatggctagagctaacgagaac

SEQ ID NO: 105102 - DNA, 262 bp, Glycine max
  unsure (1)..(262): unsure at all n locations
  Clone ID: PAT_MRT3847_65924C.1
actcataataatgaggccgataagttgcacccttttgggnnatngatgtcggaattcagagatggttctcatttaaggcgtgcacaatcttccaatagttcttgagactgggtgaccagggttcatttcnagatccattaattgatagagatgctgcttttgctgatcaaagctctgttggtggcatggctaatcagcctcctttcagggagacatgggctgatgaatatgggttaaataggcattttaatggtaatccaca

SEQ ID NO: 105103 - DNA, 787 bp, Glycine max
  unsure (1)..(787): unsure at all n locations
  Clone ID: PAT_MRT3847_65925C.1
aaaagccacaccacaaatgatttttttatttttattttcttaaggtgaagtacagaagtagcttatgtcaatagatactacttccacatttagatggcatgagctagatttcaaagtcatgaagttgatggttagctgggtttgagattgggatttctcactgacttgggacacagatatttcttcaagcctgataaatcaaggagcttcttgctaactgtatccctctccgaagaccctgagattagggtcctacggttacaaaactcaagcacatcagggaaaaatatcttccaatagaacgttgtcgtaaaccatgctggctctgtcaagtatgagtctccgcgacaagcgctattaacaattgatttggcagcttctgtgactgatcttatgggtatcaaactagcttgcacatctcttattagttgatcagaaaccatcttgccttccttgaataagaccttcccttgcgacatttctgattcaatcagccctggagtgactatagttatccctatgtctcttcccaattcaattcttagagtctcatataagctgatcactgctgctttgctcgcattgtagatgctcatccttggaacaggcaaccatcctgtacaggaagctattgctatgatcttgcctttgctttttctgaggtgggggattgcaaagtaagtgccatatcccgtgccccgnnagttgatgtccattgcgggtgcaaaattgcggatatcagtggtncttncnacaagccgggagcacttncncctgcattgnnacc

SEQ ID NO: 105104 - DNA, 224 bp, Glycine max
  Clone ID: PAT_MRT3847_65926C.1
tttatccgtgttcacttcatccttcataagtcttcatcatcatcatcatcatcaccgtttattgaagaatattcccttcataaacatttccatcttaaggcctgaatatgctactcacccctacacgtttaattcgcgctttgcttatttcattttcaccttcatcttcttgttcactctttcatgatccggcatcttctacaacaagcttacctacaactttt

SEQ ID NO: 105105 - DNA, 246 bp, Glycine max
  unsure (1)..(246): unsure at all n locations
  Clone ID: PAT_MRT3847_65927C.1
attgaagctaaaagccttagcctaccctacaactcaatacataaagacatcctcanccatggctgcctccgactccactgtcggagcactcagcagagcacttttgaacctgaatggttctcgagctggagcttcagctcccagttcagccttctctgggaccagcttgaagaaggtgattacctcaagtgnacccatctgcaagcgctccggtggaagcctcaagattgttgctgtagaagagaa

SEQ ID NO: 105106 - DNA, 447 bp, Glycine max
  Clone ID: PAT_MRT3847_65928C.1
tacgggctgcgagaacgacagaaggggaaagaaggcgattcgtattcggtgagctggtccgtttcctagacgaaatggtgtaagaattgaaagcatgatgattgattgatgggagcagcgaaccatataatttaatttaatttgtgtccacatgagaacgtcgtgacctgcattttctatctcgcaacaccgcgataatggacatcagtggaaatgatgtgagtctgaatgattacagcgggaaggttctactgattgtgaatgtcgcctctcaatgtggtttgacacagacaaattacaaagaattgaatgtattgtacgagaagtacaagaatcaaggatttgaaatcttggcatttccgtgcaaccagtttgctggacaggaaccaggaaacaatgaagaaattcacgaagtagtttgcacaaggttcaaggctgaatttccta

SEQ ID NO: 105107 - DNA, 429 bp, Glycine max
  Clone ID: PAT_MRT3847_65929C.1
cacgcagaataaaacatacatagggatggggctttataataattatactaccaacctatatacagcattatccatcttatttgtggcatgacaagcgcacaaatgacaacatacataaatcctaatgtgttcacagcgccctaccaatgaacggcggttgtaacctaatgaattgctaaatacactcgtcaacacagtttgccctttgaaccacactactggactattttgacccaataagcttcactagcgaggtcccaactgcttactcccaaccccccagagaccatataatccaatttaacactactctaggcagaacgaggttaaagcctgcactagccatggtgttagctctagggctcaccgaaattactctgcccgagccgtttaacaatataccaacctatcctggaacaccatcccaca

SEQ ID NO: 105108 - DNA, 269 bp, Glycine max
  unsure (1)..(269): unsure at all n locations
  Clone ID: PAT_MRT3847_6592C.1
agcgccccggctcgaaaatgcacaanaaggacgtcgtcgaggccgncaccatcatcnagaccccgcccatggtcgcngtcgggtcgttcggctacgtcgagannccgcgnggtctccgntncgctcaccancgtgtgggangngcacctntcggacgaggtcangcgtcgnttcnacaananctngtaccgctcgaagaanaaggtgntcaccangtacgccaagaagcacgccgagtacgggttcggntngtcggtncgcccgcnang

SEQ ID NO: 105109 - DNA, 1172 bp, Glycine max
  Clone ID: PAT_MRT3847_65930C.1
gggtttccttgacgaaatggcgtaagaattgattgattgatgggagcagcgaaccatatatacaatttaatttgcgttcacatgagaacaggcgtttcgtgcattttctacattgcaacaccgcgatatgaacgatgcaaaatagtttcagatacgtcgcgttgattgattgatatgaagtggttgactttctggaactgcatatctatcctcgtgttgtcttttgctttcttctggtatgaagtgattgactttttttcttcttctattctcacacatacccatctactccttccctcatggctgaacaatcttccaactccatttacgatttcactgtcaaggacatcagtggaaatgatgtgagtctgaatgattacagcgggaaggttctactgattgtgaatgtcgcctctcaatgtggtttgacacagacaaattacaaagaattgaatgtattgtacgagaagtacaagaatcaaggatttgaaatcttggcatttccgtgcaaccagtttgctggacaggaaccaggaaacaatgaagaaattcaggaagtagtttgcacaaggttcaaggctgaatttcctatctttgataaggttgaagtcaatgggaagaatgcagcgccactttacaagtttttaaaggagaagaaagggggaatatttggcgatggtatcaagtggaacttcacaaagttcttagtaaacaaagaagggaagttgtggacagatatgcacctaccacctcacctctgaaatcgagaaagacatcaaagctcttgcatctcagaaagggggaatatttggtgatggtatcaagtggaacttcacaaagttcttagtaaacaaagaagggaaggttgtggacagatatgcacctaccacctcacctctgaaaatcgagaaagacatagagaagcttttgcaatcttgaatagtaagatttgattctacatatctaatgtgctgaggacatagggaatctgtccggtgccttcgaaggacaagtagcaatatgtatcataagttaatatatgccctgaaaagttcttaatgtatctcgtgtatttggattttggattgctcaataagtataaattggtgttctcactctgttaccaaaaccataaaataataatatatttggatgcatctttatgttaaaaa

SEQ ID NO: 105110 - DNA, 363 bp, Glycine max
  unsure (1)..(363): unsure at all n locations
  Clone ID: PAT_MRT3847_65931C.1
tccccgggcacccacgcctcgcccctgatgcccattctatccctagagtcatctagggtgttcattccactctaattccatattctaactctgcgttcattcgattcagggggagttaaattgtgtctatatttttctttcaatttttcacaccttagaactccataaacaaaatggggagagggtgcagaatcttcgttcaatcgggagtgaagctgggaaactccggaattgggaggggcgggctagccatgagtctatactccccatgggtaagtacggggtngcacangaggatgggggagcttccctttgggcaccattctgagtacccacctgcccgggtcatttacacatttcttg

SEQ ID NO: 105111 - DNA, 283 bp, Glycine max
  Clone ID: PAT_MRT3847_65932C.1
taaactataaagatctaactatgattgagttaacaagaactgtactattgccatatcatattacaaatcaatcacaattcttattcatttaaaccaatcaccttactcaaatgacatttctatataatacatatcaaccttacaaatttcttcctatatacctatccactgtaattcttcatcatgacccattctaagtactttaccaaaaatgtattcgtcaactaatcaacattatcacatacaattttcatacttctacaccaaacttgaatgttataat

SEQ ID NO: 105112 - DNA, 318 bp, Glycine max
  Clone ID: PAT_MRT3847_65933C.1
gaccttttgctgtttcactcttctttgagtcatggcatatcaattagatttagagctccacacaaaattgttttcacataccatggacatcacccgtatcttttggaatgccagtgtccatgtgatgcttatctctgtagtggccaatcaatctctgaatgaatattccatttatatcaccatctacatctcctcattgattgatcatgggtgctactgttatggcaccgacattgatattcatatccacaacagccacttactagctttatatgctgatgactaagatgagtggaagatcaccaatacctatggacc

SEQ ID NO: 105113 - DNA, 314 bp, Glycine max
  Clone ID: PAT_MRT3847_65934C.1
aattcccggcccgacccgagcgacgcgtccggccacgcgtccgatagaatatccacttttcttttagatcttttatccatcagaaaggggtggatcaacttttctaaggcgtactatagtacatgaaagacatgtagcgccctcatgccactcgagctgaggatctgctaacttgaagcgtactttacaacagatgcttgttgacagagatgataaccgtattggatctagcagcgtattgatccatgcaatcagctgcaagtattgccgatgatgggaatataaaatcttctgctgtgtcagatgtttgactg

SEQ ID NO: 105114 - DNA, 552 bp, Glycine max
  unsure (1)..(552): unsure at all n locations
  Clone ID: PAT_MRT3847_65935C.1
aacacaacacttttgctgcaacattaaatggacatgatgttgcagcaaaagtgttgtgttaaaaaaagcaaggcaaagaaaaaggaaccggtgcttctagtactgatcttaaagatttaagttttggtggtgatgaagaaacatgagctaatgaagacttaggaatgtccattagttggtagcaatagaaagaagcaaatgccaaaaagggggaggatgagaagtaaaattaaggaggccaatggtcattaccaattaaaattttgggactgtagctgttctctctaatgacattgttattttcttcagattgtttggtgactttgttgttctttcctttttagcatttatatatttgagtctacaacactttatggtgttaacgtgtcctttatgataatataattttcttgaaaaactaacttaccaataaaaagctattatttggtaatatgcatgttatcaagttatctgaataaaacanactatagaaatttaatacatacantagattacctaattacttgcatcagaataagagatcaggagttt

SEQ ID NO: 105115 - DNA, 136 bp, Glycine max
  Clone ID: PAT_MRT3847_65936C.1
acggctgaaaacagacgacagaagggggaacaacaagtcttacattacggtggaggatatttcggaaacagatagcaactacttggtattatgcaggttactagctctcctggtgccatattgctccgttaaataa

SEQ ID NO: 105116 - DNA, 547 bp, Glycine max
  unsure (1)..(547): unsure at all n locations
  Clone ID: PAT_MRT3847_65937C.1
ccataaaataatcatcctcttactcttatatcatgaatcctctagcgatgatctgccttagctgctacactttaatttaaggttattataaaaatgccgggtcaacccatcaaaagacatgcaataacagagaagccggagagatagatataggaatatcaggagttcatcaaccacaattgaatccctctaaatgctcattggatcatatgacaaacaagaccatattcaattgccttgtatataaccaccccaaaaaggttggcggaaatggctggattaaattgttttcaaacttctggatctataatttttttcttacttacacatcccagttcaaagctgcaacagattccaccacatatttgattgggcacaagaatcctatccacaacagatcattccaggttttattcatcaactaaaggcatggtgacagaatgaactgtaaaatgctccttggaaagctatctttgccaggttttgtgcattgagtcaattagagcttcttgaagtccaggataggatagaagactcttattanaaa

SEQ ID NO: 105117 - DNA, 729 bp, Glycine max
  Clone ID: PAT_MRT3847_65938C.1
ctctttttcactctttctttcctctcgtttaatggttagggtttcgtagggccgtcatcggaatgttccagaaggcccttccttctctctttgccctttccaattccgttatacgacggcgtttcgtgccaaccatgcgttgaattgttttttttttttctttttccttcagtggcggcagttctggtatggaaatgtatgatgtttctgaaactagaaatgcagatgcttatttgattgaaggcactgatttaaacttacatctgacaagcccaaatattcaacaatttcaagccatgtttaatgatggagcccctgaatttgttgctgatcagaacttgtattaccctgctgccaccaattatgggtattactgtacaggatttgaatcacccggagaatgggaggaccaccataggatttttggtgtagatggtcctgatattcagtacacaggtgcacaaaacgaaagttttccatatatatattatacacctagctatggatttgcacagtctccatacaatccatacaatccttatattcctggtgcaatgataggagttgatggttcatttggaggggcagagcaatattactccctccccaattatcaaaaccctatttcttcacatgcttatattcctcttgttcaaccagacaatttccctaatagttctgttgactcattgtttgataccagagcttctgtcagcagacctgatggaa

SEQ ID NO: 105118 - DNA, 256 bp, Glycine max
  unsure (1)..(256): unsure at all n locations
  Clone ID: PAT_MRT3847_65939C.1
gaacgnctccgatgctttggacaagattcgatttgagagtttgacagntaagagcaanctncgatgatcagccagngtctnttnantcatattattcnaganaanantaacaaacccantgaccantgttgacagtggnantggcatgaccanagctgatttggtgaacaacttgggtnnaattgctagntntggtnnnaaggaattcatggaagccntggctgntggtggtgatgtgagtntgnttggacagttt

SEQ ID NO: 105119 - DNA, 403 bp, Glycine max
  unsure (1)..(403): unsure at all n locations
  Clone ID: PAT_MRT3847_6593C.1
tttttttttttttatttttttttttttacncttccccnnnncggcaaaaccagaaccctttttttttgatattgatattaaaaaaccattggggggggctacctacaaacaaagaagccatgttttttgttgatccccctaaaaattcccaaagaaccttccatttacaaaatgggggggaggggggaaaaacccccccagttaaaaaccgggaaaggtttgggttttaaacattttatagggggcagccttaaaaaactttccccttaaaggaggggaaagaattactttgggcttctcccacttggggggggggaccccctcccatgggaagagagggggtttttttccaaaaggggcctagggagaaggttttaaaaaaccgtttttttccccccccttt

SEQ ID NO: 105120 - DNA, 765 bp, Glycine max
  Clone ID: PAT_MRT3847_65940C.1
tggtacgcctgcggtacccggtcccgacctcccgggtcgaaccacgccgtccgggcgaaaattaaacaacaacaaaaaaaaagctcttccatccgaaaccgtaactcactgccggcgacgaggatctcgccggggaaatgaacattccggcgaaactcttttctctttctttgagcaatgcacgtctctcataccatcgtcgccatgtttttcacgaaagccttgacctcgaaacgtttttcacctcctctttctcctctactcgcgtagtagtctagaagttattcgatccttcttccctcaaaatggaacttacatgatagagtagttgtagttgaagtcgttagaaagagacacaggttttgagcggattttttttctcttgcgatttccccccctctttttttgtcagtcatgcctccgatgaagatccaaccaatcgacgtcgattcacagaagctcgcggtgatccgaaacgacgccgttaagccggtgctgaagtcgcgcctgaagaggctcttcgtgttcgaccgtcagttctcgaatgtgctcaagacttcttcgacttcctcgtccgagaaaccagccgccggcgaggctccccagtcgaacaccaaagacggagcggcggagtttgaaccgagctccgtttgtttagacaaaatggtgcagagtttcatggaagagagtaacgagaagcccgcaccggccaccgcgaaatgcggtcgcaaccgctgcaactgcttcaacggcaacacaatgaca

SEQ ID NO: 105121 - DNA, 549 bp, Glycine max
  Clone ID: PAT_MRT3847_65941C.1
gtttaaacatgtaagattcatccatgattttgtatattttgatgattgcttgttggatctagaaaataagttaaaaggaaggggaagatgatcatattttcaagatttcaaacatccattcacccaggctagcaatcagctcgcctgggctaatcaagtttcttcaggcatagataaccaactcgcttgagcgagtgagtgccttcagcactaagcaagaaactcacctgggtgtgtttagctcgatcgagcaaattggtctgcacctcttggctctttttctataaaaagccatgcaaaggatggagagaaacataccaagactagagaaaagccagaggaagaacacagaaggaagaaagaataaaaaagtgaagcccgggcgctgcaaagttgtgatcatggatcgcatccttcatcatttctcttgttgatcttgtgctctatgcaatgattggatagcttctcaaaaggattggatgtaatctttgtacccttatgtatctcttttgatattttatatatgtatgaatcttttctactcattat

SEQ ID NO: 105122 - DNA, 736 bp, Glycine max
  unsure (1)..(736): unsure at all n locations
  Clone ID: PAT_MRT3847_65942C.1
gtacgtaagcttggatcctctaaaaccgcccgccctttttttttttttttaaaaaatagatacattccattgaattctaacaaccaaaataagacaaaacttagatgtaattctttaggtgttgttttccaattaaaattagagtttcatctcaataagatgataacctatgttgacctttaatttaaacctttatttggtatattattgatgtaaaactccaattctgattggaaaacaacaccaaaagcatctaaataactgcatttaagttttgtcccaaaaattttagtctcaatctgacaaggtccatgtgtgatacctgagtccgctagtgtggctcagaagccttccttgcgacttctctaactttgggatttcatacaaaagagtaggatttgaaggacaagacaaattccttttcctaattgctgcaactaaaacctgtaaaattggcctaaaagggtttcctgctggctgcttgtacctataaaaaggtctccctgcatataaagctatggtagtgagagccatgagaatagtgatgatgagactagaaactccccaactgacaaagtcttgaacataaacaaccactgttgcaccaagcagcatagcaaagcacacagtaaagctccaccagttgaagaaggacatcttcttcttcctttcttcccagngatcgttgtcgaattgatcgggctcaaagctttccaagcatgttttgtgtccccca

SEQ ID NO: 105123 - DNA, 478 bp, Glycine max
  Clone ID: PAT_MRT3847_65943C.1
ggaagggaaaaaaaatttggtggttcagttagaaacccaaaaatcctggccctttacccaaaggggaccacttaaaataaaattttttttaaaaatggcttggattaacttaaaaccaaaaatttggggggggggactttaaaaaataatttactggtccccaaggaagggtttggtgatattaaaaatacccagaataattatggttaaggcagacaattttgaaattttttcaaatggcggggccaaaaccaaaatggttccaatggaaaggagaaactcaacctttgcccaaaaaagaaaagaattaaatttttaatttcctaaaaggggggcagtggtaacaaaggaaaataaattccctttggagcctctaaagggattgaaaaaccgtttggaaaccagggggaaattttcaatttttattaaaaaaacgaacccggtggtgaaggccttaaggggtcttttgggttttttg

SEQ ID NO: 105124 - DNA, 280 bp, Glycine max
  Clone ID: PAT_MRT3847_65944C.1
aagagtcgattgtagatcatgactgaggagccatcataggatgttatcgatgcatgtaacgcactgtcttagtacaaggctatgtctgcctaatagcacctcatataccgcagagacccaaacatcttaacgttcgaacgcatgcgagctttggatcgaaaccactactatgtatgcagatttcagatacccatggaaatggaggctcaaatagctgaagtatgcactgaggatggtctcgaaaacatccctacaactcgtaatcctagcactacaattc

SEQ ID NO: 105125 - DNA, 167 bp, Glycine max
  Clone ID: PAT_MRT3847_65945C.1
gtccaggaggggggacccgtccgtgagaggagactattgaatcgtggaacaatgatagccacaacttcctttaacatacctaggcatatatataagcgaacaccctgataccatacataaagccaaagcccctgttaaagaggagtacttctgagaatcgatactca

SEQ ID NO: 105126 - DNA, 282 bp, Glycine max
  Clone ID: PAT_MRT3847_65946C.1
accacgctttcgttccctggggcatataacgattgtcacgactgggaaatgcatcaaatgcatcgagaatgtgaagcgcacgcacactctctcaaggcagagaggcagacccgacctgagcaacgcggcgcggattgatgaacaccaagcacgaccccacacaagccgtagcagccggagcatcacagagaaacacaaaccgtctacaccatccatagactctactacacacgcctacaccagggaaagacacaagcaaaccactgtgcaacaacatgcaca

SEQ ID NO: 105127 - DNA, 519 bp, Glycine max
  Clone ID: PAT_MRT3847_65947C.1
cttactctctcattctgactgtcgacacaaaaccctttccttgctatttaatgggaagatgaatgcctgacccattgttaggctcactttgatggtactcttttttgaggatgactttcaacgttcactggcagggacatgcagtcccctgcagctaagagcatgtcgcagtgcagtatcctttttaacccctacatcatacctatgctggtgcagaagatcaacacagaaaccatgcctatgcctatacctcaggagccccaatctcatgaaggatgcgtgactcttctaacgcaaagagaggatctagcacttttggaactcccattacgaacgagctaattgacaatcaatcggaatacgtttcaattactctacctgatcatgcattttgatatctatccaagtgctggacgcgagactatcagactgaaacacaaacatctgctactggctatcatacatatatatatatggcgccgttcaaggactctatatatgcactaatgctagcgcgat

SEQ ID NO: 105128 - DNA, 249 bp, Glycine max
  Clone ID: PAT_MRT3847_65948C.1
tactgttataagaacacaacagaaaggacctcaaatgcgtatattcatctatatggctatttacattgtgatgaaaataaaacgtcatgtatttttccattctacaaattacaatagctttaacattttcttgtcatcgatatgcgcccttttcttattaacaattacaatggttcccgtacttagcatttgaattgcgaatatttaatatatgttatggaagcacacaaaatatttggctaaaaaaca

SEQ ID NO: 105129 - DNA, 506 bp, Glycine max
  Clone ID: PAT_MRT3847_65949C.1
acaaaatgtttccgccaaccgtggactgggacaacattaactggtcaactagaaggccacagatggatttccctgtgcagtctgctatctgtacactggaagatgtagatgttatcaaggaaggacaggctaggattgctggatatgcactttcaggtggtggccgtggcattgagagagtggatgtatcagctgatgggggtaagacctgggtcgaggctcgtagataccagaaagacaatgtggcgtatgtgtcagatggacctcaaagtgacaagtgggcttgggttctctttgaggccacattagacgtaccagcgaatcctgagatcgtagttaaggcggtggactcagctgcaaatgttcagcccgagaaggtagaagacatatggaatctgagaggaatcctcaacacgtcttggcatcggatcaaaattcagagatctttgtgcgttgaaagatctaagctgtgaaattaagtacgcagctgatcacttggagcaagc

SEQ ID NO: 105130 - DNA, 338 bp, Glycine max
  Clone ID: PAT_MRT3847_6594C.1
ggctgcgcagacagtatgactagcgaacttcagtatttctactacacgactcttatactatattggatcagactataggtctcatctaagattacacagcggattaattatatggcctgcataatggacacataacaactgttttttcgtcacctgttatgagactataagatataaagaattacttcccaaagatgaaaatgtgttatcagttttgaaatgggaaatgacattacgatagaaagtttgaatgaagggtttagggcattactttactaaaagtataatatcgctgggcaatccataaccctttgctgatgggaaggaatgattacagg

SEQ ID NO: 105131 - DNA, 902 bp, Glycine max
  Clone ID: PAT_MRT3847_65950C.1
ccgacagcatcaagcaaccaacacaaactgatttctcatttcgtagcatcaaccgctaactatccagatactaattttcgctttggtttggttcaattctgtccgcagacatggttttcaggccaatgagtggtaattggttagcactgttaagaaacagttatggaggtaaagccgcgtacgcaacctcaacagcaccaaagatgaaagcgtatgcagctgcggctgattacggacacaagcaacaacatgggaagtcggccaaacgggactttgtggcaatttacgtggcgattgggatgatagctctgtccacagggctgggtctccacactgcgtggcagcaactgaggaattccccgacggtgagcgtgaagaagcagaggagggagaccctccccgaagtggtggaacccgaccacgtggcggaggaggctgagaaattcatgaagaaatccttcttcaggaaggtggcgcacgtgcaagagcgtagctaccctgatcaccaccaaatccttagtcccattcacggagatgcctatactgatagctggcgcacctgcaagagcgtagctaccctgatcacccccaaatccttagtcccattcacggagatgcctatacttatacccctcgtgtcgagaccctcaagtccgttggggtcgatccctcgcacgtgtgactagataattactctagtttttgcttttcttacaggttgtaaatagaactcttaagtgtctatctatgtgacttgtgctctgccttttaatatctcagttttgtgttagtaagttaaatgtgaaaatttcatgccaggcctctctgcgggtatttttacaattagtaagaatcaagggaattttcaaaaagtgcttccatataaaatatccttgcattac

SEQ ID NO: 105132 - DNA, 922 bp, Glycine max
  Clone ID: PAT_MRT3847_65951C.1
cccacgcgtccgcccacgcgtccgtacggctgcgagaagacgacagaagggggcgagagaagttattagggtttttgagtgcggcggtccaaacactcttctctgcagcttttgcctacaactcccttcaccatggctgaacaaaccgagaaagcttttctgaagcaaccaaaagtgtttctcagcacaaagaagactgggaagggaaagagacctggaaaaggtgggaaccgcttttggaagtccattgggcttggatttaagactcccagggaagccatcgaaggaacctatattgacaagaagtgccccttcactggcaatgtttccatccgtggccgtatcttggctggaacatgtcacagtgctaagatgaacaggactattattgttagaaggaattatctccattttatcaagaagtaccagaggtacgagaagaggcactcaaatattcctgctcatatatcacctgccttccgtgtgaaggaaggggatcacgttattattggtcaatgcaggcctctctctaagacagtgaggttcaatgtcttgaaagtgatcccagctggatcttctagtggtgcaaagaaggcttttactggaatgtgagcttcgatttccagtttttattgaagaaaaatgttaccttgttatttagtagatctgatttcttttctggaaggtgacatattaaaaccttatcaattttggattttctttgaggtttcgttctggctttatgtttaggattttgttatacattatgtttttcgaatactatttgccttttaatttttgaaactatgcagactcttcatttgctttaccagtaatatatttagtttactcgggtttctaaagtttggttgaatatgttttaaaaaaaaaaaaaaatggataaaaaaaaatgaagggaatt

SEQ ID NO: 105133 - DNA, 189 bp, Glycine max
  Clone ID: PAT_MRT3847_65952C.1
ccttctttttttttttttgccattttttctttttagaacccgaaagggaagaaaactccaagggcatgtgttgcccggtggacaaaaataggacacggttgacattgaagggaagaggacgtttttcaagaaccaaaagaacccgaagaccgtaccggccactttgtggcgcccaaatttcttaccctc

SEQ ID NO: 105134 - DNA, 198 bp, Glycine max
  Clone ID: PAT_MRT3847_65953C.1
aatacccacctacacctacgcgggcaccgcctcctctatacaccactacttactatcacaaccagccaccacacgaccaagcaccgtttcatacaaaaatcaccccctacacattcatcaatttcacacacacactcaacatatataactcttatgcttctcactacaaaaacacactcaacatcttccacaacatct

SEQ ID NO: 105135 - DNA, 1094 bp, Glycine max
  Clone ID: PAT_MRT3847_65954C.1
cccacgcgtccgcccacgcgtccggcgagaagacgacagaagggtacggctgcgagaagacgacagaagggggagcgaagaagatattagggtttttgagtgcggtgcggcgatcctagcactctcttctgcagctttcgccgacagcttcattcaccatgggctgagcaagtgggcttattctccatattttctcttccttttctccatttcgttttatcattaggcctcatttgtgtcttccattgattttttttttttcaattgtgtgttgcagaccgagaaggtttttttgaaacaaccaaaagtgtttctcaggtgcgcttaatacgcgagaaaatgcttcacttgtttttaagagtgttttgttgatgctgaatcgtttgttgtttttggtcactttcgcagctcgaagaaaactgggaagggaaagagacccggaaagggtgggaaccgcttttggaaatccattgggcttggatttaagactcccagggaagccatcgaaggaacctacattgacaagaagtgccccttcactggcaatgtttccatccgtggccgtatcttggctggaacatgtcacagtgctaagatgaacaggactattattgttaggaggaattatctccattttatcaagaagtaccagaggtacgagaaaaggcattccaacattcctgctcatatatcacctgctttccgtgtgaaggaaggagatcacgttattattggtcaatgcaggccactttctaagactgtgaggttcaatatgttgaaagtgatcccagctggatcttctagcggtgcaaagaaggcttttactggaatgtgagctttgatttccagtttttattgaagataaatgttaccttattaattattatatctgatttcttttctggatgataacaaatatgaaaaccttgtcaattttggattttctttgaggtttcgttctggctttatgtttaggatcttgttataatacattatggttttcgaatcttattagcctttcaattttttaaactacgcagactctttatttgtttttaccagtaatatctttagttttcaaaaaaaaaaaaaaa

SEQ ID NO: 105136 - DNA, 478 bp, Glycine max
  Clone ID: PAT_MRT3847_65955C.1
tttttttttatttttttttttttttttttttttttttttttttttttttttggtttttaagaaaaaccatatttttttttattcattaaatatgttcctaagggggcaaataaccactggaacggggtttttattttttcatgagttggtgccatttttaaacaatacaaaagtaattaaaaacctttggttttttcctaatttttttgaccagacccttgttttttgggggtggtttttgtttcgaaaacccgcaatttttttaaaattttgggttattacggtgggaaaaaaattatccacctccttggttatataataagatagcctttccaacacaccaaagtttggtcggaatcttttggctggtttatgtgttacttttttaaaaagaacaagaagggtttaaacaacatttttttcctttttggtcttcctgaagaggggcgctttttttttaaaccgtttatgggttttg

SEQ ID NO: 105137 - DNA, 304 bp, Glycine max
  unsure (1)..(304): unsure at all n locations
  Clone ID: PAT_MRT3847_65956C.1
aaaaaggaaattttttatttaagaaattttttttttaacctactnngcnaaanataaaggcaagattaaaaaatttactattcatcccacaaaattttccaccggggaaattttttaaaaggggtaataagttgaataattggaaacgtttttttcctcgccaacgactttgccgggttcctccaccaattcggtaacttccccaaactttggccattaaaaaacattaaggccttgggaagcggcaagggtccccacccctggcccgacccgtagaccaacccattcctccacccggaaattc

SEQ ID NO: 105138 - DNA, 476 bp, Glycine max
  Clone ID: PAT_MRT3847_65957C.1
acatcacgcgtccggggaacggagtagtgggacgggttagtgaaacaggtcccagtcgcacaaagctctgattctcatgcaaaaaatggtgaaagtgcctacaataaaaacactcttgttgttcaacaccgcatgctatcaaggccttcaccacacttcccactctatctccttcacactaaagcatctcctttcctctggcatgctaccccaagcccaatctctgatcctgcgactaatctctggtcgaatcccctcctgcttaatgcttcaactaacacaagcccatttcacctcttgttcaacctacactcctctttatgacgcacttgacaatgcctatgttcattctcattcaaccgaccaagccctcacttttctacaccacatgattcacgagggccatgctcctttatcaaacacccttcaataatcttttgggcttactcaataggtctaattatttccataaagct

SEQ ID NO: 105139 - DNA, 612 bp, Glycine max
  Clone ID: PAT_MRT3847_65958C.1
ttgtgcaccaaaacaaatatattttctattatataaagcaattttatttataatacaccaacacaatcaattcgtagtatctttgctccactaggcgaaatgcaaaattgaatttctctagtatcacaacaaagagcccactataccctgaaaattgtaatttctctacactacttcagggtcttctttgttggtgtcattctcattgtttccttgaaatttgacatatttataccacctagccatcagtacatatattacaagatcagctgcggtgagtgctgctaagaggaagtaaaacatatccaaatgccctttgttcaagtttcctgggatccatcctggcatctcatctgtggcagaaatcttcatcacaattgcaacaagcaagctactaacgtagtttccaagtgatattgaagtcatgcaaagtgcactaccaaaactctttaatccatcaggtgtttgtgcattgaagaactctaattgacccacatacatgaaaacttctgatgcccccacaaacacatattgtggcacttgccaaaatatggaaagtgaactagaccctttacattcattgcagtcttctattgcattctttagcctaaa

SEQ ID NO: 105140 - DNA, 409 bp, Glycine max
  Clone ID: PAT_MRT3847_65959C.1
ggtacaaagtagtgacataccagtggttattaatgcaaaacgttacaacatccaaacatacacattaaccatacatagggggaatgaaggaaatgaatcccttctaatcctttatttaagattcagcacaaccatgcttcctttttagatagagatactattaggattgcctctgaaagtcaacccttcctcactagaaggataaagcagtgtgtaaggcatcttcacagggccatatcgattcctcaggggctcatcattgaccctgtggatgagcttttgctcaatctgagccaacttatttacaaatctctggaaggcttgcatcatctgagcatgagaagtccaaccattaccaccatctctctggccaaggcataactcagcagaagcatgccttgacaagacc

SEQ ID NO: 105141 - DNA, 516 bp, Glycine max
  Clone ID: PAT_MRT3847_6595C.1
cggctccagctcattcattcattcattcattcgttcttcttccttacaatctatcctctaatgtgtattatccagaacgactattgttactttgggctaggaccactcttgtcttggttagattcctgaacttccctccttgttcttaataatatttggtatcacttgggtcaacacatcatttacttcaattacttgatctggtcctgttctctgtaactggattgggagtggtaaaacattcagcctatccaaagattgtagcctctgcgtgactagctatatttaatatctcacccctaaactactatatatatggataaagtaacacttactggtgcgttcgaattctattctttgcaagaccaacatgctctccactgcttccatttgggcaaatttgcgttgtgtaaacggtcctatctcggagatttcgaatcagaatcctgaacgtgggttcagggtggatgattcatgtgccccttcagaatgtgacactgatgctgggccttctta

SEQ ID NO: 105142 - DNA, 199 bp, Glycine max
  unsure (1)..(199): unsure at all n locations
  Clone ID: PAT_MRT3847_65960C.1
tagggaagatggattggtggatanaanttgtggaagtnnnaattatgttggannagaggtanttggtaataagggntatganggtggaanatnagatanatggtnatgtggtgttatattgtatgtgatnntaaaaggaaatttantttttgaagattgaaattttgtttttttttattagaagattttttaaggagat

SEQ ID NO: 105143 - DNA, 344 bp, Glycine max
  Clone ID: PAT_MRT3847_65961C.1
ataatgcaacacacacatgttttgaaaccaatagttatatacattcgttgttatcttacaacttatcatgttcaaaaaaaatggggggaaaccccctctctctccaacggggagaacattacattattcctggcgatttctatgaactaaacgagctttttgttttaggagcgtaataattcgactccagtgccgaggataccatttcatgctagcaagatgcacaatccgctttcaacttagatagagatttacccacgggatgcactagaaaatctgcataatctttggagcaacactttgctggtttggtcctgaaaacatcaccattaaattctcctttc

SEQ ID NO: 105144 - DNA, 151 bp, Glycine max
  unsure (1)..(151): unsure at all n locations
  Clone ID: PAT_MRT3847_65962C.1
cgttcattctgttttccagttgnagtctttcctccagccantggccactgntcgtttgncccgggntcacnctctgccgtgagnngcttgatgaaaccctcaatgccaacaggancgaaattttngnccttntgtaaagnntngngagcna

SEQ ID NO: 105145 - DNA, 266 bp, Glycine max
  Clone ID: PAT_MRT3847_65963C.1
catacccccacagcaacgtcggttcaccgatcgggcccactccaaaccgttcattctacccagggtcacggcccttgcctgtgcctcggtattatccgccgtctcgctccaattctccttcaccgcacgtgcctgccctcccacttcttttgaaagcgaccaccggctgaacgtggaggagtgcctctgccctctcttcgacctactagaaaccaacgccgagggcctcgccgcgctcaagtccctacttcagcagaagctctagc

SEQ ID NO: 105146 - DNA, 446 bp, Glycine max
  Clone ID: PAT_MRT3847_65964C.1
cggagcagagagagacgccggcgggtttggacagtgagtcacgagttaggaatcgtgacactcagacgttgagaaccgcggaatgcctctgaagccgtcgtattcgtcggagaatctgatgcttccggtatcggatcctcctaacgacgaagaccgagagtggcttttgaaagccgacaataacaagaccttccaaacacgaaggatttatactgccatctcttacatgtcatgtgcagtgctctttcgtcttttcacttcccatctgcaggtgtcatcacgcttcttcaggcactggaggataatttctttcatagcaggcgaatcagtaattatggcagataactcaaatggatttgttccactgaggactttgaagcacactctttctttggcaggagcttatttactttacatgctagtcaccatggagtctgttcgtggag

SEQ ID NO: 105147 - DNA, 550 bp, Glycine max
  unsure (1)..(550): unsure at all n locations
  Clone ID: PAT_MRT3847_65965C.1
gtttattctcttaactggcaaatatgtgttgttaagcttccgattgtctttaatgctctcaaagacatcttggcatctgaacatgaagaggctatatacgcagccactgatgcattcaaaaacatgataaattcttgtattgatgaacgattgatcaaacagggagtggatcaaatcagtttgagtgaaaacaaagaatcaaggaagtcagcgccaaccatcattgaaaaaatgtgagcaactattgagagcttacttgattatcattatactgctctctgggacagagtatttgaaattgtttgagccatgattcatagattaggaaatcattctccttattttatgagaggaatactcaaaaacatggaagacgtgcagaagcttcctgatgaagattttccatttaggaaacagctgcatgaatgctttggatcagctcttgttgcaatgggacctgaaactctggtgtctcttatacctctaaatttggaagctgaagattcatctgatgcanatgtctggcttttttcaattctaaaacattata

SEQ ID NO: 105148 - DNA, 386 bp, Glycine max
  unsure (1)..(386): unsure at all n locations
  Clone ID: PAT_MRT3847_65966C.1
cccccttttcctccttttcttccnnnnnngaagggcgaaagggggttttttaagtaacgccggatcaggcacaaaaagttagcttaaggggggaaacattgtattgctcctaacttcaagggatcattctaagtactttttacacgcaaaaaatttaagctcctataaaataggaaccgtgaagagataaaagcctccctctttgcagttgcacctaagaagaaagtccctcatcacgtacaaaaggatcaagagggctccggcctggccatgatgagccaccgatagacagtgattgtggctatgctaaatagcctattctcccccctaaattagccactcacctcacattggaggccccccagggaactgctccatatgtgcta

SEQ ID NO: 105149 - DNA, 396 bp, Glycine max
  unsure (1)..(396): unsure at all n locations
  Clone ID: PAT_MRT3847_65967C.1
tacaagcttctgttaagaagctgatactctgttctcatatccaaacaaatagtccatttgtacttgataatatagttatcaaatcacctaagataggatcatcttatcactactgatctatatattttaaatatcccttgattctaggagttagtttttcacaactgttgtcacttgtttatgcatacatgtaaacattcaagagataagcacactcagattattcccctaaatttctttctgacattgtcaagaaggctgacagacagttaaaaagttttggaataagaggtcattggtttcaaagcccagaaagatgtagcccgtgtcacatgggaatggggttagcgaccaattcgattaaaagaccttcccctctgattttcagttntatgg

SEQ ID NO: 105150 - DNA, 148 bp, Glycine max
  Clone ID: PAT_MRT3847_65968C.1
caatagcttctccttcaacccgggcccgtttaacatgaatgagcacttgctcattaccaggttcgggaatgcctgaagcgcatgctgatccttttcaccctatactgtggttatctttaacattatctaatccttttacttactcatc

SEQ ID NO: 105151 - DNA, 235 bp, Glycine max
  Clone ID: PAT_MRT3847_65969C.1
ggggagccttataggtgggggtatcagcgtgatcttcctatttcataaataccttctttctctacgacgtacgcctaaaacacgtgcccaaaaggagagggttcagctatagaaattgagctcaaaaccacctacatctgcgcgcaaataaaagacaacacacaccgccatagaaagcaccgacccctacgcaatgaatcacaactattgcctgcgacaatcagattcacttgag

SEQ ID NO: 105152 - DNA, 210 bp, Glycine max
  Clone ID: PAT_MRT3847_6596C.1
gggaaaaaaaaaaataaaaaaaaaaaaagacaataacaaaaaaaagaaaatatgggcggccgcaaactgtttgcctttttaccccgaaataaatttcggaccggttcctgtaggcgtaccaaatggggcgtcctccgaatttttttttttcctgcccggaaattaattcatagccggttcctgggggggatcggttttcccttatagtgg

SEQ ID NO: 105153 - DNA, 484 bp, Glycine max
  Clone ID: PAT_MRT3847_65970C.1
acggctgcgaagacgacagaaggggggacagtgggacccaacaattagaataaattaactattttgcttctaattggattctgatttgaagtgcctacctttctgctttgtctaaagttggtagggattcagtgaaacccttatgattaaggaataagaaatgtctcgagatattaaagatcctacttaatcataccctaaagcagtcaattaaagtgtgacaagttaatcattaagttcatagaaacttatgaaaaacatttattcgttcatactagcatgattactaacatttactagcatgactattaacaagttggcaggggaactaatcacatctcgcatttgttgccttgtaaaaaacctttcttgattctaatactatcaatcactatcatagaattttcagaatgaagatttttgtctggagcacagcctattctggaaatcatttttaagttcaacctttattatgttattggag

SEQ ID NO: 105154 - DNA, 744 bp, Glycine max
  Clone ID: PAT_MRT3847_65971C.1
accctagttacttcctccgtctttgtctctctgtctgcgtctcttctcaaaaaccctacaaacaaaacactctctgcttcgcaaattcgaacctttgaatctgaatcatgccgcgcaagaagaaagctcacgacccattcttcaccaacgattcccgaaagcgccaaaaaccgaataaaaaactcgacgaagatgaggaagacgccgagatagaaagcgactttgatgaagacggcttcttcgccggcggcggtggcggcggctcgggtgaagagcaggaggaggaagagaccggcgcggaggtgcggaagagactcgcacaggaccttctccaaagggttcggaaaagcgcgcagaaaggagaggaagaagaggatgataaagaagaagacgaagaaggagcaagagactcgctcgtagctcagaagttgttgaaggagcaaaatgaggaaagcggacgcgtcagaagaagcattgcttcaagggtgaaagtgagtggtactggtgatgaaggatttagggtgttggtgaagcaccggcatagtgtgacggcggtggctctgtctgaggatgattcgaagggcttttcggcatcaaaagacggaacaattatgcagtgggatgtgaatagtgggcagtgtgagaagtataagtggcccagtgatacggtgttgaagtctcatggcttgaaggatccgcaaggctcggctacgaggcaaataaaacagtattggctttggctgc

SEQ ID NO: 105155 - DNA, 477 bp, Glycine max
  Clone ID: PAT_MRT3847_65972C.1
cccacgcgtccgtacggctgcgagaagacgacagaaggggataaggctgaatttgacacaccttcctctcatctaatatctccacttttccattccttatcgcccatgttcttccaatatatttcttttacacctgtttttatggtgaaaatatcctgttcatctcattagtgaatcaatataaccagagtctgttatgcagttcttcacatttcaatgatgtctaatgtcttcaagatgaaatagttttgtagcatgttaatcaagggaaagtacgaacctggagatttgcgtcctgtacaacttagtctcgaaacattaaaaaggtgtattttgacccttaagttttttcaatgggtttaaaacaacctctatgataatttttccattaaaatttgacaaactcgcagctaagaaaaaaatgtaaattagcaccttgatgtttgaatcatgtaacttaatcttaattataggact

SEQ ID NO: 105156 - DNA, 236 bp, Glycine max
  Clone ID: PAT_MRT3847_65973C.1
ctccaccttcatcaacccacgctagcttttcccttttccatgttggatcacaacccttctcacaagttttccccgattccattccaaccttaacaacaacaacacaccccactcagcacttacttccaccattaaactctatataatcccacaattgcatactaactcatctttctaacctcaaagtactttctaaacctgggtcctctctctccttccgatcttccttaacaaca

SEQ ID NO: 105157 - DNA, 612 bp, Glycine max
  Clone ID: PAT_MRT3847_65974C.1
tacggctgcgagaagacgacagaaggggatatcaccctttttgtttctctctttgtcattgaaactttttcacccccttgataccgcttcaattcaccaatggcaagtcgaggaaaaacccagggatctggcacaaccaaaaagggcatctcccgaagcaacaaagctggtctccaattcccagttggtcgtattgctcgatacctcaagattggcaagtatgctgaccgtatcggttctggcgctcccgtgtatctcgcctctgttcttgaatatcttgctgctgaggttttggagttagcggggaatgccgcaatggacaacaagaagactcgtattatgcctcgccatatccaattggctgttaggaatgatgaagagttgagcaggcttctcggagatgtgactatcgccagtggtggtgtgacacctaacattcacaacatgttgctgcctaagaaggttgggacctcgacctcaacctttatgggtcctagtgccgatgatgacgacgcttaaatgttttcccccaaaagtttgacccatgtttcccttctgtaaaatgggtcctttattgaataatactaaatgtcaagattgacataatataat

SEQ ID NO: 105158 - DNA, 422 bp, Glycine max
  Clone ID: PAT_MRT3847_65975C.1
agttttggataattgtgtcttcctgcgtttattttattgccaaagaaaaaggaatttttacgaataatgaaatggaagatgatgaataaagagatatccagttaatccaccaggccacggcatattgaaagcagtttatggttaattacttaatttaatcattggttttgtgaaaactaaaaataatggctattattacggtttgcccataacgagacaagcagcaccgttttcttacaaaagtttttcaaggccactttggttggttggctcttgtgcaaatactgagaatcatataagttcttgcacttgcctttttgaaatgaccctaattgtgaaggggaagaaaatattatcaactttcatttttctgtgtaataatatataataatatatgctctctctctttttttttttttttt

SEQ ID NO: 105159 - DNA, 346 bp, Glycine max
  Clone ID: PAT_MRT3847_65976C.1
tacacgtggagtgggtgcggtcgccgggctgtggtgtcactgcccgggagggccgtgggctgacgtggtctccatactgcctcgtctgggaattgaatgggggcggccgtttgctggttcatcccatgccaggggtctcggtcttgacaagattggtgtgggggctagcccgcccctctctgcccttcgttggtgtgccacgggtcctctcatcatatctgggcccagcattgctgctttggggccgagcgactgtcgctctactttatgtggggattatgatgagcggccggtgggggggtcgggacgaaaaggtcctgccttgtgggatgtgctggaggctcgc

SEQ ID NO: 105160 - DNA, 766 bp, Glycine max
  Clone ID: PAT_MRT3847_65977C.1
ccacgcgtccggaaactttttcacccccttgataccgcttcaattcaccaatggcaagtcgaggaaaaacccagggatctggcacaaccaaaaagggcatctcccgaagcaacaaagctggtctccaattcccagttggtcgtattgctcgatacctcaagattggcaagtatgctgaccgtatcggttctggcgctcccgtgtatctcgcctctgttcttgaatatcttgctgctgaggcaatttttcttaatcgcctttgatttttgttttcgtgtgttgtcattggatttagggtttataaattagggcttattttcctaaagtttagtggatggttttggtttaatgatcaaccttgaataattgaaatgataaatttactttaatcaatattaattacttttttgaaaggtttatatcacacttggtgtgttcaggttttggagttagcggggaatgccgcaatggacaacaagaagactcgtattatgcctcgccatatccaattggctgttaggaatgatgaagagttgagcaggcttctcggagatgtgactatcgccagtggtggtgtgacacctaacattcacaacatgttgctgcctaagaaggttgggacctcgacctcaacctttatgggtcctagtgccgatgatgacgacgcttaaatgttttcccccaaaagtttgacccatgtttcccttctgtaaaatgggtcctttattgaataatactaaatgtcaagattgacataatataataa

SEQ ID NO: 105161 - DNA, 452 bp, Glycine max
  Clone ID: PAT_MRT3847_65978C.1
gtggggatgcgtgtgagggagagggtgagtgtccccaaagctggactcactgaggaggtgatggagaagattcataagaggtggaggaaggaggagttggtgaggctcaagtttcatgaggtacttgcttaggacatgaggaaggttcatgagattgttgaggttcaattcttgcccctttttcataataatcacttgacattatcattaacacatatcataggaccacgtacaacgattgatagtttgtaaatgatccatggacactcaagtgcccttatagctcacttgagatttgtgcagatgtgagtagcgatatatggtttgtttgttttcacatcctagacgtagttttttatgtttactgataaactgccctttatagcttactcatcttagatgtgattctttactttatcaatgggtgttcctatacacgtatatgtgacaag

SEQ ID NO: 105162 - DNA, 220 bp, Glycine max
  unsure (1)..(220): unsure at all n locations
  Clone ID: PAT_MRT3847_65979C.1
cccaccacngcnnggannagnncngcagnnaacaancgcnccncagacancaacaaaagganncgcacagcacnngggaaagggaagaaaanngnnnnncnnacnnagaggganccnnnnccaggagcnnnannggcggnncnnnnnggcgnnaagaangaaanncngagnncnaacgccacnaacccnangcngacgcgacnncnngagaaccgnaaga

SEQ ID NO: 105163 - DNA, 409 bp, Glycine max
  Clone ID: PAT_MRT3847_6597C.1
agatattgtgtcttggacaagtatgattacctgttgtgttcataatggacttccagttgaagctcttgaacttttctactctttaaaacaaactaatattcaacctgattctatagcgatcattagtgcactctctgccactgctaatttatcttcattgaagaaagggaaggagattcatggatttctgattaggaagggtttcttcttggagggaccaattgctagctctctggtggacatgtatgcttgctgtggaactgtggagaactcaagaaagatgtttcattctgtgaaacagagagatctaattgtatggacttctatgattaatgctaacggaatgcatggatgtgggaataaggccattgcgttattcaagaaaatgactgatcaaaatggtattcct

SEQ ID NO: 105164 - DNA, 530 bp, Glycine max
  unsure (1)..(530): unsure at all n locations
  Clone ID: PAT_MRT3847_65980C.1
gatttattttgaaattggaaagaaattgaaagctctgaatgacttggaggttgaagttgtggagcttaagagagaaaacaaagaacttcaacacgaaaagcaagaattaacagttaaactcaatgctgctgaatctagaattacagaactctccaatgtgacagagaatgaaatggttgccaagaccaaagaggaggtcagtagcctaaggcatgtgaatgaagacttgcttaagcaagtggaaggactccagatgaataggttcagtgaagttgaagagcttgtatatcttcgttgggtcaatgcatgcttaaggtatgagctcaagaattacctggcacctccaggaaaattatcaacccatgatctaaataccagtctcagcccaaaatcacaagagaaggctaagcagttaatgttagaatatgctggatcagagcatggacaaggtgacacagatcttgattgctacttctctcattcctcttcaccaggcagtgaagatnttgagaatgcttcttcctttgata

SEQ ID NO: 105165 - DNA, 542 bp, Glycine max
  Clone ID: PAT_MRT3847_65981C.1
ccacataacgagagatggcatctatgaacttgctcatttcctgtcaaatacaaacactttacaaggaataagacgcatgacacaacagaatacagacacatttaacacaccaaccactttatatgtacaaaatgactccctaactcaaatttgaactttatttttcctattcatatcaacacaaaaaacaaaaaacaaaacaaaaacaaacgcttgcttaagggtggcttggtgcaagaagaggtgcagacacaggcattgctgctgctgcaggtggaacagccactgagccagcagcagagacattattattattgctcccaacaacacaacaaagctcagagcaatcaactgggtgttcaagttttgccttgcattccttttcactcctttgcaatggcttctctggcaaacagttcctcctatcatcaaacactatcctctttgatgtcaagttcttacaaatacccttttcctcacagaaaaagttgtaagagaaagtgaagtttgccaagtttggaaactaacaaacccccacaggg

SEQ ID NO: 105166 - DNA, 391 bp, Glycine max
  Clone ID: PAT_MRT3847_65982C.1
ttgttatcaactctatccggattcttcctcttcgttcaccttaaaccaaacccttgaattatttcaacaacactgttcctgtcttggtctccattaccaggcttattctcccaaactagcgtgtttctctctcagtcacggtcggaaaaacaatgagcgtggcggcgactgcccgtgaaaagctcacgagtctcgtgaacgccgtcaagctgggcatcgacatccccttcaagctcgaatcgctagtccaacttcatcacgaacgtccccccgaagacccagttctccttaccgagattctaccataggtcttactattacactccgatcgcttcggcccggtttagcaaattcctgaccgagatgcttggggagattggattgaagaaca

SEQ ID NO: 105167 - DNA, 476 bp, Glycine max
  Clone ID: PAT_MRT3847_65983C.1
tttggtttttttttttttttttttttttttaaaaactcccttaaattaggcttggcatttttttttaaaggccggcctacaccccattgggaaaacctaacccttaatttttaaaacagagatccttttcctttacttcctagaaatatcctttatggggttaaccggactaaaaacaaaccagggtggggtttcccccccttaccttttagaaaaccccggtcccttggaccaaaactggtttaaggacggggtttgggcaacggggttaagcgggggccttaattttaaactccctggactttcttttgggaaggggcagtattagggggtggttaaacctggggaccggggacaccgaaacccccggaacccaggtgggtttggagtggttctaggtaaccgtggcgggggaccttaaccctggggacaaagtggccgttctcaacccggactgggagaaccctttggtttgg

SEQ ID NO: 105168 - DNA, 1832 bp, Glycine max
  Clone ID: PAT_MRT3847_65984C.1
ccacgcgtccgctagcgtccacacccccaaacgccaacgccgtcgtctcctctgtttcagtcttttgctttttattttactcacactctcagactcactctagatcagatctattttcttttccctaatcgttacttgagccacgattcgacgtcgttttcaaacccacccgccggattggaccatggtcgtcaacgagagaccttccaagaggatgaagaggagggtcacagctgatctttgtgattttcttacttttccggagcctggcgtctctgcctccaccgaacccttccggaactgtgtacagcgcttcctctctcaccatgcgcgcatcactttccctccctcgctctttccttcactcatgacgtggcagatcttgttccgtgtcggagacctccttgacgctcccgatctctcgccggcgatagtcactctcgacattgtcgaggaagatgtcactcgttctcgtgcttctgtctattgtgaccagtgccgagtcgttgggtggagtgggcatccggtgtgtcgaaagcgataccacgcgtccgatcttgaataccctgtaccctaatggcttgtcgcggttttcattccatggtcggggaccaataagcggctgggacggatgccgtagaagcatatcaaagaccttgttaaagatctttagatgttcaaaaatcttctttcctttttgttgactttgattcttttaccatctcagccagtgaccttgaggatatcttagcagaccagattgaagataacacccatcttctgcatggatgtcgtgattccaatggttatggtcacctgcttactcttaatggaagagaaggtggctcaaagcttctctctggatttgatatcatgaatttctgggataggctatgtgctgcaatttctgttaggaaggttagcgtgatggatttgtccaagaaatttgggctggaataccggttgcttcatgcaatcaccaacgggcattcctggtatggcaattggggttatgaatttggaactggcagctatgctcttacgcaagatgcgtacaagaatgcagtgaataccctgtcaagcatgcccttgtcatcattttcattccacggtcggggaccaagaagccacctggagtgtgtcatttctctttaccagtctttggcagaaactgaacttttgacgattggacatctcttctcctttatgttgacattgattcatgaatgtcgtaagccagtggccatgaggacatctaagcagaccagtaacatgttgtgtgcatggacgggaaatgatgttgaagaggtgcaacatgctttgataaaggttttgcttgcatcgggtgcttgtactgaggctaaatgggtgacaagacgtgctctcaagggtgcagtatgcaggggtgtttcatctccagagcttctagactactgtcttaagcacttcccagggaaattaactgccaatggaatgatagtttgttcacgatgcaatcccatttccagtggcatcgaattcaggtaagactgaatacgtggcttttgccaatttgcttctatactaatgtaactaacgcttgttatatatccttgatatagattagaaccttggtgtaatggattgagtacaaagtcaagctatccaacagaagttcaactgatctctgatttgacatttttatttaattcaattattcaccctgacaaaatggtgtgctacagacccaagattatgaggaaaagtgtggctgattcagccaggaagctccttgactgtaaacagtttatgaaggattacaagccatatgaaatggccgttgaactgccttc

SEQ ID NO: 105169 - DNA, 442 bp, Glycine max
  Clone ID: PAT_MRT3847_65985C.1
ggactagctgtcgacgtgtgggtagcaatgtaccaggtcctgtcacccgcaaccaagtgtgccaaggggtgggccttgaagaaagagatcgggtggcggggttaaccttgcgcaagtccaaggcccagggaaagggaagtaggagcgtgcgggtggtaagtccaagtatcaataatagccaacgcacaaggccctaaacccgggtgtctccaagctgtttgagttgtctgtgttatattggtactcacgaggattctgttcattataaattgttccgtattcttctttgtagtcttcctaatatttgtagtgatggtccttttgttggttgtcatttttgtaggttttttagtcaataacgtgccggtaatttgtattgtagttgtaacaataaccatggcaaatctggtggctgcgtattcggggattatagtccacaatt

SEQ ID NO: 105170 - DNA, 261 bp, Glycine max
  Clone ID: PAT_MRT3847_65986C.1
ggcttgagactaaagataagattatattgctcagaagaaaaaatatgaaggatgggtacttgcttgctgccctattgggtgtgacatgaactcgatgatctgactctgaccctagacctgtgcaagattgtcggggggcgctcaatgctatacatggtgattaagagtacggggaattctgataggtccccgcgcctggatcagtaccacattttttggaacatgtggagcctgcgaaatactgtacacccactaagttca

SEQ ID NO: 105171 - DNA, 423 bp, Glycine max
  Clone ID: PAT_MRT3847_65987C.1
tggggggggaaaaaaaagggaaaaaatttcaaaggtttgggcgccaaaaaaaaaaatttgggggcggcccaagccaacaaattgcaagcaacatccccccgggttttagcaggtaaaaattgggctccgactttaacaaagcaaagtggggggaaaaaatccatgttcttttaaaaaagaatatcattgccatgtgggatttggccctggccctttttaaagctaaaccttcgaaacttttggttgctccttaccacttaaaacattgaagggcccttgacagggttttgggctcgccaatcaactggaagttggaacaactgacccatttccttttttacatttggaaccctaaggggctcaaaatcaaaaacctcaaaggtccctttttttttaaccagggtttgaaccccttgtgggggg

SEQ ID NO: 105172 - DNA, 242 bp, Glycine max
  Clone ID: PAT_MRT3847_65988C.1
gggcactccctctgctgggttccaaccgaaaactggttgcttggaaaaaactttccaaaccattaaatgcgtctacggaaacacggacccttcttaactattctcgcagacgtagaacgcctaattaaaaactggattttttgaacgattcctgtttgggtaccacctttcctttatagggaggcgcattaaaactttgcgtggaaacaagaattattgttatcatgagaagaaacaggcac

SEQ ID NO: 105173 - DNA, 268 bp, Glycine max
  Clone ID: PAT_MRT3847_65989C.1
gcaccagaacacagctcaagcaacctccactcgccacaaaaaagcgcgtgccctcactctctgccatgacctcttgtctccattcactccctcatcaccacattcaaattcgtttcttccttaaacaccactttcatctccctcattcattcaaacacaacacaacacaaagtgtcacaaacacacactccaaaactcaaatctcgcctcacctctcttgttctcgttcccccaccccactccctcattttccttcctctacccccat

SEQ ID NO: 105174 - DNA, 389 bp, Glycine max
  Clone ID: PAT_MRT3847_6598C.1
ggacccaaaaagccagcttcaactaaataagagggcaacaaaaaggggcccaaaacaatccccaaagggggggcccaaccaaaaaaaatccggtaattaaggggcccaaaaaaataaaatcccggccaaatttggaacaaccaaaccttcacaggggttaaggcagtttttgccaaggccaattaatttgccccccaaggaaaccccttttttccccaaaaaacccaagggctccaacaaaaaaaaaacttaataacaaaaccccttccggggcccccaaaaatccatttttacaaacacagaacgccccaacttaagccccccccccacaaatccttttggccaggggaatatcccggggcaaaaaagccccaccctgggcgggaagg

SEQ ID NO: 105175 - DNA, 784 bp, Glycine max
  Clone ID: PAT_MRT3847_65990C.1
cccctgcagaagtgagcgagaaagaaggaattaactttctgggagttaaaggtaaatgcttgtggccaattagaatagggtgcttaaatcccaaggaccaaataccaaagtggtcaatgaagacaatacaatgtataacagatgaggattattactttgtatgcgtggagatctttgaaggattaaaaagaattggaaagccgtctatccttctttccatacgcgaaggagctgaagcagtacatataatcatggggatgttgcaggcttgctacaacagaagtgctctactgatgaataatactaggtgggagattattatagaggaaatgcatgaatcagattcaacaatggaggattggtttgtaattgttgaggatgcaaagaaatctgcagtaagggatacatctaatttgattgaacaaatggtgggaaaggttttgatggcgaaaaacaatctattatccacacaggagcagactcgatacagttttatatgagattaaagatagttttcataatttggctggtttttggatacaacgggattgattgtggatatataacaatcatattgaagattaaactaaagaataaggtcaaaattgcgtagtatattcacaactttcattgtagccaaaaaatattcctaacttgaatcttctgctgggagggtgtttttaagccgttgcattgattatgtaatgtatacataaatcataatgtatacctaaattgtattattacacatttacataaaaaagggctataatctttttttttc

SEQ ID NO: 105176 - DNA, 281 bp, Glycine max
  Clone ID: PAT_MRT3847_65991C.1
ttccaatatttgtgaaaggataaaaatttcggtcattagttcaaaattttaaaataaaataaagtgacccacatttagaggagcgtcgattgtcacagcaatcgttagaatttgaatgacatacattttggcttgtacgaaccgactggatatacattcttttgattcagtaaagacggtaacagtggatgacaagtgaatgtaaaccttctctactttgaaatgtataaatgtacgctcatcttcgaaagtgaaaatttacaactgaatgctgggagaac

SEQ ID NO: 105177 - DNA, 125 bp, Glycine max
  Clone ID: PAT_MRT3847_65992C.1
cacgggccatcccggcactggagaaaccattcttgccaaagctccagccaaggagtccagagcagcttttattaacgtgagaacattgataccagtgggcacccggaacagggatgcccaaaagc

SEQ ID NO: 105178 - DNA, 505 bp, Glycine max
  Clone ID: PAT_MRT3847_65993C.1
tagctgaagcaagttttttgagttgttccttttcctgctcttccttcattcaaattgcccctgaactcaatggggcagtcaatcaaatgcaaaatatatttgaaacagagacctccgaaggtaatgctacaagtattggtgacactgacataaatgataggcaaaatcaagatcagtgctgggaaaagtcagaaaatgactgcaatctggaaatgcttgttgaagacataataactcctgagtctgcagaaatctgcaaggatgctaaggagaatagggttacattaaatgaagaggcagatgagaatcaatctaatttttctaatgaggaaaatttgtttgacaatgaacacaatatagaagaatctcagatatctagttcatctgatcggaaatcaagtcttttcaaagaagaggaggttgaatcaagtcacagcaatctaagggagagtaatcgagcatctgtaataatggaagagaaggaagcaaatggcaacttgcataa

SEQ ID NO: 105179 - DNA, 379 bp, Glycine max
  Clone ID: PAT_MRT3847_65994C.1
tgtgtgcttgctcctatcaatcttggaatgatatgctcctattattacatcagttacacaacaattgagaggttttcatcatctgtgactagaaaaactaaactgaagggtctttcggtgattctgcctgcagcttactagtatgctcaacttacaatacgacctgtagaggtagaggttggtcccaagttaattaatcaccataggttgtcctttgaaaaccccaaggtttcatatcctgatgttaaagctaatgctttgcttgaagcccatttctgtaggcaaaacggtggtgggaaccttgcattgcaccagaatgaggtgcttgtatctgctaatagactgcattatgcaatggttgatgtgatatcgagcaaca

SEQ ID NO: 105180 - DNA, 259 bp, Glycine max
  Clone ID: PAT_MRT3847_65995C.1
tcttgcgacaagttgatggggtcatcagccaaaaatgaggcctttacccacaagcatgtggcatgtcggatagattaatgaaaaagggcgactgtattctgcacaggaagaatgctttacaggttggtcaaattacgagcgtactacaacaactgaggggggtgatgggagaccatatttgtgtgctatggggcatgataatgcagggactgacacaccaggtgatggcttgattggtgaggatgggacaaccataaac

SEQ ID NO: 105181 - DNA, 517 bp, Glycine max
  Clone ID: PAT_MRT3847_65996C.1
agcctccgaggaaattgcaacggacttggatcagttcacaaaagatctcaaaaacttgatgaataccttaaaaggcaaagctgcatcaggtgactctcgtctcaagtatgatgtaggaagcatacctggtcctgataataagcacatatatggtcttgttcagtgcacaccggacttgtcagggtcagagtgtgatgattgcttggggcggtccattcaagtcatcccaacagattgttgtgaaagcagaacaggtggtaaggttgttagacccagttgtaatttgaggttccgaacctcaggtccgttcaatgaagcatttgttgaaggttgcagcaatgctaaaatcatttcatttaagtgccacttacttattagcgttgtcgtggtaatagtagtaccagttgttgtggtcgtcgctgctgtggtgctcatttatatctacatctatcctaaaaaagaaactattaatcgaaattgacaattctgagtcattgcaattcagcattaacgacat

SEQ ID NO: 105182 - DNA, 826 bp, Glycine max
  unsure (1)..(826): unsure at all n locations
  Clone ID: PAT_MRT3847_65997C.1
aagaaatctctcagttctgtctgtaatgatggcggtgttaatgtgcagagtgacattgacacaagtagtggcagtatgcctctcacagttcaagtagcaaagcttagcagatgtttatttataataagtcatgttgccatgaatcaactggtatatattgaatcctgtgcccgtaaaattcagaagcagaaacttacaaaagagaaaaaggacaatgagaatcagaacctagacagcaatggcaccgtatcaactggtacacagaaggataatgatataaatgcagagttaggatttgctgcctctgaggatgcagcgcttgatgctttgtttgaaaaggcagaaaaagaaatagtatctggtggttcaaatgaaaagaatttgattggtatctgtgcaacctttttgtcaaagctttgtaaaaatttaggactaatgcagaagtatccagaattacaggcatctgcaatgcttgctctgtgtcgattgatgattatcgatgcagatttttgtgatgcaaatctccaactccttttcacggttgtggaaggtgcacattctgaaattgttcgttctaattgcacaattgcattgggagatttagcagtacggtttcccaacctcttagaaccatggacagaaaacatgtatgcgcgcctaaaagatccctgtgcatctgttaggaagaatgctgtgttggtgctttcacatctcatactaaatgacatgatgaaggtaaaaggatacattaatgaaatggctgntagattagaagacgaagatgagagaatttcaaatctagctaagctattttttctttgaactt

SEQ ID NO: 105183 - DNA, 411 bp, Glycine max
  Clone ID: PAT_MRT3847_65998C.1
agccggaatcggctcggggaaatctggattagtgctcccactctctatctggtataggactcggggtgacttctattcttctttctttcactctcttctttactgatccgatgcgtcaaagtggcttattgaaaaacacttggcgtggtgcaaatgttgctcgtaattttctctggggacaacagctactggaaaacaattttacttgcagagattggcatcttggtgttattatacaatagcaactcattagaaaatttctaccgcatacataggtggcatctgataccttgtgatctacattctcccatcttttctcactgctgaaattaaatataagcggaattgagtatattcatattccggctattttacgacggagatacaattctggactaacacgagaaaatc

SEQ ID NO: 105184 - DNA, 187 bp, Glycine max
  Clone ID: PAT_MRT3847_65999C.1
tcgctcacacgttctatctggaggtaatctgttctcatcgtgaagcctcattcagggaattgtgatctatacaatcaccaggggggggttcactacctgtccacgaaatccttgttgtggcgatcaatgtgcttcataaccagtattagccatgtgatgcttcactcaattcacacattgacacatg

SEQ ID NO: 105185 - DNA, 251 bp, Glycine max
  Clone ID: PAT_MRT3847_6599C.1
tcactctacctcaaatcaaacagaaaaggttctttaacacatacgatatcttttataatcaccatatacccactccctcttctcctcactatatccacaactcaaatcaaatatactcttctccctatcaatactattataccaatacttattcctgaccaaaccctaaatctacacattcttaacattactacaacatcatattcattaaatagtaattatattaaattataatatacatcattccctct

SEQ ID NO: 105186 - DNA, 277 bp, Glycine max
  unsure (1)..(277): unsure at all n locations
  Clone ID: PAT_MRT3847_659C.1
gaagcaggtcattgtggagaagcttggtgagccagcccaaggctatgaagatttcactgccagccttcctgctgatgagtgccgttatgctngttatgattttgagtatctgactgaagggaatgtccctaaagcagaatttttttctttgcttgccccctgacacctcaagggtgagagccaaatgatctttgcagctccaaagacagatccagaaggaactgattgaattttagtagagcttgaaccactgatcccctgggaagggcctgatgtg

SEQ ID NO: 105187 - DNA, 289 bp, Glycine max
  Clone ID: PAT_MRT3847_65C.1
gacaattgagactagagaacagggaggtgcttgtaccctagtcgtgagaagaaaggaaagggataagaggaaaatggtgtgcataacgaaagcgacggttaaagaccttatgtcgatgcacgcatgcaacctgttctgccttcctgagaactaccagacgaagtactacctctatcacatcctgtcctggccccaactactctacttctgcgaagactacaacgggcgcatcgatcgctacgtgctcgacgagatggaggaagaaaccaccgactgccacggccacatg

SEQ ID NO: 105188 - DNA, 142 bp, Glycine max
  unsure (1)..(142): unsure at all n locations
  Clone ID: PAT_MRT3847_66000C.1
attagcttacgtagaacatcttaaaggagggaaggatcgccagagagtttgatggttgcgcaaccacactcaccgcggaagatgaaacgcatgcaatatttcatatgaaaaagacagggcccgacccacacaaccacncaag

SEQ ID NO: 105189 - DNA, 271 bp, Glycine max
  Clone ID: PAT_MRT3847_66001C.1
cccacgcgtccgggaggagctggtggtgattgtggtttaggtggtggatatggaggaggggcaggaggtggtggagttggaggacttggaggtggtagtggtctaggtggtggttatggatgatgaagtggtctatgtggtggaataggtggaggcatttacaaatgaataggtattgtaggaagcatttacataggaattggaattggatgaagcatttacaaaggcattgttgttagtgtagattctataattagtgattttattatta

SEQ ID NO: 105190 - DNA, 829 bp, Glycine max
  Clone ID: PAT_MRT3847_66002C.1
tatttctgtattttacattccagtaatctttacttaaactagttcacgatcgcgggcggcgccttttttttttttttttttgacaaatccaagcatagtgttattgatcagataacattgataataaaaaacactcaaacaacctggttcttggaggctctctagatgataaaaacaaaccctgatctagatgagttgtttaacacttcatacattttgcatagacattctattaatgtcatagttagataaatgaactgagcatctcattccaaatgtctggcaccccagggaggcaccaatggctgcaatcagaggaaagacctgtgcctgctttctgcctctcttcactcattgccttgttatacactgaaggatgtccatctcttcggaaagcagtcattgttgtaatgtcttgcagatatactggaaatctcattctctttagcactccttttagcactaccagtggttcaggaacgtgtatgtggctgaaaaattgtaatggctgcctctgcttatagcatttccaaccatttagcctgttatgcctaggtgacatgcttcggaaaatgattcgggttcttctagagtccaaattaagatccacccaccttgcccatgtactgagtcctttctgataagcaaccataggattcatgtttgtgatgatactatttccctccatgtaataatcccacgagcgtgtttggccagagtgagtccaccaatggggctgaatcaaatacaagaacatcaactcctttccaataccttgcattttcttcaatcaaatccagatgtagaattctcttattgtcagcccctt

SEQ ID NO: 105191 - DNA, 1502 bp, Glycine max
  unsure (1)..(1502): unsure at all n locations
  Clone ID: PAT_MRT3847_66003C.1
tttaataataatgtcattatataaaataaatatttggaaagtaaaaaggaaaaaaaaaaaaaaaactgaaacaatttgaaatctttttcatacataaactcaaaaacgggggganaaagggggaaagaaaaaataatccaagaactgttgtgtggagctagtgctaacctcataacaggagaaagagaaatctggattactaacggaggacgaagcactactactaacaccacccacttcatcttctccttctctatcaccttcttgcacaacaagcataaccacttccaccgccaccgccacctcgtcgaattcagagaaccaaaacttgaggtgccctcgttgtgattcatcaaacacaaagttctgttactacaacaactacaacctcactcagcctcgtcacttctgcaaaacatgtcgccggtactggaccaaaggcggcgctctcaggaatgttcccatcggtggtggctgccggaaaagcaaaagctccggcatgtccaactcggttgccaagcaaaccgccacaaagatgaaagcagtggcatcagagcttggaaggtcgtcgtcacaaggactcttggaccaagagcttccgcaaaccccagcaatcctgtggggttctccacaaaattctcaactgatggctttactaagagctaaccaaaaccataaccctaaccctaaccctagtccaatgtcaattgttgtcaagggagaagggaacttaatgggatctcaccacatggtggctgagccattgctcgcaaatgggttgttgaatcctagaactagtctaggctttgatggtgtgggagaagtacttccttcactgggtctatgcggctctttttggaggaacaatcaagatcagactcagcaacaaaacaacggttttgcacttggagaacatcaaagtagtggagttcaagaactttaccacaagctcaggtcatcgtcatcatcaattaattattgtggcagtgataactcaccagtgtttctaagcaacatggcttcttcttcctcttctttgtccaacattttggagtcatcttcagtttctgggagtgaattcgggtgctggaatccaaccctttcctggtctgatcttcccactaccaatggagcatatccttaattaaccaccgcatgcagtaactactttcctcttttttgttcactgttcaaattatcttttcgagttagatatatagaactccttaatctatagtttatagatgttaatctgtatcctagctagagtcttttctcgtgtttgtttgcttcggggtggtggataaggaatatggatgtgtaggtaccattagatttttttttcccaactcagcagcgtctttctatcatttgcttcttttatttctggttgatggtgtgtttatcttagctttctcaaatgatatttcaagaactaccagagagtttagaatgaatggaaaacacagtgtttaattgtcaaaacggacgcgtgggtcgac

SEQ ID NO: 105192 - DNA, 414 bp, Glycine max
  Clone ID: PAT_MRT3847_66004C.1
ctacatgccatctagagacgtcaatcgcccaatgctgcaacagcgactctgtcaaattcgtgcaatccctactctctccactcacttctcgctctcagctcacggtatcacgtactaccacgcatattgggaagttcttgaaacatcccaatcagaacctgactgttcatatacctcctttgttatataatattctacatcggattcttacacttacacgattgatacttataaacatattcccatccctgctctgatacaacacattgctactgtaactgtaatgttatctgaacgacaactcttaatccgacaacgaaatgttctacatgattatcagatactatctgcctatcatgtttaaaatagtcacacctttcatctggatgctatgcaacctgatctaccatcacc

SEQ ID NO: 105193 - DNA, 373 bp, Glycine max
  Clone ID: PAT_MRT3847_66005C.1
aaatttgccatacgtttcgccacaaattccgcatttaactctctctctaaaatcggtgaaaatggtatccaagggcccgaacccgcccgagggattctacttggatcctagtggtggcatggctcttccggggaagcctcccttcgcttccgtctccgccgctgccgccgccgcgaactcgtcggaggacgccgccaagaagatccgcaagccctacaccatcacaaagtcaagggagaactggaccgaacccgaacacgacaagttcctcgaagcaattcaactgatcatggtaaacatattatttgttcatgatacgacacaatgacctaaagccagtttttttttggtgaatgacctaaagccaggtttg

SEQ ID NO: 105194 - DNA, 2337 bp, Glycine max
  Clone ID: PAT_MRT3847_66006C.1
gtcaagggcccccgccgcagcttcttattctttctttttctccttctaattctttgttacccttcacctattacaagccactcacactaacacaaaaacatggaactaagcaccatgttttgcttgtgtgcttcgtttctcttcattgttctcttcagggcactcatcaaaccttattatgtctccaaacgccgtgacttgccactcccacctggctccatgggttggccttacataggagaaacctttcaaatgtattctcaagatccaaatgtcttctttgcctcaaaaataaaaaggtttggctctatgttcaagtcccacattctaggttgtccctgcgtgatgatttccagccccgaggctgcaaagtttgtgctcaacaaagctcaactcttcaagccaacattcccagcaagcaaagagaggatgttgggaaaacaagctatcttctttcaccaaggagagtaccatgctaacttgagaaggcttgttcttcgcaccttcatgcccgaagccataaaaaacatcgtacctgacattgaatccattgcccaagattgcttaaagtcttgggaaggccgtctgatcaccactttccttgaaatgaaaacgttcaccttcaacgttgctctgctttcaattttcggaaaagaagagattctgtacagagatgctctgaaacggtgctactacactctggagcaagggtacaactcaatgcccataaacgttccagggacactgttccacaaggcgatgaaggcaaggaaggaacttgcacaaatcgtggcccaaataatctcgagcagaaggcagaggaagaagattgatcacaaggcacttgttgggttcattcatggatgagaaatcagggctcaccgatgagcagatagcggataatgtaattggcgtcatattcgcagctcgtgacaccaccgccagtgtgctgacgtggatcgtcaagtaccttggtgaaaaccccagtgtcctagaagctgttactgaggaacaagagtgcatattgaagagcaaggaagaaagtggagtagataagggtctaaattgggaagatgcgaaaaagatgcaaatcaagtaagggatcatacaagataaaggactacatggttaagattcgatcatgtagctacagctattcaggagaatttgtcaaattccaagagaggcgtagttgccgaagttgattgtcaccgaaacagttgaggttggagtatatcaagtgttttttattccaaaacggtggaaagtgctacctctatttaggaacatacaccacagtccagacaacttcaaggagccagaaaaatttgatccctcaagatttgaggctgctccaaaacccaacacttttatgccatttggcagtgggatccacatgtgtccagggaacgaattagccaagttggagattttggtcctcctacatcatctgaccacaaagtacaggtggtctgttgtgggtgcaaagaatgggattcaatacggcccttttgctcttccccaaaacggcttacccatcacattatttcccaagagcaagtagatatcactcaaacaatggcttcatagtagctttctaaatatggaaagaattgcttcatagctctcaaaattggtttccatattgcaattggataaccaaacaagggagatcaacttttcccttctttttggccaagagaaacccaaaggggtagtcttgacaatagcatacaaacaggaagaatgtcaagtgtatatagaggaggaggtttcacagcctgagcaaatagtattaagttcttttcattttcttattttttttatccttcaaatgtgaagaaaagtcctcataagattgtattgatgcattcaactaattagttctgtatccataagaatgccgcaaggccaaaataaaagttaaattttggttctgaacagataatgataaagacacagaccatattgcaattggataaccaaacaaagggagatcaacttttcccttcttttttgtccaagagaaacctaaaggggtaatcttgacaaatagcatacaaacaggaatgtcaagtgtatatagaggaggtttcacagcctgagcagatagtattaagttcttttcattttcttattttttttatctttcaaatatgaggaaaagtcctcataagattgtattgatgcattcaactaattagttctgtatccataagaatgccgcaaggccaaaataaagtgaaacattggttctgggaaaaaaaaaaaaaaaaaaaaaaaaaaaaaaaaaaaaaaaaaaaaaaaaaaaaaaaaaaaaaaaaaaaaaaaaaaaaa

SEQ ID NO: 105195 - DNA, 686 bp, Glycine max
  unsure (1)..(686): unsure at all n locations
  Clone ID: PAT_MRT3847_66007C.1
ctcgagccgattcggctcgagaaagtgtcaattgggtgtatgcattgttcatacttcatacatgcatatatcattcttcaaagttgtttggacccttagccttgccttacactttcttctttttaatttttggacttcacaggaggaacaagagtgcatattgaagagcaaggaagaaagtggagaagataagggtctaaattgggaagatgcaaaaaagatgccaataacttcaagggtcattcaggagactctaagagttgcttcaattttgtcttttactttcagagaagcagtagaggatgttgaataccaagggtatcttattccaaaagggtggaaagtgctacctctatttaggaacatacaccacagtccagacaacttcaaggagccagaaaaatttgatccctcaagatttgaggctgctccaaagcccaacacttttatgccatttggcagtgggatccacatgtgtccagggaatgaattagccaagttggagattttggtcctcctacatcatctgaccacaaagtacaggtggtctgttgtgggtgcaaagaatgggattcaatatgggcctttttgctcttccccaaaacgggcttacccatcacattattntccaagagcaagtagataatcaatcacacatccaatacaaccctggcttcatagtaagc

SEQ ID NO: 105196 - DNA, 873 bp, Glycine max
  Clone ID: PAT_MRT3847_66008C.1
tcccatgtttccggctacgcgtccgtccacgcgttcgcccacgcgtgcgcaccttaaaagagaaagcactgagggtagatatgataggtaacatgacgtatgaaaaagagaaaaatagaaagaaattatgcattgttcgggcatgcatatatcattcttcaaagttgtttggtctattagccttgccttacactttttttttttttttttgaatttttggacttgccaggaggagcaagagtgcatattgaagagcaaggaagaaaggggagaagataagggttttaattgggaagatgccaaaaagatgccaataacttcaagggtcattcaggagactctaagagttgcttccattttgtcttttactttcagagaagcagtagaggatgtagaatatcaaggtgtattttattcctatagggtggaaagtgctaccttttttttctatttatgaacatacaccacagtccagacattttcaaggagccagaaaaatttgatccctcaagatttgaggctgctccaaaacccaacacttttatgccatttggcagtgggatccacatgtgtccagggaacgaattagccaagttggagattttggtcctcctacatcatctgaccacaaagtacaggttggtaaacttaatcacgagtaatttcaacaacccttttttagccataggctttgaatagagacatattattccaaattagggggtttctaaactagcgtgtgctgcttctatttttttctggtgcaggtggtctgttgtgggtgcaaagaatgggattcaatacggcccttttgctcttccccaaaacggctcacccatcacattatttcccaagaacaagtagatatcactc

SEQ ID NO: 105197 - DNA, 1429 bp, Glycine max
  Clone ID: PAT_MRT3847_66009C.1
tctccttcttcttcttctttgtgttatccttcacacacctattacaagtcaagccactcaactcacactaacataaaaacatggaactaagcaccatgtttttcctgtgtgcttctcttctcttcattgttctcttcttcaggacactcatcaaaccttactatgtctccaaacgccgtgacttgccactcccacctggctccatgggttggccttacataggagaaacctttcaaatgtattctcaagacccaaatgtcttctttgcctcaaaaataaaaaggtttggctctatgttcaagtcccacattctaggttgtccctgcgtgatgatttccagccccgaggctgcaaagtttgtgctcaacaaagctcaactcttcaagccaacattcccagcaagcaaagagaggatgttgggaaaacaagctatcttctttcaccaaggagagtaccatgctaacttgagaaggcttgttcttcgcaccttcatgcccgaagccataaaaaacatcgtacctgacattgaatccattgcccaagattgcttaaagtcttgggaaggccgtctgatcaccactttccttgaaatgaaaacggtgagccctccaaaacagagcacaaaacagagcaaaacagagcaaaacagagctcctctgctttcctctgttcattctccttcaaaaacataaacaataccaataataaaaaaattacccatttctaatttctcgttggttttttaagaaaataaaaaaaatggggtttttacggtttgcgattttggggtctcctgcagttcaccttcaacgttgctctgctttcaattttcgggaaagaagagattctgtacagagatgctctgaaacggtgctactacactctggagcaagggtacaactcaatgcccataaacgttccagggacactgttccacaaggcgatgaaggcaaggaaggaacttgcacaaatcgtggcccaaataatctcgagcagaaggcagaggaagcaggattttcacaaggaccttttgggttcattcatggatgagaaatcagggctcaccgatgagcagatagcggataatgtaattggcgtcatattcgcagctcgtgacaccaccgccagtgtgctgacgtggatcgtcaagtaccttggtgaaaaccccagtgtcctagaagctgttactgtaagtgtcttctgggtcctaccaccaccaccacccttgtttttttctttgtcaatttttgaggccataaagatagtaaaaaagtagttcaaaaataattctttggacgccttaaaactgaaagcaagtatagacgtgataggtaatatgacccgaaaaaaaaaagacaaatagaaagaaatgaaaagtgtcaattggggtgtatgcattggtcatacttcatacatgcatatatcattc

SEQ ID NO: 105198 - DNA, 756 bp, Glycine max
  Clone ID: PAT_MRT3847_6600C.1
attcaaacttcacacggtaggctcatcaacattgtgtagaacaaagacatcagatatatccaagttctattcatgaatggaaaaggaaaaggttccaaaatatgacacaaaaactacaaaacttgcatgatacaaatcactgagtttggaatataaaaatatttaattttttaacttctttgacctcatgataacatcaagcacaactcaatctgaatataataaacttagtaagacatttaggtagtaaagattcatcaaatattacaacttacaagcttagggtgagtggtagtttctttaaaatcagtgcttaattgttaatttcctagcctctcactcttttttcctcatgtattgttggcaaagatgtgattcatattttactaaaatcaattcccaagattcataatatggtcagaggtgactttggctccttgcatggttttgatttccaggataagaaatcccgctaggatatagatcaacggagaaattttcaaagttttaccaatcctttgccttacaagaactcttccttggatttgaatgcagactctactggggaagcatctgcttataataacactaaaaatcgtagaaagggtactaagcatggttttgatgggacgagatatgactctgcttctaaccccagtgatcactatgaagagaataaccttgtggttaaccagactagttctagatcgcgagcggccgcgcgcgatctagaactagtccggacgcgtgggtcgt

SEQ ID NO: 105199 - DNA, 316 bp, Glycine max
  Clone ID: PAT_MRT3847_66010C.1
caactgctggagtaaatgcaaacgcagagtggctgactatatactaaagcaagatttacttctgatctggttgccaccaccaacccactacatctcacctgaaggttatactacggataacctccactctcttagtagtcaatatgggtgtgaccgtaacctaacagcgctacttagaaatatgatgcactacactgtaatagctgtggctgacatagttattaataatatgactggcaccacccatcgacgcggaaggatgcatcatggatcacacggaatgccatctcagcagcatgcacatgctatgacatca

SEQ ID NO: 105200 - DNA, 462 bp, Glycine max
  Clone ID: PAT_MRT3847_66011C.1
tggatgccttcttagaagcggcgcgccccaccccccccccccccccccccccccccccccccctccttccttttttttttttcttttttatcaaggacccattccttgaatgaagggttccgggttgagttattggagtacttttcagccttttttaggaatcactacttaatatgctttttaaataatcaaggggatccccttttgggttttaccctttttcatcacctttaaaaatatttaattttacaagggattattgggtttgtttatttaaaaattcaccaaaaaaattttgttcaaaagttggtccaggggttttggaagttcctacacttgtttttaatgcctttgctgttgaagaagtaactgaggtttcaactggcctaaaattttgtattggcattgaaaaatgaggtgcaatgattccaggttaacccttggggcgggggacaaaaataa

SEQ ID NO: 105201 - DNA, 1679 bp, Glycine max
  Clone ID: PAT_MRT3847_66012C.1
atgttcaactccttttgtcacacacaccctcttctccttcttcttcttctttgtgttatccttcacacacctattacaagtcaagccactcaactcacactaacataaaaacatggaactaagcaccatgtttttcctgtgtgcttctcttctcttcattgttctcttcttcaggacactcatcaaaccttactatgtctccaaacgccgtgacttgccactcccacctggctccatgggttggccttacataggagaaacctttcaaatgtattctcaagacccaaatgtcttctttgcctcaaaaataaaaaggtttggctctatgtttaagtcccacattctaggttgtccctgcgtgatgatttccagccccgaggctgccaagtttgtgctgaacaaagctcaacgactttctcatccatgaatgaacccaacattccttgtaatcaatcatggatgagaaatcagggctcaccgacgaccagatagcggataatgttattggcgtcattttcgcagctcgtgacaccaccgccagtgtgctgacgtggatcgtcaagtacctcggtgaaaaccccagtgtcctagaagctgttaatgaggagcaagagtgcatattgaagagcaaggaagaaaggggagaagataagggtctaaattgggaagatgccaaaaagatgccaataacttcaagggtcattcaggagactctaagagttgcttcaattttgtcttttactttcagagaagcagtagaggatgtagaatatcaagggtatcttattccaaaagggtggaaagtgctacctctatttaggaacatacaccacagtccagacaacttcaaggagccagaaaaatttgatccctcaagatttgaggtaattattgtgctgaaaccatgttttacctaccaacctcagttttgttgctattcatgtgtgataccaagtccaagaccttgacagattctgtttaattatttgccaggctgctccaaagcccaacacttttatgccatttggcagtgggatccacatgtgtccagggaatgaattagccaagttggagattttggtcctcctacatcatctgaccacaaagtacaggtggtctgttgtgggtgcaaagaatgggattcaatatggcccttttgctcttccccaaaacggcttacccatcacattatttcccaagagcaagtagataatcaatcacacatccaatacaaccctggcttcatagtagctttctaaatatggaaagaattgcttcatagctctcaaaattggtttccacagataatgataaagacacagaccatattgcaattggataaccaaacaaagggagatcaacttttcccttcttttttgtccaagagaaacctaaaggggtaatcttgacaaatagcatacaaacaggaatgtcaagtgtatatagaggaggtttcacagcctgagcagatagtattaagttcttttcattttcttattttttttatctttcaaatatgaggaaaagtcctcataagattgtattgatgcattcaactaattagttctgtatccataagaatgccgcaaggccaaaataaagtgaaacattggttctgggatgagtttcaaatgccccaaaactttcaggcagaaaaaaacagaaccaagcaaaagcag

SEQ ID NO: 105202 - DNA, 555 bp, Glycine max
  Clone ID: PAT_MRT3847_66013C.1
gtaaaaagatccttattgaagtgagtaaaagtgtgttgcttgcatttgctgcttatatttttgtataattttcgtgataaatatttttttcttttaattatttaagtagggcctaaggatatttgttaacagaccggtaagaaagttaggaacatgataacttaatttctctcttttgggtgtgaatatatatttttatgtaggtatggtagtgtatttaagacgagcattttgggaactggtgtgattgtgtcgacagacccggaagtgaacaaggtgattctgcagaaccaggggaacatattcgtccctgcttatccaaaatcagtgagagaactaatgggagaacactccatactccaaatgaacgggaacatgcataggaaaatccattcactccttggaggcttcctacgatccccacaattcaaagctcgaatcactagagatattgaacactctgttaaacaatgctttgctacttggacccaccaaccaataatataccttcaagatcaagtcaaaaaggctaaggaaagaatgatgaagatagtg

SEQ ID NO: 105203 - DNA, 1178 bp, Glycine max
  Clone ID: PAT_MRT3847_66014C.1
aaaaagaaacaattcaaaactttattcttggatgaatgagaatgtacataagggcgtttatttataccctcttatttcccttttaatccggattttcctaatgacaactaacttgctaatcaagcctctaatttcacttattacaactttccccctcttcaaaaataggacttgttctcaaggcctgttagctctccaatcaaaatctggaaattggggttgcatactgggtaattccttccaaattgcatcttctgggttggtatgttgccattgaatcaacacctccgtgacagctctgctgccttttttcttcattcgggcgttgagctttgaaatgtgttctgtaccatgaacaccattcaccactgccaacacaacaaccacaacaatcatgcaaataagcatttgaatgctgcctataatgtacaagaaccttcgcccaaagtgatcaacaatagcagttgagacaagaatggaaccaaggttgacaagccccaatataacagccaaaagcaacgccaagtcattgtcaactcccatagactgaaaaaggtctggcgcataaaaggcaacaatgttgatccccgtgagctgctgagacatcggaatcgcaaacaccatcaccaacttaggctgatactgctcctcaaacatcatcccaaaaccttcccctttcacggcttttgaaatctaggacgattggatcacgtgttgtaatttgagttccacatcagcagtgaggccatgcactttgcggagagtgtttctggcttggggtatttggttgcgcaccactaggctgcttgaggtgttaaggattaggaatgctccaacagtgatgatggttggggggactgtggcgaggccgagggacacatgccacccccatggatgccgcacggtgccatagtttattcagttccaccatacccacaccgacgaagaattggaacccagtgttgaacaacttcaccatttgggaggagcaatttcggataggtacactggcgttgcttgatttgtgaaaccgactccaagaccaagcaagatacgacccaagattagcgtagcaatattttcagcagcaccattaatggcaccaccagaaaaaaagatgcaaccaccaaaaatcatggcgtttggcctatgaacccttactatttctcaagctcaat

SEQ ID NO: 105204 - DNA, 428 bp, Glycine max
  Clone ID: PAT_MRT3847_66015C.1
cccacgcgtccgcaagtttgcagtaagcagtttatgagccaaagatgagcatgtatctaataccagttgtggagtgataaaggtgtttactgttgctgcatcagttgtaatatcaacttgccatctgagaaattgtggacagacacctatttgcttgttgtcaattttgctggaccatgcaggcctgagagcctacagtaggggttaggcctatactaagtgattaggggtcaagtggtacagattttcttatggtttggacctcttttgcttggtatatactgttgttgcaactattgatcccagcttgctaaaaatcctactgtctacactatgtaaaatactatgtcaattaattagaaatcaccacacctggtatttaaatttaaaaaagttaaacctccaaaaaaagggccggcgctctagag

SEQ ID NO: 105205 - DNA, 320 bp, Glycine max
  Clone ID: PAT_MRT3847_66016C.1
aaattatagggtcaggactgaggatttagaatcttttcacaaataacggggctttaacggttatacagaagaatcagtgatcttaaagagttaatggaaaataaagacttttgctatggggaagatttaaaatttaaagctataaattatgctttccatttgggataaaaaccaagcttacgtgatacaatgaacaaaaaaaagggtattggaaggaagcacctactgttaccataccctatatctgcatggcctccccaaagacccgcagtcactcgccgtaattaactggggagctccgttgaatcacctccatttgg

SEQ ID NO: 105206 - DNA, 532 bp, Glycine max
  unsure (1)..(532): unsure at all n locations
  Clone ID: PAT_MRT3847_66017C.1
gtggacaccgtgtagagtatcgacatgttgactggaatactgatcatgcttttcgagcatgccgcggagagtttacattgctcgtgacacggtagtaaaggcagactagatcacgcatgctactcactgatctgtatcttattggagtaagagcatatccaggatacaaggtgncatggtcgacagacctatagcataccactatcgacttaccacatatgaggcaagcatcgggatataagagtcgttgcatcagccacaacatcggcatcaacagctatccatcttcgtgtccagcctcaggagcgactacatcatcagcaactatatctgcttataatgatgtgcttaatcacttatacaacaacagcatgatgcaggcattactagctttacttccaacgttgacgctctcttaccgaactatcagactcgtcaatatgcaacaaaatcctaagcgtagtcccaatcccgctgccaaccctaaccctaatcctctcatcaatatgcatcagaaccctaattccaacca

SEQ ID NO: 105207 - DNA, 493 bp, Glycine max
  Clone ID: PAT_MRT3847_66018C.1
ggctcgagccggaaacggcaccgggcccggtggagtacggaccttggcagagggtccgtactccggaggtgacggggcggtctatgacggtcagcatgttgcactccgcgatttcaataacatgtacggcaccttttgatgtcctaaaagaaggaggtcctcaccttctgccacaggctgcaggccgctaccactctcatgatatccacgccgcacaatcagcttttcatcaagacctatgatttcttcaccggcttgctcctcatcgctcattggcttccttactctccatggagtggtatgataaagatcgtgactttcaagtcttccttctccaagggttgcacgcttttctacctcttcatggtcatgaggtgggtcatacttttaacgcaaggacaatgaactacccttggattggctccgccagactgatggcgattttttcttggcccttttctgggtttacttccttggtcactcttggagggag

SEQ ID NO: 105208 - DNA, 535 bp, Glycine max
  Clone ID: PAT_MRT3847_66019C.1
gcaaggatggttcagcatggttagtcaaagtatcaaaacacaagttcactgttttctattacatcccagttaatcacgcaaagcaacaattcaattaagtcctgatcctaaactgagaagttctaaaaaaaaaatattacaaaaaactttacttctcatctgaggtgaagaaccatattagtcgattgctttgttggcacaccaggaaacaaagctatcctgtgaactgaaatccagctgacttagtcgaaattctgaaggtggtgtctcaggcactacatttgcagggtcaaggacaagattttgacactcttcgatatctttcttcagatgctctggtcctagatcagcataaacagaaagactgggtcgtttcttgtgttcattttcctcatccctcttgggagattgactctgaaggagatcatcacacaagaacaatgcttcgacaagttgttgtgagctcaacagattctgtgactcactatcccaccattttgagtcttcctcagcattggattctatattatctatc

SEQ ID NO: 105209 - DNA, 240 bp, Glycine max
  Clone ID: PAT_MRT3847_6601C.1
ccacgcgtccggcagtggtttggtgatttgactcataatattgctctgagaatggtgggagggaagtcatatagtggggttggtgatgatgatcatgcagaaggtgaggcaagaaggtataggagagttatgagagactgggtgtgtttgtttggggtgtttgggaggcttgttgtggaagcacacaccatggtgtggttttgagacgatgactcgagagtgtgttgaagcaacaaagga

SEQ ID NO: 105210 - DNA, 299 bp, Glycine max
  Clone ID: PAT_MRT3847_66020C.1
caatgtacgattctagttgacaaattacaattatgaatttatgattacatcggtttgtccaacatgttgtacatacataaaaattcctttccagtgaaaaagcctatataaatcttaaatggctagtgtaatattacaaacaattgccttctttgtttaagttgacttagagctcaacactccacataccaaaacaaactttcaagtaatgctagaaatagcatgaacaacaaaattatagaagtactgcaaaaaggtgatcccacagagaactggaatttgtgagactgatccttttg

SEQ ID NO: 105211 - DNA, 110 bp, Glycine max
  Clone ID: PAT_MRT3847_66021C.1
cgcgtctggggaaagcacgactgacggcggcctccactgacatttctaaccagagtgtgcttcaatatgtgaggaggagcatgctagaatacattatttacaagtgaaag

SEQ ID NO: 105212 - DNA, 226 bp, Glycine max
  Clone ID: PAT_MRT3847_66022C.1
aacactctctttttgatattgatatggagagacacattggtggggcgtacatacaaacagagagtacatgtttttagttgatcacgtaaaaaatttcaaaagatcatacaaataacaaaatttgaggtataggagagaaacacacattgtaagaaactttgaaagtttttgatattatacatattttaagggcaatgttcaaaaaactttcatcatttaacaattg

SEQ ID NO: 105213 - DNA, 392 bp, Glycine max
  Clone ID: PAT_MRT3847_66023C.1
gggacccaatcccaatttgggaaacaatcaatcagcttcggaaaaccctcttcttgttcctttgccaagagccctcctttcgaaacacgctggcaaaacctacctccctagaaaactatgtacctttccagaaccaaacctttcttaaacccttttttcccttacgggggtgtttaaatttttacccctttccaggggtttctttcccacacttttgggttttttcccatgcataactcttagagggttcccaaaaaaattccttgggcccccttggcctttattggtgcccaaaatgggcccccatggctcccccaataaaggtgttaaagcccccccatccggcccaaaatttgtttggctaaaaaccctctaaaagcctgccccccttt

SEQ ID NO: 105214 - DNA, 1056 bp, Glycine max
  unsure (1)..(1056): unsure at all n locations
  Clone ID: PAT_MRT3847_66024C.1
gaagcagaagaaattggcttatgggtcggccattagggcgcttgattttgctatgacgaagtacccgccggcttgtgagcgttttgtggatgttttggggttgaagaccgcgtttgcagctttcatgggtaagattcctttaagtaagaagaacaagaaagaaaggtaccaagaggatttggaggagcgcattgtgtcactgattgcgtcattatttggtggaatcttgaggggttctaggagagaaagattattaagtaaatttgttgaaaatgagtgtgagaagatagacaggctaatggaactatacatcagatattcagatagagtcaaagcagaaactgaacggttgaatcaagttgagcttgatgacttggagatggatgaagatgaaaaatacaaccgtaaactagaatctggactatatactcttcagttgattgctgtcattttgggtcatctttggtgctcagagcatccacaaatgagagggagaattgaactacttctcaagcagaacaaacttagtaagaagcatatcaaggatatacttcaggagtatcatgacaatattggtgaccttgatggaccggaagagaaggagagagcacagacaaaaattcagaagttcataacggccttataattagtgtaagacacaaacttcaatggaggtgactcaagtaattcattttgcttgtaaaagagaatagattagtcagggtaatggagaaggaacaccgatctgcaaatgtcgttgagatcatagccatgtagtgtttatttcacacaacttcttaatgtagttatattggatattatttttttcccttggtggggtgtcatgaatgttgttcctctataaagcaatttcagtccaatagggacactttagtctttcgctgtgtattttcataggtgtaccctgaaattcccccccccgctaagagtgttagttaaagttttccttgtagtcagtttgacattttacccttttaacattgtggaggggtaggaaagaagttgagttttttagnaaaaaaaaaaaaaaccaag

SEQ ID NO: 105215 - DNA, 379 bp, Glycine max
  unsure (1)..(379): unsure at all n locations
  Clone ID: PAT_MRT3847_66025C.1
ccagcgtccggcgcttcaaaacaaggnaactaaaaacccaccaagctgcaaatttgcttgggggctaatcaaagacgatgccgactaagtctaacctgagaagaggcaaatagaggaaaatgacagcatatgcgccttgtttgcagcaaatctgcaggaggatgcagcccatttatttgggcaacgggcaacaatacttactcttaaggggggaatccttatcgtggacaggaatagtgggggccttctacataagccctaggcaccacttgtggcaggaccaaatggcggatgaatgggggggaaacggaaaccaataggcgggaagggcagcgcgggggggggggggagggggggggcgaggggggcgggcgcgcgg

SEQ ID NO: 105216 - DNA, 360 bp, Glycine max
  Clone ID: PAT_MRT3847_66026C.1
gaattaaactagcccatagctttggtaggatttacgctgggccattgatgccttatgttatagaaactattacatgtattgcacatgctggaagcaaggaactttttgggaaatggggcaaatacaggtgaaaacttgtgatgaagctttccaccagaattactagacaatttagacaaaactatatggggacgaaactaggagtgaccgctcacaccgggttacctttacgcctattaatagtttaacatttcatgtctttatttttggaagaatatttgtaacgacataccttattctgcacaggttccaaagaattttaccagcagcactcgctgtcctttgctttgctgaccaaac

SEQ ID NO: 105217 - DNA, 444 bp, Glycine max
  Clone ID: PAT_MRT3847_66027C.1
gacaccaacaccaaaacatacccactaagatggcttcctttgggtccttgctagtgctgcttcttgtagcccttatcctcatgcctcacgggctcgctacttactacaaaccaattaagaagtcaccagggtacaagcctgcagtgtacaaaccaccagtgtacaaaccaccggtttataagccgaaaccaccggtttacaagccgaaaccaccgctttacaagccaccatataagaagccaccatacaagaaaccaccttatggaaagtaccctgcagtggaggacaacacccatgcctaaagcatgcaatgaggtctattatctacttaataaataagaggaactgctttgcgttttctagcatatgtgatatacaacttcgtagcaatgcatattcttgactcttgcatgcacttcaatgctcgtagcattaatgatgtgg

SEQ ID NO: 105218 - DNA, 622 bp, Glycine max
  unsure (1)..(622): unsure at all n locations
  Clone ID: PAT_MRT3847_66028C.1
ggtaccgcccttgccaggttacccggtnccggnacatctcccgggtcgacccacgccgtccgaacaaacccactaagatggacttcctcttgtactcctctcactagttgcttgctttctttgcaagccctttatgcctcatgccctcaagggcttgctacttaccacaaaccaattaagaagccaccagtgtacaagcctccagtgtacaagccaccagtgtacaaaccaccggtttataagccaaaaccaccggtttacaagccgaaaccaccggtttacaagccaccatataagaagccaccatacaagaaaccaccttatggaaagtaccctccagtagaggacaacacccatgcctaaagcaagcaatgaggtctattatctacttaataaataagaggaactgctttgtgttttctagcattgtgatttacaacttcgtagcaatgcatattcttgactcttgcatgcacttcaatccttcgtagcattaatgatgtggccaagtcatcatgagcatcatacttatttctttgtgaatgtaaatcaaaattataagagagaaaatggtgcttttgtactacagattactataaataaaaaacttttattggttttc

SEQ ID NO: 105219 - DNA, 410 bp, Glycine max
  Clone ID: PAT_MRT3847_66029C.1
tttggtttacccactttccgtcaaaacaaacccactaagatggcttgcttgggttcctttctagtgctgcttcttgcagcccttatcctcatgcctcaagggcttgctacttactacaaaccaattaagaagccaccagtgtacaagcctccagtgtacaagccaccagtgtacaaaccaccggtttataagccaaaaccaccggtttacaagccgaaaccaccggtttacaagccaccatataagaagccaccatacaagaaaccaccttatggaaagtaccctccagtatgaggacaacacccatgcctaaagcaagctatgaggtctactatctacctaattaataagaggaactgtttcgtgcacactagttattgtgatatacatcctcgtagcaatgcattcct

SEQ ID NO: 105220 - DNA, 345 bp, Glycine max
  Clone ID: PAT_MRT3847_6602C.1
gtgacagtttcatacttgagacggcactcacaaccgacgtcgaagcggccgtgttgcttgctccttgcacgaacgcgcctccagctagagcgtggtgaccgcattagacaccataggattcggcctgggcgtggatttacatgattacaacggttactactgttgaaacgaggaggatccgacaagtgccaccgagtctacctcgcgggttatcataggacgtggaaggcacatgcgggaactatggcactgaagatctgggacacgacagtacaggacaagatgcccgcggttggaaataaacgcggtcccgcctgaggtaagaccctgcgcgctgaatgatgt

SEQ ID NO: 105221 - DNA, 233 bp, Glycine max
  Clone ID: PAT_MRT3847_66030C.1
ctaggcagctgtcatatcatgaatttggcagaagggaaaagggtagatgttttcagtgtggccaactatttggtcttcatgcctaggtgcctcaaagaaagtatgataatcgtgattttgacgtgaaaaggggagattgttatttgttaaaaatggtaatcctaggaggaaggacagtgggaaggatatggctactatcagatcttggttccccaatttcaccattgtggaca

SEQ ID NO: 105222 - DNA, 411 bp, Glycine max
  Clone ID: PAT_MRT3847_66031C.1
gacaccaacaccaaaacaaacccactaagatgggttcctttggatccttcctaaggctggttcttgcaacccttatccttatgccttaaaggcttgctacttactaccaaacaattaaaaaaccaacaatgtaccaaccttcaatgtccaaccaaccatgtccaaacaaccggttaataagccaaaaccaccggtttacaagccgaaaccaccggtttacaagccaccatataagaagccaccatacaagaaaccaccttatggaaagtacccttcagtagaggacaacacccatgcctaaagcaagcaatgaggtctattatctacttaataaataagaggaactgctttgtgttttctagcattgtgatttacaacttcgtagcaatgcatattcttgactcttgcatg

SEQ ID NO: 105223 - DNA, 334 bp, Glycine max
  unsure (1)..(334): unsure at all n locations
  Clone ID: PAT_MRT3847_66032C.1
cagggacaccaacaccgaaacaaagccactaagatggcttacttgggatccttcctagtgctgctatttgcagcccttatcctcatgcctcaagggcttgctacttactacaaaccaattaagaagccaccactgtacaagcctncagtgtacaagccaccagtgtacaaaccaccggcttataagcccaaaccaccggttcacaagccgaaaccaccgggttacaagccaccatattagaagccaccatacaagaaaccaccttatggaaagtaccctgcagtataggacaacacccatgcctaaaagcagcaatgaggtctattatctactt

SEQ ID NO: 105224 - DNA, 270 bp, Glycine max
  Clone ID: PAT_MRT3847_66033C.1
cgcttcttcccattccctatctccaccgccaccactcctcctcctccctaccccttcgtcgagtccaagctttttcctctcccaatcccacccccctcccctctcccgccgcgcctcgcctacctcatctccggtcctccgccgacgcctccgccatcctccgcacgctctccgccctctactcacccccgcaaccgctacgtcctccacctcgaccgcgactcctccccggaagaccgccgccttttaacccaccacgtcgaccgccat

SEQ ID NO: 105225 - DNA, 443 bp, Glycine max
  unsure (1)..(443): unsure at all n locations
  Clone ID: PAT_MRT3847_66034C.1
ctaagatggcttcctttgtatccttcctagtgatgcttcttgcagcccttatcctcatgcctcaagggcttgctacttactacaaaccaattaagaagccaccagtgtacaagcctccagtgtacaagccaccagtgtacaaaccaccggtttataagccaaaaccaccggtttacaagccgaaaccaccggtttacaagccaccatataagaagccaccatacaagaaaccaccttatggaaagtaccctccannanangacaacacccacncccaaagcaagcaacgaggcccatcatccacccaataaataaaannaactgcccnncggcccctaacatcnnaattcacaacctccnancaatnccaaancccnactcttncatgcaccncaatccccccnancatcaatgatnnncccaacccaccataacacacaccc

SEQ ID NO: 105226 - DNA, 608 bp, Glycine max
  unsure (1)..(608): unsure at all n locations
  Clone ID: PAT_MRT3847_66035C.1
gagggtaagacgacgaattccatttataattgctactttatcatacacatacaatacatacatcatgtatcactatctcttgaatccttagtatagttgcataataagtatattgcactagaataaagaaaaaaaataagagtttattgtataggtgtagtgcttcgaagcagtgttgcgtcgttttctctaagcagatttcgtatgacaacacaatcttcattgatagagtacgttactcttttggaacccagcatccatgcaacccatatggaagtccataggggaatttggccctagcaatctcttcaaaagtggaaccatctaacaccaacgcaaatccttctccatttttctcactgacaatggagatgactacgccatcatcttcctctgttgctcctggtcgtgccacaaagaagggttctgagggcactgcaccttcttcatgccagttcttagccttctttaattcaaaatcaagcttggtgagggtgttgggaaagttacaaggtctttgtgctccacaagcatatgcatatctgtatttcttccctaaataattagggtttatgctgcacatggncatgccttttccatgttcattc

SEQ ID NO: 105227 - DNA, 421 bp, Glycine max
  Clone ID: PAT_MRT3847_66036C.1
tttttgttgggtttttttttttggatcaaaatacctattcactcattaaataaatgaacacttagaaaaggggtcaacatcgatccaaccgatcacgtaataccaagtgtaaatagaaggtcctagcacaattatatttaaagcatacgcattgttgaggtcaagtaacaggtccccttcaatcagttggagaattaatcatgcaggcaagagaggatgggttcacactgaggcaaaaataactaaaggaaaaagacagtacagcacctagtaaaaataaatcacaaattgcataacatatacttatatgcagaacacgtaatgaatccgagaaataaatagacacaaccaccaaaacatcctagtactcttgatctcggttcaaactacgaagaggaataaatgggaaatgaaaacaaac

SEQ ID NO: 105228 - DNA, 446 bp, Glycine max
  Clone ID: PAT_MRT3847_66037C.1
cccacgcgtacggctagctaccacaaccaactcatacttggtcattggattggttccctttgggttgtggctttggttattttttttactttaacgtttggttaagggttaatgttccgaaataataaaggaaggttgttaaataaactggttaattggttggaaaattaaaataatatactaggttgttgttgtttcttcttgaagtgaagtatcattatatgaaagaagatcaagaataatgcattataatgtttacaagacagttagcatgttttctatatggatattgagtgggcagaacattgagtgatgtataaaaataaaattgttgcattgtctttttttcgtattagccaattaatacacttttatgaataagtatgtgtgtgttctatgtaaaaaaaaaacaacaccttttatgataaatgggtaaacagggataa

SEQ ID NO: 105229 - DNA, 360 bp, Glycine max
  Clone ID: PAT_MRT3847_66038C.1
atcaagcgtcacagccactacgatagggtacacgaagcatcaccacttcgagcgtagagctagacgacatgaacgatgcatcgctatgatgataaatatgggaatacccggctctatgttggacggcagtcatcgacgactcgatcacgtgacctgaagcgtgtcttaagcagatatggaagagatcgaggacgtcatcataagaatgattatcgctctgatgaatatagagatcctcgagatcgctgatgacgctagatacaactcaggatggacgccatgtttaacgaagtcatgtcattgtggaaattgccaaagggggtcctcgtcgttacagggaccgggaatatatgggacggg

SEQ ID NO: 105230 - DNA, 342 bp, Glycine max
  unsure (1)..(342): unsure at all n locations
  Clone ID: PAT_MRT3847_66039C.1
gttacctcnttnaaaagnagcngagggggnncggaggggattatttganggatcgcatccttcccccaagctgaaatcgggaccgtgtttaaagctccagccaaaacgacgacgtacagaaagtcttcggtatactcagaagcacctccacaccggaacagctgaaacaagcccacaaaggaagcggcgatgtcctacgcaacgacgtgagcgagcaaagcactgaaacggcgtacgattcagccacgggagccggagcaaaaccctcgggtctttacggaccaccggcagaagaaaagggaccacccactcctggaggacccaagacaccaggctggacag

SEQ ID NO: 105231 - DNA, 543 bp, Glycine max
  unsure (1)..(543): unsure at all n locations
  Clone ID: PAT_MRT3847_6603C.1
ccctttnnntttttttnntttttttttttttattttttttttttttttttttttttttttttttttttttttttttggacggaaacggcaagcaaaggaaaagtttccattcgatttctaaatatataaaaatatatatataaaaaaaggggaaacggggaaaaaaaaaatagggggtcataacaaacctaaatttattagccaaaaaatggggcagggaaagggcctaccctatctaaaaaattcaaacccaaagggcctaaggggttttttcttcagcatggctagcattttcgcgatgggggctcatcatccgcttgaacccggggaagttgacgttgccgcccccgtcggaatccacggatttgatcatgggggggcattcctccacggagcactttattccgggggggttcaacacctggcaaagctccgggggggatatgaggccgttcttggcctgatcgaacaggttgaaggcatcggggagctcggtgccccccccgcccgcggtgtcggagcggcaaaaggcggcaaactccg

SEQ ID NO: 105232 - DNA, 338 bp, Glycine max
  Clone ID: PAT_MRT3847_66040C.1
gggggctgcaatgagtgagttaaagctgcgcaatgaattgtgtctggaacgaggggcactgaagcgagagcagatattttatttcctattaaaattaccgtggcacgaaagaaataggagctgcattcttctagtagctctttttctatacgagaacatgcatggcgcacttaggagttatccagggagatcaaaattgagtatgagctccaaaggtatctaccatcttgatatctaatactcgagaaaaggcattaatgacgtctggtaatctgaccctcatgctttgaatattgttcgagaagataattatgcaccttacgtaacaccctataaat

SEQ ID NO: 105233 - DNA, 297 bp, Glycine max
  unsure (1)..(297): unsure at all n locations
  Clone ID: PAT_MRT3847_66041C.1
cgcgtangtaagctcggaattcggctcgaggaaaaggaccatgaagaaccttccccattctcatgggctactcaaggtaggacaggataagaaagatggggtcttcataatgttttggcagctaacctgctcccctttcccagtctggaccctttattttcatctataaatcatctttcagctgaaannacacacagcttcatagctacgatccacgctcccagagacacagagatctcaacatgnncctcanctttacctgcnacagtngtntctcctgggtgaatgagacatgag

SEQ ID NO: 105234 - DNA, 376 bp, Glycine max
  Clone ID: PAT_MRT3847_66042C.1
ttgcaacctccacattagttttttccaaccaactcgatgaagatcaattaaaacttgttttttagtgactcggcttgattcttcgtcaggatatacttctattaaaaaagtaattattatcattattatgatgatgatattatagtcaaagaaaaatcaaacgctcttgtacaattaggtaatagtaccacattaaagtatcaccactggaatagtgtgacgtgacaggcaaagtttaagaaccgattcattattttctttttgtccaggaatcgtctcttcttacttaggcaatgttgctactttctaaccaagtgaaatatgcccaactgtataatttgcagcaataaacgttaattttggtactttctttcac

SEQ ID NO: 105235 - DNA, 392 bp, Glycine max
  Clone ID: PAT_MRT3847_66043C.1
gacgtcatgccgctacgtagctggaattggctcgagaaaacccttatactttacacgcgctttatattctcctttatcgccgctgtgtgcaacaatgacaacaggggggtgattccatggcaaacaccgcatcttgtgtggcaggccatcatgactgcccggtaaggttgtttgagctgaagacaaaaaagacacaccgcctcatagtttttaagattgaggagcagcagaagcaggtcattgtggtgaagcttggtgtgccagcccaaggctatgaatatttaactgccagccctcctgctgatgagtgccggtatgctgtttatgattttgagtatctgactgaagggaatgggcctaaaagcaaaatttttttcattgcatgggcccct

SEQ ID NO: 105236 - DNA, 671 bp, Glycine max
  Clone ID: PAT_MRT3847_66044C.1
gaacggccaaaaatattttatatattagatagaaatagaaccagaagtactacaaggatacagagcagatactatctcctgaaacgtgaaaacataagcaacaaaacatcaacccaacaaagaaaactacaaaacccaaccatacatcccacactaggtaaaggccaaagacatagatgaggaccattggtgaaaaggaacaataaaatccttttcccaccccctcaaccaagaccaggtgagaaagattgcattatccaccagcttagagatgacaaaaggttgatttttaaaaatcatgtcatttctgaggttccaaatagatgttgtagctgctatccaccaaatcttccactttctgttagaatccctcgaaccagccaaggaaaagtgctgaaggaagttatccccaggcctacaatgcataactgtgtcttccttgacccaagagttaaactcctaccacattggcataacttttttgtaagtgaaaaagagatgagaggcagattcaacttggctttggcagaaggggcaaagatcattttcaatgacaacttgccttctaattaggttttccttagtcggtaacctatcccaaagtagtctccaagcaaaggatagggctctaggagggactttgatttcccacagctgactgaagctcgtgc

SEQ ID NO: 105237 - DNA, 758 bp, Glycine max
  Clone ID: PAT_MRT3847_66045C.1
ccacgcgtccgctccaccctctctctttctctcctcgcaaactgtttctctctctagatcaatcgtaccacaactgaattcttcttcttcctcttctcctcttccgttttcgttcgcgtttccgcaattcggagctgaagatcaaccaccgctcaaattcgcgtttggatccgatcgaatccgcaatccaatcgagtttcgggatctgaagagaaagagaagagagggatctgcgagcgccataggcgatggcgatgtcggggatgcgaggactctccgtgttcataagcgatattcgcaattgccagaacaaggagcaggagaggctccgcgttgacaaggaactcggcaacattcgcacgcgctttaaaaacgagaaggctctgactccatatgagaaaaagaaatatgtttggaaaatgctttacatatatatgcttggctatgatgtggattttggtcacatggaagctgtttctcttatatctgccccaaagtatcctgaaaaacaggttgggtacattgtaacatcaagtttgcttaatgaaaatcatgactttctcaggttggctataaatacagtgcgcaatgatatcattggtcgtaatgaaaccttccagtgtctagcattgactatggttggaaatattggtgggagagaattgctgaatccttagcaccagatgtacagaagttgctgatatcgagcagctgcagaccacttgttagaaaaaagccgcattgtgtttgctgcgcct

SEQ ID NO: 105238 - DNA, 340 bp, Glycine max
  Clone ID: PAT_MRT3847_66046C.1
atggcagttcttcatcagcaaaataacggtataaaaataacaggcagtggagatcacagtaaatatatgcgagtataaagacaacaacaaaataataagcgcaacataaaataggcggtgaaaaataaaacacacgcatgcattaacttgatggacaagggaacagagtgaaggacaaaaatgcttatatgtgtcaacaaatcattccattcctcttcttcctccagctcttctggttcttcaatgaaggcgtgtttgataaccgagaatcataagtatttattttaaatattccaattatttgtctgtgtttatgagtttctaaatggcgtagaaaaat

SEQ ID NO: 105239 - DNA, 566 bp, Glycine max
  Clone ID: PAT_MRT3847_66047C.1
gaaaaaccattgtatgcttttgagtttaccatcaccatcaccactggtttccaccatgtcagagaagaagaagaagaagaatagcacgagaaggagcgttgttgttgttggggagagcaaaaagccacaacctttggtggaagtggaagacatagaggactcactttccttctccaaagacgagactcacaaactgagagtggctcttttggactggtacgacctcaaccgaagggaccttccttggagaaccacattcaaacaagaagatgaagaagtggaaagaagagcttatggggtgtgggtctcggaggttatgctgcagcaaacaagggttcagactgttattgcctattacaaccgttggatgcaaaaatggcccaccattcaccatcttgcgcaagcttctcttgaggaagtaaatgagatgtgggcaggtttgggctactaccgaagagctcgttttcttttagagggggcaaagaaaattgttgccgaaggaggccaaattcctaaagtggcttctatgctacgaaacattcctggaattggagagtacacttctg

SEQ ID NO: 105240 - DNA, 346 bp, Glycine max
  Clone ID: PAT_MRT3847_66048C.1
tgatgctagcgtcgcatccaactcagtacatatcttctattgaatcagacgagcgaagatggattttgaaaaatatgtgctgcacaataacagcactgaggcacactttactgctgagacttatcaaggaatttctgccatagcacgtaaaaatgagctcacgacagcactccaccatcatatgttagttgattctgtcgaggtccatcgtgaggggaattgcaatgcagtccagaagcacaactgactgttacgttgccgagtaaattatctgcgtgccatgtagcctaacatcgaaagccacagttacatacatggacgtgtgcattacaatacgagcggctga

SEQ ID NO: 105241 - DNA, 1514 bp, Glycine max
  Clone ID: PAT_MRT3847_66049C.1
ccgcggccccccagggcgccgaacgcggcgcggtggtgacagccattgttttaacacgagatctctcttaatagtagctgaaaccggattcaggtctgcgtttccctatctacggacctcaagggcattgctgcccattcggcttgtaggtacacaacctcggccatgagggcgggttgcttttctcagaacgttactcttgtgaagaagtgcttaaatatgttctctttcgtaggtttggctttgagggacagctggaggatcggcaatggataggttggggactatgctaggagcaatattacttatgccaataacatttagagccaaataggaatgccactgaatccagattcactcttaaccaaaggcacattaaggttcgggaggtaattttctaaaaatttctcttcagatggcatgctttgaaattgagaaaataacagagatgctcagcaagaactttcgtcttcaatggtttcacagacatttggtgtccctgatatggccttcaattcaattgattccacaatagatgatagtaacttcttgaacagtggtccgtgggctccaccaccagcaccgccacctctgccaccagcacagtttcagcggatgaggacatataccaaggtatataaacgcggagctgtgggaaggtccatagacataacacgatattcaggttatgaggagcttaaaaaggatctagctcgtaggtttggcatagagggacagctggaggatcggcaaaggataggttggaaacttgtctatgtagatcatgagagtgatgttcttctagtgggagatgatccttgggaggagtttgtgaactgtgtccgctgtattaaaatactttctcctcaagaagtgcagcagatgagcttggacggagattttggcaatggtggccttcaaaatcaagcctgtagcagctctgacggtggcaatacttaaatgaagttcagtaatacgctaactattcttccgtattgttaacttagattatttctgggagatgcattattgtcctaattccgaaaggcaattattatgccactgcggacttctgtgtccaccatcaggacttgaaaggagaagttttgtctatgttccggacatgcaaatttgaagagccaaatgagggcggagaagtgagctgctgctctggtttaacattgagcggtaattttgaatgtataaagtcttaggcagctagattttgcggaagctttcatgatcttccatccttggaggcaccttattattttttagccaatatgactgtgaagtagagaaacttcaaatgttgtaaggtcaagtgcatactgttgcattgtttgcttgaagcgtaagtactaaaaatgttggagttatttgactgtacaggagatcaattactagtatttgacacatgaatctaatgttcatcatcgactccctcttattctaattcagtaattgaaaagaaaaaaaaaaaaaaaaaaaaaaaaaaaaaaaaaaaaaaaaaa

SEQ ID NO: 105242 - DNA, 478 bp, Glycine max
  Clone ID: PAT_MRT3847_6604C.1
gcgccctttttttttttttttttttttttttttttttttttttttttttttttttttttttttttttttttttttttttttttttttttttttcccaaaacaacccctaatttttatttacagaagcggcaacaaggtaaaaggggaacggccatgggggggaccgaatttaaccccccaaaattagctagcaatgggttttacagggcccaaacaaaacccaaaaaaaacacctcccaataaaaaaaatccaaacaccttttacccccaaacaaaaaatcccttttatcccaacaaaagggggggggggttttaagctctttttgaaacagcctaaaaaacaaataaattttttaaaaaggggacatttgccaataacaaaaattgggtttacaaaaaatttccctaaataaagcttttaaaattataagggggcttttaaaacaaacgggaaggtttaaatcttctcctttggggg

SEQ ID NO: 105243 - DNA, 1413 bp, Glycine max
  unsure (1)..(1413): unsure at all n locations
  Clone ID: PAT_MRT3847_66050C.1
agaatacatccatatcttacaatccacagtctttgttgtttagagacaataatcaagatggggaagttcaggcagatgctaggagcaatattccttatgccaataacattgatagccaaatgggaatgccactgaatccagattcactctcaaccaaaggcacattgaggttggggaaggatttgtctaataatttctcttcagaaggcatgcttggtaattatgaaattaacagagatgcccagcaggaaccttcgtcttcaatggtttcacagacatttggtgtacctgatatggccttcaattcaattgattccacaatagatgatagtaacttcttgaatagtggtccatgggctccaccaccagcaccaccactgccacctctgccacctctgccaccagcacagtttcagcggatgaggacatataccaaggtatataaacgtggagctgtgggaagatccatagacataacacggtattcaggttatgaggagcttaaacaggatctagctcgtaggtttggcatagagggacagctggaggatcggcaaaggataggttggaaacttgtctatgtggatcatgagagtgatgttctactattgggagatgacccttgggaggagtttgtgaactgtgttcgctgtattaaaatactttctcctcaagaagtgcaacagatgagcttggacggagattttggcaatggtggccttccaaatcaagcctgtagcagctctgacggtggggatacttaaaatggagttcagtaatacactaactattcttccgtattgttaactcagattatttctgggagatgcattattgtcctagttccgaaaggcggttattatgccactggggacttgaaagcgatcttttgcagtttgaaaggagaatttttgtctctgttctggacgtgctaattttaagagccaaatgaaggtggagaagcgagctgctcctagtgctacaaattcaattaagttactataaactggtactgaatcgaatgtttggagcacccggacaaaactagacgtgtttcaagccatagatttgttgttgttgtaatgttgaaaagaattgttcttggcatggtcagaaatatttaattctatgtattgtagaaagaaaggtttaatattgagcggtgattttgaatgtataaagtcataggcagctagattttgcggaagctttcacgatcttccatccttggaggcaccttagtaatttttagcctagaggactgtgaagtagagaaacttcaaatgttgtaaggtcatgtagacactgttgcattgtttgcttgaagcataagtactaaaaatggtggagaattaattgactgtaaaaaaaaaaaaaacaaaaaaaaaaaaaaaaaacaaaatnnnnnnnnnn

SEQ ID NO: 105244 - DNA, 432 bp, Glycine max
  Clone ID: PAT_MRT3847_66051C.1
tgctttgaactcgttgattctccaactctgttttggaaattccagttctctaggcgctgcaatgcaatcttctgcttttctttttctttttctttttctaattctctttttgagattgaattgattttgatgagtttttctctgttttgaacttgtttgttttggaaattgcagttctctaggcggtggaacttctgctttttcttatttccttttggatgaaaagtaatttccgtttggataaaattaataatgattggttttctctgcttagaacttgttggttctccaaattgtattggaaattgtggttaatcttctgtgttttctaattttcttttgaaatttcagtggaaagtaatttccgtgtggataaattgattacgacttgttttctctgttttgaacttgtttgtccaaaattgtgtctgg

SEQ ID NO: 105245 - DNA, 458 bp, Glycine max
  unsure (1)..(458): unsure at all n locations
  Clone ID: PAT_MRT3847_66052C.1
cgcnggcgaagcgccaacttatctagtaaacgtacgtccgcctgtgaaaattttttgggttgccaagtccatttcagaaagatgtcaaatgttgacaagggagcttacatatttaaaaaatgataatcgtgacgggacttcttcatctttcacataaaatgaactagatacatacataaattgaggccctagaaaaaggaactaggccagaaattagagaacatgaaacctcaaaaataatgaactatatctgtcacattctgggacacaaaatgctttaccaactgaacttgctaaataaaccgatcaaggttctcacagcaagcaggatagatggtacttattacacggcattgaacaaaagcacactgaaatatatgctgctttttgtcggttggacgaactgacatatctctaaaagtgacatttctcacaggaatatgttcactaccacgttt

SEQ ID NO: 105246 - DNA, 322 bp, Glycine max
  Clone ID: PAT_MRT3847_66053C.1
gtaaagtgtggacgaacccctgcaattggaagggccagctctagttccgattgaatggctggaaaaagctgattaccctataatatgagagattgatgatgaccatttgatgcagaggatagatgaatgctattgtttcaaaagacaatgacaatctaccgttgatcatggatgggacgggttagcatggtgcacaaaaaacaatgccaaacaagattttttttgatgataaaatcctgttgactaacatacatctattgtttgttgaaaatttgacagggtgttcttgggtgacaacatatggggatagtctgtatactgt

SEQ ID NO: 105247 - DNA, 468 bp, Glycine max
  unsure (1)..(468): unsure at all n locations
  Clone ID: PAT_MRT3847_66054C.1
catagagcagatacttgggtttggaaacctgatccaagtggacaatactcaacaaaaagtgcgtatgatcagctcttgggagaatcattgggggggaacctggatggagcttttgaggaactatggaaacttaggatcccagccaaaacaacattttttgcatggaggctaatcagagaccaattgccaacgaagtcaaatttgcgaaggagacaagtagagggtaaatgacatgatgtgcccattttgcaaaaataaggaggaggatgcagctcatttattcttcgattgcagcaaaaccttacctttatggtgggagtccttgtcttgggtgaacatcttgggcgcattcccgcaaaatccgaggcatcattttctgcagcatgacagtgggaatgttggtggatcaaacccaatagatggaagtgctggtgggtagctntaacatggaccatctgacagcaaagg

SEQ ID NO: 105248 - DNA, 899 bp, Glycine max
  Clone ID: PAT_MRT3847_66055C.1
ctgattgtcaaagactaaagcactaggcttccaaatatgttcaacatagttatcctctgtattcgtggatactttggccaagcagctgtcctaggattgccagacaccggaggccaggtggtatatattcttgatcaagtaagggccttagaggaagagctactccataagattgagctgcaaggccttgacgtgaagcctcagattcttgtgtgatcatgtgtttgcatgtgttggagcttgaataatctcctacttccatactaggtgatttaattcctgataacatgtcacctgctcaagttggttcctcagtgttgcctcatcctgactctctttgttccttaagcaacaaattcaaaagagtagtcagcagcatctacaatgttctctgcaccctctttcaagccatcagtctgagtctctccagaagcaagaaaaaaatggtcctggaaccataactgtagagggcaatgtgtccaatactttacaaggaaacaaccagggaacaacgtcagtggtccttgcaggactagttgcagctctgaaattggttgggggagacttgactgatcacatgttcttgttccttggtgctagagaggtaagttaataccatgtgtccttcttcattgtttcttggagataagaaagttcaatcatttcctgttagtacaaaggtgttgaataaaaagagagtattgaacatcatcagatattcagataactttgaattgttcacttacatttccttacaaataactattatatattccatgtccttgtggatgaattgtatggtttgtggttgcaagctggcactggaatagcagaactcatagcacttgaaacatcaaaacgagttagatttatgatgtgaggcattgcatgaatgattt

SEQ ID NO: 105249 - DNA, 2352 bp, Glycine max
  Clone ID: PAT_MRT3847_66056C.1
aattcggctcgagcaagaacaatgggaatagagattctggagcctaacacgtgcattaggggttgctgcaccagcccctctattccccttcatctccctccctcttcttatacccttctctctcctattgcccgagcaagttagatcatccaggaatagcaacaccgattgcggcccatgcaaaaccgcccaattacatgtttttcttcaagttatttgaatctccaaatctagcacaaaagttacatgtggaagagtggatcccaactctgaacgatgcacttatgatagcaatgcacttgacaaaaacctttgtccacacctcacagattttggtttggcagaatacaagaatgatcttaagagagtttctactgagaattggaagtcttctggaaagcctactggtggtttccacaaaaagaatatggttggaacactcatttacatggcacctgaaatattaagaaaagagttacatacagaaaagtcagatgtatacagttttgggatatcaatcaatgaactcctaactggtgttgtgccatacactgatcttcgtacagaagcgcaggctcacacagtgcttgagatgaactatactgagcagcaattaacagcagctgtcgtttctgatggattacggcctgtccttgctgccgaggacttgggtataccgtcaagattattatcaatgattaaaaaatgctgggatgcagatcctaataacagacctgcttttgatgacattgttgaggaacttgatttagttatggagcatggtaagttaaagaaggcagaagatattcatatcagaccttataacttgcatgttgttcaacctgcgggcaagactgatcactttaaggcttatcaagagagttttagctggttcactcgtggcgaacttttggccaggagtgcctctagtgcaaatgattctggtttgataactaggtgcgagtcttctgacaagccttcagcataccacccaacaatgtcttggggatcttatgctacctgtgggagaagggagactatggaggatacacatttcattcttccccatatttgtgatgaaaaggatgcctatgcttttggtatctttgatggccataggggtgcagcagctgctgccttttcttctagagctgtaccagcagttttgcagacttcagatttcatgggcagtcctgctaatgcactagcggaagcattcattaagacagatgctgccttcagaaaagagcttgattcctatcgcaaatccaacagatgtatccagaaggattggcatcctgggtgtacagcaattgctattcttatagtcagaaacaagctatttgttgctaacattggtgattgcagggtaatcttatgtcgtgctggtaatccaattgctctaagtaaggatcatgttgcaagctgtcttcaagagagagagcgtgttattcggcaggggggccaagtacattggcaagttgatacttggagggttggtcttcctgcacttcaggttactcgttctattggtgatgatgatttgaagcctgctgtaactgcagaacctgagataactgagagtaccttgtgcccagaggatgaatttctggtcatggctagcgatggcctgtgggatgccataagcagtatggaggtcataaatataataaaagatactgttaaagagcctggaatgtgctccaagaggttagctactgaagcagtggaacgaggcagcaaagataatatcacagttatcgttgttttcttacgtcctgtgtctacagcagagagaatttattagcataccttcttgcatgctctttgagacttgccacaaatagcacatacttatattcctttattggataataaaagataaattatgtttttagtctctaaacttttcgttatttatggttttgtttcttaaattcttcaatgatcaatcaacgtcttcaaactggaatatgagctcattttttcttataaatcatcatcatatgtgttgttagttaattcaaatgacagttaatactgttattagtcagttagttaggtaaatcagttaccgtcattgtgtgtgcaatatcaaagcacacatgtactagtgtaaatcagagtgtgtgtgtctacatgagttatcaactaacaaacaacatttccttatgtcatctatctttctttctctgagtgtgatagtggtttcttccctgtgtgcatgcaacacctgtgaggctttctgctgcattaaacctctatccagtgtagtttttggatcgtggcattcctcttgtgggaattctgcaggtcgactctagaggatccccgggtaccgagctcgaattc

SEQ ID NO: 105250 - DNA, 177 bp, Glycine max
  Clone ID: PAT_MRT3847_66057C.1
ccacgcgtccccacgcgtcgattcatggctctataaccacattattgttatactacctgggcatcatacaacttggaccatcagttttgttaaaaccgcttgaatacccgagagagtcttgtgtaagcgcacccctatggggaatcaaaggcgctattagctcgttttggtactaac

SEQ ID NO: 105251 - DNA, 379 bp, Glycine max
  Clone ID: PAT_MRT3847_66058C.1
ggctcgagggcttgtaatgactgcctcgttttggactggccagtgctataacgctcctcaactcggcgctgactgcgtcacctatcgcaagccgtcgtagcaggcctttttcagcggcttcctctgtgtcctgaaagccatacgctcccacgcggtcggccgagatctgctttagtggatgcatctgcgacctgagctcggaccgcctctgctgaagaccgacgctgtcctcctccggtcatgcctggccatctgctgctggcccgtcatgggtcgtgactccctccgagaagcagaggtgtgctcccgatgggatgaagtaccagtactcctggtctggtgacctggatgatgtagatgttactatggacttcgtaga

SEQ ID NO: 105252 - DNA, 757 bp, Glycine max
  Clone ID: PAT_MRT3847_66059C.1
cacgcgtccgaacggccaaaactcgagtaacagaacatccagcgacacgaaatttccatcgctaaaaattgaacacatgatataccgtagcaccatacgcactcttctgctgcactataattcccgtgttgcgtcgtgtctatcttcattttcatattcttcttctgcaaccacacaagaacaatgggaatagagattctggagcctaacacgtgcattaggggttgctgcaccagcccctctattccccttcatctccctccctcttcttatacccttctctctcctattgcccgagggtctgagagtgttgtttatgaagggactttggatggcacgagggttgctgtgaagaaacccatcttgtcaacttcagaagacattaataagtttcataaagaattgcaattgttgtgcaagttagatcatccaggaatagcaacaccgattgcggcccatgcaaaaccgcccaattacatgtttttcttcaagttatttgaatctccaaatctagcacaaaagttacatgtggaagagtggatcccaactctgaacgatgcacttatgatagcaatgcagttagcaaaggctttgcaatatctgcataacctcgggattgtgcatagagatgtgaaaccggcaaatattcttcttgacaaaacctttgtccacacctcacagattttggtttggcagaatacaagaatgatcttaagagagtttctactgagaattggaagtcttctggaaagctact

SEQ ID NO: 105253 - DNA, 159 bp, Glycine max
  Clone ID: PAT_MRT3847_6605C.1
cccgtacttccgtacgatgaggcacagcgggaattatgggccgttatcccatctcctactctggtcacggtcgcgaggttctcgggtatggttgccgtgactgtcaagccgtctgctccggcacccctgttcattgtgctagtgcctacctatggaggg

SEQ ID NO: 105254 - DNA, 306 bp, Glycine max
  unsure (1)..(306): unsure at all n locations
  Clone ID: PAT_MRT3847_66060C.1
aacaaaacggagggagnaaaaaacagcanaaagaaaatttatgattaactgataaaccacaacaacaaaaaatcgtctgtgcgatttcaaggaatggggccatccaaaccaaacaaagaaaataacactagcacttcaaaacagcacaataagatcatcgcaacctatacgctcttccccacccacacacaatgcaaacagaaccttaccacaaacatactctcacatcatcctaccaaaaccaaccaatggtatttaaatcatgcacccaaagaactggtttccgcacacaaaaacattggacgg

SEQ ID NO: 105255 - DNA, 761 bp, Glycine max
  Clone ID: PAT_MRT3847_66061C.1
aaaaaaaattattttttattattgctaatttttattcaaaaaaaatgaatccaacctatccctctctttcttctctctttactctgaatggcatctatatattgacgaggatttgctctcacattttcaaaacctgcaacaataactccgttgctgacaaattagcatggcccctgccatcggaagcatgggggacacaaatgggctcatggcccaagtcatcaccggaagggggttcggggggttcgccttctttctaatcatggccgccgccggcgccacctacatgttcagcctctactccggagacatcaaatccgccctggcctaccaccaaaccaccttaaacctccttagtttcttcaaagacttggggggcaatgtcggcgtcctctcgggcctcatcaacgagatcactcccccgtgggtggtcctcgccatgggttccgtcctcaacttctttggctacttcatgatatggctggcggtgacaaaaaaaatacccaagccgcacgtgtggcacatgtgcctctacatctgcataggctcgaattctcagtccttcgccaacaccggttcccttgtgacttgcgtgaagaacttcccagaaagccgtggggttgtgctgggcatcctcaaaggctacgttggtctcagtggagccatcattacacaactatactttgctttttactacgacgattcaaggtccttgattttgctcatagggtggctcccagctgctatttccttccttttcc

SEQ ID NO: 105256 - DNA, 2132 bp, Glycine max
  Clone ID: PAT_MRT3847_66062C.1
gtacatatatatgaaataactaagtgttgttggtaactcaatcagaccctttaacaatgtagtccttaaatttaacatggtatcagagttggttgatctcgttctacttattgttgccctctgtcatctgctaccgtctgttatctccggccagctagtgttatttttctccagcgggttggtgcgccttgtcaagcacagtcgaacccaagtgttttggatctagattttgacccagtaatgaagagtgggttctcttttttcttctcttgtcattttcttttctttgtcagatctacttttcttcggtaggcctttgttgtcaccaatgccaccattgtactcgtctccctttagcaagtctaacctagtggtcagttgctattgcctttgccagagccgtcacaccgatcgctagagttgccgtcgaaattgtcattgtttgactgttattttgttgttttcacctaaagattccatttctactttttcctttcttggtgttagtttgggggtttttcaatcctccatttacgcaaatatagacggttcatccaagtcaaggcttctggtgttgtttgttcattttattggtcatgtttgtttctctggcttggtaacaatgtagagcaaggccagtttattggtagtggttaagcattgtgttaagcttctgccatcgatggttaaacattgagatgttatgcttctgtccatagtggctaagccttttgttaagcttctgccatggatggttaagcattgagatgttatgcttctatccatggtggttaagcattatgtcaagcttctgccatggatgttttagcgttgatatgtgttgcttctacctttgtggtggttaagcatttttcattggcttgcttctgccttttaggtggtaaagcatgtttgcttctgttaagtggttaatccttgggttgtggcttatgcttaatggttaagcatatgtgcattggctttgaatgttttcagtcattgtctatctttcaccaaactattttttggcactcttcattgtattttgctttcatttgatatttgtgttgttcatcccaagctggaagttttgtgaacacctttcagcttacgaaggcctattagaattttggccttgtttgtccttgtcctaaatgcatgggttcgatctggtgtcctagatgctttgtccccgtccttgtcccagatgcactagctccgtccatgtcccaaatgcactggctttgtccttgtcccaaatgcactagcctgactttgtcacggttgcattggctttgtccttgtcccaaatgcataggtttaatctagtcaagaatcattatttttttcaaggcaatgtatagtaataagctaaaagcttagcaagctttagcttgaaggggagcattggaggccactagtcaaagtttatatcagaggaaactagtcaaaagtccatatttctggaatatgttattcaaaacataattgtgccttctttgtcagctcttcctttacttgtttcaagtcccattgtgttgtttatattcttgttgtcatttgtttcaagttttaggatccttctttgttttgcttagaggaagtaacatcatggctagtattgctgtcattattggatggatgatgcaacattttcttgcattcattcttggacagaattgttgttggggttttgattttgagcaaaattatttaagatgaccttgtatccattggttgcattgttatcatgagtttcagttggctcctccgcatcatgagttagaagaagacttttcagtatttggtgttgtattctgcgcactggagtcctctaccttggagttattttcatcctttgatgcttcaattcatatgttcgaagcttggagcagacaatctatatactcaaggtggagggggagtgttaggtttactgttgtattttatcctagtgacaacaataaagttgttttagttgtatctactttggcatagtagatttaggcttttcccctatgtaatcttgtttttgtctctctgtaaccaaacatcacatatatataaatcagttgagtgtggttagtgaagtgaacaaaataaaacaaagaagggagttgaattgtgttttc

SEQ ID NO: 105257 - DNA, 2053 bp, Glycine max
  Clone ID: PAT_MRT3847_66063C.1
acctgatgctgaatagctttcatatcatgactaagcttaccaccagctccttctggagttaacttgcaagtttgaatcatagaagcttcaagctggcaagctgctctaaccaaatcttcctccagtgatcgagcatccttaaccttccataccacaaaacaattcaagtatgagcaccaagctttatcaaaagcagcaagctgagatctgaaggtacaaagcttcatggatactgagacagactcttcatcagaactttgtattggaccatctagtataatctttatcaacaactcaaacatttggacaaactcttgtgcagatttggctagagtattctcacattctcccattccactgaaaactgcatctggatgacccaatatcatataagcacaaagaacaactctcacaggataccttgataacctagctaagctattgtttgactccctgactgaatctactttctttgcctgcctgcttctcacagaactccggggagtagcccttttcttgggggaagcaacccgtttaagaagatgatcgatgttatccaagctagacaaattcttggcaggagccactgctgtagacactttaaggcggctctcaaaccggtcaagtaaagttttcacagtctgaagagtagaagccgattcaatcagaagagcaagctgttcaaaaggcattgacttgacagatttctcattgatccccactcgagccgaattgcttttgtcaaggtaaatgttgttctcttttgccttaggaatcgcctccagcaccttgctagatttctggaaagatattctgcttgctttggcatccaattccgattctcttgggcatagccacgcaatcttcccctctgcctgagatattcagctctttgtcgtcttgccctctgcaatcgatcttccaaactcatccttttttttccttctctcaatctcacgctggtgagatacagactttgccacatgtatcacctgcgagactcgagcatgtgccctattcttctcagcctccagcaacccaagtcgttttgtttcagcagcagctcgtttttggtgaattgcagcacgtacacactctttatatttactttctcgagccatccttctcatcaatgtctgagatgacctttctctatgagaagcccttctttgcctgagagccttgagaataagcatcctattagcctctgcctgctgaacccgtgattcaacttttgttccaagcctcacacgttcattctcatagcgcatttctactccacttttagctgcttgacgcaattcatccagtcttgctaaacgcatttgggccttagtcaagatgctcaacctcttctgttcagcagcctgcagttttgcttccagtctctgaccaagatcttcctcctgagatgaacaccttgaggggcttcttggctttgcacgtgccttgcttgagagtttctcatagtatttctgtctgcgaagatcagcgtcgtggagtttcgcttcgatttcctccaccgtgctcggagacttgcactccgcgtcacgaagccgtcgccggagcctcttcggcaacctcgttggcgacgagaacgattcctcatcaccggccggaaactccatcacaattccgccgccaccgccgcttctcccctccggcaactccactccgaccgccatccttcaacaacaccgcaacgtagcaaacaacctctccgtaccagcgcgacggcgatgaaatcgctccaacgacgtcgtacagtacaaaccacacacacagaacacaatagaatcgcaaccaccaaaataataacaataacaataataatcgacgatcgatgatcgatgatcgatgaacggtgaccggtgattggtgatatatatacaaacaacgaagggaaacgaaaaagtgaaattcgaaacgattcaaaaaggcaacgtcgcgacgagtggactcagtttcgagagcttcgttttatttttgagttttttttgagagagagcgaaagtagagagagagagagagacgcgagccgcccacgcgaaaa

SEQ ID NO: 105258 - DNA, 456 bp, Glycine max
  Clone ID: PAT_MRT3847_66064C.1
ccgtcgccggagcctcttcggcaacctcgtcggcgacgagaacgattcctcatctccggccggaaattccatcacaattccgccgccaccgccgcttctcccctccggcaactccactccagccgccatccttcaacgacaccacgacgcagcaaacaatctctccgtaccagcgcgacggcgatgaaatcgctccaacgacgtcgtacagtacagcacaaaatagaatcgcaaccaccaaaataataacaataatattaaaaacaacagcaattaataatcgatgatcggtgatcggtgatcggtgatagatatatatacaaacaacgaagggaaacgaaaaagtgaaattcgagacgattcaaaaaggcaacgtcgcgacgagtggtcgagagcttcgttttgtttttgagttttttttttagagagcgaaagtaagagagagagagagagagt

SEQ ID NO: 105259 - DNA, 408 bp, Glycine max
  unsure (1)..(408): unsure at all n locations
  Clone ID: PAT_MRT3847_66065C.1
gtcgactatgggggggggncccgccactggccacttgatctacaagcttggagggattgacatgcgggggattgaaaggttacagaaggaggctgctctacatcaacaagatgtcattcaagtatgcctgggtgctcgtcaagctcagagctgagcgtgaaagacgaattaccattgatatggcttacgtggaagtttgaaaccaccaagttctactgaacggtcattgatgcatgctggacatctgagactttatcaagaacattattactggtacctcccaagccgactgggctagccttattattgactccaccactgctggttatgaagctggtgtttctaaggatggacagacccgtgagcatgctcttgttgctttgaccctacgtgtgaagcatatgatct

SEQ ID NO: 105260 - DNA, 696 bp, Glycine max
  Clone ID: PAT_MRT3847_66066C.1
aaagcaaattttaacttttaaatatatataccatgctgtcacacaatttctacccatctcaattgtaccctggggattattaactaatatggaaggcaagtattattcacaatctacttttattaagtccttgcctatcttaggcgtcttttagcatttttattcatgtaaattctgctagttttagttatatgccagcccaaaaccaagaggaaataatggttcacatgaattaactgcatcagctggctgatcaagctgttcaactcttctgaaccaagtcactggtagtttacctttgaagccatgactgccaaagataacatctataattccctctccttcacttcctggcaaccaaacagcaacaagagcatcaatcttatccaatagcaatggctctaagactaaaggtcttccagatatcagaataacaagagttgggattctgtcagcaactaggcttatgatatctgctccatttaaggggattgtaagctctgaattgtcacccaaggtctcggcatatggagcttcaccaatagctacaattgcaaaagagaattcattgcgttctatggtgttctcggacggatatttctcatatataaccttctggttctgctcccacagttgcctgcacagcatccaaaattgttgtcccaactgtgatctgcccactcattccataccaag

SEQ ID NO: 105261 - DNA, 5945 bp, Glycine max
  Clone ID: PAT_MRT3847_66067C.1
atgtcgactttgaaagagcaaatggcttccatgatggaggccatgttaggaatgagacaactcatggagaaaaacgtggccaccgctgccgctgttagtttggctgccgaagtagacccaactctcctagctaccgcacaccatcctcccccaaacgcggtaggacgggaaaggaacacactggggcacaccagcaaccctcatttgggatacaactgggtggcttaccacctaattacacgccgccagtcgtgcatgatgatgcgggtcatgtctcttcccccatccttgaaggggagcctcctcgacagcccgacgaagtccatgaagatcatcgagaaaggaccacccctgacggcggaagaaagaaggaaactcgatctcatcgaggagaggttaagagcagttgaaggctttggtgattatccgttcgcagacataacagatctttgcttggtaccggatgtcgtcatccccccaaaattcaaggtacctgatttcgacaagtacaaagggacgacttgtcctaagaaccatctcaagatgtattgtcgtaagatgggggcgcattctagggatgaaaagttgttaatgcactttttccaagatagcttggccggggccgcggttatttggtacgctaatctggaagcttcccgcatccgtacttggaaggatctaattactgccttccttaggcaatatcagtacaattccgatatggctcttgatcgcactcagttgcagaacatggttaagaaggaaagtgagacctttaaagagtatgctcagcggtggagagacctgacaacacaagtggcccctcccatggttgaaagggagatgattaccatgatggtagacaccttgccaatattttactacgagaagttggtaggctacatgccttccaacttcgcggacttggtattcatcggggaaagaaccaaacaactggggcaaaaaggaaagaaggaaatacccatgccatcacttcggcgtccgcatgggtcaagcctctgcagacctctcatggtacccatcagtatgcgcaacatcatccgagcttttcagctcgcgccggaaactcctccaattcagcacccgtacagcctagagcacccgcccccatccagagggaggcccccccaagctccggctccaaccacgactcgcccggctggcaatgcccactatggtgtcagttccaacgcgatgaagaactttcccccgaggccaattctagaattcaccccgatcccaatgacgtacgaagacctcttgtcgtccctcatcgccaaccaaatagccgtaataactcacgggaagatctaccaacatcctttcccaaagtggtatgaccctgacgcaacttgcgcgtaccatgggaaaaccccaggccaccccaccgaaaaatgcctggcccttaaatacaagtccacagatgagagaagttttgggaggcctaaacctttggtgatatatttcaccaaggacgtagcttcacaaaagccccgatacccctcggtagttaaacatgttcctttcccataccgaaacagccacgcagtcccgtggaggtatgcacctctaagtgaaaggaaagaagaggccaccgacatcaactcgttgttagccaaggtaaccaatatcacggggctgagcgacgtgacccgcagcggtcgcatgtttgcaccccccgacctgccgactcaacccgcaaacgtcaaggggaaggcaaatgtggtggaagaacaaaatgacaaaatgaccctcactccgaatgaggatattccagtgaaaggtcttctagagaaaatggatggttgtggcaagaaggaaagcgagttcaaggtcattgagcagctcaacaaaaccccggccagggtctctcttttggaattactcatgagctctgagcctcatcgggctttgctagtaaaggtcttgaacgaagctcatgtggcccaagatatctctgtagaaggctttggagggctcgtcaataatatcaccgccaacaactatctcgccttcaccgaagaagaaatccctactgaggggagagggcataatagggctttgcatgtatcagtcaagtgcatggaccacgtcgtggccaaagtgctcatcgataacgattccagtttaaacataatgcccaaaagcactttggagaaattaccgtttaatgcttcccatctaaagccaagttccatggtggtccatgccttcgacggcacctgccgagaggttaagggagagatcgacctccctgtacagataggtccccatacctatcaggttacctttcaaataatggatattaaccctacttacagctgccttttggggcacctgtggatccactcggtgggagtcattccttctacacttcaccagaagttgaaatttatagtagagggacatttggttatcgtatcgggcgaggaagacatcttggtgagttgcccgtcctctatgccatatgtggaagccgcggaggagtcattagaaacggccttccagtcttttgaggtggtaagcattgcctccgtagattccttctctgggcaaccttgcctgtctgatacggcggtgatggtggcccgggtgatgttggggaatggttacgagcccggaatgggtttaggcaaagacaacggcagtagaaccagcatgataagtgccagaggaaaccgtgggaagtttgggttaggctataaacccacacaagtggacataaggaaaagtgttgcaggaaggaagagcggaggtcaaggctcacgattaagacaagaagtcgaagggagcccaccctgccacataagtaggagctttataagcgcgggtctaggacacgaaggccaagtcattgcgatatgcgaagatgattctccgagtgggtcagatttggtacgactatgccctcctggtttccgactaggaaattggcgagtggaggagcgcccggacatttacgcgacaagcataatatctgacgacgagtccctcgaaggtactaatacctgggacccgaccatcgatttcgagcaagaaacgaatcagacggaggatgaagaggacgaggatgtgggacttcccctggagttggagaagatagtcgcccatgagaaccaagagatggggcctcatcaagaagagacggaactgatggacttaggaaccggcaatgggaaaaaagaagtaaagataggcacgggtatgaccgcacccgtccatgaagaattaatagccttgctaaaagactaccaagacatctttgcttggtcgtaccaagatatgcccagtttgagttctgacattatacagcaccgattacctctaaatctcgagtgttccccggtgaaacaaaaactgaggaggatgaagcccgagacatccttgaaaataaaagaagaggtaaagaaacaatttgacgttggttttttggctgtcgctcggtacccagaatgggttgccaacattgtaccagtccctaagaaggatgggaagataaaaatggtgccagaaaatatggaaaagactaccttcgtcaccctgtggggaacgttctattataaggtgatgtcctttggactcaagaacgccagggcaacttatcaacgggctatggtggctttgtctaaaaccgattacataattgccaagtctaaaaccgaggcggaacaccttgtcaacctgcggaagttgttcgaaaggcttaggaagtatcaattgagtttcatcgtgagccagaaagggatagaggtgcaccccgaaaaggtgaaggccatccttgagatgccggaaccccgtaccgagaggcaggtccgagtacccgaaaggcctctcatcttgtatatgatgattttggacgagtcgatgggatgtatgctggggcaacatgacgagtccgggaagagagagcgcgttgtctactacttgagtaagaagttcacggcctgtgaaatgaattactccctgctcgaaagaacgtggtgtgctttagtctgggcgtcccaccatctaagacaatacatgttgagccataccacctggttgatatccaagatggacccggttaagtacatctttgaaaagcctgctctcacaggacggatcacccggtggcaagtcttgctatccgagtttgatatagtttatgtcacccaaaaggcgataaaaggaagcgccttggcagattatttggctcagcaacctctcaacgactatcagctcatgcatcccgaattcccagatgaggacatcatggccttgtttgaggaaaaactagacaaggaccgggataagtggaccgtgtggtttgatggagcgtcaaacgttctaggccatggcactggagcagtattggtctctccagacaatcaatgtataccattcacagccaggctggggtttgactgcaccaacaatatggctgagtatgaagcgtgtgctctggccgtccatgcggcaattgactctaatgtcaaactgctcaaggtgtacgggtactcagcactggtgatccaccaactgagaggggaatgggaaactagagaccccaagttgataccctaccaagcctatatcaaggagttgcgattcattgaaagcaaaaagtacccaccgggggcttccgacaatgacaaaaggacattgaggaaattggcaaccggtttcttcatgagtaggagcatactatataagagaaaccatgacatgaccctcctgcgatgcgtggataccaaagaagcgaaccacatgatcaaggaagtccacgaaggttcgtttggaacacacgccaatgggcatgctatggccaggaagatcttgagagcaggttattactggctcaccatggaaagtgattgctgcacccatgtcgaagcggcttcctacaccaatgtcacgaggagtgtagtggtcagattcataaagagggagttgatttgtcgatacggactccctaggaagatcattactgacaatggcaccaatctgaataacaaaatgatgcaggaaatgtgcgtggatttcaaaatccaacatcacaattacatgccctaccgaccaaagatgaacggagccgtggaagcaaccaataagaatattaagaaaattattcagaagatgacggtgtcgtacaaagattggcatgagatgttgccttttgccctgcatggataccgaacttcggtacgaacttctactgggccaacaccgtactccttggtttatagaatggaagcggtactcctgtttgaggtagaggtcccttcccagaaaatactagcagaatcaggcttagaagaatcagagtgggctcaaacacgctacgaccaactcaaccttattgaagataagtgcttgatggccatgagccatgggcgcctgtatcaacaaagaatgaagaacgcgttcgacaagaaggtgcgcttgcgcaagttccatgagggggaccttgtgctgaaaaagatgtcccacgctgttaaagataatagagggaagtgggccccgaactacgaagggcctttcgttgtgaaaaaggcttttttccggaggggccctggtgcttaccaacatggatggcgaggagctacctttacccgtgagctctaacgcatatgggttctgtcttgatcccttgtgtaaacaaaccaacggagggtccatatcaccttcttaattgtacacatggggcactgcgtccccaaatgcgcaagtaagaagagataattttccgggctctcgtgtccgtaaaatgcattcatatcatgcatcgcataagcatctcttcataatatcataatgaacatatcgttcctgcatttgtccgttatcatattccagcctcacattttgcatgagtcattgcatcatcatatgcgttcaacatactttttgtttgctcatacatgatccttgtattttcctctccc

SEQ ID NO: 105262 - DNA, 556 bp, Glycine max
  Clone ID: PAT_MRT3847_66068C.1
tatggacggagtgacaaaagcttcacttcactgattcaggtagtgcaggatatgcttccagaggaaaacacgttgccaaaaagttattatcaggcaaagatattgtgtttgatgggtatggagtatcagaaaatacatgttttccttaatgattgtatattgtatagacaagagtatgaagaaatgcataaatgcctcatgtgtaaggtatcacggtacaaagtgaaagatgatgacaagtgatgaaacgacaacaaaaggccccccagaaagtgttatggtatcttccaatcattccaaggttcaagcgtttgtttgctaatgcagatgacacaaaagatcttacatggcatgtagatgggagaaattacgatggtcatccagttgattcctcctagtggaagaagactgatcatttgtatccgaatttcaacaaagagtcaagaaatcttatgtttggacttgtgattgatggaatgaattgctatggcagtttaagcactcagcacagttcgtggcctattttgctagtaatttacaacttgcctccttggtt

SEQ ID NO: 105263 - DNA, 359 bp, Glycine max
  unsure (1)..(359): unsure at all n locations
  Clone ID: PAT_MRT3847_66069C.1
aaagacttgcttccaagatggttctgctagagaagctctgggatgacgttgttgctggccctcaacctgagcgtggccttggcaagctcanaaaactcaccaccctcaaaactanatacagtagcaagctgcagaagacattgtcaatgccatcaacaccaacaatcccaatgactcccacaactccaacaacaccaggatccacacataaagctaacaacatttggaggaacatcttccatcctgagagcaactccaccacaaaaaccatcaatactcagatatttaacaaaccacttcccaacactcccactgtctacaactgactatacantaagaaaaccagaagcaagcaccac

SEQ ID NO: 105264 - DNA, 358 bp, Glycine max
  Clone ID: PAT_MRT3847_6606C.1
cgcgtccagccgagatcaattggctattgatgatattgtgtttggtagtaactatttgtttcagagacacaaagcatctgggtaatgcctcaggtttggcagttatcacagtgatgctggtgaccacttgtttgatgtcactggttattgtactttgctggcaccagaatgttctccttgcacttgggtttgttttcatatttggctacattgaggttctcttcttctctgcttctcttatcaagttcctgcaaggagcatgggtgcctatagcattggcacttgtgtttctgacttgcatgtgtgcttggcactatggcacactcaaaaagtatgaatatgatgttcaaaacaaggt

SEQ ID NO: 105265 - DNA, 330 bp, Glycine max
  unsure (1)..(330): unsure at all n locations
  Clone ID: PAT_MRT3847_66070C.1
ctttgcatgtntttatanatggtcagctatcaggaactgcatatggnacttagnattcccnntactagcatntaacgagggagtgaagtccagaaccggtgtnaacnagatctctcttncgaagtgntgcagttggactcccgatgtnggtccnnatnttggaaacatggaatgcggtggtcctnggccantttccataagttggcncacgnaggggagggactgnctggcagaatgggcttaaanggtggtctaaaagggaaccctggagntcnancnctggnggagtccgncatgnatggatccagganttagntcccaaagcancca

SEQ ID NO: 105266 - DNA, 175 bp, Glycine max
  Clone ID: PAT_MRT3847_66071C.1
ctgggcgtactccggatttttttttgccaaccataggcgctctttcctaggatgaaagcttttactacaggcgatgacttttgctaccacgactgtttgacagagtagactatcctgctgcatgctgacacacatacgcttcaaccgttgcagcgcccatgatttgtacactgag

SEQ ID NO: 105267 - DNA, 608 bp, Glycine max
  unsure (1)..(608): unsure at all n locations
  Clone ID: PAT_MRT3847_66072C.1
ggctcgagggcttgtatcagagtacaacagggtacggtgagtagcagtaacgacactaaggaaagcccgtggatattgtgcagtgtcgcgcaagttgagcaagcaaagatattgctatcagttattcccatatttgctagcaccattgttttcaacacaatattagcacaactgcaaacattctcggtccaacaagggagttccatggacactcacctcaccaaatcgtttcatgtccctcctgcgtcgcttcaatccattccttacattttgctcattgttgtggtccctctctatgatagtttctttgtcccttttgctagaaaaatcaccggccatgagtccggaatttcacctttgcagcgaataggctttgggctctttctagctacattttctatgatttcagctgcccttgtggagaaaaagagaagggatgcagctgtgaacctcaacgaaactatatccattttttggattaccccacaattcttaatttttggcttgtctgagatgtttacagctgctgggctcattgagttccnctacaaacagtccttgatagggatgcagacattcttcactgccatcacatatngctcttactc

SEQ ID NO: 105268 - DNA, 108 bp, Glycine max
  Clone ID: PAT_MRT3847_66073C.1
gatttctatttcacttctctgccacgcacggaaaagagcgagtgcacagtacttttcggcacgcgcagagctcatgccaggctgctgcactgcctggagcgcactcta

SEQ ID NO: 105269 - DNA, 3170 bp, Glycine max
  unsure (1)..(3170): unsure at all n locations
  Clone ID: PAT_MRT3847_66074C.1
cccacgcgtccgggacataacaaacaggcatttacttttagggcccttatttaagcttcttagcaaggtgttttcaggtgaatgggtgaatggtgcctattccccggtgagaaggttaagccaaccttcaagtccttctgaagccaacaattacacaatatatcatattcaacagactctgttgataatcctggaggatataattatttctcttaaaagcatggctccgctaaatgaaaaaataataagtgaaattaacatcaagctattgatagagtgtgcccggaaatcccccgttgcagtcacccgcaaccatgtattttctgtactttctgctgttaccagagtctttccaggcgaagttttggagcatatgcttgatattctagaagttattggacaagcagctgtcacacagattgacagtcattcaaagcatgtttttgaggatcttatatctgcaattgttccgtgttggctggctaagacagatgatgtggagaaattactaatgattttcatggatatattgcctgaaatcgttgagcacagaaggctgtcatttgtgttatatctattaagaactttgggtgagggtaaaagcttagcctcattgcttatcctacttttgcgttcattaatttcaaggaaagctgcctgtttccttaatgtcaagacacgagatgatttaacattttatactggggaatgggaatataaatttgcagtgcaaatttgtgaacaatatacaagtacgatttggcttccttctttagtcatgctgcttgaacagaggggaaatagtgatgttgaccaggcactgtttctggaattgtttattgtaatgcaattttctttgcaaaagttgcaagatccagaatttgtgtttaagttgaaatcaggagaagataccgcagtcattcagagggcgttgggtgagcttatggagcatgttgttttactcttgcaacttgtagatgcatggaaaaagcaactgaatttccctgtaattctgaggagagagttgaaggaaactatgcgtgcggttgtaaggaatctaacaacagtcatgatacctgccggatactttaagagcataattaaattgcttcaccatgcagacaagaggctcggaaaaaaggctcttgggctgttatgtgaggctgcaagaaatcacaaaaatgtcagcttaaagcttaaaggcaataaaggttcaaggtcaactccaagttttcttttgcttcatatgaatgaaacttctcaagaatcacttaataaattgtgtttagaaattattcgagtacttgatgattcatcaaatacctccttgaaagtggcagcagtttcagcattagaagttctagctgaaagatttccttctaataattccatctttagtctgtgccttggatctgttacaagacatattgtgtctcataacttggctgtgacttctagctgcctcagaacaactgctgccctgatcaatgttctaggtccaaaatcactggcagaacttcccaagattatggacaatgtgatgaagtcatctcgtcgagtattggctagtttggataagaaacccgaaaccaccgatgttttatcagcctcaaatgaatcccatttttatgttctcatcactttggaggcagtcgtggacaagcttggtggatttttaaatccatatctcacaaatatcatggagcttctggtgctttatcctgaatatgtttcaggagtagatgcaaaagtggagtctagagctcatggagtacgaaagcttcttgctgaaaaaattcctgttcgacttgccctgccacctttgttaaaattatacccagctgccattgaggctggggataaaagcttaacaattgtatttgatatgttgggaaccataattggtacaatggacagatcatctattgtggcattccatggaaaggtatttgacctttgtttggttgctcttgatctgcgccgtcaaagtcctccttcagttcaaaacattgatgtagtggaaaaagctgtgcttaacacaatgactgttctgaccctaaaacttactgagagcatgttcaagcctcttctcataaagagtattgagtgggcagaatctgaagtggatgaaactgcctctagcggaagcattgatagggtcatatcgttctatggcatggtaaataagcttacagagagccatcggtcattgtttgttccttacttcaaacacttgcttggtagttgtgttcatcatcttagtgaaggtggagatgtgaaagtgtctagagtgaatcagaagaaaaaggccaggattctggatgatggcaatataaaagaaataggcagtgtgtctatcaatgcctggcatctcagggcactagtcttgtcatccttacataagtgtttcctgtacgacactgggaccttgaagtttcttgactcctcaaattttcagatgttgttgagacctattgtttcacaacttgttgtagatccaccagcactgttggatgacagcattaatataccaagtgtgaaggaagttgatgacctactggttgtatgcattggtcaaatggcagtgactgctggatcagaccttttgtggaaacctttgaatcatgaggttttgatgcagacacggagtgaaaaattgcgagctaaaatattgggcctcagaattgttaaatattttgtggagaacttgaaagaagaatatctagtgttcatagctgaaacaatccccttcctcggtgaactgcttgaggatgtggagctttcagttaaatctcttgctcaggaaattctgcaggaaatggaatctctgagtggagaaagccttcgccaatacctatgacgtagattaggagagccgtattcatggttttgtgacatgagcaaagagctagagatgtgtaatcaaacaaaaaatataatggataggccagtgtaaactgtggttaatcaaggaaaattagcatttatttattctgataaaggttaaagttcaatttttcccttgcaatttttaaactcagtcatttatagcatagtgcttttgggggtacttgtgatagtaagagaaaagaaaaagaaagattaagttggtttatttttnncaatatcatttatacattctcnnngaggaattttatccnnnnactctt

SEQ ID NO: 105270 - DNA, 480 bp, Glycine max
  Clone ID: PAT_MRT3847_66075C.1
ccacgcgtccggctcttggaagaggagacggacacggacggcttcttcgagcagtaccacccggaccaccccgcgctgctccaggttcagcagcccttcgccgacatgctcgctggcgccgccgccgaagacggcagccgagggacctctgtagctggctcccctgcattcgccgccaacgctatctggccctacgatccaggccagctctcccagctgctcctttctaggacctacccggccgacacggcgacataccccagctcgatggcgtcctctgccgggtccggtgctggcacggtaaacatggacatgctcaacctggcgttcctcaagggcatggaggaggccagcaagttcttgccggccaccagcaacaatcatgaccaccggcgccaagcgacgggaacatgcgacaagcgggtggacgaaatgtcgccgttgctccaacagagtgctagcaaaggccgcaagaaccac

SEQ ID NO: 105271 - DNA, 280 bp, Glycine max
  Clone ID: PAT_MRT3847_66076C.1
tttactggtgcgcacacgcggggttgctgatgatgcatggatagcaagggacagtgctatgacatggtcggaaagggggcgcgccagagacagatgtgtacaccatcggctctcaagactggaaatcatggaatgctgatagcgtaaaagcaacgactatgacatacaatccaaacgcgagttctgacgcatggagtaaggaatgcttgaaacgggccagagttcactgtgcaatcacacagtgtcactggagggactgccaccccaatgatagatgtgc

SEQ ID NO: 105272 - DNA, 423 bp, Glycine max
  Clone ID: PAT_MRT3847_66077C.1
cgggccgggatttccgggttggaccacacgcttccgccacacgcttccgcccacgcttccgccaacgcttccgaagattttgggttggggctgcctcttaaggtggcagcttccaccacaaactcaaggggggcctggttcaacacaaaaaaccacccttttaggcttttgggaagggcttaaaacaagcctgcagggggggaacccgaaaccacaacccttccagctgaagctgaagcaaagccaaaaccaccaccttttggccccaaaagaggggctaaggggaagatccttaggaaggattcctactggtccaaaggccctggttcaggggttgctgttgatcaggacccaaacattggttaccctgtgggggttcgattcaccaaagtcaactttgccatatgttcaacaaacaacttt

SEQ ID NO: 105273 - DNA, 203 bp, Glycine max
  Clone ID: PAT_MRT3847_66078C.1
atataccgaaaccacggccaatgaatcagccaacagtgtcacaaacccagactgatttaacattggaagaacgcttgaaccttgctagtgcactgtaagcacaatgcctaggtcgcatcatgctgttcagcttaccaagaaaaccatgggctcaaatgttatactgagacagttcactggggtcaatctgctgcatacaggaa

SEQ ID NO: 105274 - DNA, 844 bp, Glycine max
  Clone ID: PAT_MRT3847_66079C.1
gaagatcaaccaaaatcggtttactcatatataactcatgcattacagctagaaaaaaaaaaagatttacttttatcatgatatacctttattcactaagcctttaatttataattttccaagtttcgagcaaggtacatatatacgtacattcacatagtatatagtatcttagaggtgacacattttaatttcacctatacaaacatcctctgtatgctggtgtccagtaatctggtccactgctttctctgtaaactagaggagtacatgaagtaggaactaaacacagacctctgcttcgaaggtctagctttgtgtcctccttatgatcttttctatccaagcttccccatggatccttgtgtgaattagctttcaagaaagggttgctcagtagctggacttgttcttgaagaaactttatgtaccctattgcttcaaacagcacagatgctgtatctttccaaatggagacacaatttgctgaagggctgtgattttgtcccctagcttgactttgggtgcctgcacctttgaagaagaagctgttgatgtatcttgcttaggctttttcaacattgcatctgaagattcttcagatcttttcttctttacttcacgtgttgtcccctccccttttccattaacattagttcttatcgtactagatgaggtctgaacatcttgctaatttggtgtgcatgcgttcaggtacggcatactaggcttttgattacaaacttcactcactgaaaggcccaatctaccattaaagttcaaagcatttgagaaatttcttgtgcatgaagaaatattgggcatgtcatggtagagtttgcac

SEQ ID NO: 105275 - DNA, 265 bp, Glycine max
  Clone ID: PAT_MRT3847_6607C.1
tgccaaatccaatgtttttgcctcggagctcatgagttcacgttttttgggatttccgtttagtttgcctatcgtcatcttcgttcattttcctcttgttttaaggttttgcttctgattgattgattgattgcgtttgagagagacttgtgaactcagttctttctttctttcgccctcttgggtaagctcagaaacttccgtaaagaaccagagtttctccctagaattctgtaaggtgtttgatctaggattttcgttgggt

SEQ ID NO: 105276 - DNA, 374 bp, Glycine max
  Clone ID: PAT_MRT3847_66080C.1
ggctcgagcacaacacgctgcttcaaaactattgcaaacccaccatcattgtggtatgggatcattgaaccataacctcacctcaaatcccctggcctatataactacacacattaacggctggcaaccgccgggcgaagaattgtaacgcaacaaatgttggcgtggccaacgtctagaccagcagcgaacggctgtcatcatatgtcaatttcagccatgaaattcatatcatcaagaccagggtagtacccccgatcgcaacataaccgcacctagagggatcttttcctcagctaggactcagactatcctaatatgccaccgccgaactcgatgggacacaatcccaccaaaccgagaacagatctgat

SEQ ID NO: 105277 - DNA, 563 bp, Glycine max
  Clone ID: PAT_MRT3847_66081C.1
ggcaattgcccttggaacgaagaaaaatgatatcacaaaatatatttgtatctacatcgttccactcaaaatacattttcggagaagaaaaaacgaataaacatataatcaaccaattcaattttcaggacagcctacacaagaaagagaagctgtgccacccattcaataatcatacggctaaagcaaattccaattttcccaactccatcttgcaacagtttctcaaaagatcaacttgagacataagatgcctgtacctaagttcctcttttggtttgcaatgcacgagtaatttgctgacacatgccctagatggaatatttttgaagagtcacggtaaattctggttagaaagtcccatagattctgcaacttctctagcggccaatgtgtcagcttgtacctgaaggcgatgcaagagatacatcaagaagagatgtacaaacaccaagtagaaaaataaaataactcgagctgttggatactgccagagaaatcttgtggccctgacagccccagaatctaatagtttcactggccttttgcaactgaatacttgc

SEQ ID NO: 105278 - DNA, 420 bp, Glycine max
  Clone ID: PAT_MRT3847_66082C.1
atcataacaaaggagtaaatcgttggggggagctcttggtgaaaactggacacatgaacagattttactaacgtcttcatgacactatactgaacacaaaacatctgaattataaaaggggagactttcttcaatcacctcataacaaaattttcaaagaaaatgaaatttattaagtttgtataaagaacaatggtacaacacatattttaagaattctcatattatcgggaaagcatggggtataacggtgacaaaattaatcctttgtcttaaagcacacactttaagaggagcaactaaaatacccttccttagttttgtacttcacaatggcaggagttcatcattctgaaccacccacaaaccaaaccagatggcgctgctgcgagcctcagcaaccataatgctgacttcgag

SEQ ID NO: 105279 - DNA, 192 bp, Glycine max
  Clone ID: PAT_MRT3847_66083C.1
caattaggagctttattcagggcaagttccgtattctgtattcacgtttttttttttcttcctaaaataaagtggttggttggtccattttacatatattaatccctttttaccataaaaagttgttggtcttatcgtcctattattcttcaaacttagtgcttcaaattttatcatgttttttttgtaaca

SEQ ID NO: 105280 - DNA, 2775 bp, Glycine max
  Clone ID: PAT_MRT3847_66084C.1
gtgatcaggtggttggaggtgatcaggtggttgaagacaggagtggcgaattagaatcagagagaaagaagcggtttttatatttctcgcgcgattcgtttcaggcaagtgcagtgcagagtcgaaacgacgtcgttcattgtgcgatgaaagtagctcaacaagtgttgaatctctgaactctttgggattcgaatcttgagtcgttgatcgtttccggcaatggattcgtggctcaaagccgctgaaggtttatttgaagttgtagatcgacgagcgaaggctgttgccagtgacttatcagaggagcagggtgattctaagtccccagcatcaaatgggcaaggatctcagggcaagaggacaaaatcaaaaccaaaggctcaaaaggcactatccgactcaccaactataattagtgatactactcacgagaaaagtggatctccatcagcacctgtggacatagcagcttttattagacaaagttgatcctgaaattgaagtgagcggatccacgtcttacaaacgaaccataggagccacaacctagcgatgcaacatcacccctaggcgatgatgttggtaaacatgtcacagatgatgcggaagcattagaaaatgatgctgatgctggagttgccacaattgctggtaatggtgatcctgtccaagagagtgcttcagacatttgtgagatggatcctcctccagctcccaaaggaattgagggctccagtgatgaacccactagtactggccaaattatcaaatctagagatttagatgccagtaaaaatgtggatatagagaaatctgattctgtggcttctgacacagctcctaaaaatgatcctatactcaaagattctgatgtaaaagttgaatctgttgtggacgagaaaagccaagaggatcacaaagctgacatctcccccgaaaaagtacaggatcaacttgatgaggctcaaggattgcttaaaacaacaaaatctactggtcagtctaaagaggctaggttagctcgggtctgtgctggattgtcatcccgtcttcaagaatacaaatctgaaaatgcacagttggaggaacttctcacttcagagagagagctgagtaaatcatatgaagctagcataaaacagctacagaaggatctgtctgaaagtaaaagggaagtgacaagagttgaatcaaatatggttgaggctttggcagcaaaaaatgctgaaattgaggcacttttctgaaatgcaaaaaatgagagttgaaatggctgccatgaagagggatgctgagcattcctgacgtcaggagcatatggagttagagaaacgctatcgggaactgacagaccttttgtactacaaacaaactcaattagaaaccatggtcagtgaaaaggctgcgacagagtttcaattggaaaaggaaattaagcgtcttcaggaagcaaaggcagaggctgaaagaagtagagtttctcgtcgagcatcatcatcttgggaagacgagactgagataaaatcccttgagccgcttcctatgcatcaccgtcatttggtcggtgcaagtattcagttgcaaaaggcagtgaaactattagattctggggctgtcagggccacaagatttctctggcagtatccaacagctcgagttattttatttttctacttggaagcaggcatggcaggaagaattggagcgtgcacgtcaaggtcagagggaactgacacattggccgctagagaagttgcagaatctatgggactttcgaaccagaatttaccgtgactcttcaaaaatattccatctagggcatgtgtcaggtgttaataatatcttcctgactacatatattttcaagtgtacatactacaaacaaactcaattagaaaccatggtcagtgaaaaggctgccacagagtttcaattggaaaaggaaattaagcgtcttcaggaagcaaaggcagaggctgaaagaagtagagtttctcgtcgagcatcatcatcttgggaagacgagactgaaataaaatcccttgagcctcttcctatgcatcaccgtcatttggtcggtgcaagtattcagttgcaaaaagcagtgaaactattagattcaggggctgtcagggccacaagatttctctggcgatatccaacagctcgagttattttatttttctacttggtttttgtacatctcttcttgatgtatctcttgcatcgccttcaggcacaagctgacacattggctgctagagaagttgcagaatctatgggactttctaaccagaatttaccgtgacttatcaaaaatattccatctagggcatgtgtcaggtgttaataatatcttcctggctacatatattttcaagtgtacatttccaatgccactgcttagggtggcttgataatggtccagcaaatgactcgagcattgcaaaccaaaagaggaacttacgtacaggcatcttatgtctcaagttgatcttttgagaaactgctgcaagatggagttgggaagattggaatttgctttagccaatgattaatgaatgggtggcagcttctgtttcttgtgtagactgttctgaaaattgaattggttgattatatgtttattcgttttttcttctctgaaaatgtatttcgagtggaacgatgtagataacaatatattttgtgatatcctttttcttcgttccaagggcaattgccaaaactaaagaatacacagcgcttgaatgaagaaaagttaggtactaa

SEQ ID NO: 105281 - DNA, 819 bp, Glycine max
  Clone ID: PAT_MRT3847_66085C.1
agtttttctgaaggagtggtgatcaggtggttgaagacaggagtggcgaattagaatcagagagaaagaagcggtttttatatttctcgcgcgattcgtttcaggcaagtgcagtgcagagtcgaaacgacgtcgttcattgtgcgatgaaagtagctcaacaagtgttgaatctctgaactctttgggattcgaatcttgagtcgttgatcgtttccggcaatggattcgtggctcaaagccgctgaaggtttatttgaagttgtagatcgacgagcgaaggctgttgccagtgacttatcagaggagcagggtgattctaagtctccagcatcaaatgggcaaggatctcagggcaagaggacaaaatcaaaaccaaaggctcaaaaggcactatccgactcaccaactataattagtgatactactcacgagaaaagtggatctccatcagcacctgtggacatagcaacttcaatagacaaagttgatcctgaaattgatgtgagcgcttccacgtctacaaaccaaccaaaggagccacaacctagcgatgcaacatcacccttgttaggctcttcattatcaaaaattctaggcgatgatgttggtaaacatgacacagatgatgcggaagcattagtaaatgatgctgatattggagttgccacaattgctggtaatggtgatcctgtccaagagagtgcttcagacatttgtgagatggatcctcctccagctcccaaaggaattgagggctccagtgatgaacccactagtactggccaaattatcaaatctagagatttagatgccagt

SEQ ID NO: 105282 - DNA, 1102 bp, Glycine max
  unsure (1)..(1102): unsure at all n locations
  Clone ID: PAT_MRT3847_66086C.1
ttcttgatttaaagatgcacattcancctcgagaagtgccaccttctgctcaagttctgtggcttttgctgtcctctcatctgctactctctgtatccttgcaagtgcagtggatgactcaactgctctgtgctccaattccacttctctttccatagcagccattttggtagcattatgtgcgacacgctccttcttctgctcttcgctcagcagatgctagctcctctcttagagcttgcatcatccttgtttcgcttagttctcgatttctcatcattgattccatacttgcctgcagggaagctagatttccttctgacaatgcagcctgcctcttaacagcatccatagaacttaaaagtgcctcaatttcagcattttttgctgccaaagcctcaaccatatttgattcaactcttgtcacttcccttttactttcagacagatccttctgtagctgttttatgctagcttcatatgatttactcagctctctctgtagatttagaattaatttaagtgatatgatagtcaatatgttttcatttcaagcatataatgagactttttattcctttaacaggaaatagtgatggtgcttcacctctgaagtgagaagttcctccaactgtgcattttcagatttgtattcttgaagacgggatgacaatccagcacagacctgagcatcattaggaaataataatcaggcatctataataagcaattagaaagattttattggtttaagcaacacccttacccgagctaacctagcctctttagactgaccagtagattttgttgttttaagcaatccttgagcctatgtaccaactaaaaaaattagtcagaagaatcttttaataaagatgtgcataagtaagaatgtctaaacttctccattataagtattacctcatcaagttgatcctgtactttttcgggggagatgtcagctttgtgatcctcttggcttttctcgtccacaacagattcaacttttacatcagaatctttgagtataggatcattattaggagctgtgtcagaagccacagaatcagatttctctatatccacatttttactggcatct

SEQ ID NO: 105283 - DNA, 426 bp, Glycine max
  Clone ID: PAT_MRT3847_66087C.1
tcgcttacttatgctcactcatcggaaataccgtctcttgcaatttgcatccgtttctggtcgggcactaacaataagtccggaattcaggcagctcagttctgtttcgtccatcccatcaaattcgcataaaacctcaaagtcagatggaaaggcgcccaaatcgagcactctttggcttaatttgccctccaatgcggaagaggatgtgcgaacacgtgttcggagctctttcttcggcacttacgtcgctttgttattcccagccgccacttttgctttgggttgttggcaatggaaaaggcacaaatggaagaccgaactcatcgaaaaactgaaaattgcaacaaaaactgcacctgtggaattccctgtggacaatctgtccgcgattgatgatatggagtttcgcaaggtgcacgtcag

SEQ ID NO: 105284 - DNA, 1122 bp, Glycine max
  Clone ID: PAT_MRT3847_66088C.1
aggattgtaccttccctccttcacaactgtgttacaaccaatcacttgtgagtagataactagatatgtgattgtgtcttagtggactgagattatttgtaaatctttttcttattattttacttctcaggctcatactgcattccactttgctgagccgtgctttagtggcctactagctgctccatttgtgccacaatctaatattcatcatgctcagctactaggaatgactcctgctcgaattcctctgccacttgatcttagtgaggagcccatgtatgtgaacgcaaagcagtaccatgctattctgagacgcaggcagtatcgtgcaaaactggaagcacagaacaaactcatcaaagaacggaaaccatatcttcatgagtcccgccatctacatgcactgaagagagctagaggttccggtggacgctttttgaatgccaaaaagctccaagagttgaaactcacttcagcaaaccgtggcctagatgtttctggctgtactcaattgaatctgagtggaaatatgtcagaatcaaaggttcaagcagtagaaaacttgaactacagaaatggtgcttctacaaccacgtgttctgatgtcattagtacatctaatagtgatgatgtcttccagcaacatgagtcagactttaggttatgtggttacccttctcatattggaaggaacatgcagggttattccgcagacattggtggtggtggtggtggtggaaatcaacaccgtctatcagtccttatgtgacaaacttttatggcacactagcaagttattcttcagcgctctgttggagatcataattgcctgtgttccatagggaagtcatccttggctcatttacattattatgtttttactaatatgtttatgttagttgttttggaacaaagatatagacctttgctagatttcaattttcttatattgatgactgaaatatttgggcaaagtagcacatttaactgactagtcacaagcaatatttcttttatgttgatgttacattggaaaatgtctttttgagaactaaggttttggttgtggtgtatgttttatctccgtacactgatgctttattaattttgagagaaaaa

SEQ ID NO: 105285 - DNA, 235 bp, Glycine max
  Clone ID: PAT_MRT3847_66089C.1
gtctcgctccgtgcctttggtttcaaccatttttgtcttgcttctgcttctggtgcccactgtcattatggggccctcaatggtggctgacgcgagaacttgtgtgtctcatacccaccgtttcctggggccctgtttgtgtgacaccttctgtggctctgtttgccttaccgcacgtttcactgtaggtctctgtcgtgtcttccctcgcagatgcttctgcaccacgcgttgt

SEQ ID NO: 105286 - DNA, 494 bp, Glycine max
  Clone ID: PAT_MRT3847_6608C.1
actcttaatatattatcttttttatgaatcctttgttctccacggggttagggatgttaaccgatcccgcgccaactgaggacacgaccgcggatataacttaaatccccaaaaggaacagactatggtacacaccaaagagaaaagttgtcatacgtggaagactaaaaacaaaacaccccaccccaggaagggaacctcaaatccccatccatgcaaaaggcaacgacagcgggcccaactaaaaatagcgtacgagagccaacatggatgcgccagctgcacaaacaaaaaattaaccacaggctggggccctgtccaaaaaacatttatagactcatggaccaaaagaaaccacatccctatgaaaagaatctcaaacaaggcagcccaaagaggtgacattaccttcaccacgctataagcggacaaatataaagtccaacacagactcgcacaaacaactgcaaatcccatgaaaaaacgccccacaa

SEQ ID NO: 105287 - DNA, 771 bp, Glycine max
  Clone ID: PAT_MRT3847_66090C.1
ccacgcgtccggatcttaataaacgctaacctctgtacccttcgctaaaatgagagagtgcatttccatccacattggccaggccggaattcaggtcggaaatgcttgctgggagctctattgcctcgagcatggcattcaggctgatgggcagatgccaagtgataagaccattggtggaggtgacgatgctttcaacaccttcttcagcgagaccggtgcaggaaagcacgtgcctcgtgcagttttcgtagatcttgagcccactgtcattgatgaagtcagaactggcacataccgccaactcttccatcctgagcagctcatcagcggaaaggaagatgctgcaaacaacttcgctcgtggccactatactattgggaaagagatagttgatctgtgcttggaccgtatcagaaagcttgcggacaactgcactggtctccaaggttttctggttttcaatgctgtaggtggtggcactggttcaggtctaggatcccttctcttggaacggctttcagtggattatggcaagaaatccaagctgggtttcaccgtctatccttcaccccaagtttcaacctctgtggttgagccttacaacagtgtcctttccacccattcccttctggaacacactgatgttgccgtgctacttgacatgaagccatatatgatatttgcaggcggttcccttgacattgatagacccacttacacaaaccttaatcgcttagtttctcaggtgatatcatcactgactgcatc

SEQ ID NO: 105288 - DNA, 1631 bp, Glycine max
  Clone ID: PAT_MRT3847_66091C.1
ctcgagccgctcgagccgagcgtcttaataaacgctaacctctgtaccattcttcttcttaaaaatgagagagtgcatttccatccacattggccaggccggcattcaggtcggaaatgcttgctgggagctttattgcctcgagcatgccattcaggctgatgggcagatgccgagtgataagaccataggtggtggtgacgatgctttcaacaccttcttcagcgagaccggtgccggaaagcacgtgcctcgtgcagttttcgtggatctcgagcccactgtcattgatgaaatcagaactggcacataccgccaattgttccatcctgagcagctcatcagtggaaaggaagatgcagcaaacaacttcgctcgtggccattatactattgggaaggagatagttgatctttgcttggatcgtatcagaaagcttgcggacaactgcactggtctccagggttttctggtttttaatgccgttggtggtggcactggttcgggtcttggatcccttctcttggaacggctttccgtagattatggcaagaaatccaagctgggtttcactgtctatccttcaccacaagtttcaacctctgttgttgagccttacaacagtgtcctttccacccattcccttttggagcacactgatgttgccgtgctacttgataacgaagccatatatgatatttgcaggcgttcccttgacattgagagacccacttacactaaccttaaccgcttagtttctcaggtgatatcatcactgactgcatctctgagatttgatggtgccctgaatgtggatgttactgagttccagactaacctggtaccatatccgaggattcacttcatgctttcatcctatgctcccgtgatttcagcagagaaggcataccatgaacagctttcagttgcagagatcacaaacagcgcgtttgagccgtcctctatgatggccaagtgcgaccctcgccacggcaagtacatggcttgctgtctgatgtacagaggcgatgtggtccctaaagatgttaatgcagccgtagccattatcaagaccaagcgcactatccaatttgttgattggtgccccacagggttcaagtgcggtatcaattatcagcctccaactgttgttccagggggagatcttgccaaggtgcagagggcagtgtgcatgatctccaactccactagtgttgctgaggttttctcacgcattgaccacaaatttgaccttatgtatgccaagagagcgtttgtgcactggtatgttggtgagggcatggaagagggtgagttttctgaggctcgtgaagatcttgctgcccttgagaaggattatgaggaggtcggagcagaggctaatgaaggtgatgaaggagaggatggagatgagtattgattaaggactttgcatttttagttactttttcgtgatggggttcttttatgtactttccttggctttattttgtaagttgttgccatatatgcttgctgttatctgcatgaatggtttgtccatttgatggagcttgttctgtcccagcactaaataatttcaatgacatgattgtggcgctttagttaaaattgaaaggtttatgcgcagt

SEQ ID NO: 105289 - DNA, 334 bp, Glycine max
  Clone ID: PAT_MRT3847_66092C.1
gagagccatgcatcttcttctcctatcacaattccatcaaaatccccttctatgtccatgtcatccttctagtctcctccaaaatcaattatacacaacatttccaattcatcgttcataatcccttattgaaatcaatgcttgttctcatataactattgttctccatactaacattaaaatttaaatatctattccttactactttatattactttaatcttcaattaactacacacttcaatatttgaacttcaccacctgcattacttgattaaattctttaattacaatcttttttccccctttataaacatcattttcatttttaaaa

SEQ ID NO: 105290 - DNA, 813 bp, Glycine max
  Clone ID: PAT_MRT3847_66093C.1
tacggctgcgagaagacgacagaagggggcgccaatggagttttgttctgagaattcgaatctaggatttgtttgagcgttcgcgaaggatcatggtggggttcagaaacagatacatggttatggaggtttttctgaaccctaatagggacaaaggtggggatgattctgttatagttacacagtttaatgtctccaaagctgtaagagacagcatattggtgaattttggggagtgtggtttggcttcgtcattgggatcgtttcagggaagtataagggcttgtaaaaatgctgccttgaaatgtgaggagtcaaaatttgagcagtacaaactcatgcttggtgatcgattctcttctgatcatactcatcgcatgaatacctatctcgacaggatcaaagttttggagcattgaataagtggcctacgaggagtgtctcattgagatttctcaattttcttgcaattagtttgtgttcaatcacaagttgcctgcaattattggttaaattttaatctcacgaatcatagtgtgtgtgtgttatctacgtgagttcagtgcaccctcttttcacagaagatgcggctcctgtttagtttgtgctctgacataccaatttttgtgaagtgacattacctagtgtatggtatagagttaacagctttcaaccatgacagaagaggcctgtgaaaatatgtaaatttgcacctaagtgtggtcagattattacatattcattgtaaattactagactatttctagttgtagaacacataattacaaaggaaagtagttttttgagcctgcc

SEQ ID NO: 105291 - DNA, 1464 bp, Glycine max
  Clone ID: PAT_MRT3847_66094C.1
ccacgcgtccggtttcctcttgttgttcactcattcgatctgatagtttcatcagctggaatattttctattaggggtacacgtgaaactggaattatagttcccatggaggatcctatgacaattcttcagaaaggatattcttttacaatagttttagctgttctggcattcggtttgtctacccggtggttactctacactgagcaagcaccttcagcatggttcaattttgctttgtgtgggttgattggtattatcactgcttacatatttgtctggattgccaagtattataccgactacaagcatgagcctgtgcgcatattagccctttccagctctactggccatgggaccaacataattgcaggagtcagtttgggtctggaatctactgctcttcccgtccttgtcatcagtgtgtcaattatctcagctttctggctgggccacacctgtggactagtagatgaaacaggaaacccaactggtgggctgtttggcacagctgtggcaacaatgggaatgcttagcactgctgcctatattcttaccatggatatgtttggcccaatagctgataatgctggaggaattgtagagatgagtcagcaggaaacacagctaccaccaaagggtttgctattggttctgctgctcttgcatctttccttttgaggcttatatggacgaggtttctgcatttgctcatgaaccgtgatattgcacttcctgctggtgttgtcagaagagagtgaacattaccaccaagagcttattacaatcgaagaagacctcttctcatccctgggattgcattttaaaactttggatatggcttctgaagatttaggtgcacctgcctatcagaaattcgatgtggaggcttggatgcctggtttagaacggtttggtgagatctcaagcgcatcaaattgcacagactatcagagccgtcgtttgggaataaggtatcgtcctgcatcagaagcacaagccacaagtgcaaaaaaatctaaaggcaatcttgccccacctcagtttgttcatacattaaatgcaacagcttgtgctgtaccacggatgattatatgtttgcttgagaattaccaacaagaagatggatctgtccttatacctgagcccttgaggcccttcatgggtggccttagtgtcatcgccagaaaatcattatgattgatcacagtatttgtttccatttgaaggatgctgctgcggcattagactatggtgacagatgagttgaagcaattttcattagggtgatatttttacaaataatattaatagcctttttttccttataaactattttttgtatccttttttctttatgatgcaacgtgtatctaaatttatttttttcagtaaaaacaatttttcagtaaaaacaatattccttgtataaaatttttctttttaatgaaaagaactagtagt

SEQ ID NO: 105292 - DNA, 437 bp, Glycine max
  unsure (1)..(437): unsure at all n locations
  Clone ID: PAT_MRT3847_66095C.1
gaattctttaagggacctaactattttgaaattgacttggatatacatcgctttagctatatatcaaggaaagcacttcattcactacgagaccgtacaaagaatgtagtacttaatctgggcttaactatccaggcacagaagcaagaggaactgccagagcaagtcttatgctgcttacagctgaataaaattgattttgctaacgatggtcaaattcctaccattgtggctcttgatgataattaattcatgtgggcatcaggtggcaaattggggtaagacccagatgatgtctatggaggaaaagaaaagacaagattgagggttattttgtaaatttatttacttacaatggaggaaaaggaagagaagcaaaatttaagcaattagtgctttctctcatgcaagttnttttttttttcttttagtgtatg

SEQ ID NO: 105293 - DNA, 342 bp, Glycine max
  Clone ID: PAT_MRT3847_66096C.1
cattgtattgctcatcgtctagctatctcgatcgaacctgtccacaggtgcctgtcacctaatatccttgagcgttaaatattaagagttattcgcgtgggaggagtcgtccggtgatttggcattccagtttaagtttgaagtgggtgattatgtgtatgttaaaaagtgtgaaggggggtagtgcccaacagtccggcatcaacgtcaccagttcagtctggcacagcaatgacccgggtaagtcagtcgagtatatatcaataagtagcgggcatctcacgagtccgaattgaaatcccaaattaacgtgccgcttatgggccataactgaaatcacat

SEQ ID NO: 105294 - DNA, 364 bp, Glycine max
  Clone ID: PAT_MRT3847_66097C.1
gaaaaatccaagtttaaagcttcttcaacaaagaagaaagacaatactccatccaagccatcttgtggattgtcaccaggtggtggagcattcaaattgaacttcataaatgaaaaactttatggtcttacatcaatgctataaacattttatgctaaattacctgatttcatgtcaaaattatatagtttagatgtaacatcttttttacgttcttaacataatgggtgaatcttgttattaattaacgtagagagtacatactatcaatttatttagcttgtttctccttatgtttatgatttttcattttcatttatcggacagtctttatctgaagaatcaatttaattatattttattt

SEQ ID NO: 105295 - DNA, 279 bp, Glycine max
  Clone ID: PAT_MRT3847_66098C.1
gctacgcgaacaggcccataaaacgtgcgtgaggatcactccggagcctggcaaccgcactggcgccacacatggatcagatagcgaactacacgcctatatctctagatgattgtatgcgcagcactgggctacatatgcaccgactcatctgatgacttgcaaacgtatgcgacatgctttactagtgagcatgtggaggacatgagtgcgacagtcggacattgactggcagagtcaacacatgaagctttaaaagattcatgggaagttacattt

SEQ ID NO: 105296 - DNA, 537 bp, Glycine max
  Clone ID: PAT_MRT3847_66099C.1
ggaaacaaacaaattgggtccctctttatgggtagggggcaaaagccacaacaaaggcgggggggggggaattttccctctctatgggtccaaaaaaaagggcaaaaaaggaaaattaggggggggggggggccaccccactggctaaaaacccatcttgggaggccccatctcttccattatcacccaacggggcaaaacccttaattatgggcccgaaaatttaaacccctttcaaggattcatcttggggcaaaaacccatgggggccatgaaaaaaaacaggaggggtggccaaaggggaaaacccaatggggggaaacccacgtccacggaagaagcgggaatctggagggggggaaaaaacctggggctaaccaagtttcccaccagcctttgggacagcattttctaaaggggccccccagggaggggaacaatcagtttggggggggatgggttccccaaacttatccggggggggcgccttcgggtggaaaggaaaggacatatggggggaagaaggggcccattcct

SEQ ID NO: 105297 - DNA, 512 bp, Glycine max
  Clone ID: PAT_MRT3847_6609C.1
attctgttatactaatattttatttgtgcaggtctctgtgtttatgattttgtttatgtacaaaattaaggaaatttaatctttgtttttgaatgagccttgggttagacatgtaggcgacttcacctagtaggataaggtttttgatgttgtagtttttgaatgagccttagagcagacattatcaagtagtcatagtacattttatgaatgatttattttttcatccaatgactaacaagtagcaattcatcagaatatcattgtctattgcattcattcttctgtatgtgctcattgtcaactcaactggatgatttgttgcccttctttgagaaaaataaagatatgattcctgtgttcctttgaggcaatgtagtgggtatagctatcagctatgagatatgcaaggactgttcatgttcaatttcaaaccttgcaattctctttccccttctcctaatgagacctgttgtgggctttccccaaggccatcaatgatgggcctacct

SEQ ID NO: 105298 - DNA, 251 bp, Glycine max
  unsure (1)..(251): unsure at all n locations
  Clone ID: PAT_MRT3847_660C.1
ctgaagaagcccttgatgagctcatgangcttgttcngaagcgctcaacacccatgagctaactgctcccaanncagntccngagangaagnnacagcagcagagaagaggaggaagttgagtgacagaagggaagnngttattgatgtnacagaagagaagaggaagctgatgtcatgaagagaagnggagtggtngtnacggagagaagaggnnttgtgtacagntgngangaggcgcagtgtgacaga

SEQ ID NO: 105299 - DNA, 330 bp, Glycine max
  Clone ID: PAT_MRT3847_66100C.1
gttgtgaactcttcttttctttgtgtctggtttggtttgttttctctacctaaatgtcttgctgggggaactgggttcgaactctcagtgcgacggctgcgagctgagattcccaacttactcctgataccccaccaacctgtatggatgccctgttagtcatcaggtctgaatggtgtcccctgaaacatgtgaatggaccaactgtctgaccctccttcagtgaggtgggaagcactcagcagtaccctattagatatatactttatttactaactatgtttattctgtatgttctccttgtttttgtaacaactctaataatgtcat

SEQ ID NO: 105300 - DNA, 421 bp, Glycine max
  unsure (1)..(421): unsure at all n locations
  Clone ID: PAT_MRT3847_66101C.1
tcatgacatctataaggtcatcancagaggcatcatacctgaaagtggtatcaatgttgatgacaatgctgatgacatcacacttgaggaactggagagcttggaaaagctacctcattactgcccgataggtggacaccttgagtggaaccttgatggcgccctggagaaaacttgggaatatcgcgacttaacatcgatttatactaaacctaaggggatgattccgggatatgaggatcctgcaaaatcatcaggcaagaagaggacagatgaggacttctgcgatcgcattcacaaggacatgcttaaacagttctagtatgctttggtctggagttcaagggcgaaaaccagcctcaaagagtggcagggagctgaacttgaagatgaagagcgggtgctgatatcagaaaggata

SEQ ID NO: 105301 - DNA, 538 bp, Glycine max
  unsure (1)..(538): unsure at all n locations
  Clone ID: PAT_MRT3847_66102C.1
cccattcgtccggggccgggaattcccggtcatccgaggtcccggtcccgggttttgaaaagctcaggtcccggtcccggtagggcaaccgggaaccggaaaaacaagcactgaacaaagatggctctgcgataaacaaatatcgggtgcacccatttgttacggaatcgtaccgaaaaatcatggaatccggcgattttgagcaattgatcatggaacagggatggttggactcggctgaccaatggaactccacaatccttgcccattgggctgaccaaagtttggctgaactgctcgacaaaagcttttcaaggcttcaaacgccaaaattgcgttgggaatcaatgaaactccgaggcagcaaatggcgcaacacgaaaaacatggacggcggacaactgctgtgtgaacagccctttaacaaagatggctctgcgatcaacaaatatcgggtgcacccatttgttacggaatcgtaccgaaaaatcatggaaatccgcgattttgagcaatngatcatggaacagggatggtt

SEQ ID NO: 105302 - DNA, 551 bp, Glycine max
  Clone ID: PAT_MRT3847_66103C.1
caagttctacttagaatgcattatttgtttttaatatataaaaattccaaagacatgaaataaaatatagataacccattttaaaaagaactgctgctttataaccacgagagaattgagtactgattctccattatcttttacctgcatggttctgcgctccttcaaatttaaaatcaaagctgaatcatcaaaaaaaattgcgatttgtgagggagcatatgatcagcatatgaagtgttagacaacacttttcttaagaatggatctcttgatgcatgtcaaccagtccttccttgactccacaagtccctaaatgcttgaaaattctgcttcagcaggatatttctgacatgaccaatttgtggacaatcatctcccgtttcaggctgacaccttggcaataacaagggacaatccgtaatggtcaaggtatacaaagacttgagcatttctagtcctttgggaagtgaacccaagtttttgcattcagaaatcactagcttacacagcgaggtgagcttggtcatgctcttaggcagaaaagttaa

SEQ ID NO: 105303 - DNA, 431 bp, Glycine max
  Clone ID: PAT_MRT3847_66104C.1
ctcctagtggctgatactgcttgagcttcctttgctgaaatggaagtctctcccctcatccttctctcattgctacatagactgtatattactgcgagccgtcatagacgcaaataactccttctgctagtgttagataaataccctcacttaacacgcatgatcgaacctccaactctcttcttcttacttttacacatggcttggataaagatcttggcgccaccgagttcgttatggtgaggactctgatcaaagagatctcttttattacttcagagacgcggcattgtcatctctgttgcagtggaatctcaaaagccgctccatcttacttattctccctctaatccctatacgtcacattcttgcccggtgatagagattggaatgcttagacttataggttgtgtttccaaacaaagactgat

SEQ ID NO: 105304 - DNA, 125 bp, Glycine max
  Clone ID: PAT_MRT3847_66105C.1
gaacacttataatgaaagcggggtaaccgagaaaacaatctatgccttacactctggagcctttcctatttattatggcgctacaaacagatacggattttggccccttccatttaagtaatggc

SEQ ID NO: 105305 - DNA, 223 bp, Glycine max
  Clone ID: PAT_MRT3847_66106C.1
ccaccctatcaataaactacggcatccttactaccgcaacaccatagatctcactggactcgctgggtactccctgtttattgcgaatggcattatcgagaaattatttttgccctgaaagtactccatcgagatgccttcatccatgtacatgaattggatcttcactgaccaagcattaccacttgatctcatcaagacatgattggcaaatcaacatccc

SEQ ID NO: 105306 - DNA, 480 bp, Glycine max
  Clone ID: PAT_MRT3847_66107C.1
gaacattattatattgaatgtcttgtcttgactgagtcagatgatgtgatttgcataatagaatgtgttgcttggttttttactcttttaagccatgtataatggcaaaacatgtgggctttttaacatggtgaattcttgtggcttcaaagaaattttggtattactgtggagggtgggtattgtatagtgcgttagaaagcatattttgaagtttttctgtacagttttggtacactgggtcaatcttatgccttccccaattaattgtgttctttgccagcgtaataaaagccccaaaaaacgcagtgctagcaggagtccaagtaggagcaggagcaggagcaagagtttgtctcggtctctatcttaaattgctgatatttttctggatgattttacctttgcgttctttggcttagtcaatttaaattttgtttgggtgttggatttatactcaaacttgttttgatttaattg

SEQ ID NO: 105307 - DNA, 268 bp, Glycine max
  unsure (1)..(268): unsure at all n locations
  Clone ID: PAT_MRT3847_66108C.1
cgccagagggttgcatgagagttctccagtagttaccaggtatgagaggagaaaagtgaggcatgatagttatgaactttgaaagggttttctacaagcttaagcccttttaaacccaaaatacctccataaaattcccctttaacattaatatttgaccgcattctcaggatttttgacaccataagcatagcagtgctatgtctcaatgaaatgcccccattgcagccactaactgtgaagtgtgatnctatggtnatncatatnc

SEQ ID NO: 105308 - DNA, 126 bp, Glycine max
  Clone ID: PAT_MRT3847_66109C.1
ctctgaattcggctccacgcagaacaatgacagtgagagatggatcactttttgtcgacggtgtacgcttagcttacaatccttgtttactttggagcattcttctacttgcaggattcttacaca

SEQ ID NO: 105309 - DNA, 243 bp, Glycine max
  unsure (1)..(243): unsure at all n locations
  Clone ID: PAT_MRT3847_6610C.1
ccacgcgtccgtacggcgcgagaagacgacagaaggggatgagcattanaggcgcgggggggtaatgaggggtgagaatatgaaaatggaagtggttccattttgacaatcaactcattcctaatagttacagagagggacaataggcgagcgtcccaattcaaacacagtacaaacttattagttaatagaataacatgtcgactggttttgtacgctgccataatctggtgaaacatattt

SEQ ID NO: 105310 - DNA, 1035 bp, Glycine max
  Clone ID: PAT_MRT3847_66110C.1
ccacgcgtccgcttcattggaatattctgtggctctgtctctcactcatcctttgcaatagagtaatacctcaaactacatataatacattttagggcaatcttacttttgatttctgaaatctgattatcattggaggatctgatttctgacatctgattctgattatcattggagggaatctcaacccaaagtttagttttttatttttattattattattattgttgttatttctgccacaacatttaggggtgcattgcaaatggcttccattgttgcaagcttgccgccaccattgctgctccctgctagaaaatatcatccgggcaacttcccaagttcccctttttctcttctttcagggagacggaatcatgtttcttttgttgtgaaggcttctggagaaagttctgaatcttcaactacccttactgtttttaagtctgttcagaatgtttgggatcaacctgaggaccgtctgggacttattggtttgggatttgcagccatagcagcattttgggcatcaacaaatttgattgcggccattgacaaattgccagttttcccaacagtactggaattaattggaatattttactctgtgtggtttacttatcgctatctcatattcaaacctgaccgggaagagctttttcaaatcttgaacaagtcagcatcagatatcttgggccagtaagatgtgcggccgaaatgctatgctagattgggaggaaaaggtgaaaggggctttggttgtcttcactccaatcgtaaatgtcaatgcaaggattatttatttggtttaagacccctatattacatcaatgagttaaagcttacttcttttgtgttggtttctttgtataaaattttaactgagttcccttgtgcatcaaactatcaagagtaaaactagcctaaataatgcccagaacataactgctaagtgccaacttatatactgccataaatctttacaaaatcattgtatgtgtattctcatagtaaaaaaatgctaatgctttgggg

SEQ ID NO: 105311 - DNA, 295 bp, Glycine max
  unsure (1)..(295): unsure at all n locations
  Clone ID: PAT_MRT3847_66111C.1
ctagtctaagcagaaatggcctcttcagtgatggcatctgtgggcccnccaaacctggcccntttcactgttgagaagtcctcagttagagggccttcccctcccctctcaaaggaactccctccttcattcagagntgtgggcnatggtgggnaagaagattcaagactgacaagccctatgngaattaatggtgggcatgggctttganggnaaggagttgatgcatctggcaggncaggaaagggaaacggcgtttaccagtttgtagacaaatacgtgctatgtcgatggc

SEQ ID NO: 105312 - DNA, 776 bp, Glycine max
  Clone ID: PAT_MRT3847_66112C.1
ggtggtgcacattccttcattggaatattctgtggctctgtctctcactcatcctttgcaggagtagagtaatacattacaatacaaggggtgcattgcaaatggcttccgttgttgcaagcttgccgccaccattgctgctccctgctagaaaatcacatatgggcaacttcccaagttcccctgtttctcttctttcagggagatggaatcgtgtttcttttgttgtgaaggcttctggagaaagttctgaatcttcaactacccttactgtttttaagtctgttcagaatatttgggatcaacctgaggaccgactgggacttattggtttgggatttgcagccgtagcagcgttttgggcatcaacaaatttgattgcggccattgacaaattgccacttttcccaactgtactggaattagttggaatattttactccgtgtggtttacttatcgctatctcatatttaagcctgaccgggaagagctttttcaaattttgaacaagtcagcatcagatatcttgggccagtaagatgtgcggccaaaattctatgctagattgggaggaaaaggtgaaagaagggtttgggagaaggggctttggttgtcttcactccaatcgtaaatgtcagtgcaaggattatttattcggtttaagaccaccatattacatcaatgagttaaagcttacttcttttgtgttggttactttgtatacaattttaacgaagttcccttgtgcataaaactcttgagaatgaactagcct

SEQ ID NO: 105313 - DNA, 533 bp, Glycine max
  Clone ID: PAT_MRT3847_66113C.1
gaaagtaaaagattcgtatacacgttacactgccgcactcacgctattggcctcgtcaaaattcaaagtaggcaaacgtatccatcctgccttgccagcctcgtcgtccgcacaggcaaccctccacgcttttgctactgggcgtggtatgtccttgtattgtgttctcgctttgttatctaagccccgctcgctcctctcctcgttacgctgctcttgttggtggcggcatgttttgcaaagcagatcgatggctggcttttatcaaggattgctcaaaactcatacaacacctccacacctctgttttctcttctcgctccttatgcctttgaaacgaggggtgatcttcaccaagtactttacgcgcttgagtcggatacgctggtgatctcgtcggtgtgatgcgcaccaccacgcagcttctgttcagctgcatcacgtaccggctggaagtacgcgtgctgcatggcctcctttgccgctagtcgctcttggtggtcataacgcagcaaaccgtccagaaaatcgat

SEQ ID NO: 105314 - DNA, 370 bp, Glycine max
  Clone ID: PAT_MRT3847_66114C.1
gtctttctttttttttttttttttttttttaatttttaaattttgtattctaatgggcctttttggttgtttttcaagggcaggaaattttcaaatgtgaacccccccccataggacaaacaacacagcgttcaggacactaatctagggaattaaggcccaacagaatttcagaggggttttttaggacaagaaacaaagatccccgggctgaaacaacgggactatcttttttacacaagggaccagccccgggttgtttgcataaaaacggagaaaaccgtccggggtgggccccccaagaagcttttaaagggaatacccccctctggggccagaataacctttggtagggggcggtcaggcaaaa

SEQ ID NO: 105315 - DNA, 273 bp, Glycine max
  Clone ID: PAT_MRT3847_66115C.1
tgttttatgagtttgctcttgatcaatctgaaaggttcccaactctgaacagatcgatacagatgcaaactaacctccatcgagtgtcagaatttgctgtaactgctaatcaaacagtcgatgacggcaatgttgaagcaagaacttctgttaagagagttcgtgaacatgacactgagacagagtcagacgctgatgacattgttagtagcagtacaatccctgtagctctgacagacctaaatagccatgggattgataccacagatttct

SEQ ID NO: 105316 - DNA, 305 bp, Glycine max
  Clone ID: PAT_MRT3847_66116C.1
tctgagagcttcggcagcttatcctatatctctctctgttcttctgttgggcgcgacaacattggagatcaaaactctctctcacgatggaggcaccatttgcttttacggataacgctgatggcctaagcggtaaataataaaaatggagcgattggagattctttcagatccaaaggtgattaaaagaaggagaattagcttatccatataacatatcaccccaacagaagagggaggaaactggtttggggagtcaactggacttggggcagcttagaatcctctctcccttacttatctaa

SEQ ID NO: 105317 - DNA, 2451 bp, Glycine max
  Clone ID: PAT_MRT3847_66117C.1
ggctcgagtcttatacttgagctttgtatcaatttaatatttcccctaatcaagtgttttgcgtttaacagccttttgttttagttttataataataattgatgatgatttgtgtcttatttcaagtctcttacacttacgtgatgataaattgacaaggtatcctgggggaaaaaagcactgctcattggagggaaaacagacccaggaagtgacagaatttcagtatgggcatttgatacagagacagagtgctggtcactcatggaggccaagggggacataccggttgctcgcagtggtcatagtgttgttagagcgagctctgttttaatattgtttggtggtgaggatgcaaaaaggaggaaattgaatgatctacatatgttcgatctcaagtccttaacatggcttccacttcactacacgggaacagcaccttctccaagattcaaccatgtagctgctctttatgatgataaaattctttatatatttggaggatcatcaaaatccaggaccttaaatgatttatattcacttgactttgaaactatggcatggtcacgagtgaagatgcgaggttttcatccgtcacctaaagctggttgttgtggtgtcctttgtggtactaaatggtatatcacaagtggtggaagccggaaaaaaagacacggagagactgtgatatttgatattgtaaaaaatgaatggtctgtggcaatcacttcgcctccaagttctatcagtacaaacaaggcatgccttttactcatctgctataacatacttgcctcactactttctataatggaagaaggattatttatatgccttatatttattttgcataacaatcattttttcttgataaattgaaactacgactaaacctactattggataatcacgtgcctgaaagtggtaatttgcaacacagtgaaaacaataatctttatgcatttgggggaatccagaaaagatcaaataactcttgtttgtcagaaagtatgaaggtaatatttgtaggtcatacttgaattctttttctacctttacctgcatatcaagcatacggagatgctgaatggaaaaagaatgaatcagcactaagggagagcaatcagctcccagtaaatgttcagcatctgtgctacttgaaaaaacattcatcatccactagattggccccccaacttaatgattgttctcaacgtttagttgactcagttgctagacaaaatctagcttctgcaattgaacatggttccggcatgagatctctatcagaatccctggttgttgatcccaattttcccccaaccaacacctcccttcgtaagcaatttgatcacgatgaagaatacaatactgatctcaagatggacaagaactcagatgaaaattctttccctcgggcagtagatcacagaacaaacgaaaatgaccatggtaaacagatgaatagtagtggagccaagaacattacggaggaacaacaggcactgttatctggaattccaatccaacaaaacctagtatttgaaaatgacatgctagaaagtgataacgtgtcatttactgaaaacattaaatcaggatcactgactacttcaaatgtctatcattgctatgaaagtaaattggcttccctgataaggaaaaatggaattctggagggacaattagcagcttccttagcaagcaaagaagccgcagagaaaagtttggcatctgttctcaaaagtagacaggaaatggagaggaaattggcggaatcacataaggagatggaattgatgagagagaagctgaccagtctagagttggcccaggaagaggccaacaacctatcaaacattgtgcactctgacaatgtacggcttgagcatgatgtggccttcctcaaggctgttttagatgatacacagaaggagttgcactcaacaagaggagttattgcaggagaaagagcaagagcattccaactacagtatgaagtttttcatctcaaacagagattgcaatcaatggaaaatcgagcatctactacaccgagaaaaccgttccatgtgcagtgaggtgatgtttgtttgaagttgcttattccacttaattcgatgtgtacatatatttgaaccaatgaatcaccgttagtagttcttctggaaggttctaaaagtgagagcaacttgttttagaatgtcaagtaaattattgataagaaaattaatgtttaatattacgtattcatgcattggatattaaaaaatttattttcttatcattgactaaaattatttattttacgtttttagtttacaagactcaaattcactttcttaaattatgtactttcaactttttttcttcttccattacatccaaacttacctatagtgtaaacctatgtgaatgcaagattagtatgtaaaattattcactaaaaaa

SEQ ID NO: 105318 - DNA, 196 bp, Glycine max
  Clone ID: PAT_MRT3847_66118C.1
aaggtacagcacttaataatattaagggtttagactatatagaaagaattcctcttaccacatctaaggattttcctcatatactttcacacaaaaatggcgaaaaaggcaaaaggagatttatctctagggatggtgaagagatgacattaattaccaggaaccagtattagaagaggacttacaacaagctaat

SEQ ID NO: 105319 - DNA, 387 bp, Glycine max
  Clone ID: PAT_MRT3847_66119C.1
ggaaaaaaaagttttccctaaaaccaaaacgtcttttacaagggaaaaaccgccctggtggattaacaagggggtttaaaaggccctaaccaacaggggtgggtggcctcccccgaactacccagccaaaaagactttgggcaaggggcaattaaaccccccccgaaaccctgcttttttccccggggttggggcctccacaagatcttggccccgattcaaaaagtttttcaatttttggggcccattttatgaaaccccgggtccaaaaattggccctaggattcttaatccgctcaataaaagtaatggggggccccccggggggggggcgggtaacaattgggcgggctaacaagactctagaaatttggtctgggaaaaccc

SEQ ID NO: 105320 - DNA, 188 bp, Glycine max
  Clone ID: PAT_MRT3847_6611C.1
ctgacacatctgtcgagaaggcagacatctggaattctttccatgagtagatgacatgtactcgcgcaggccctcttgacaaaacgacctgtgaatgccgggtgcattttcacaagcatgatggctacttatcactagatgcacgccattaattgaaatcattctaatcagctcttgataacccaaaa

SEQ ID NO: 105321 - DNA, 2235 bp, Glycine max
  Clone ID: PAT_MRT3847_66120C.1
atgaagccccacactccggcttcttctttcgtcactcgtctcccgcacgtgccttacttccgcggcgccactgccgcacgtgccgcgccaccggaccctcctcatgacgcccccggaggcctcgaattccgccgggtctcgaccgccaaacgccgccgcgtcagcctttccgtctgccacgcgagtcgcgtcaccgccgcctcgaatcccggtggttccgacggcgacggcgatactcgagctcggagcagccggcgcggcgtgctgatggcgccgttcttagtcgccggcgcatcaatcctgctctcggcggcgacggcgagggcggaggagaaggcagcggaatctcctctggcttcggcgccgaagccggaggagccgccgaagaagaaggaggaggaggaagtgataacttcgaggatttacgacgcgacggtgataggagaaccgttggcgatagggaaagagaaagggaaagtgtgggagaagttgatgaatgctcgagtggtgtatttaggtgaagcagagcaagttccggttcgagacgatagggaattggagcttgagattgtgaagaatttgcataggcgctgtttggagaaggaaaaactattgtctctggcgcttgaagtttttcccgctaatcttcaggaaccgctcaatcagtatatggataagaactcttttgtcttagtcagattgcttttccataattctgcattacttgtcctgaaacttgactttcatggcaggatagatggagacaccttgaagtcttacacgttgcattggccgcctcaaagatggcaggagtatgaacctattctgagctactgtcgcgaaaatggaattcatcttgttgcttgtggtacaccactgaagatcttaagaactgtccaagcagaaggaattcgtgggcttacaaaggatgaacgtaaactatatgcacctccagctggttcaggcttcatatctggctttacttctatctcacgcagatcttctgttgatagtactcaaaatctgtctattccttttggtccaagctcatacctttctgcacaggctcgagtagttgatgagtattctatgtcccagattatcttacaaaatgtgcttgatggaggggtcactgaggaactggagtgccagcaagaatttcaggaaaaatacaaaagaaaaaccatgcagttatattacttgaccctgaaagacaattcattcgcagagaaggagaagtttcctgttgctgattttttgtggtattctgctgcgagaccctgtagtagaaattgctttgaccgtgctgagattgctcgggttatgaatgctgctgggcggaggcgagatgccctcccacaggatcttcaaaagggaattgatcttggtttagtatcaccagaggtattgcagaacttctttgatctagagcagtatcctctaatttcagagctcactcaccgtttccagggatttcagggaaagattgttggcagatcccaaattcttgcacagattagccatagaagaagctatatcaataacaactacattattggcacaattgactatgttattacggacactgtcagaggatcagttgttgatttctttacagtgtggcttcctgcaccaactttgtcattcctttcatatgctgatgagatgaaagcacccgacaacattggttctctaatgggacttcttggctccatcccggacaatgcatttcaaaagaatccagcagggataaactggaatctcaatcataggattgcatcagttgtatttggtggtttaaaacttgctagtgttggatttatttcaagcataggagctgtggcttcatcaaattctctatatgcaattcgtaaagtccttaatccagcagttgtcactgaacaacggattatgaggtccccaatactcaaaactgcatttatatatgcatgctttcttggaatatctgcaaatctccgttatcagataattgctgggatagtggagcatcggatttctgaacagtttgcttctcaaacattctttgtaaatatgctttcttttgtagcacggacagtcaattcatattggggaacccagcaatggattgacctagcgcgctttactggcctacaagttagaaagacagagccatcagcatcagatcctccgaatccttctgcaattttatgcaacgaaacagaagaagccagcattgatgagagagaaaaataa

SEQ ID NO: 105322 - DNA, 416 bp, Glycine max
  Clone ID: PAT_MRT3847_66121C.1
ggggaacgagttgcgtacacctcacatgctcctgctcctcctcctctacctctgcataagcgccctcgcatcacattctttgcagactcaacaagcattcatttcatttcactcactcactcttcgtttcgtttctctttctcactctagatctgtgtttctctctccaaccttcgtttcaccacacttccatcacttgtcgagtgtagaaatggctccaccaattgagaccccaaccaaggtttccagctatcagcactccccaaaccctcgtcttaacgagaggattctttcatccatttccaggaaacatgttgctgctcacccgtggcatgatcttgagataggacctgaagctccaaagatcttcaactgtgtggttgaaattgggaaaggaagtaaggtgaaatatgaac

SEQ ID NO: 105323 - DNA, 550 bp, Glycine max
  Clone ID: PAT_MRT3847_66122C.1
cgagtagaggggaactactacctacggtgatggagacagtgctcgtggagtggtgaagaagaagaagaagaagaagtgaagtagtagaagtagaacaaggtgtggtgggggaagatcgcacgtagttgtgttatataaagcagcggtaaaggtttgtgttatcttttgggactactactactactactactacttctgccacaaattccaaggtgtatgtttctgtttctcatcccttcttcttagcaagctaaaaaccacaacatcacactactgctactactactactacttccaaatgtcccttgtttgaactcttttggaatccgatgatcgctttcatgtgctagctagcctaggccttttccattactattctttcattctttcctgcatataataacaacttcacattcttttgtcattacattacatttattatttccccacttacagattcagtattcatttaggaaaaacatttcgaatttgtaaagattaaaaaaaaaaaaaaacccaaccaaccacagcttcttgattgttcattttc

SEQ ID NO: 105324 - DNA, 2671 bp, Glycine max
  Clone ID: PAT_MRT3847_66123C.1
atgaagccccacactccggcttcttctttcgtcactcgtctcccgcacgtgccttacttccgcggcgccactgccgcacgtgccgcgccatcggaccctcctcatgacgcccccggaggcctcgaattccgccgcgtctcgaccgccaaacgccgccgcgtcagcctttccgtctgccacgcgagtcgcgtcaccgccgcctcgaatcccggtggttccgacggcgacggcgatactcgagctcggagcagccggcgcggcgtgctgatggcgccgttcttagtcgccggcgcatcaatcctgctctcggcggcgacggcgagggcggaggagaaggcagcggaatctcctctggcttcggcgccgaagccggaggagccgccgaagaagaaggaggaggaggaagtgataacttcgaggatttacgacgcgacggtgataggagaaccgttggcgatagggaaagagaaagggaaagtgtgggagaagttgatgaatgctcgagtggtgtatttaggtgaagcagagcaagttccggttcgagacgatagggaattggagcttgagattgtgaagaatttgcataggcgctgtttggagaaggaaaaactattgtctctggcgcttgaagtttttcccgctaatcttcaggaaccgctcaatcagtatatggataagaactcttttgtcttagtcagattgcttttccataattctgcattacttgtcctgaaacttgactttcatggcaggatagatggagacaccttgaagtcttacacgttgcattggccgcctcaaagatggcaggagtatgaacctattctgagctactgtcgcgaaaatggaattcatcttgttgcttgtggtacaccactgaagatcttaagaactgtccaagcagaaggaattcgtgggcttacaaaggatgaacgtaaactatatgcacctccagctggttcaggcttcatatctggctttacttctatctcacgcagatcttctgttgatagtactcaaaatctgtctattccttttggtccaagctcatacctttctgcacaggctcgagtagttgatgagtattctatgtcccagattatcttacaaaatgtgcttgatggaggggtcactggtatgttaatagttgtcactggtgcaagccatgttacatatggatctagaggaactggagtgccagcaagaatttcaggaaaaatacaaaagaaaaaccatgcagttatattacttgaccctgaaagacaattcattcgcagagaaggagaagttcctgttgctgattttttgtggtattctgctgcgagaccctgtagtagaaattgctttgaccgtgctgagattgctcgggttatgaatgctgctgggcggaggcgagatgccctcccacaggatcttcaaaagggaattgatcttggtttagtatcaccagaggtattgcagaacttctttgatctggagcagtatcctctaatttcagagctcactcaccgtttccagggattcagggaaagattgttggcagatcccaaattcttgcacagattagccatagaagaagctatatcaataacaactacattattggcccagtatgaaaagcggaaagaaaattttttccaagagattgactatgttattacggacactgtcagaggatcagttgttgatttctttacagtgtggcttcctgcaccaactttgtcattcctttcatatgctgatgagatgaaagcacccgacaacattggttctctaatgggacttcttggctccatcccggacaatgcatttcaaaagaatcctgcagggataaactggaatctcaatcataggattgcatcagttgtatttggtggtttaaaacttgctagtgttggatttatttcaagcataggagctgtggcttcatcaaattctctatatgcaattcgtaaagtccttaatccagcagttgtcactgaacaacggattatgaggtccccaatactcaaaactgcatttatatatgcatgctttcttggaatatctgcaaatctccgttatcagataattgctgggatagtggagcatcggatttctgaacagtttgcttctcaaacattctttgtaaatatgctttcttttgtagcacggacagtcaattcatattggggaacccagcaatggattgacctagcgcgctttactggcctacaagttagaaagacagagccatcagcatcagatcctccgaatcctgctgcaattttatgcaacgaaacagaagaagccagcattgatgagagagaaaaataaatgcggtgaaattaggttgcaacattttttttttcttggtaattttgtattattcttgaaaagctggtaaaataggcacaaaggaataggttctggtttttcatcacaatctggttttcttggtaattttatactattcttgtatacgtttttgatatttcccatttcatagtttggtgaatgtaatatttttatttttaaatgtaagtggaataaatagaggtgtctcaaatcgaaaccaacgcaagtactcttggctttaagggatatatatctcttggtaagtcttgttaaaaatgatataagaaatcagcagttgtacatcttatatagtattagcaatttatcatggaac

SEQ ID NO: 105325 - DNA, 3083 bp, Glycine max
  Clone ID: PAT_MRT3847_66124C.1
gataatgcctgggatagtggagcatcggatttttgaacagtttgcttctcaaacattctttgtaaataggctttcagcctgtactactttttagtgctatttttttgcttgtgcctgatgttgaaaatgtttacattgttccggtagatgataaggcatgactgaagctaacgaaactaatgaagccccacactccggcttcttctttcgtcactcgtctcccgcacgtgccttacttccgcggcgccactgccgcacgtgccgcgccatcggaccctcctcatgacgcccccggaggcctcgaattccgccgcgtctcgaccgccaaacgccgccgcgtcagcctttccgtctgccacgcgagtcgcgtcaccgccgcctcgaatcccggtggttccgacggcgacggcgatactcgagctcggagcagccggcgcggcgtgctgatggcgccgttcttagtcgccggcgcatcaatcctgctctcggcggcgacggcgagggcggaggagaaggcagcggaatcgcctccggctccggcgccgacgccggaggagccgccgaagaagaaggaggaggaggaagtgataacttcgaggatttacgacgcgacggtgataggagaaccgttggcgatagggaaagagaaagggaaagtgtgggagaagttgatgaatgctcgagtggtgtatttaggtgaagcagagcaagttccggttcgagacgatagggaattggagcttgagattgtgaagaatttgcataggcgctgtttggagaaggaaaaactattgtctctggcgcttgaagtttttcccgctaatcttcaggaaccgctcaatcagtatatggataagaagatagatggagacaccttgaagtcttacacgttgcattggccgcctcaaagatggcaggagtatgaacctattctgagctactgtcgcgaaaatggaattcatcttgttgcttgtggtacaccactgaagatcttaagaactgtccaagcagaaggaattcgtgggcttacaaaggatgaacgtaaactatatgcacctccagctggttcaggcttcatatctggctttacttctatctcacgcagatcttctgttgatagtactcaaaatctgtctattccttttggtccaagctcatacctttctgcacaggctcgagtagttgatgagtattctatgtcccagattatcttacaaaatgtgcttgatggaggggtcactggtatgttaatagttgtcactggtgcaagccatgttacatatggatctagaggaactggagtgccagcaagaatttcaggaaaaatacaaaagaaaaaccatgcagttatattacttgaccctgaaagacaattcattcgcagagaaggagaagttcctgttgctgattttttgtggtattctgctgcgagaccctgtagtagaaattgctttgaccgtgctgagattgctcgggttatgaatgctgctgggcggaggcgagatgccctcccacaggatcttcaaaagggaattgatcttggtttagtatcaccagaggtattgcagaacttctttgatctggagcagtatcctctaatttcagagctcactcaccgtttccagggattcagggaaagattgttggcagatcccaaattcttgcacagattagccatagaagaagctatatcaataacaactacattattggcccagtatgaaaagcggaaagaaaattttttccaagagattgactatgttattacggacactgtcagaggatcagttgttgatttctttacagtgtggcttcctgcaccaactttgtcattcctttcatatgctgatgagatgaaagcacccgacaacattggttctctaatgggacttcttggctccatcccggacaatgcatttcaaaagaatcctgcagggataaactggaatctcaatcataggattgcatcagttgtatttggtggtttaaaacttgctagtgttggatttatttcaagcataggagctgtggcttcatcaaattctctatatgcaattcgtaaagtccttaatccagcagttgtcactgaacaacggattatgaggtccccaatactcaaaactgcatttatatatgcatgctttcttggaatatctgcaaatctccgttatcagataattgctgggatagtggagcatcggatttctgaacagtttgcttctcaaacattctttgtaaatatgctttcttttgtagcacggacagtcaattcatattggggaacccagcaatggattgacctagcgcgctttactggcctacaagttagaaagacagagccatcagcatcagatcctccgaatcctgctgcaattttatgcaacgaaacagaagaagccagcattgatgagagagaaaaataaatgtggtgaaaatacgttgcatcatttttttttcttggtaattttgtactattcttgaaaagctggtaaaataggcacaaaggaataggttctggtttttgtcataacttgtttacaattccttccacggctcacttctatacgttttgatatttcccatttcccagtttggtgaatgtaatatttttatttttcaaatgtaagtggaataaatagaggtgtctcaaatcgaaacataagtgctcttggctttaagggatatatctcttggcaagtcttgttaaaatgatatataaaatcagcagttgtacatcttatgtagtattatcaatttatcatggagcaatgaactttctttagatttgcagtaaaaaagggagaggttggtcttggtaattatgtgctattcttgagaacctggtaggaataggcactggtgggcgccatcctaggccttcaggtcagtcccaggcaatcctagccctttctagcataccactatttctcactttggtgagatgtactatcttgactcttcagatgtaagtgagataaacaaaggtggctctactatgaactgaagtggttgtgactttaacgaatatatctcttggcaagtcctgtttaaatgaaagataaaatctgcagtggttcatctgc

SEQ ID NO: 105326 - DNA, 108 bp, Glycine max
  Clone ID: PAT_MRT3847_66125C.1
aaaaaagctaaacttattatcatatctatgcatcatgtaagggttaaggttttaacagtccaagaattctttatgacatggtgtgcaatgtcactgcagatcaagctg

SEQ ID NO: 105327 - DNA, 976 bp, Glycine max
  unsure (1)..(976): unsure at all n locations
  Clone ID: PAT_MRT3847_66126C.1
gaattcccgggtgcgacccacgcgtccgcacactctccacattgtgttgcgcttctccgactctgaattttcgccaaaacgacgtcgtttcatggctccctgtgcggctgcggcggagtttccggtgggtctccgggttcttgtggtcgacgacgacgccaccacgttgaagattatcgagcaaatgtccattcgctgccgttaccgcgttaccacatgcactgaggctactgtggctttgaatcttctgcgggaaaggaaaggttgttttgatgtggtgctgagtgatgttcatatgccagacatggatggctataaactccttgaacatgttgggctggaaatggaccttcctgtaattatgatgtctggtgatagtactacaagtgctgtcatgaagggaatcaggcatggggcttgtgattatttgattaagcctgtacgtgaggaagaactaaggaatatatggcagcatgttgttaggaaattctggaatgacagcaaagaacaggataattctggcagcatggaagatagtgatcaaaataaacgggggaatgatgatgctgaatatacttctgttgctgacgcagcagtagttaaagcaccaaaaaagaggagcagtttaaaagaagaagatattgaattagagagtgatgatccagctgcatctaagaagccccgtgtagtgtggtctgtggaactgcatcaacaatttgtcagtgcagtgaatcaacttgggcttgacaaggctgtgccaaagagaatacttgaattgatgaatgtccctggtttgacaagagaaaatgttgcaagtcatttgcagaaatttagactttatttgaagcgattaactggagtggcacagcaccagaatgggatgctatacacagttcctgggcctattagaatccaatctgggaactaatggaagatttgacgnacatgctttggctgctgctgcccatgttccccc

SEQ ID NO: 105328 - DNA, 260 bp, Glycine max
  Clone ID: PAT_MRT3847_66127C.1
ctcgagccgaatcggctcgagcggctgcgagaagaccacagaagggggtgggcaaagactcaactgtacagctggttatcagtggatgtggtctaacaattcaccgtggaacaacttcatattttctatggtcaatggtccaccccattgtaatggaactggaccgtcctgtcataggaaccaggcacaccatttggttgcagccttgccttataattcaaactctctcataactgggagaatcgacaattcccatgctt

SEQ ID NO: 105329 - DNA, 253 bp, Glycine max
  unsure (1)..(253): unsure at all n locations
  Clone ID: PAT_MRT3847_66128C.1
caataatccaacttcgaactaataatctcgtactagtctatcaatacactagttatactatctggatttggtacgtatttatttccttgttctatataccaagaatgagcagttttggttaggtgcgactgtgcaagaatactacagtagatgatttaaagtatataccaaaaagtaatcaaaccttaggccacaacagtaaagtgtaaagtagatgtttttnttttttctttcaagattgcattttccttta

SEQ ID NO: 105330 - DNA, 421 bp, Glycine max
  Clone ID: PAT_MRT3847_66129C.1
gcatcgtgagaacactgcgtaaacttggcacgaattacttgcaccctaggcatcccgccgtcccaattaagtcgcaaccatataacgtactccaattcatgtttgtggtttgtcttaggtccacacatatatattccctatacacaccaaatgaattcccttaatttctattatagtggaaaatcgaacaaagttcatacagttctaaaagaaagtgggttggtttccattgcatagcctggaattttagagtaatttgactttgctaagtagctctccaatatatatatatatatatatatatatatatatatatatatatatatatatataatattttagaaaaattttggtaattggactttaattagatgaagacttgcaacgtaagtgtcaggaaagaaacagcgtgcctttcttt

SEQ ID NO: 105331 - DNA, 1732 bp, Glycine max
  unsure (1)..(1732): unsure at all n locations
  Clone ID: PAT_MRT3847_6612C.1
cgtatgctccgcccggcatatacgagaggagaggctcgaggggagaggaagaagaaggtgcgagacaacaagagtctcatgttgatgttagtttgtttgagacaaaagaagcaagattccgaggagtttacaaggtatttgcatctacaatatttgcagcaatatgtttgatttgggtgtaccgagtggcaaacatccccacagttgcaagtgggagatggacttggattagtgttatggtgtcagagttatgttttggaatatactggatcatcactcaatctgttcgttggaaaatcgtatatcaaacgcctttcaaacacaggctcttacaaagatatgatgaggagagtttaccagcagtggacatttttgtgtgcacggctgacccaacacttgagccaccatgcatggtgatgaatacggtattatcagcaatggcgtacaattatcctgcgaataaattgagtgtgtatctctctgacgatggaggctcagagctcacattctatgctctcttaaaagcctccattttctccaaacattggttacctttctgtagaagattcaatgttgaacctaggtcaccagaggctttcttcgctgcccataattgtagcaatagtagcactgagtatagccaagcatggttatttatcaagaatttgtacaaagacatgaaaagtgagattgaatcagccgtagcaaggggcgaggttccagataatgcgatgaatcagcacagaggattctcagaatggaatccaaaaataacaaagcagaatcatcaacctatcgtgcagataataattgatggaagagacactaatgctgtagatgaagacggatttcaactgccaagagtcgtatacatggcacgcgaaaaacgacacaactaccctcaccacttcaaagctggagcggttaatgcattgatacgagtgtcttccgagataagcaacgccccttcattctcaacttggattgtgatatgtactccaataatgcaaatacaattcaagaagtattatgcttcttcttggatgaaacaaaaggccacgatatagcttatgttcaatttccacagagctataataacatcgccaagaatgaccattatgcaaattcttatcttgtgagcaataagtttgagctagctggaatatgtggatatggagcagccttgttttgtggaactgggtgtttacatcgaagagaaagtctttcgggagcttacttgaaagattacaaagcaaaatgggacagcaagccaaaaagaaacgataatagaacaattgatgaattgaatgaagcatccaaggttcttgccacttgcacctatgaggagagcactcaatgggggaaagagaagggattagtatatggtattcccgtggaagacattgctactggccttgtaatctcatgcaggggttggaaatcgatttattacaaccctgaaaggaaggctttcatgggcatagctccaacaaccttggatgtagcatgtcttcaacatatgaggtggtcagaaggcatgttccaagttttcttctccaggtattgccctttcatttatgggcatggcaagatacactatggtgtacaaatgggatattgcaattaccttttatgggctcccatgtctctgcctactctctgttatgtcattgcttctcctatctgcctacttcatggcattccgctgttcacacagntttcaagcatatgg

SEQ ID NO: 105332 - DNA, 502 bp, Glycine max
  Clone ID: PAT_MRT3847_66130C.1
agtgatccactccaggtgggccatgctcggagccttgggctgcagatttccggagttgctgtcccgcaacggggtgaagtcccgataaacctagtggttcatggcccggtcccacatcttcagcgagggtgggctctactacttgggcatcccaagcctgatccacgcccatagcattctcgccatctgggccacacaagtgatcctaatggccgccgctgacgttaccgtattgctggtggccccctcggtgaggtcactgacccaatctacccatgtggcatcattctacccattgagccttgctgatgacccagaggctattgctgatcttaaggtgaaggaactcaagaacggacgattgaccatgttctctatgtatgacttctctgcttaagccattgtcacctgaaacggtccatcggagaacctcgcctatcactctgctgacccttgctactacaactcctgggcctgtgctcactacttcgtccccagtaag

SEQ ID NO: 105333 - DNA, 1695 bp, Glycine max
  Clone ID: PAT_MRT3847_66131C.1
atgtacatgtccatcttaaagaagaatgtaaagaggcagttgcaaaactggatgctcaggaggcacagggaactgctgtaccaaaaagactatcagcattttatatggaaaattatggacaagagaccaatgagtacaggagacaggccaaaaatgcatgatcaaaccggttgctttgatcccaacacaacgggagaaagtgtaccctctctgaaggataactttcctcaaactctacctccatcatcacctatggttgttgtaggaaacaccaccacaaacagcatcaataatagccttgaagagaatctcaggctttctgtggaggagctctcctgtaaccatcacaatccacaacaccaacaagatcatgtctccacctatgcaagtggagtaactgccacatctattgaaatcccacttccacagcatcttggtttgaacatgggaaactcctacatcaacaacaacaacaacatggataatcatttggtgcaagaggtcattgatgcatttccctatcagcagtccacttgggaccctactattgttcaggaattacaagacatggcctatgctaatcacacagaacaaacacaacagcaacaacaaaatgaacaacaatttcagcaatttgagactcaaaactgcagccaaagctacaacaacccctcttccatactagaccctccttacccttcaccagatctcctaaaccttctccacatgccaagatgctcagcctcatctttgctcaccaatccctccatttgcctcacaaacccaactcagaacacaccaaactttcagaatccaatggcctttcttggagatcttccaataggatcagaaaacacaagtgcatcctcagttttgtatgatcctctattccatctgaaccttcctcctcagcctccagcactcagagagctgtttcagtctctcccccgcggctatagcttgccaacaaactcgaggaatggctcactctttggtggaggggatgagatggagggtgatggaagccagcttgacatgggagtgctggaattcaacagggtcacactcacaccttctgttggcaaaggaaggagaggcaaagctaccaaacattttgcaactgagaaacaaagaagagagcaactcaatggaaaatacaaaatcttgaggaatctcatcccaagccccaccaagactgatagagcatctgtggtgggggatgccattgactatataagggagctgattagaacagtcaatgagctcaaactactggtggagaagaaaagatatgcgaaggacaggtgcaagaggcccaaaacagaggaagatgctgctgagagctgcaacattaagccttttggtgatccagatgggggcataaggacctcatggctccagaggaaatccaaagacagcgaggttgatgtccgtatcatcgacgacgatgtcacaatcaaactcttccagaggaagaagatcaactgcctgctgtttgtctccaaggttctggatgaacttcagctggagcttcaccatgttgcaggtggacatgttggtgaatattgcagtttcttgttcaatagcaagataatggaaggttcttcagtctatgcaagtgccatagccaacagggtgattgatgttctggacagtcagtacgcagcagcagttccacatacaaacagctattag

SEQ ID NO: 105334 - DNA, 2485 bp, Glycine max
  Clone ID: PAT_MRT3847_66132C.1
ggggactttgtttcttcatacacagagagaaagtctggttttatgaaatggtttggtaagattttcaacattggatccagtagaggaaggggtggtggtcgtcatctgcagcagcctgttgaggaaaacatggtttggcctgctcctgctagatccttggatgaccgtgctagatctcggaaggaggaagaggatctagatcacgcaattgcactttctttaggcgaaaattttaagagaccaactggatatagatggcgaacaggaactgatgaagattatgcaaaggctcttcaggatcgcaggttctcatctgcacatcctccatatgcccctgtacctttttatccccggggatatggtgtgccattgcataacagaacatgtggagggtgcaaccaagagatactctatggcaattgtttaggagttggccatagttattttcatccagactgctttcggtgtcactcttgtcgttaccccattactgagcgtgagttttctttgtcagggaagcatccatatcacaagtcctgttttaaggaattgacacaccctaaatgtgaagtttgccatcaatatataccaataaatgctgctggtttgattgaatatagatgccacccctattggaaccaaaagtattgcccatctcatgaatatgataatacagctcggtgctgtagttgtgaaagattagagtcgcggggtgaaagatactatagattggaagatggaaggattttgtgttttgagtgcatggaatctgctataacagacactggtgaatgtcaacccctttatcattccatcagagactattatgaaggaatgaacatgaaaattgatcaacaagtaccaatgcttctcgttgggagagaagcacttaatgaagccattgttggggagaagaatggcttccatcactcaccagaaacaaggggcttatgcctttcagaagagcaaactgtcacaagtgtatatagatggccaagaattggaggccatcgattaataagcatgagatctcaagctcaaaggctgcctagaaaatgtgaagttacagctattcttgttctctatggtcttccaaggttactcacaggtgctatacttgcacatgagttgatgcatgcttggttacgcctcaaaggttaccaaaaccttagtcttgaagtagaggaaggtatttgtcaagttctttcttacatgtggcttgatgcagaagtcatgtcatgtgctagaaccacgccctcaacatcatcatcagcttcttcctcctcttactctaactcatcaaagaaaggtgtgaaatctcttgttgaaaataaattgggtggcgttgggtggtggcatttgggtgcggcgatggtgttgggcggaggttttggggagagacaattaaggcttttgcttggaagatgaaggataaaatgggggatatttgccattttggtagtgcaccaaataaaaatggggtgtataaagcaattgcccataggttccttttttcttcttgttagttagggcactttttgcatggagttaggcatcctgtatcctcctattatgtttgaaattattttattacccttaatgaattaacatcaccttccccaacccactcgtgaaggcttctcccttcctccttcgtctcgaaaccgtgcatcctcgttcctgtgctcctttgtcattgaaggtcagcttcttcctttctagtgtggttgaggttggtttctggtggggttggggttgggttctggtgaaggtgagtttcggtgagggtgggtttcggggtggatgaggtcacattccataatgacctttccataagcaaaaaaccctactaaaatgagttttccataagcaaaaaaaccttatggaatgacctttctgaaagctaaaaaaacttccaaaatggttgttctagaagtactttagcttaagactattccggaagcaaatttgttaatccaaaacatcctttctagaaatgtattttatatattctggaaaacgggttccagaaatcagtatcgggcttacgaaaagcccattttgaaagctacaactacaatctgaagtagcatttccaaaagttattttgcatcttttggaaaggtcattttggaaagtacgattttggtttatggaaggaccattccagaagaaaaaattgcaatccagaatagcctttttggaagtacattttgtaccttttggaatgattgttccagataacactatttttgtttacgaaaaaggttttcataagattttccttttggaataaccatttcgaaagaaaatttattcccttatagaaagcctattctggaaacaggtccacaatgagaatgtaaatacattaaaaggtacatgcaaagtggagagttggagaatgagaaggacttctacgacgtcaagttggacttgctttgtacctccgatggctgtgggaagaagagttggagaagaagag

SEQ ID NO: 105335 - DNA, 283 bp, Glycine max
  Clone ID: PAT_MRT3847_66133C.1
gtgttttttttttttaaaaaaaaaagcttttggcttttattaaaccagaccaaaaatcccacctggatttttttccaaccgggaaacctttaattttttccggccccccccttgaatcttcaaagaaccccgaggcaaaaatcccattccaaaaccaggggggcctaacttaaaaaacctaaggaataaccaattggccttgcctggcgaagggggccttcatgcttaggctgccctaatttctttcaattggccccaatattacccaacccaggcatttggg

SEQ ID NO: 105336 - DNA, 524 bp, Glycine max
  Clone ID: PAT_MRT3847_66134C.1
gcattccccaacctaagaaacattttgaaattttaggattatctgactttcctaataatccatatcagcttcattatatatctgatctaatcggatatgcaagaagaagaaaccatatatttgcttacactaattaaagcacataaagtgagcatgagaagagagagagagcttgcgctctcgaacttctcaggatgaatagaccacggtgcaatattaccaaggcatactaagattgtctcaacaaatactgcaagcattaataaattccgattgattttgatgtaattcattttgacattataatataccagtggagtgtgcctctttacctattttaattaaaaataagaaattagaagttaaaaaaatatcaataatatgagagtagtgggttgttattaggagagaaataataaaaatttaaaaattaacaaaaggtaaaatagtctagtgaaatatgtacatcaaatgaaggttttttttattaccagcatatatatatatatataagtatgaaagta

SEQ ID NO: 105337 - DNA, 1273 bp, Glycine max
  Clone ID: PAT_MRT3847_66135C.1
ccacagtgccttcagctgctataaggattttctttctgtagacttcccgtttgactcatatacgcaagttttcatagagccagagatggcagtgtcatcattgagtttgggagcctctatgagtatatttagttctcaagttttgtttgatgagaaggttattgaccagactattgatacaagggtaaaacttgcatatgctctcgcaagacagtggtttggtgtgtacatcactcctgaggcaccaaatgatgagtggctcttggatggacttgctggtttcttgacagatttttttattaagaaacatttgggaaataatgaggcacggtacaggagatacaaggcaaattgtgctgtttgcaaagttgataatggtggagcgacagctttgagctgttcagcttcctgtaaagatttatatggaactcagtgaattcggctcgagggaaaaataagatcatggaagtctgtggcagctcttcagatgttggaaaaacaaatgggtcctgaatcttttcgtagaattttgcaaactatagtttctcgtgctcaagataaaactcgttccataaagactcttagtactaaggagtttcgacattttgctaacaaggttgggaatcttgaacgcccatttcttaaagatttctttcctcggtgggttggttcttgtggatgtcctgttttaaggatggggttttcctataataaaaggaagaatatggttgaattggctgtgctgcggggatgtacagcattgcagacttcaaatacatccattcttgatattaatccagatacagaaactcgagatggagatactggatggcctggtatgatgagcatcagggtatatgaacttgatggtatgtatgaccatccaattctaccaatggctggagatgcatggcaactattggaaatacaatgccactcaaagcttgccgctaggcgctttcagaagcccaagaaaggtttaaaacttgatggctctgatgataatggtgatgtgccttccatggatatgcgcttgaataccgagtcccctttattatggattagagcagatcctgatatggagtaccttgctgaggttcattttaaccaaccagttcaaatgtggatcaatcaattagagaaggacaaagatgttattgctcaggcacaagcaattgcagcccttgaggcatccccacagctatcattttctattgtaaatgccctaaacaattttctcagtgactcaaaggctttctggagagtacggatt

SEQ ID NO: 105338 - DNA, 236 bp, Glycine max
  unsure (1)..(236): unsure at all n locations
  Clone ID: PAT_MRT3847_66136C.1
aatttgnnaataattgctccccatngccattgagtttcattgtaggngctaacattttgttgggtggggcnttctntggagcggccatgaaccccgctgtgacatttgggcntgctgtngtgagctgnacctgnaccaaccatggatctantgggcngggcctntcatcggtggtggaatngctggcnttgtnnacgaggttgtttnatcacccacaccacgancanttcccacca

SEQ ID NO: 105339 - DNA, 158 bp, Glycine max
  Clone ID: PAT_MRT3847_66137C.1
aattctaatctcagagtttagtactttagaggttagttactagaggagtagttgatagataaatcaacatatcatgtgctagtagtttgagtttgtttcacagcatggttagtggatgtaaaatatggactaagaaatgcagcccgtggagtagatta

SEQ ID NO: 105340 - DNA, 730 bp, Glycine max
  Clone ID: PAT_MRT3847_66138C.1
ctgcgagaagacgacagaagaaggaaagggagagagagaggtcaattaatcaagaaatagagagcaaattaaagcatagccagtatggtgcactgtgtggtcttagcatatccagctcaaggccacattaaccctatgcataatttctgcaagctcttgcaacaacaaggtgtgaaagtaacactagtcaccaccctttcctacagcaagaacttgcagaacatacctgcttctattgcacttgaaaccatttctgatggttttgacaatcgtggttttgctgagtcaggaaactggaaggcctacttggaacgtttttggcaagtagggccaaagactcttgctgagcttcttgagaaacttggtagatcaggtgaccctgttgattgtgttgtttataattcattcttcccttgggctcttgaggttgcaaagagatttgggatagttggggctgttttcctcactcaaaatatgtccgtcaatagtatataccaccatgtccagcaaggaaatttgtgtgttcccctcacaaaaagtgagatttcccttcctttgttgcccaaacttcaacatgaggacatgcccacattcttcttccccacatgtgtggataattcacttttgcttgatttggtagtgggccagttctccaatatcgacaaggctgattggatcctttgcaattcattctctgagatggaaaaagagtaaaccgattggacgaaga

SEQ ID NO: 105341 - DNA, 519 bp, Glycine max
  Clone ID: PAT_MRT3847_66139C.1
gctgaggagatgcacatagatgcttctaatgtcaccagggaatattctgttgaccatcagtcttctaatatggtttcaaatgtttcagcagcatataatgatactgttcatataacaagagaaagttctgtggctactgagtgccctcccgttgttgaaagtgttgagacatacagggatagaactccagtagccacagatagttctcatccacgaagaacctcttccactgttagggaatattctgttgacaatcggttttctaacatggtttcaaatgtttcagtggtgcataatgacactgttcatataacaagggaaagttctgcaactactgagtgccctcctgttgttgaaaatgttgagacatacagagatagaactccagcagccactgatagttctcatccacgaagagcctcttcctctgttttaaacaccagcgatgtcgagatgggtgatgccagtgaccatccactcatactgtctggagaccaagaggtcccgttcacatacatg

SEQ ID NO: 105342 - DNA, 2246 bp, Glycine max
  Clone ID: PAT_MRT3847_6613C.1
cgaggctagatttcaaatttcacatcactctgtctttatcttttatctatggcacctacagcagcaatgcttttgctctctcacaatggcaaaacacacgcaccctcatcatcatcatcatctgcaacaacttattattctagtttgaaagcctctgcattcaaatgggttgccaaatacaaccccgtgcccaaagcaagatcagaaaataagaggatgaagtgagggagagtgggaggaactaactggggaaggaaaaggaacacatgtctgttcaccgtggctctagcattctcattcggctcgacattttcttgccccaatcccaatcccaattccaaaccctaaccaatttccatggcttcctcggagatcgaggtggtttcatcatcatcatcggtctccaaacccaacaacgaccagcctccaatcctcgacgttttcaccgcctctgctcacggcgacttcaacaaattgagaaccttcgtcgaacaagacggtgcctccgtctctcttcccgattttagcggctattacgctcttcagtgggcctcgctcaacaactttcacgacattgcgcactatctcattcagcatggggcggatgtcaatgctaaagacaacatgcaacaaacggcattgcactgggcagcggttcacggttcaactctagctgctgatgtgcttgtggagaacggtgctcgggtcgaagctgcagatgtaaatggataccgggcagttcatgttgctgcacaatttggacagacagctttcttaaatcatattgtagtaaagtaccatgctgattttgatgtgcctgataatgatggatggagtcctcttcattgggctgcatataagggatttgctgacacaataagattgcttctatttagagatgcaagtcaaggaagacaagataaagatggttgtacaccgttgcactgggctgcattaagaggaaatgcagaggcatgcactgtgcttgtacatgcaggcacaaaggaagaactgatggtgaaggacaattctgggaacacacctgtacagcttgcatatgataaaggtcatcggcatgtcgctcctttcctttcaaatcaacaacgggctagtagaaactactggaaagggaaactgtgtagtgggatagtgacagatattggttatgctcccatcttattttgtactataatctttctctcgatcctcttcatcaactcagtcgttgcagctcctaaccttaaaaagattactgccgttgttggactttgggcatggacggcgctttcttcggccgttggttccctgattatgttctacaagtgtagtagtaaagatcctggttatataaaacgaccgggagacttgggtactcaaagtgatactgaggatccgttattgaatattgatctgaatagttcctctgtttggatgggaaattggtctcaactttgccctacctgcaagataataagacctgtccgatctaagcattgcccaacttgtaagcgatgtgtggaacagtttgaccaccactgtccatggatatctaactgtgttgggaagaggaacaaaagggatttctttatttttatctgcctgggaactttgacttcttccctttctggtgccgttgcagttcaaagaatttggacatctaaaccagcattactggcaggagaaacatggatccattatgcgttagtaagacatctaggtttagttgtgtttttggtgatggatgctgttgtttttgttgcgactacgacattaacgataacccaggcttccatgatagctcgaaatgtgaccacaaatgaactagcaaattcctcccgttatgattatcttcgtggtcctgatgggcggttcagaaacccatacaaccacggttgttggaagaattgtgctgacttcttttttctcggctatacaaatgatgatgagattgcttggcctccattacagcaggtggcaacttagaacattctcccatgctgtgtccatgcatcctttgttatattatcacattgttccaattatatgtagatgatagtcattttcagctaggctttcattctctgacacatgtacattttattacagaacccaaagaaataaaacatttttattttgggccatcagaaaatacaaattattttgataccctcctgtaccagttgtgcaattgtttggtgggatacccattactttagaaggaaatgcatttaaaggattggaactag

SEQ ID NO: 105343 - DNA, 147 bp, Glycine max
  unsure (1)..(147): unsure at all n locations
  Clone ID: PAT_MRT3847_66140C.1
gcaacgccttccgctacttcttcaaggctcgcttcaaagttcttaccctcaccanngaanagtgctncaggggcatatctcgcagccatgtgtattactcttcataagtttacttgtctaccaaaatcacctctgaaaattagagac

SEQ ID NO: 105344 - DNA, 251 bp, Glycine max
  unsure (1)..(251): unsure at all n locations
  Clone ID: PAT_MRT3847_66141C.1
ctctgagtaggactacactgccatgncctgccttcagtctccancgttggagctgtcaacggnactncactgagcttgaacagctctggagtggagcttcagttccccagttcagccttctttggcaccagcttgaagaaggttattgcctcaagggtccctaacgtcagatttcttctggnngtttcaaaatcgttgccgcnnntnaagagantgatgagaaacacagaccgacaggncagatggcaagg

SEQ ID NO: 105345 - DNA, 534 bp, Glycine max
  Clone ID: PAT_MRT3847_66142C.1
cttttttttttttttttttttttagctcgtgaacctcaaagttaattatagtaataaacattattttttgccagtaatacatagatgaacacgtaaagaaaggaactcaaacatggaacacaaaaaagataaaaataggtagcgaatgcaacacaaagatccatatttttccatattgttccattaaggtagaacaacaacaatccaactatgttcatctgatacctatgaatggggtccgaaattcaactgcaatccaacacaaagaaaaataaaatagcaaaagtactgtcagtatatagaaaagttaaagatgatgaataaattaataataacaattgaagtatataatgaagcttttttagataaaaaaacgaaaatggcgagtcgagaaggctcaggaacaaaaaaaaatttaagttttgattgagaaagcaagaaaacgaacctgtgtacatgggagtttgggagataaaaatcaaacctttctaagataaaaatcgcagctttagaaagaacaatgaacatgcagtg

SEQ ID NO: 105346 - DNA, 942 bp, Glycine max
  Clone ID: PAT_MRT3847_66143C.1
aaagcagagttaaaaacaaagcaaaagctcccacctataccagatcacattatatattttattcatgggggtcctcactgtgattccaaacaacagtgttttcaattttagttttttccctcacacagaaggaattgaataaataagagttcacatatgcttagtattaagaatttcaggtagagggttagtaaataaggaaaagtgaaaaaggtggataacaataataagcacaatatatgattaatagatgtaataggttatagcacccaaatctaaaactcttatttatactaattaggtgatgccccaatactattagtacaagtccgagctcgctctgcataagactaataacctaatactaatataaatatcttaacactttccctcatgctttagcccgtgacatgacaagtagtaaacccaaaaatacaaggcaataaaccccagcccatctagccaaaaaacttacacaactagtattccccatgaatcacaaatctctgcaaagtcctaacacagatagctcctataatctctacacatttcccaagaaaatctttgacatttctcctcactgtcccctcaaccacataaaactatttgaaagcttattcaaatagcatcttagtctgatgccaaacaggccatgcaaagctggaatccgaatcaagacagaacaaaaactaaaaatgcctaagagaggcagaacagcaattcagcaatcaaaaagggaaaaagcaaaagtttattttggagaatgttggaccaccccaaaaaaaacactgaagagatgaaaggagtgaaatagggttaaaacacttacaagatgttggagatgcacccaacacaccaaaaccacaaccaaaccaaaaacacaagaagaagaaaccacaaaaagtaccaaagaatcagcaataatagaaagcggacgcgtgg

SEQ ID NO: 105347 - DNA, 158 bp, Glycine max
  Clone ID: PAT_MRT3847_66144C.1
aaacctgcaaaagcctgatgagatcagtttaggtcatggatacctccactcaatggacactatgccgcctctcccgatcccagtccttagcaaaggctgccgaccgaggaggattcacttctcgcccgaaggtcccctcaagcaacggacgcaccttc

SEQ ID NO: 105348 - DNA, 337 bp, Glycine max
  Clone ID: PAT_MRT3847_66145C.1
aattaatttctgtttaataaacaaaggggttttcagggcttatggaaaacaaccaaaaaaatattatttacaattaacaacttatatagacattacatacatatttaaggggcaacagacatcggcaaactttaatatagctaaaagggtcgactggacacaaggtgaaaaaaaaccaaataaaaagaaagaggcactatccacaaacacaggataccttttctggggtctaaaaaaaattggtatgtcacagacttctccataatttatttctacaacctgcttacctttccttagtaaagatgtcgtgcttcaattcttaaaaaaagcgcttttg

SEQ ID NO: 105349 - DNA, 318 bp, Glycine max
  Clone ID: PAT_MRT3847_66146C.1
gttaaaaacggggaccttctcgaacgaggaacagggaaatagccatatgttttttattccccatgagcaggccccactgactgaaagtgaaactttttccgttccttgaggataacgtctcctattgcactaatgcataagcatgtgctatttctaacaggttgttgtaaatgaagaggagtgccaactaaattgccttattgttgccaccgtgaataaaacatgtttacctgtcaacatagaagacatgttactgccatgggtctgaacaaataaaaactagtcgtgcgcccaccactatatacctcgtctacctgc

SEQ ID NO: 105350 - DNA, 1192 bp, Glycine max
  Clone ID: PAT_MRT3847_66147C.1
tttttcacgaatgtcagttcagggatgcaatatggaatcatgccatcttcagatccctatgatggagtgtcactagagaattcatcctcatttgttcaaactagtgagaatttcagattaagtgctcaccaatgttctccaagaatttcccccatgttcgatgaaaaatctaaaaggattgcatctttaccttccgttgttccaattggagccccatggcaggaaatttttctgttggccagaacccagaagaaaatttatatagaaatgcttgaattgtcaccaatcaagttgactttaagtttttccagtgccccatggatgcttcggaataggatcctcacatccaaggaatttcttatacatagaggccttatggctcttgctgatgttgagggagcacatatttatctaaaggatttaatcattgcacatcatatggctagttgggaatccattcaggagattctaattaggcattacaaccgccaactacttcatgagacttacaagttgtttggttcggctggtgtcattggaaatcccttgggtttcgcgcggagcatggggcttggcattagagatttcttgtctgtgcctgcaaagagcattgtgcggagccctactggacttattatgggcatggctcaaggcaccactagtcttttaagcaacacagtgtatgctattagtgatgcagcttctcaattcagtaaagctgcacgcaagcgcctggttgcatttacatatgatgaccaagcggtttcaaggatggaaaaacaccaggcaattgtagcttctgacagtaaaggtgtaattaatgaagttttagagggactcacaggtcttctccagtttcctgtaacaggagccgagaggcatggtcttcctggtgtcctctctggtgttgcattggggatgactggtcttgtggcctctcctgctgctcgtgcacctgtaggtacggccagtaccgctcgctgcttgagaaaccgtagtaaacccagtcaattaagactgcaacactttagggttcggcttcaaaggccactgtgccgtgaatttccattaaaaccttattcgtgggaagaagcagttggaacgtcagtacttgtggaagctgatgatggtttaaagttcaaagatgagaagttagtggcttgcaaagcccttaaagaagctggtaaatttg

SEQ ID NO: 105351 - DNA, 762 bp, Glycine max
  Clone ID: PAT_MRT3847_66148C.1
cccacgcgtccgtacggctgcgagagacgacagaaggggggcgaaaggatgtgaaagattaaaccattcgcctgtcatgagttgttgtttcctgagacgatttgggcgttttggagctgtggggaccgcggcttttggttctactctgttgtgctctaatgacagtgctcgttttagagcttcggttgcattgcgggtccctgagccattgcagaattccctatggttgacatgtcctgtgttgcgtgatttgtctcctcaaccttcaccttttcccgaccaatttggaatgcgtctgctctattcttatagagttagtccggttccatcgtctggtgtatctaaggaagcttctgcggctgctggtgatgagtctaagccacatgattgttttggcaaagatactattgcaaatgcagctgctaaagttggtcctgctgttgttaatattgcaattccacaagatttttttggtattactagcggaaagagtataggttctggaacaatcatcaacaaggatggaacaatcctgacagctgctcatgttgtggttgattttctaggcactagaggttcgtccaaagggaagaattgaagttactttgcaagatggaagaacatttgaggggaaagtcataaatgctgacctgcattcagatgttgctattttgaagattaattctgaaaccccactgccagaagctaaatttggttcgtcaagtaggctacgtccaggggattgggtaatagccatgggct

SEQ ID NO: 105352 - DNA, 807 bp, Glycine max
  unsure (1)..(807): unsure at all n locations
  Clone ID: PAT_MRT3847_66149C.1
aatacattctttctctttcaccctctttcaaggctccacttttataattccttgtacatttcttcatcaaagtatcaaacttgtcttgtatctctcttttcactccctctgcatatatgatatattcttccataattctcatgtttaagacgttatagtttccttgaattctcgtctgggttcaacctgtttgatgtttagactgaatcagtttgaattagtggagaatatctgataccgaaaaaaagattcagctctttttcttgtttctttgtcacaatacttggatttttgagaatctggagacatgggttgttgtgtaagtaaagattcagagccacaacacaatggttacagacatggtggaactggtggagtgcacaaccagaagactcatgaacctttagtcaaccaatcaagagcacctgcaaatcaaccttatcatttacctgaaaagcatgctgcatccactgctcagacagtgcctcagaatatgccatggaagccttctggtccggcccttagtcctaaacctgttgttagtgttaggcaagacacaattcttgggaagcagtttgaggatgtgaagcagttctacacactcgggaaggaattgggtagagggcaatttggggtgacatatctttgcactgagaattcaactgggttgcagtatgcctgcaagtccatttccaagaggaaacttgtgaagaaatctgataaggaggacataaangagggagattcagattatgcagcattttgagtggtcaacccaacattggttgagttcaaaggggcttatga

SEQ ID NO: 105353 - DNA, 1299 bp, Glycine max
  unsure (1)..(1299): unsure at all n locations
  Clone ID: PAT_MRT3847_6614C.1
ccacgcgtccggacatttcattgcatgtagatcctgaaggcttgctccacgaaccaagttgcttaaatccagaggacagttgggcattgtttaagaaaaaagcttttccaagacaagataacccagaatccacggtttctgatgagtttataagattaggcagagaaatggttgcaaagtgtgctggtctgcctttgactatcattgttcttggagggcttttggctacaaaggagagagttagtgactgggctacaataggaggagaggtacgtgaaaagcgaaaagagnaggaagtcttggatttaagttaccaggacttgccttgtcaactgaaaccatgttttctctatttaagtcaattccctgaagactctgagataccaagaactaaactaattcagctatgggtagcagaaggtgttgtttcatctcaatatgagactgaacgggatgagccaaggaagaatgttgcagaacgctacctaggtaacttaattagccgctgcatggttcaagttggtcagatggggtctactggtaggattaaaacctgtaggctccatgatttaatgcgtgatctgtgtttgtcaaaggccagaaaagaaaattttctttacanttattaatggatcacaacaaaatagtacatttgatggttgcttcttcatctaatttatcagatgccggacgaacccacgcgtccggtaggcttgctgtcttcttggatcaacgtgttgatcaattgattccacaggacaagcaagtgaatgaacacctcaggtcccttgtattttttcacgacaagaagtgtaggatggaaaattgggacctagtgaaaggtgtttttgtcgagttcaaattacttagagttctagatcttgaaggaattaaggggctgaagggacagtcattgcctaaagaagtgggaaatcttttatggttgaagtttctgagtctgaaaaggactcgcatacaaatactgccatcttccttgggaaatttggagaatttgcaattcctaaatttgcaaactgtcaataaagtgagctgggattcaaccgtggaaattccaaatgtaatatgtaagttgaaacggttgaggcatctatatcttccaaattggtgtgggaatgttactaacaacctgcaactagaaaatttgaccaatttacagacattagtaaattttcctgccagcaaatgtgatgtaaaagatctattgaagctgaaaaaactcagaaaggtagtactgaatgaccctagacattttcaaanatttagtgaaagttcagtccc

SEQ ID NO: 105354 - DNA, 2556 bp, Glycine max
  Clone ID: PAT_MRT3847_66150C.1
cgaaagctcggaatacggctcgagctttgaatgaactccaccttatgtactactagcatttatccccttttttttttttttatacattctttctcttccaccctctttcaaggctccacttttataattccttgtaatttcttcatcaaagtatcaaacttgtcttctctctctctccttttacttcctctgcatatatgatatattcttccaaaatcctcatctaagggttaattttgttccggacaagtttttattattattattattattttttaaatttcagaatgatttacttataggtttctgatccaaggtttaagatgttatagtttccttgaattctcatctgggttcaacctgtttgatgttttgactgaatcagtttgaaatagtggtgattatctgataccaaacataaaagattcagctctttttcttgtttctttgtcacaagacttggattttgagaatctggagacatgggttgttgtgcaagtaaagagtcagagccgcaacacaatggttacagacatgctgggactggtggtgtgcacaaccagaagactcatgaacctttggtcaaccaatcaagagcacctgcaaatcaaccttatcatttacatgaaaagcatgctgcatccactgctcagacagtgcctcaaaatatgccatggaagcctcctggtccagcccttagtcctaaacctgttgttggtgttaggcaagacacaattcttgggaagcagtttgaggatgtgaagcagttctacacacttgggaaggagttgggtagagggcaatttggtgtgacatatctttgcactgagaattcgaccggattgcagtatgcctgcaagtccatttccaagaggaaacttgcgagcaaatctgctaaggaagacataaagagggagagtcagaatatgcagcatttgagtggtcaacccaacattgttgagttcaaaggggcttatgaggattggagctcagttaatgatgtgatggagatgtatgaagatggtgtacttatggataggaatattaacacgaagcataacggaagctattctgatgtctcgatgttgagagtaattctgacgatactgggtgcttgctttagagtggggcttctgaaaatggatatgaaacttgagcatgtaaagcttgtatttggggtttgatatgcatttcttatggcttccgacttggagttctcactttttagtcttgaaggaagggtataaaagtttatagttggtagtgcttactatgttgctcctgaagttctgcggcgcagatgtgggaaggaaatagatatatggagtgcaggagtcatattgtatatcttacttagtggagtccctccattttgggctgagactgagaagggaatatttgatgccatattggaaggtcacattgattttgaaagtcaaccatggcctaacatctcagacagtgccaaggatcttgttcgtaagatgcttatacaggatccaaagaaacgcattacctctgctcaagttcttgagcacccatggattaaagatggaaatgcttcagacaagccgatagacagtgcagtcctttccagaatgaagcaatttagagcaatgaataagctaaagaaacttgccttgaaggtcattgctgagaatatgtctgcagaagagatccaaggtttgaaggcaatgtttacaaatatggacactgacaagagtggtacaatcacctatgaagaacttaagtcaggattgcatagacttggctcaaagcttacagaggctgaagtgaagcaacttatggaagctgctgatgtagatggaaatggctcaattgactacatagaattcatcactgctacaatgcatagacacaaattagaaagagatgaccaacttttcaaggccttccaatattttgataaagacaacagtgggtttattacaagagatgaattggaatcagccatgaaagaatatggtatgggtgatgatgcaacaatcaaggaaatcatatctgaagttgatacaattatatctgaagtggatacagatcatgatggtagaatcaactatgaagaattctctgcgatgatgaagagtgggaaccaacaacaaggcaagctattctaaatcacaccatctaaccagtctgagggcctggtatccaaaacccctctagagaaaaggtttatacctctgagaagtacttccaaacagtttgtatcactcataggcatgtaaagcttctatttagaatgtttttgagttactatgctcctcatgactgttagtcaactccctttttttcatttctgggacctttttttgcttttcactgagattccatttccgagtcctctttgaatttgttttggacacaaagtataaactcacatagaaaaaggtgatatctcaataagattatacaagtttttgcgcttgaaaaaaaaaaaaaaaaaaagcacgcatagtgcctagtacatctaagtgacaataaacctggaaaagacaacagtaggccaatataaccaatacctattcaatccgt

SEQ ID NO: 105355 - DNA, 183 bp, Glycine max
  unsure (1)..(183): unsure at all n locations
  Clone ID: PAT_MRT3847_66151C.1
gttggtgtagcaaacttgcaatgcattatccctatctcttgagtcttctttgcttcacaaattcaccgcacggaaatttgtctcacaggcttacatcgcgtctggggcaanatcacatcttcaagatggacatcgcaattcccatttctcctgtattctgctcttggctcacgtgctcctccc

SEQ ID NO: 105356 - DNA, 133 bp, Glycine max
  Clone ID: PAT_MRT3847_66152C.1
ttccgtcgacccagcgtcgctaattgtgggagctcggctctgatgcttaagggcaaactcctgtgccgtaagtaacatggccctaggctaagggtatgacagttgacactaagtgcaagatgataccgtgtaa

SEQ ID NO: 105357 - DNA, 606 bp, Glycine max
  Clone ID: PAT_MRT3847_66153C.1
gtcacactcctttctcattatacacgatatagtttctgcctctagctctaattggttcgacttctgcttcgtgaaaagcgtccgggccttcattaatcactctcaatttgttgagcgaaagtttgaacatatacattttctaaggaactcctttgtggagctatgttgtttagatgtgcaaaagtcatctaacaaagcaatgacatgtatattgcatctgggtaagatattgcagaatgggtggcaaaccaaaaagaaggaggtggttaagacaatttgcagttggcagtacatcaattgcattgatctctgggttacatttatatcagcaaacatacatgactacgatcttcagccattgctgtatatgatcgtacagattataaatggagttgctctcctgtttcctggccctagatatttaccactgagactcagatgtatccaatggcttaataagctttctggttctagtggggttttcatccctgttacatcattggtgctggatgttttagaatacaaaattaccaaggatagcgggaaatttggcaaagtcttgaacctatgtctactactataaaagcttcgaagcattggtaaaat

SEQ ID NO: 105358 - DNA, 350 bp, Glycine max
  Clone ID: PAT_MRT3847_66154C.1
attgtggtgtggtttttttgtgtgcgccggaacccatttaaacaaaatgctgcattaccaccattttttaaaggagaaacagattcaggaaatttatctcagcggcttccctttttaaaaggttctttgaataaaaaaaatccccagacccggggtgcttttaacaaaattaactttgcctttttgggggggttaccccaaccacccaacggggccaaaaaaggggccctttaaattattcctcccctagggataaaaattggctggggaaatccaggttgatgggcttaaaaaaaacctccttatttccccttttttttaaaggcccatttttttttaaaaaatttttt

SEQ ID NO: 105359 - DNA, 389 bp, Glycine max
  Clone ID: PAT_MRT3847_66155C.1
ctgcaagtttatcactgcattcctatctacctaaaatcatggccgaatcactccttttctccgttgcagagtcactgctagggaagcttgcttctcgtgccgttgaaaaagcttctctggccatgggggtgtaccatgatctacaacagatgagagtgactatggcactggtcaaagccttgctgttagatgctgagcaaaagaagcagcagaacaatgcattgagcgagtggctgagacagattaagcgcgtattttcggatgccgaagacatagtagacaactttgagtgtgaagctttgcggaagcatgttgtcaacactcatggtagcgtctcgaggaaaggacctcggttggtcttaaactaatatccctttggttatcggtta

SEQ ID NO: 105360 - DNA, 298 bp, Glycine max
  Clone ID: PAT_MRT3847_66156C.1
ttcgtctttttttttttttttttttttttttttttttttttttttttttttttaaaggaaaaggccccaaattcaatttaagggggcactggaactcaaaatttttgaggaagacggcccaatatgaaaaatattgtaagatcctctcaaacttagcatcttctttttgcacctaaaacattgaaaatgctaaaaatgttaccccccagtaccatcaccacttttagcccttggattaggacaacaaccttgacgaacagaaaaatttacttgcccggtttgtttttccttcaaacca

SEQ ID NO: 105361 - DNA, 368 bp, Glycine max
  Clone ID: PAT_MRT3847_66157C.1
tagcaacactcgctctgagaaccgcgtgaaaaccaatcgccaacaggctcaagaaggaggccggttaccaccccaagttccgaaatttcatcatcagcattgcccaggccaatcatagattgacgacgagagtgcagagacgaatttacggtcatgccactgatgttgcaatccaccctctgaacgaggatttttttgtgcaagctgctgctgatctgcttggagaactctttgtcttctcgacaaatgtggccgatgcaattctaatcgcagtcgcggacattttaaaaactttgatgttgcagcccaaaacaaggttgcaggagctgccatcatctttgaggtgcaaagaagttcaagatcagaag

SEQ ID NO: 105362 - DNA, 474 bp, Glycine max
  Clone ID: PAT_MRT3847_66158C.1
tagcactcttatagtcccccacgatcatattgtctacgtagacaccattgcatactttatagtaggaccgtacttaccaaatgaagtaacaccctaggcatgattaagcactcttcgagctcgtaaagacttgactcaagggcactctaccaagggcagatatggtagactaactggggcgtgctgaacctgcagagcctgaatattaattagataggactattcatgaggccgagccaatcagatggtggagcgttgttttcaagagcttgcttatccagcctcataactgacctttgctcatggagctaatgcatgataaagcctcaagcacctacagtagctgctgccggattagaccattctaaattgagcgagagagcgtgctcaggctctatcatggcctcatgctgctcatgcaggggctaggcactgtgcggcccaatatctagtcccccagggtgctgaggatgc

SEQ ID NO: 105363 - DNA, 187 bp, Glycine max
  Clone ID: PAT_MRT3847_66159C.1
atacccatatatgaatagataccggtggggggggtcaatattgtaacctattacaccaagatgacatttttataaactattcatatgcaaacatatagttcaaatttttaaactttgaaacaccgcagatttaagaatcattactactaaaattcttcaacctaaatcccgcaaaatagagaaaacc

SEQ ID NO: 105364 - DNA, 949 bp, Glycine max
  Clone ID: PAT_MRT3847_6615C.1
aggtttctactcgggaaacttgcctccgtgagcatgaaggatcttactcatcaagagaaacttgcattttggataaacacttataattcctgcatgcttaatgcatatttagagcacggcatacccgagagtcctgaaatgattgtagcactaatgcagaaggcaacaatagaagtgggggggcagctgctcaatgcaattacaatagagcacttcatcttgagacttccttatcacctgatgtttattacaattcatcccttgattttcatctttccttactgcgacagacctgcccaaaagctgcaaaacacggcgagatgaaattgcgaagcatatttggcttggaatggtcagagcccttggttacatttgcactttcctgtggaagctggtcttcacctgcggttaggatatacacagcatcacaagttgacaatgagttggaagcagcaaagagggattatttacaggcaacagttggcattacaaaaacaaacaagttaataattccaaagttactagattggtatttacttgactttgcaaaggacttggaaactttgttggattgggtttgcctccaactacccattgaactgagaaaggaagcaattgaatgccttgaaagaagggaaagacagcccctttcacagctggtacaaatgatgccctatgacttcagttttaggttgcttttacaccaataaacttagagagtggtactgttcaccactaccatttcagtcagcacagatttctgaattttgatgtggtggatttttgtatatgggatagttcacacataaagtatattatcaaaataatgtgatgcattcatttggtaaagggttttggcctttttggacactgtaattgggtacgtaaaaaggcttttgtagaaaataatacatacatagaaatggcggtttcttataagcaaaaaaaa

SEQ ID NO: 105365 - DNA, 327 bp, Glycine max
  Clone ID: PAT_MRT3847_66160C.1
caatatatagaacgtagtatgggtgttgtgtccgtgttggccactgacacggacgtgggtcgaccatcggacacgacaatgggctggggtgtccgtgcttcataggttattggatcatcagatcatagatttgatatctgataactttggcagctatttttatttaactgggccttgtataacttttatttacgtcacttcatcaataaaacttccattgccttgaagtcaatgatgttcacattcacagttgacgtcacatgcaacacatccccctttcgccaactagagctgccgctcaagaggatccaagctttcgtacgcctg

SEQ ID NO: 105366 - DNA, 540 bp, Glycine max
  Clone ID: PAT_MRT3847_66161C.1
tttttttttttttttttttttttttttttttctttttttttttgtttttttttttttttttttttttttttttttttagccagcaaaagattattgcccttaaaagggttatgggtattaaaggacagaggggggccccaaattaaacgaaaaaggggacattaatttcaaacaaaaaaattccttggggacaaaaatcccccggccttttccttaggggaaaccctaatggggaaaccaggaaatcccctaggcccgaaataatttttggaaaagcggaacaccaaaaggcccttatgcccaacaggcccacaaaaagggggaagaaaaccccgaaactagggggggggggggaaccaccccccctaaaatttccataaacggggaacaaggtccccgggggaccccgcatgaacaaaaattcccaaaaaggggggggggggcaaaaccccggggggggtttcttgggaaaagggggggggggtaaaagacaccccactgggggggggggggaaaaaacctctactggggggggggggg

SEQ ID NO: 105367 - DNA, 264 bp, Glycine max
  Clone ID: PAT_MRT3847_66162C.1
tcttggtatcctctagacggccgcttttttttttttttttttttttttttgttggccaaagataacggggcccttttctttgctctccttctattttgtcttgtcttccctgtttcctaccctctgtttgttctctcctcgccacttatggggcgctttatctctcctacctattgctagcagtgggggaggtacagccttctctgtcccttcgtgtccccatccccctccttctctgggcggtgctggccgtttgtttttccc

SEQ ID NO: 105368 - DNA, 500 bp, Glycine max
  Clone ID: PAT_MRT3847_66163C.1
cgcaagctccgaatgctgctagatgcttgttgagggtgaatcatctatctttatacaaacatggtcctagcattatatggaaatgtcagaaatgtacctacttagctgaggtgccgaaatattacgccatgtccttcccgcccaaaaacggcgacatcacgctatgtagagcgctggctattttgcccatctggatttcattgcactgatggttacaatgcgctactatcgccaatgcgcctctctgacagagaggatgcggactctgaccatagtctgcaagagatagaacacacagtgccagagtattgaagctataccaagtcaccagtaaccctaactgcacctcccttgcgattgaatgagaaagaacatgaaatggaagtcgaaggatggcgaataaagtcaccagcatcccgagtacaaggtcgtattctatgcaggagaaagaatagggtgaaataagtcacccacaaccctaagtacaggttcctattctt

SEQ ID NO: 105369 - DNA, 418 bp, Glycine max
  Clone ID: PAT_MRT3847_66164C.1
ggaaaaaaaaaaaaaaaatttttattaaaaaaaaaaaaaaaaaaaaaaaaaaaaaaaaaaagggcggccgaaaacataaaaaagataggggacccggaaattatattaagaaccgaaacctgaaaaaaaaaccaaatttcaaatattgggggggggcccccattttggggtttttcgcccccataaatttttcctgggcggaatccttagggcgttccctttttcatttatggggcgggtttaaagcctggggaaaataggggggggggcctttttggggggaaaattttgtttccttagaattgcgccaacttacctgtttcgggaagttaaaactgacaggccgggggccttaatgggggggccaacccccttattgtgggggggtccaattcgcgggtttggggggggaaatctt

SEQ ID NO: 105370 - DNA, 200 bp, Glycine max
  unsure (1)..(200): unsure at all n locations
  Clone ID: PAT_MRT3847_66165C.1
cacaatcgccaagtcatagttcgttcncaaggttgtgacccaaactccatttacaactttcaatctcacgacttcaatgttcctccttttgtttcccctgcccccaacccacatctgaaacaaggttcccctcacatcttttactttccttcgtggtctccacgagtctccgtgagcccgtgtatgcactcttgcaatcc

SEQ ID NO: 105371 - DNA, 322 bp, Glycine max
  Clone ID: PAT_MRT3847_66166C.1
agctcggaattcggctcgaggagaaactcattgacacacattgcctttctgaatcacaccacaacttcatagcggagggctgattacaaatagctgaatgctggacggtcccgaaatagacataattatatgggtactatttaccctgatcatgaacatgcttaatatcaatactttgggtacttacaaggttttattcatcaccttgaatcataattccaaatatcctgcattcgtggcagttcccctacaaaccaattctttaccccacaggtgaagcagaaaatagtctggagagacttcatcaatgatctgaaaagga

SEQ ID NO: 105372 - DNA, 903 bp, Glycine max
  Clone ID: PAT_MRT3847_66167C.1
ggctcgagctccgtagtttcggacttgtcctctgcgtccgcttttggtcacttccaccacctcctctctcttcttggcttggtagagagaaaataaaaaaaaaacacaaagctaaacacaaacactactgttacagaatctagtaaaacactctccagaaaaacaaacctgagttaggaaaaaaaacaaaacaaaacaactgagcttttgattgaatcctcaaccattttcttctgaacatggcttgttcagtgcatctacttcttcttcttctcacttcacttctggctttgttctttaacccaacatgtgtctatggcaatgatgagcttagagcacttttggacttgaaatcaagtttggatccagaagggcactttctatcctcatggaccatgggtggtaacccatgtgatggttcctttgagggagtggcttgcaatgagaagggtcaggtggcaaatgtgtctttgcagggaaaaggcctctctgggaagctctcaccagctattgctggactcaaacacttgacaggactctacttgcactacaactctttgtatggagagattccgagggaagttgctaacttgactgagcttagtgacttgtacttgaatgtgaatcacttgtctggtgaaatcccacctgagattggcaagatggagaatctgcaagttttgcagctttgctataatcagttaaccggaagcatacctacacagcttggtgatttgaagaagcttagtgttcttgctcttcagtcaaacctgctgggtggagctatccctgctagtctaggtgatttgggaatgttgatgaggctagatttgagctccaataatctctttggttccattcccattaaactagctgatcttccttcactgcaagttctggatg

SEQ ID NO: 105373 - DNA, 389 bp, Glycine max
  Clone ID: PAT_MRT3847_66168C.1
gtttattttgcatcttatgattcattattgttcctttttacttttgcacttacaatacccgatggataccatcaacgtcgccgtggataaccacatgtttacagatgcccatggcgcatcattataaggatcttatacacccaatgtggtgactgctatgcggggaactaagatactggggactcttgatgcaccaagcagtcacgcggataacagaaagagtattgtgtactgagatggacagcctgaaccagttaaatactaccatgaccactatcttcttcgctacacgcaacaggggcgagacgacagacgaaggcacagcacgatggtgacagagcttaacatgggcgagtgatggagcagaaaagctgaaggcaccgtacacg

SEQ ID NO: 105374 - DNA, 457 bp, Glycine max
  Clone ID: PAT_MRT3847_66169C.1
gctactagtcggtgggctcccgtcctttattcatttgcggaggcttgtgtttgtactccgctaatcgttataatcacaagcagtgcatatgaacaaattgttcttgcacatgcgataagcacatcgacttgcacattatccaaggaacacatataatcgtggccctcgaggcacactatggtaatagctagggctgcctagctcaacttacttggcgcaaccgatcgatagtacataccggggggatagagctaaccgaaccgtgctcttttcgaaaaattggaaaggcctggactggattgcaagcgcaagaatgggaacaatagcgaagaacatctgttctggaacatgatgaacagccacagcgtgcaccacgaccacgtccacgttgaccatgtcgacattgacattggtggagacggctactgtatcaagaacacgggtgtgaacaccgtaa

SEQ ID NO: 105375 - DNA, 1801 bp, Glycine max
  unsure (1)..(1801): unsure at all n locations
  Clone ID: PAT_MRT3847_6616C.1
gtcgacgtgcgcgtccgctgaaaacttcctttcgtctcatctgtttaaattgccgagaacttcattacccattatctgttacagttctacgtgctcgctgcaaggaaagtgtcagatttggtttactgataaagaaagtgcttgaaggacccaatcacacacgttagatgcaatggcaaattacacacacaagtttgcttcaatgagttattattgctgccaaagtgatgaatgagttatcctctgtgtcatattttatttggctgttttctaattttctctgaaaagtgattactagtttcctcgaacaataatggaagcagcaaaggttctttcacactgcaaaactgccccttttggtttctctatcgtgagcaacaaagtgtctctaagacctttcaacaaacattttcatgctgatgtacttgctaacagacccaagaacattagttttcaattgaattgcacctttggaaacccttctaagtcagtatcaaaaccagcaagaaaaagggctgatttgttacattttcccagatgctcaatttccagtaatgccagcactgaatctccgaattcaaacatagatttcttcagtaatctatcatttgattcaataaaagctacacttctgcagttgactccaattgatgttggaagtggtctgggatattatgcatcatagctgcagccacaaaatggactatgaatatgcttttcagtcccttcttttggatgtattttagctggacgtggttgttctggccttggatggtggccatagggcttgcagtctatgggttatattgctttcggaaacatctgcacagtgaggcaaacatatttgagcaattggctattgttacatcagtttttacgtggctcactcttgttccacctggtcatttcaatggctaccttgaaggctggccttatgttttcttttttgtgtatcattatttctttttcttcaatgttagtgttagaaagcggttatatggagattattttgctcagccccatgacccaaagtgggacgtgaacttgccaatgtggtctcnnnnattgttcagcacaggagtcatggttgnncattggcttgcagcatttgaagggnnngagcttcacctcataccgggtgggtggagcaatcttggaatctgggctttaatcattacaactctgctaatgcagtataatgctacattgtatctcgctaagtattcagaaaatgtggtggagccaacttctgtagtgcaatttggaccttatcgttgggtccgtcatccaatatattcatcaacaatgcttttgtttgtaacatactgcattgcgcttcgagcacctctgagtctgctatttattgtggcagtatgcttgttgtattataagcagaaggcagagaaggaagaggatttgatggttgagacttttggccagagttacacagaatatgcaagcaaagttaagtacaagcttattccttttatctattagttgatctccagaagtttagtcagtcatcaaaatctgattgtactgtcaggtttaggcaaaagatagtgttaattctcaaaatccaagtgtatctctttgtttactctttactctgttatctttagtgtttttaacttaccttaaattatggtatcatgtgcacttgtggtgattagatttttgaagattttggttttcaatgatgttttgtttcatagaacatgcaaaatttgactctataaatcttgtctatattaaaaaaaaaaaaaaaaaaaaaaaaaaaaaaaaaaaaaaaaaaaaaaaa

SEQ ID NO: 105376 - DNA, 1329 bp, Glycine max
  Clone ID: PAT_MRT3847_66170C.1
tacggctgcgagaagacgacagaaggggggatatattgatagaatattgggacaaccatcattgatccgagagtcatccagagggaaatacccatggtctggcatgttttctcgcaccatgagctccctatcacgacatactaatccaggatctgctttgaaaaatggaaatggttttggtgatgtgattttgcatccttctcttcaaaaaagaattcagcagttgtcttctgctacggcaaatacaaaagcacatcaagcgccattcagaaacatgcttttttatggccctcctggaacaggaaagacaatggctgctagggagttagctcgtaaatctggattagattacgcattaatgactggaggtgacgttgctccactgggaccgcaggctgtaacaaagatacaccagttgttcgattgggctaagaaatcaaataagggtttattgcttttcattgacgaagctgatgcatttctgtgcgagcggaacaagacttacatgagtgaagctcaaagaagtgcattaaatgcccttctctaccgaactggtgaccagtctaaagacatagtccttgctcttgccacaaatcgtcctggtgatcttgattcagctgttgcagacagaatagatgaagtcctagaatttcccttgcctggggaagaggagcgcttcaaacttcttaagctctatctggataagtacatagcccaagctggatcaggaaaatctagtttcgttaaagatttgttcaaaggaaaacctcaacaaatagaaattaagggattgactgatgatatcataaaggaagctgctgctaaaacggagggattttctggaagagaaatagcaaaactgatggcaagtgtccaagctgctgtatatggaagtgagaattgtgtgcttgatccaagcttgttccgtgaagtggtagattataaagttgcagagcatcaacagagaataaaattggcagctggtgataaacctatcgcatgaggatttttatagattttgttggaacccttataatatagggctggcccattgcattctgttctgggcatgctgttatttattgatttccctaactgatgggaagattttggaatttgaatttagtagtgtttcatttacggctgataatcactattcaatattcatcgctaaatgtagcagctaattgagggtttgctgtcacgttgaatattcatcatcttgaccactgacaataaactagagtttcatgctatcattgtaacttacctgctgtatttcttgaaaaaccctcacatggtcgaggagggcctctattttcctgtgta

SEQ ID NO: 105377 - DNA, 252 bp, Glycine max
  Clone ID: PAT_MRT3847_66171C.1
atcggttgcgaaaaaacaccggaaggggccaacacttgtagcgccaaatccaaacctatagaaatatgtgacagcttctctatcactcttgtaaaattccacataaaccaagttctacatatggaagaagaacttagcttcttctctaaggaaggatcaaagagactgggtgaagcaatggcatcaatgactatatggcgtaagtatactcttaggctgtgttggaaggaaggctggactacacacgcttga

SEQ ID NO: 105378 - DNA, 378 bp, Glycine max
  Clone ID: PAT_MRT3847_66172C.1
gatatttcgtggttaaaaaaaaaaaaataaaaaaaaaaaaaaaaaaaaaaaaaaaaaaagaaaaaggaaaaaaaaaaaaagaaaaaaaaaaaaaaaaaaaaaaaaaaaaaaaaaaaaaaaaaaaaaaaaaaaaaaaaaaaaaaaaaaaagggcgcccctttaaaaaaacccaatttaactaacccttctatccaacttaaaacctttttaatagggcccccaaaattaaattaattgcccttcttttaaaaaaattataactggaaaaaccctggcttacccaaactaaatccccttaaaaaaaaatccctttttcccaaattgcctaaataccaaaaagcccctaaccaatctcctttcaaaaaaatttcccaacct

SEQ ID NO: 105379 - DNA, 726 bp, Glycine max
  unsure (1)..(726): unsure at all n locations
  Clone ID: PAT_MRT3847_66173C.1
cttgcatgcctgcagtttgtatcgtgtttaaggcatagtaccattagatacttttttttccatgttcagtgaaactctggcttaaaaaaatattttccatgaaataactcaatttcattaaacattaaacattaaacttatcaagaatacagtcagaaaacaaaatgaacttattaagaatacatcactagtaagcaaatttaaaataaacaacatgtgactgccttttattcttataaaaaaaaaaaaccacgactctccctctttttctgccatagaccatagggggatctaactgttctaaatttctaatagaagctagaagcgaaggtccaagaataaatcttgtgtgtttcaaccaattgtccagtggcacccgagaacccaactctaatccattcaggcagaacagtcctcaaatcaatcacaaacgagaggctagtcgtgttcaaactgcttccagggtatgttacaagcacgtttaaactcttgccaataggctcatagttcacagtggcatatgcaacttcaaacgaattcccagtttcccatttcctcgttgtcacagaagcaatggagttaacatcaatgcccacatgggcagagggagggtcccaggggttcccactgaaggagtcgaattcgacggccactattttggtttttgtacacgtttagggcagagttagggctgaagagtccgaggaatccgncacttgaattgtt

SEQ ID NO: 105380 - DNA, 1467 bp, Glycine max
  Clone ID: PAT_MRT3847_66174C.1
cctcgagccgctcgagccgctcgagacggctgcgagaagacgacagaaggggagagtaaccagtagtgtgcaaaagaaaactcaagctcccagattctgttccaatgcctcccgtaccaatttcccccatcaaagttgggcacattgatgatgtccaagagctaagaaaaaccaagccaaggacaattcctcaaagatttgtacgagacttgacagaaagaccaacactcactacacctcttcccccaccacatagtgacatgccagtcattgatttctctaagcttagcaaagggaacaaagaggaagtcctcactgaacttttcaatcttgcaactgcttgtgaagagtggggattttttcaggtaattaatcatgaaattgacctcaatctgctggagagcatcgagaacctgagcagggagtttttcatgctacctttggaagagaaacagaaataccctatggctccaggaacagtccaagggtatggacaagcttttgttttctcagaggaccaaaaactggactggtgcaacatgtttgctcttggaattgaacctcaatatgttaggaacccaaatctatggccaaagaaaccagaaaaattcagcgaaactgtggaagaatactcaggagaaataaggaaactctgctataatctgttaacatacatagctttaggccttggtttgaaaggggatgagtttgaggagatgtttggcgtatcggtgcaagccgtgaggatgaactactaccctccatgttcaagacctgaccttgttttgggtctgagtccccattcagatggaagtgccctcactgttctgcagcaagcaaagggaggcccagtgggacttcagatactcaaggacaatacatgggttcctattcaaccaattccaaatgctcttgtcatcaacattggagacacaatagaagttcttacaaatgggaaatacaggagtgtggagcatagagctgtggctcatgaggagaaagctagactctcaattgtgacattttttgctcctagctatgaagtggagcttggtccaatgcctgagtttgtggatgaaaaccacccatgcaagtataaaatatacaatcatggagagtacagtaaacactatgtaacaaacaagttacaaggtaaaaagaccctggaatttgccaagatccaaaccaagaacacaaactaggaagttccctaactagttaggagaactataattagactgactaatgactgtgtgtgtagaattaattatctaccacataaaagcatcatggtcaaatctctcgattctatttttgttgaaaaagtaggcaaagtaattagttggagtgatgtaggagggtgtgattgtgggtcacatacagaagactcactgtttcttattccaaatatgtatatgctatatatctctcaatggaaactagtggcatcttattttatacgctttt

SEQ ID NO: 105381 - DNA, 965 bp, Glycine max
  Clone ID: PAT_MRT3847_66175C.1
ggctaggacgacagcaagcggggagtgaacattgagtagtgtagtgcgcacttaacatgagggtaagcaaggaattggtgtcatgttgtactttcccagtgatagttgataattttgatcaatcaattatgtattattatatctttaattattttgtagagccgaattctgtgttgatagggcctttcttattgattgttaaagaacaatgtttgtcatttaaattggtgggccatgcttgtgattgcctatcatattgttcgggtttcaatggtttgactatatatttagaaccacaagacacataaggagagaagaagaagaaaaatggcaaattttgttctacagtttccaaatactttgaggagtttcgctgtgtctgcttcctccaactccaacggagctcctcctggtggttctggaagcagtagtggtgggggtgggggccctgtaatattggaacttcctctagataagatcagaaggcctttgatgaggaccagagcaaatgatcaaaaacaaagttctggaattaatggatagtatcaaggaaattggtcttcaagtgcctattgatgtcctcgaggttgatggagtctattatggtttctccggctgtcaccgctatgaggctcatcagcgccttggactccccaccatccgttgcaaaatacgccggggtacaaaagagactttaaggcatcatctgcgctaaacatgtcatcattttatcattcaaagttggtacatggcaattagtaatgacaggacacaggggtgtccttcttcccaatgcattgtgattccaatggacagtgtatgatatcatgagtgtagtgtcctatagttgcttgtgtatatatatcaagaagagaatgtttcctctcaatgaccaaagaggacagtgaactattactactggaaagattgaaaattcataatctgatttctctgactcttgtgct

SEQ ID NO: 105382 - DNA, 735 bp, Glycine max
  unsure (1)..(735): unsure at all n locations
  Clone ID: PAT_MRT3847_66176C.1
aagttaaaatagattcattctattaataacaattctatagccaactaaggagtgttaaccccccttcaacaatgaacaatgtcggatcatgaatataagctcctgctgattttaatgttgaaaaatcaattattacacttttcaaagaaaacacatggcttatatacaagaaagaagttgacttctttttttctttttgtttcaatagaagacgacatttatgtcatttaaagtaatgttgatttcatgcatcaaacaagagaagactcgaaaaactttagagttggaatggaacgatcatttcattttatgaagctaataccattccatccaaaaaacttgatgctggattaaatattgctagagtagtaaatttcctccacctcagaagatttacatggatatcctacagactttagatgatccattaattgatccaatatggagtatataccagttgaagcacaatgccttttgtcatccaccatgaattgatagcaacagccatcgatttcaatgaagctaatcgccctacacttttttatcccactgtcatccattattttcctgatctttttcatgtcatcccatctttgagattctgaatacatgtttgagagaagcacataaagcccagaattgaatcgtcctaactctagcaactgctncatgatttgcttagcaatctccagattcccataagatcctggaagcaccaagcaaagcaccccaaac

SEQ ID NO: 105383 - DNA, 244 bp, Glycine max
  unsure (1)..(244): unsure at all n locations
  Clone ID: PAT_MRT3847_66177C.1
acgaaaagatcanacatacattgtgtcaacacgtcattatanggcacctaaagttatcctcaaactgtgatagaactatccatataatatatagaatagtgattatatactaattgaattatacactaatgaanctttattggaaactgatgaaaatttaaaacatctagcccttaataacaaagtgagttttcctattaccacagagatattaaagagatttgaccacattcaggaaaagttt

SEQ ID NO: 105384 - DNA, 747 bp, Glycine max
  unsure (1)..(747): unsure at all n locations
  Clone ID: PAT_MRT3847_66178C.1
ccgccaaccccnaattactgtgagttagctccactcattaggccnccccaggnctttnccccttnatanttccgggctcggtatattgtgtggaattgtgaggggatancaatttcacacaggaancagcttatgccnttgattacgccaagctcgaaatacccntcactaaagggaacaaaagctgggctgcgagaagatgccagaaggggaaaacagattcaattaaactaaacatatcccaagtgttcttacttattatataagtcttgaattcagttcatattttgctgatcactctactttatacatctgtataagcctttagtcatgtttgaaccaagggacatgtggaccaagctgaaggaaaagggtgagacaattttctctaatgctggctggattcaccgtgaacctagccagggaattcaaggaaaggagaagagttcacctgggttggctgtggttgctggccaacaacacgtgcaagttcacacacctaggatgatgtattccgaggcttcagtttccatgcttgtcgaatgcttcagtgcttgaaagaacaaaaaaggataagtgcctactcttgtacttgttattttaatttgtgatcaagttttctacctaggagctgatgtaaataataaactatatatatatatatgctgatcaaatatatgtaactaaaatatgatgtatgcttgtatgttacaacaaagactacgacggcaaaataactgcttttcc

SEQ ID NO: 105385 - DNA, 146 bp, Glycine max
  Clone ID: PAT_MRT3847_66179C.1
ggagaaataaatatttctatgcatttaagagccttacagagagaaagggcgatgaatgttgttacactgctattagtggaggcttcagaataatactgagtgattttttacaacaagatccagaacccacccacggccgggatcca

SEQ ID NO: 105386 - DNA, 253 bp, Glycine max
  Clone ID: PAT_MRT3847_6617C.1
caacccctatctcgaaggaggagggttggaataaaaaaaaaaccctttttttggtatcggtaggaatcgattttattactttccaaaattccttcccgatccctcctaaggaaccgaatgggatcccaaatggacgggttagggggagcttatccatgcggttatgcccccttcaaataggaatccattttttgaaaaaccccggttttcgggcgtgggggggttttcaaaatcctttcaatcggacgcgggg

SEQ ID NO: 105387 - DNA, 299 bp, Glycine max
  Clone ID: PAT_MRT3847_66180C.1
cccccagcggcgcgctctttttttttttatttttacttttacccaactaataattaccccaccacaaaatgtatatacgaggttttcttgccattacaggaaaaccactaaggcaaaatccttcattcattctctaactctcgaagccatgcatctttcatcaaaacctaccatgaaaattcaattacattttgtctccttaattaactcaactacttttaaaaaaataaccacatttctctaatgctttttattctaacatacttttcaaaaacttcttattttctccaaaatatcat

SEQ ID NO: 105388 - DNA, 741 bp, Glycine max
  Clone ID: PAT_MRT3847_66181C.1
agcacgaggtaagatggagttaagacccacgcgtccgcccacgcgtccgcgaacactcttagcgatggctatccgaatcaactccttgactctctcttccgctttacctatggagttaagaggtggaatttcgggcctctgggttggctcgcagatgatgccccaaatgcgaaaggaggctcgtggacgacgagtttggaggcgaagaaaattgataaaaaaggatgaatatatgcaccccaaaatggagcgcattcctttcatggaggagcaggtaaggatggtaagggaacagggaaagctcttgacgatggacatagagaggttaatgttgtcagaagataatcggtttgattttgtgaatgagatagcagctgaggccaattcttatgttgagaacaacagggatgagtatggaggtgagaagaaggccattcttcatgttttgagcaatcgaatgaatgatactggaatttacaggccagaagcatattatgagcctgatcccttcaagcccggacctcattatttgagagaagaatttacataaaatgttatgctggcatcttaaactagtgacaagaatttacatctttgcttcacttagcttaattgattttcttcttaattagctgctgttgtttgtatgtatgcaaatcaaagccatcttcgaaccggaaataaaatacaattaaaaggtagtattttctactcattctaaggatgttgaaaatggattat

SEQ ID NO: 105389 - DNA, 562 bp, Glycine max
  unsure (1)..(562): unsure at all n locations
  Clone ID: PAT_MRT3847_66182C.1
gaatacaaaaaatcatatgcccatatatacacaagatcttccatttaactttcaatggaagaagtgaatatgctcactgtttcatgtgaagctcatcatggaacttgcaacagaaacacagtaaggaaatcctgatttctctagtcaccaaaaagtagatatttgcctccaatatatatttgatttgatgccctcgaaacttgaagactcacaacattctgtttccttcaatcacagaagcttttccctcaatttgtgagctactttcagagggaaaccagtgcatgagaacacccagattcatgacagcaggaatcaatttaaacaaaagtggagttgtaaccagactaagagctgtagtccctagaagaagaagatacanttttcccctaaaaaatcgcaatcagtggtcagcaagagagagagatagaacaggggaaaaatacataaatcactaaaaataatcgagaaaaggtatcaggaagatgtaaataacttcttcaattacactgcatattgtatggggtatgatcatagaagaatggaaaaggcaccgggtttt

SEQ ID NO: 105390 - DNA, 295 bp, Glycine max
  Clone ID: PAT_MRT3847_66183C.1
gtggaaaaaaacccccccaaacaaagggctgtttctttggtgccccaccttaattttcattggaagccaaaaaaccgggcggggggtctaccccgaaaatattggccggggacttggggggccaccaatttttcttaatggaggccaaataaaaatttgggaaaataaaggcaatagttttttttggggaaaaatttttatccttaaaaaattccacaaaaaaaccagtccgaaaaaaaaaaagttaaagcggggggggcttaaaggaggcccccaccccctttattgggggggg

SEQ ID NO: 105391 - DNA, 907 bp, Glycine max
  Clone ID: PAT_MRT3847_66184C.1
gagaggttgagacttgagagaaattaaaaaagccaaaaacaaaacaaggaacatacctaagaggttgcgagagagacagagagagatgaagtagagtccgaaccaagtctcatagctgagagtttaggatcggaattctgcctccgttcttcttcatctcacctaccaccttaacctcatattagcacaaacttggtttgcttctatgagccaactctcgtgttttcttcagcttcataatggtcttgaagggtctatgtgagaggattgtttcttcaaaatgctcttctaaaagctcaaagataatacacaggtgccggtgcccgtttattcaaaagcaggatctagtgactcttctgaaaagaaagcagttccttctcgaagtagtgggtgggcagctgctgtgaggaaagttgttactggtggctcaatgaggagatttcaggagcgtgtactaggatcaagcaggactgacatttcaagttctgatggtgatatatggcttctaggtgtatgtcataaaatttcacagcaagaatctactggaggtgttgatactagtaatggattggcatcatttgaacaagatttttcatcaaaaatcctagttacatatcggaaaggctttgatgctattggagatacaaagtataccagtgatgttaattggggttgtatgcttcgaagcagtcagatgctggttgctcaggcattactttttcataaattaggtagatcatggagaaaacctattgacaagccactggataaagaatatattgacgtcttgcaactttttggtgattcggaggcttctgccttttctatccacaatcttcttcaagccggtaaaggttatggccttgctgttgggtcatgggtggaccatatgccatgtgtcgcacat

SEQ ID NO: 105392 - DNA, 405 bp, Glycine max
  Clone ID: PAT_MRT3847_66185C.1
gttgcattgtcggtgctctgcttgttctcttcatctgaaaaccgtgccgctccgcctcggggtctcgttttctacctatttcgttctcttctcttgcagccgccctcccctcacacttgcatcctgcatgcttttagaaaatgagtactccggcatcctgctaatacttggctaattaaatagtgctttgcaatctattgacccctctgtctctgacttatttcgaagatatatcaatatcgatacaagaataagaatctgcttgggtggtggtagcgaagtgccaaacgaagaacaattaatgtgtgctctatgtaaagcccagaacgtgtgatccaatcttttccatgataatgcttattcatgattcatgtgtgtgacttgaacttctaaaatgcacatttt

SEQ ID NO: 105393 - DNA, 252 bp, Glycine max
  Clone ID: PAT_MRT3847_66186C.1
taggttttctatggttgggttgatgcacctattggatatgtttcaattacttcgtgctacacacatgaatgggacaaatggtggaaaaaccccgagaatgtggagctgtatcagtttatgggctaggacaatgtgccattccatactgcgatgatgacatctactgtacttggaactagtgaaaatcggtctttcttgaagactatcagtcgatagtagaatacttgaattatgaatcacggaagtcttcta

SEQ ID NO: 105394 - DNA, 365 bp, Glycine max
  unsure (1)..(365): unsure at all n locations
  Clone ID: PAT_MRT3847_66187C.1
aggacccataatgaaaatctcatagtgattctatctcgctcaaacaggattatctctatcctccgatagatgacacatgtgatttatataaaaaaagactcaaatgtaattttgattttcttattttgtttaatccgtaatcttggtcttttcattttaaaataaacatttaatcttttaaaaaattcacaattttagttcttatattttaaaataaagacatttgattcttttattttagaaaattcacaattttgattctcatattttaaaaaattaatgatttcgatgcaatcttcaattntatttaccgtntattntatttatttcttaccatatagntaataaaatcattttttgatgat

SEQ ID NO: 105395 - DNA, 641 bp, Glycine max
  unsure (1)..(641): unsure at all n locations
  Clone ID: PAT_MRT3847_66188C.1
aaaaagccaaaaacaaaacaaggaacatacctaagagtttgcgagagagacagagagagatgaagtggagtccgaaccaagtctcatagctgagagtttaggatcggaattctgccaccgttcttcttcatctcacctacaaccttaacctcatattagcacaaaattagtttgcttctatgagccaactgtcgtgttttcttcagcttcataatggtcttgaagggtctatgtgagaggattgtttcttcaaaatgctcttctaaaagctccaccgagactgtagataatacacaggtgcccgtttattcaaaagcaggatctagtaacagtaagtttcccaaggcttccttatggtcaaacatctttacatctggtttttcagtggttgaaacatatagtgaatcatcagcttccgaaaagaaagcagttcattctcgaagtagcgggtgggcagctgctgtgaggaaagttgtaactggaggctcaatgaggagatttcaggagcgtgtactaggatcaagcaggactgacatttcaagttctgatggtgatatatggcttctaggtgtatgtcatanaatttcacagcaagaatcatctggaggtgtangatatagtaatggattggcatcatttga

SEQ ID NO: 105396 - DNA, 201 bp, Glycine max
  Clone ID: PAT_MRT3847_66189C.1
aggcacttcgcggtcgtttaccttacccttatatccataagccttgcacacccatggatcgtcttctgagcaatcaatagttcaagtacccacagaccatccaagggtcgagaaactgacccacttgcattttttgtaccacgacatcttatagggcaagaacatcacggtggtgaaaatcatcgagccatcagcgagcga

SEQ ID NO: 105397 - DNA, 359 bp, Glycine max
  Clone ID: PAT_MRT3847_6618C.1
ggattaattcatctcatctcttagaaaagtggacaatactcaaaatagcttagcttagaattaattgacatggcgattggaaaggtacccggtggtggaaacaagaaaataaccaaaactgttagagaatgaaaaagagctaccgtggaattatacctatagtggattgattttacaaaagagcatgggcaaaacacacgcctataatcatatccttccatgcgagtaaacgtgctgcttgtgggaggggtattttgagtaggggcttttggggggctggtcttggataacgggggattatcggggggggggggggctccaggtccgggggtgaacagtactgagtaggggtgtaaacc

SEQ ID NO: 105398 - DNA, 139 bp, Glycine max
  Clone ID: PAT_MRT3847_66190C.1
cggcgaggacatccgcatcaaagtcaagggcggcgggcacacctcccagatgtacgccgtcaggcagagcatatccaagggcctcgaggcagactaccataaggacgggaacgagcagagcacgaaggagatcaaggag

SEQ ID NO: 105399 - DNA, 403 bp, Glycine max
  Clone ID: PAT_MRT3847_66191C.1
aatctaaaaagggaaaaagagcttacttgaatctttttttatatacaccttgattgccttcatagaaggtcgtctattatccacatatcaatactagatctcgcggccaaccttatgcaatcggccgttcttatgtataccctaactttacccaactgcccggctttgtaaaacatattctttttgaaacccatggtgttaccaaagttacccgctttgcacgcaatccccttttggtacgcggccttaataccaaatggccccctccctttcccccttccttaaacttgtgcggcctgaatggtaaaggcacccccccctgtaccgttccattaggcccgacgccttgttttggtaactccccccccctccctttcccctttcttaacccccttattccccc

SEQ ID NO: 105400 - DNA, 376 bp, Glycine max
  Clone ID: PAT_MRT3847_66192C.1
ttttgttgtttttttgttttttttttttttctgacgttgaaaacactaacaaaaaggggggtgcaaaactaacaacaacgatagggaccctggcaatacatgcagcctttaatggccagaaacatcaaacaggaaaccaagacaattataacaacttgaatctaaaagaacataacaaggaaatcaaatgcgaagaggcgaaaattatctaacctaaaaaaacaattaatattgggagccctaaattaacaagaacaggcatgcgtgcaagccccagaatgatatcaaggattattcccttctgtggtcttctcggaggcgggcggtggtgtgacgggtcggaaaaaacacaaaaggggaacggggacccggaaag

SEQ ID NO: 105401 - DNA, 171 bp, Glycine max
  Clone ID: PAT_MRT3847_66193C.1
gcatcttattacttgaatcagagtgcaaccatatcagggacagcatcatcatcaacagcggtcgttgaactgctgctctaatttgaggcacaatgatattgtacaaattctagctttgctcttaaaccttataccctgtacatagaatccaaattcatcataattatgcat

SEQ ID NO: 105402 - DNA, 1173 bp, Glycine max
  Clone ID: PAT_MRT3847_66194C.1
attgtcacaagtcataaggcagaagatcagagttgagaattcagatctctctcttccaccatgaaaacccatcaacaaccaaaactgaaaacccaactattctcatgtggcttcttccgccactgcgcccaaacagtcctcagccccaccggcaccacccctaccctgcctcagaccccccctggcttccaatgcgaatcctccacctactccttctcttcctccaccacttcccaaagcttcacccagtggagattctctcctccaacccccaccaccaccaccaatagcaacctcatccaaacaaacactaaccctccttctcctcctccgccaccccaaatccacaacctccaagaactcttccacattttagagcttcaactaaccaccgacccaacctccgttctcaaccttctagaacgttctctcgtccccaaccctccccagaaccaaccaccgtgtcctccgaaccttatgcgcgccctcaccgccaacctcgccaccgccaaacccgccaccaagaccctttcgcgctctgtctctccgatgccaaccgccgcgtcgccgtcgagaccggcgccgtctccgccgtcgtggaggccgcacccgacctcgacggcgcccccgccgagcgcgcccttgctgccctcgagcttatgtgcacgctccccgagggcgccgaggagctccgcgctcacgccctcgccgtccccgtcatggtcaccatgatggccaagaccgccgcaaggggcaaggagtacgccatcggagtcctcgccgtcgtctacggcagcgtaggcggcggcgaggagcaccacaccgcgcctcccgaagaggtggcgcgtgcggtggaactcgctctgcagggcgagtgcagcgccagggggaggaggaaaggtgcgcagctgttgaagacgctgcaacaactctctcaggctgagcttgaagctgctgagtctcaccttcacgaagccaattgaaggttttaaattacagttactagaaatgtaactgttaaggccatgattacagttacattgcagtagcaaaacttttgtaaaataaagtaacactgttctttttttctagttttttgcgctgtacagtgtttagagtttgtctcgttatgcttgcttctgttacaatattatcaaacttattgtgtattgt

SEQ ID NO: 105403 - DNA, 375 bp, Glycine max
  Clone ID: PAT_MRT3847_66195C.1
caaatccctacattcctatctcgcctacttcggctccgaataatttgctaggcaacaggatgtggaggtatgctacaacagaatctatatcacacctgtataatgtcctcatgactcaaccacccaaaggatgcatacatattcacgaagcgatacaccgaatatggaacttcgcactttcgtagaccacatgataacaatattacactgatcactgaagagctaagagacgttggatcagaactctaactcgatctggatccaatggatgcgtaaacaaagtagctctttgctggcagcacgttatagataccctgatgtcagcactagacggactttaccgaatgcatttgcaacagcaccatacatgtggac

SEQ ID NO: 105404 - DNA, 488 bp, Glycine max
  Clone ID: PAT_MRT3847_66196C.1
caattcaagcgttcgaaaactttccgccgccgcatgcgggggcaaagctccggcgaacgactaaagtcaagggatggggctccaccggcaaggttttcgagaatctcatccgccgggtgcggccgcgaaccgtcgtggaagttggcacgttcctcggcgcgtcggcgatacacatggccgagttgactcggcgactcggcctcgaaactcagatcctctgcgtcgacgactttcgaggctgggccgggttcagggaccggttcagtaaaataccgatgcaaaacggtgacgtttggctcttttaccagttccttcagaatgtggttacttttaaccagaccgggtcggtaatgcccgttccattttcgagcgggtcgaccctgatgttgttttgcgagtggggggtgtttgcggatttgattgagatcgatgctggccacgattttttatcggcctgggccgatattaatcgtggatttcggatcctc

SEQ ID NO: 105405 - DNA, 515 bp, Glycine max
  Clone ID: PAT_MRT3847_66197C.1
aaatattcactctattctactaaaaccaaatgctaactaggtaaaatgatgcatacacattgttttgctactttggagcatgcttctttttgagactgttgattatgcagtcaaaggcagaagacctgcaacccacagcaaggtcagtgcatgtgtgagcgcatgtatacactcttcatcacactccatcaaacctatgtttctacaagatcaatgaacaaaaaccatgcctttgacgatgtctcaagaaccccattctactaaatgtaggtgactgtcctaatgaaacgaaacatgctcacactgtgtggagactcccttaccaaagagctaacgtgccactatattcgaagaggctgtaattactctgactgattatgcatcgtgacctgtattcatgagtgctggccagagacctaagattgagacacaccatatatctctggggtatcatgtatatgagaccatggacatacatatagtggcgtggttaaacggctctatgtatggtataa

SEQ ID NO: 105406 - DNA, 636 bp, Glycine max
  Clone ID: PAT_MRT3847_66198C.1
attcctgtgaagaagaatttctatttcattgaaaagattgaagaaaaattatacaagcttcctctgatgaagcaaatgctgcagaacaaagttgacattacctttcaggcgaacaaatatatatatcaccccaacaaaaaaatgaggaaaaaaacaatatagaaaaaaattgttgaaatcaaactcgaatgcacatatgctggtccaccgtagtaactacacacagtatatgaatcctattcctattcctatccagtaagaacatgagcttctgcatctgttcaatccagattcttgtcaacgaggagcagcagtttcgtaaccacaaggcacagtgtatttctaaaatgcacatattaacatttcagtttttttcagaatgtgtagagacttgcacacctatcactttggcatcatgctttctcttacttcgagtgcgcctcgatctagatgttctagtctttgtagaatgcttggtcgtctgatcttgtgtgccaagtagctctttttcattggttgggagctgaggaggagcatctggccatggagtgcgttttgatgggactgtgatgtccaaaggagggtcgattacccattgggcagggaatttgctgtctgtgcgagcttcaacccgca

SEQ ID NO: 105407 - DNA, 328 bp, Glycine max
  Clone ID: PAT_MRT3847_66199C.1
gaagagttttactgtttaagtgggacggttatcatcaacagaatgcgtatcttttggagtggagtctgctgttgccgtatttggcctatcatgaagacaagggacatgtgatcggtgttactcggggaattccaatttcacattttgaagaaatacaggaggcaaaaatgttcatatattaattggaattatttgttttcttattaggcctatcctgaagccaaaggaaatgagatcggaattcctcggggaattccaatttcacatttttaagatataaggaggcaaaaatgttcatatatgaattggaattatttgttttcttatt

SEQ ID NO: 105408 - DNA, 321 bp, Glycine max
  Clone ID: PAT_MRT3847_6619C.1
cgctccctgttcttctatcttaaacgccatatgagcggctatctctgtcgcttactattcttctacagcgttggtgatataattgacactgtttgattggtgtcatatacgattagattcttacttcgtccgcggttcgaggtcgatgtttaattccaggctcactcgacggcggccgccctttttcgttcttttttttttttttttttgttgatctttttttttttttatgttttttgatttgggcaatcagggaattatcactttcgaactttttggttcgtgtctaatcctcctacttctcgtctgaaacgaattatt

SEQ ID NO: 105409 - DNA, 405 bp, Glycine max
  Clone ID: PAT_MRT3847_661C.1
tttatttgggaatttttgttttttttttttttttttttttttttttttttttattattgtgttgaggaaaaaatgtttggggggaaaaaaaggtgggggggaaaaaacagaatgggataaaagggaaaaatgaaaaattcgggttaagaatgcaaggaaaaagcggtggggtgggcggaaaattggggaaaaacaaaaatttgggaacggtatatgggggggttgaaatttttaaaaaaggggggggaataagggcttggggtaatcatgggggaaattggtatcgggggaaaattgtaaacagtatacaattcggaaaaatataatgataggaagggtgaagtttaaagaggggggggcctaaagggggggagaaatgactttaagggggttggaaggagggaa

SEQ ID NO: 105410 - DNA, 566 bp, Glycine max
  unsure (1)..(566): unsure at all n locations
  Clone ID: PAT_MRT3847_66200C.1
gcatgccacgancgtacgctaagnccttggatccctctagagcggccgccctttttttttttttttaaacgaaacaaacataacattttaataataaatatcaatgcatgctgtcattctatgctgcactaaaaactagccatgaagacaacaataacattagttgctatcatcaatcttcttgtcttgtgcaatctatggataactgcaagtgcatgtccacagataaaaactatccttatcaaggatcagatggtgactaataaggccaaagttagaaaccatgctgtcgccatatgcggctatgaaaacctgcctgctcacaatgagaatatgctaaaagctgcagttgctcatcaacctgcctctgttgcaactgatgctggaggttatgcatttcaactttattcaaaaggtaccttctctggtagctgtggaaaggacctcantcaccgcatgactatagttggatatggagaagaaaatggngaaaagtactggcttgtgaagaattcntgggcaaatgactgaggtgtatcgggctctctttggatgaagcgagatcc

SEQ ID NO: 105411 - DNA, 224 bp, Glycine max
  unsure (1)..(224): unsure at all n locations
  Clone ID: PAT_MRT3847_66201C.1
cacgaccccaaaaacctccgaagggggtcagttaaggagagaaatagtacgcgcccaatccagaggcaaaaaatacatagagtggctggacccacactattgggcatagccttgtcgagtggtagtgcacctgcctgagcaatatctaacactgaccccagtcaactgatcctgnttggaccgaaggacaccggtcaaaacccccccccaccaaaacagaaacg

SEQ ID NO: 105412 - DNA, 159 bp, Glycine max
  Clone ID: PAT_MRT3847_66202C.1
cacgctcgtaagctggacctttagacggacgcccttggttttttttttttataatagcaaatgaatcatgtggttacaggtgactgaggtttgccgggtgaggaatgaactgtgtgataggatgatgctggaatgcccaaataatgtaagagagagaga

SEQ ID NO: 105413 - DNA, 250 bp, Glycine max
  Clone ID: PAT_MRT3847_66203C.1
ataagtttctaaagcacaaaatgctagtttcagttgaattatgtttcaataaattgtcattattagttaatggaaaaaatccatccaatgcaagcctttctcgaattcaagggttaggtttggcttcatgcaatttgaaggagtttccacattttctccaggttgtgcctgatctgtcatatctttacatgccaaacaataatgtcaatgcattccccagttggatgtggggaaaaacaagtcttcgggg

SEQ ID NO: 105414 - DNA, 377 bp, Glycine max
  Clone ID: PAT_MRT3847_66204C.1
agcttgcataatgaggtttcaaaagcggaatttaagtcgccaaagaacccttataatgcagagaacagggcgatgactggtactgatacataacgctcattgctgaaatgcgagacaacttattaatacgaaagcactcacgactacttattttgtataaagcttggtcttaacttcaggtctttcattaaatcaaccgtggaaaccatgacagttttacatacatctgcatctaaaaacaaacagcgttttgtattaaagtcatgaattgaacctggttgcagagtaatattcaatccaacctacttttatgacttaggtaactacctgaggactattatatacatcatgaggaccaatggcaatctgtgcataag

SEQ ID NO: 105415 - DNA, 299 bp, Glycine max
  unsure (1)..(299): unsure at all n locations
  Clone ID: PAT_MRT3847_66205C.1
ttcatgcacgcgtacgtaagctcggaattcggctcgagntcngtanntgatcccaagacgggtnaggtgnncannnngtcaccccgctgtctcnctgcanngcanagtgcagtaatnngngtgatntngannnanacagtctgngtggtanagttctctngttgnatngctcttggaagngtgtcnctaagatcaatgggangagcnttgctgtnggnnttgtnacaagantaattnaagaacnaggtcnatntantctantcatcgcacaagatgnaatgctgnngcaagganggntc

SEQ ID NO: 105416 - DNA, 1187 bp, Glycine max
  Clone ID: PAT_MRT3847_66206C.1
ggctcgagaggatatgcggtcatcttccccacccccactatcattccttcctcctccacccccaccttctattccacaccacatgccatccacctctgatccatataacaccgtagttaattcaaaaggttgtactgtttcacagactctgaaagaaaaccccccttcactctgtggctcagcccatggctgcaccaaggcatagccaacctatctgtgatgcagtgcaccatctggtccctgaatacagagaaatgcagatgcacatgccagaatctacttgctctttcaacagttttcctgtaccacccccagacaattttcgacatactgatggtgttactatacataataaaggatactctatacgaccacctcaacatgtgccatccaatcagttttcttttgttaatggggaacagcatgtgaaacatcaaagggaggttccaccaccccctccttactccagtagtcaacactttgtgcagaacatggagagagagaacttctataataatcatgagagattaaggccacctccttatgtttacgaagatagatggaatggtcctgcatcttatcccggtcctcggtatcaggaaaaaggtgtgcctcccccttatgtttgtcatccatgtgaatcaagtagaataccagatcatgggtggagatttcctcctcggtctatgaatcagaggaactcaatgccatttagaccaccctttgaagatgcaattccagttgcaaacagaggtccgggcttttggcggcctaggtgatcagaaaattcccagaaaccatggctgcccactttttgggctgggctctggtcttgtttaggaaaaggtgatttatggtccttcattctttacatgcaagaatccttggagggggttcggcggaatctgcacaggacatgtgaatgatctgctaggttttgtacatatgtattttagcctcttctgcagaatgcagggcaggaattgtaattgtagagtttttgaaaaggggtaacctatttaggttgtcatgtgttaaatttttttgctccaaattttataatttatttcatggaagcccttatagaagttagatgaatatatatatatacacaaattttcaggggatgtttcttgaaattgttctcttgatatatggaaaaacttccctctagcattttctttgtc

SEQ ID NO: 105417 - DNA, 362 bp, Glycine max
  unsure (1)..(362): unsure at all n locations
  Clone ID: PAT_MRT3847_66207C.1
acccacgcgttcgctcggtggcggagaagactactgaggggggagtgaggcctttgcaacgagcactctcctgggagactcatttgtctctctaactttctctctcctctccggtccggtgagtcagaatggtgcagcccttcgtggctttgccagagaatgctgggttgggtgagccgagctcatggctttcggggggggagcagtgcggtgcggttgcccatcacgcactcgtgtgatcggccgtngctgctcgcactcagactctccgtctgagcatgtgtcccctctgggttctagtcgctcatctttcttgagggatgccgttgcttctcgctgcgtgggtcgttgctctccaccta

SEQ ID NO: 105418 - DNA, 502 bp, Glycine max
  Clone ID: PAT_MRT3847_66208C.1
aattgagaagattccgttgccgtaatgtcaaatccaaatcatattcatattcttcgtgttcttcttctcgcccctgcattgatggctagcattgtgaattcaatgcagttcgagctgaaatccggtcaatccaagtgcatttccgaggatttgaagagtaacgtcatcaccgtcggtaattactacgttcttaatcccaacaacgatggattccccattcctgattctcacaagatcactgtgagggtgcgttcaccttatgggaacgattttcactatggggatagtgtgcattccggtaattttgcatttactgcagctgaggctggtgattacactgcttgtttttcggtgccatccaatctcaaccttgcggtaactgttctcgttgattttgtttggaaaaatgggtttgctgcgaaggactggtctaaggttgtcaagaaggggcatattgaagtaatggaattggagttacagaagttgaatgatattgcctcat

SEQ ID NO: 105419 - DNA, 518 bp, Glycine max
  Clone ID: PAT_MRT3847_66209C.1
ctccattgagtgccacaccgctcctattcattaagccattgacatttcattttcaatgcattaattcatctaacaaattctctctattcgcaataaaactcaataccccattgaggctcatgcacctctcttctctttttctctggacttacatatataattgacgaagggatgtcttattcctccttaagaatgagaccaagatgaagaaagacatcagaagttgctgctatagtgaagggtcaacctccactctcaacaagcagaatgatacttgcaaggtaagttcactagcactgcaggatctcatgatgcaatttgagttagaagctaagcttagtgatgatttcagtggaatgaggggaaggatgtcatgtgtgaatgactccaacattttgaggcctacaaggaaagctttgaatcagtatccaaggttgtcacttgatggcggtagagatgctatgaaccacagttttgtgaacatacaaggaagaagatcagtttgctgtgatagaaga

SEQ ID NO: 105420 - DNA, 318 bp, Glycine max
  Clone ID: PAT_MRT3847_6620C.1
gccacgcaaactagaatagaaagagtgatgactcactctaatgatggatgaggtgaaaaacggttagcagcacatggcttcttgtacaatagctaccactctgaggctatccaccaaatcccactgatatctgcccaacaccaaacaccggttttcatgtgccagaataatggtattctactccaagcaccgctacttctccgtctcaggttctgcttctgctcacactgcaaagccgcattaggctctcatattcaactgcgacaggtgtgatcctcgagtgtgaacacctgcatcgccaagcctacaacgatgcct

SEQ ID NO: 105421 - DNA, 297 bp, Glycine max
  unsure (1)..(297): unsure at all n locations
  Clone ID: PAT_MRT3847_66210C.1
ggagaccntggttttgggggnnacancganaagtantacgttgntaagttgagtcaattngngttagaatttgnagcancgttgggtgctgcaaatgacnagatanttgcnattcagatnacaggnacngctacgannaaagggaaagtttcttcttctnnttcttctncaactcgtacncagnanctaggatccattcacancaccttcccccaaagantcatcaattctaaggcaccancaatcgtgtgggacgcacgtganttctgcgggtttcatctcttnctcaaacatagg

SEQ ID NO: 105422 - DNA, 707 bp, Glycine max
  Clone ID: PAT_MRT3847_66211C.1
cgttctcgtctttgtctgatacccaaacctcttcttctttttcccaagctgaaatggttttattgatgatgccgtgtgcgtgcgtgcgaatttgaattcgcaaactggattccgattggcagcagaaccgtgtttttgtttgatgcgtgggcttcctcatcgttcgtgtttgtctgttacccaaacctcttcttctttttcccaagatgggagttcaacggcatgaagcgttttctgaagacaacgagcctgctgaaaatgcttgtgctagtagttccttgaaccaaggtgctcttgccagtgagtctgccaacagcgatccaagtgtaaatactgaaagtcgtgaagttaatgaaccgggtgacaattcttataagaaaagtagtacaccgcatatctatagacaagatgtcgtgaaaaataatatcagtggcatgattgggattgtgacagaagttgctggtgattctgattctgattcagatagcagcatcactgatgacgaaaatgatagtgaggatgaggatggtgatgatgaggaaggtgatggcattaataatgctagtagaaattctgaaagtaatggtgctgctgggcatggtaaaactgatgctcttctggctgaccagctgcatgtactgtggatggacaaatctgaattcactttaaatttcagcgacgttgaagttgtgatcgcggattttaca

SEQ ID NO: 105423 - DNA, 344 bp, Glycine max
  Clone ID: PAT_MRT3847_66212C.1
agcacgtctacaagtaccccaacctcgcattcttcaactaccattgtccacatgcacacgtgaatccaataaaatgagatcagattatctgaatgattgctccatctcttgctctctactactcttctaaccttcatattatatgctctcgttgcttattttctcaattattattattctaatggtaatcatatactttcacttgatattctaattgacctctatgtctcatgctattgcttggacactaactatgtaactctaactgcctccactgctcaataattacttatattgacgttccataaactataccattccttagtattcattcactgttcatc

SEQ ID NO: 105424 - DNA, 621 bp, Glycine max
  Clone ID: PAT_MRT3847_66213C.1
ccacgcgtccgcacagcttgctgaaacatttgttgtagcaaaatgccccacaaaggtggttggtgttcctgtcactctgaatggagatcttaaaaaccagtttgtagaaactaatgttggttttgatacaatttgtaaggtatttgtcctgtaatgattagatttataatttaaatattatcctttgtcttaacatatgatgaagctcaatatattttctcttctaaatgctttatatagaaatcgtgatattatgaagctggtaatccttacattgtatcacctattatgaaaagcaataatggccaatttatcttcaatatgataggttagcaagtattaggaattctcccctctctttggtgcattgtgtttgataaaataattgcatattctcattggagagggcctttctctcttgaccaaaaagaaagacagattgggataattgaggccatgatagtttgcaaaattatgctatgaaataatgagcaaatgaagtacagtgaaaatttgcttttattttcaggttaattctcagctcatcagcaatgtctgcactgatgctctctctgcagagaaggtaatgagtctaatgtatcttgcttttctctgatatca

SEQ ID NO: 105425 - DNA, 235 bp, Glycine max
  Clone ID: PAT_MRT3847_66214C.1
tttcgtccggttgtaatgaaattaacgtgtgtctcgtacaagaattaagtcagtgaatggaacaaagataacatgaaaggattattttggttgtttcactgaaaatggggttctgattactatatccataatgtcaagccaactattattccattcaactgactgcctgtggggatcgtattgtaaagccatctattatcccacatgatcaaaacctgcattctcttttctgcct

SEQ ID NO: 105426 - DNA, 986 bp, Glycine max
  Clone ID: PAT_MRT3847_66215C.1
ccacgcgtccgcgctcactctctgcgctatttaaccttgtttctctataaacccctctctcttttctctcttatagccaacaaccgcgtccgcaataatcttggataaatctcagtgagttggccctcagagctggggttgccttctctttccttttctgggaatgtttggtggggctagctgcgacttattggatttagaaatcggctattgagtagtggtgattttttttttagttgcttcagttgagtcggcatcatctgagaagaagcagatcttatattgtcaagatgaagttcatgaagcttgggtctaagccagatacctttcagactgatgggaacaatgttaggtatgtggcaagtgagttggcggcagatattgttgcgactcgaggggatataaagttttatctacacaagtttcctcttctatcgaagagttctcatatacagacattgatctccctcaataatgaagaaaatgtagatgaagttcaaatttctgacattcctggtggtgcaaatacctttgagatatgtgctaagttttgctatggcatgactgttaccctcaatgcttacaacgtaatagcaactcgatgtgcagcagagtatcttggaatgcatgaggccattgagaaagggaacctcatttacaagattgatgttttccttagctctagcattttccgtagttggaaggattcaatcatccttcttcagacttcaaagtctatgttacccttggttgaggacctaaaggttgtcagccattgcattgaatctatagcaaataaggcatgtgttgatgtatccaaagtcgattggtcctacacctataaccggaagaagcttccaaaggaaaatggaattgagtcaaaccagaatggactcagaactcgactggtgccaaaagaactgtgggttgaagatttatgtgagcttgaagttgatttgtacaagtctgtgattacaaatattaaa

SEQ ID NO: 105427 - DNA, 336 bp, Glycine max
  Clone ID: PAT_MRT3847_66216C.1
agagccatcaaaatgatttattttgcaatagtcttcagccatgacaggaaccaagaacgaaggtttttaaataagaaaaagaaaatttatgatgctatatatggcttattttttttttttgagaaaatgctttgtatgggagtaacttcgaatggccctccttggtttttaaaccaatgacatgctattaaagcaggggtctatgactcaaaatatgggtgtagattacaagtgcaatgtgaacctgaacagagagttccattatctgaaagtgctacatactggaaggtgcagctttttattaaagctacgggggcttttttaacagatttagac

SEQ ID NO: 105428 - DNA, 559 bp, Glycine max
  Clone ID: PAT_MRT3847_66217C.1
aaaaccctggaaccaccaagctataattaaaaggggaaaaagggttttggccttcaatcccagagtaaaggggaaaggaaactaaaggaaaaaattggggaaaggctaaaaacccctaaagccaaaaccaaggaagccattccgggaaaaaaaggaaaaaacaccccttggggctaaaaaaagggccggggaacccgattatcccgacatttataccccctcttctatgacaaaaataaaaaaagggaccccgggaccccaaaagggggcgggcccatgatttcggaaacagtacccaaaaagggggcttcactggggcagggaaaaacaaaacccaaagcggccttaacaatcccctaaaaaacaaaccccttgttaaaggatcccctgcacaaaaggctcccaagggcaaagggggccaccccttttttaactccttttttaaaaagcagggttgaaattagaaaagggcccccccattcaacgggcagaccccatccatgaaacttcaaaggggcaatattttcatcagcctccagggactttatatagccaagga

SEQ ID NO: 105429 - DNA, 364 bp, Glycine max
  unsure (1)..(364): unsure at all n locations
  Clone ID: PAT_MRT3847_66218C.1
cattaagagagccacccagaagagccgcggggggggggtatgaaaccccagcggggacccgaacacccgccaacgcccgggctaacggcagggaccccaaacacngggagaacccnccagagaccaggccagagaggcccgccgaaaacgggaagagccaaccggacgcnaggggacaaccacatcatctactcccgttcggtagtggaagaagagcatgccctggcacccccctggcaccgcaagtcgtgcacgagaaccaggcagacctaattcagcgaccccaacggaaggaagaccgcgacaacggcaaggcgaacacggaagaaaaggcaggcatcaccctcccgagggcccaccccac

SEQ ID NO: 105430 - DNA, 346 bp, Glycine max
  unsure (1)..(346): unsure at all n locations
  Clone ID: PAT_MRT3847_66219C.1
cccgcaaccagggaagggggggcaaaacagganccanccacagaacccggggaagaaaaacgcacccaactccacggcgatggccagaacaacanaacgggggaacacccaacggcgggggaagcggggnngccnccnaagggggccanncagggngnnggggcgacgaacaggagggangacccncnaacggaaggaccaaggccaacnncaaagcgggggggaagagcgcagggaanagacgcgggggcgncacaacaggagccgggggggcncagggggacaaaggnnctctgcactgggggcatngacaagggcagcagccncagcagggcgggcagaaacc

SEQ ID NO: 105431 - DNA, 482 bp, Glycine max
  Clone ID: PAT_MRT3847_6621C.1
gtgacatttataaggacgccttggttctggatgaactgcgttcattaaatatcttatcattgttagtacacaggcatacttggtattcctaaacaaaggaacatttttcacaacagcaagaggctaattgtctctttttcacggataaggcagttaacctgtagaaacttgctaggcagtggctcactagattcaagcatggcttgagcattatcttttccatagagtttaatctggccatcccttttttaaaaaactcaacaaaatcagtttcaagaatgaaaagctcatttctctgccatttagatgtcacaaaggaaggagtgcaacacaaaattgattagaaagtacaacaactatgagagtatatatattcatgatatgcactataatgacatcttatgttgactcatttaacagtttgacacagtgtagttaataaaaaaactcaagaaatggcaacggcaaggggaacatacttg

SEQ ID NO: 105432 - DNA, 521 bp, Glycine max
  unsure (1)..(521): unsure at all n locations
  Clone ID: PAT_MRT3847_66220C.1
gtgcatcacccaccagcctctattttaactgaacataaccaaaagatccacttttgtttccacttcactagaaagtaaaattctcaataagttctcgaattgtttacaggaaaacaaaacatataatactcctgctatgctgaattttccaacactgttggaattaacaactactttcacataataagcatacctaaagtgctcataattttgaggatgttatgttggcacaagataatgaccttcatcctgactattgatccaaagcaatggagtggccactgcaagtagaacacatgaaagaccacaaaccaatttatatgtagtcttagcatttctgtttacaggaaccacttcggtatgcatctgcttatcggcatctgcaggaatgtcatctgttgatgagactgactctgagctaccttggaactcaacctcagcacaaccttcaattacttcactgtcacacttgtgtcgtgtcatctgcaaaaccgttttggntcgtatttagaagctggact

SEQ ID NO: 105433 - DNA, 191 bp, Glycine max
  Clone ID: PAT_MRT3847_66221C.1
tgctcgtgcgagtcgtgatggatcgacatccatggttggcatcataccgaggaatgcaggggtgacacgattaaggggaactcggtgacaatgcgaaagactgtgttggatattaactgcattaccagtgttaagggtgtcacaggatcctggatttacataattgactgtgtcattgtcaccagttctgc

SEQ ID NO: 105434 - DNA, 271 bp, Glycine max
  unsure (1)..(271): unsure at all n locations
  Clone ID: PAT_MRT3847_66222C.1
ttttggaaatttttttttttttttttttttgttttttttttttttttaaaaaaaattccccaaaacatgcttgaaattttattaacttcaaaaaaaaatccccacttctttaatagaggaaaaagacataaaattctggcctctattcctcctttccaagggggtgggaacatcattttaacttgaatgaattaaaaacccattaatggggcattctgcagccctttataacctcctggccacccccttttggcgntttctgacacccgta

SEQ ID NO: 105435 - DNA, 149 bp, Glycine max
  Clone ID: PAT_MRT3847_66223C.1
attctcattcgcactcatcattcgcatagagagagagagagacagcgagagagagagatggggctgctatacatagatatcagtgatgtcgactccagctaagaggcgactctctcatcgatggcgtctcgtgtgcgcaacaacaacaa

SEQ ID NO: 105436 - DNA, 361 bp, Glycine max
  unsure (1)..(361): unsure at all n locations
  Clone ID: PAT_MRT3847_66224C.1
ttttttttttttttttgtataaatattgttttttattttaaaatgttgtgggaaaaaagtgcaataagccaaatttttttttttttttttaagtaaacaaattgagctttgaagtttaaaaaaaggggaaaaggggaaaattaaaaaacctaaaaaccgttatattattaaaaaaaatgagttttttggaaagcatttggcatgaatgatgggacccacatttttactttccatatcacagttgacatcntaaatagtttatgtaaacggaccattatgacatccacttgtgcctttcctgacagaacgaaaattaatatacctttccccgcgttcttgggtttcccagtttccaatgggc

SEQ ID NO: 105437 - DNA, 256 bp, Glycine max
  Clone ID: PAT_MRT3847_66225C.1
agtatcaatagaagaaattcatgggcttaacgagactaactcatctgcttcagacgtttcatggtttcatcacttccatttcacgttttccggatcttgacttggaataagatcatagaggctcctagatgcttggattgtacctctgggtggaggaaactttgtgtatttttaaagaattgacaagggctaatgccaatggatataagggatatgtcttatgcacctgaaagtaccagatccttaccttacccta

SEQ ID NO: 105438 - DNA, 328 bp, Glycine max
  Clone ID: PAT_MRT3847_66226C.1
attgacattcaccaccttaaatctcttttttgacaacctttttccctctacaacgaaacttaacatcttcgaaggacgattacctgatgccatgaatctatgaatctttttagcctctaaatttcctccatacatccacctgaatttacaaatttcaacctttattatacaaacattaatcaacatggactactgcaccttaacatttacaacaccttttaatacttacaatacaccacttgtgatttctgctccatgaacaaatctaacttctcatcacactgtctaaactcgtttcacgaatatatatgaccaaactaatgaagct

SEQ ID NO: 105439 - DNA, 204 bp, Glycine max
  Clone ID: PAT_MRT3847_66227C.1
agataaacactcatttgattttgctgcttgctttaatcttgagtgtagttaccagacgttggagggcacgggccatccacctttaccgcccctcccacaccccagtctttaccaccttccattcattacttatacgtcacctgttccttacttaccttactcagttaaatctccaccacaagcttccactccttcaccaaaccc

SEQ ID NO: 105440 - DNA, 555 bp, Glycine max
  Clone ID: PAT_MRT3847_66228C.1
ttcggcacgaggctttcagaaatatcctgtgcatgcatgaggcaacctttaatgaatttatctcccaacgtttcagagattataaaaaaggcatgtgcatgttagaatttctcctcacacctgaatgaaggttggaaattatggaagttactgtgcctccttaaatcactggcaaatattcaaatacggatgtgaatgaaaaagttatgttggctgactgaactcattagtagattagaatactgtattgctgatttgataattgatttaacattgtaatcaatttggtgtagagacggtggatcatgtcggcaaaggaaagcaattctgactgcctaccaactcaaagactgggtcttgtattagagagcagaatgtgatgattggcacaggaacatggacgtcttttttgcaagagtcttcatatttgtcatgttccctcatgattaatcttctttttcaatgcctctttttcttcctcctacttaacacaatccttcttgtttcaaatttgggtatggtgctaggtgggccatacttttatttatagagaga

SEQ ID NO: 105441 - DNA, 474 bp, Glycine max
  Clone ID: PAT_MRT3847_66229C.1
taatgccattggaggtgagatccgattccagactgaagttgagatgatcagcttagccgtccatcggaatcttcttcgcctgtatgggttctgcatgacagctacagagaggctcttggtttatccctacatgtcaaatggcagtgttgcttcccgtctaaaagccaagccagctttggactgggctacaaggaagagaatagctttaggagctggaagaggcttgctatatttgcatgaacagtgtgacccaaagattattcacagggatgtgaaggcagcaaatatcttgcttgatgattattgtgaggctgtggtgggagattttgggttggcaaagctgttggaccacagggattctcatgtgacaacagcagtgagaggcactgtggggcacatagcccctgagtatctctctacaggccaatcttctgagaaaacagatgtgtttgggtttggcattcttcttcttga

SEQ ID NO: 105442 - DNA, 420 bp, Glycine max
  Clone ID: PAT_MRT3847_6622C.1
ttgcttatttgtttgatggatgtggtgttttttttgatgggagccgctacaaagaaccccctcaattgttattaagacagtggggactttttaaacattacttttaccaactagaccagagttgtcggcctaacgtagaatgtactggatgggaaagacagatatatttcgtgatgacgacccttgtatgtatgcgggcacaaaacaaagcaacaaaagattccagacaaatttcttaggggggaatcgtatgacaaaaacaggggggacccttcttttagatggggccggggggcgctcaaacctaaggaacctggactccctgatataacgccaccccttccctatgtagatgcagactcaaactatgtttgttgagaagccgcttatttgggagctaatgagttgactgtgggcgat

SEQ ID NO: 105443 - DNA, 474 bp, Glycine max
  unsure (1)..(474): unsure at all n locations
  Clone ID: PAT_MRT3847_66230C.1
accagtgcagttcgattatcgctcgttactagttactgtgctgttgtttccttttatattattataattataattaaatttaactacgtatgtttacttgtagtgtagttttatactattaatattagtgtattttatatctatgccgttgtttcattctttctttattattactattattgctactatgccggtcttattatttttatttaactgttattttttagtgttctgaatttgtgtatttttataaggatgaatccgttttttgtttgattttgcatatagatgtccttttcttttttggcgcagagtgagtactgagtgtttattctagtttttcctgctggtgtttttattgtttaattactgtaatttttatttgtcgtgttttgaatttgtgtatttttataaggatgaatccgttttgcatatagatgtcctttntttggcgcacagtgagagtaccgagtg

SEQ ID NO: 105444 - DNA, 349 bp, Glycine max
  Clone ID: PAT_MRT3847_66231C.1
ggcacaaaccgcaaaagcgtccgctttagatggtgcttttaataaattcgcatagggacctcattcctacgtaggtctttcaaaagcaagaatgttctgcgtgggtgaagaacataaattgttaaacagtgttgtttaaccgatcaaagtcaaaaaaaaaacgctcgttattgcattctaccttccaacaattataaatgaccacaacactttagcggctttacacgtggaataatctcattcatggatgacttgtccttgttcactaatcgaggtgttatttcactaaacacaccactttagtccatctactgagcaagaacacgcgcgcttagtaaaaattcactaa

SEQ ID NO: 105445 - DNA, 113 bp, Glycine max
  unsure (1)..(113): unsure at all n locations
  Clone ID: PAT_MRT3847_66232C.1
aagctcggattcggtcggtcgacgcnagggagaccgaaggggaccttgcgtgtcgtgtattttttattctaacccaggataggaccggccagagttcttcttcggtgtgtgac

SEQ ID NO: 105446 - DNA, 328 bp, Glycine max
  Clone ID: PAT_MRT3847_66233C.1
ggccccaaagggggccaaaaaaagggttattttttttgggaaaacaaggagaaaaccaaaaaaaatctttttggaggattttttttaacaaacttttattatggggctaggtttatacttgcccaatgggaaaacaagtcctttgaaaccaaattcaactataaaggttgcgttaaaaaaaaattaaaaaaaccgggttaaaaaaattatcccccggttaaaaaaactagagcccccttgaacccttgaacaaacttaaggggggcaattaaccgggggaaagggccaaggggatctaaaaaccctaaagaaacctcccctttaaatt

SEQ ID NO: 105447 - DNA, 448 bp, Glycine max
  Clone ID: PAT_MRT3847_66234C.1
cttgggggggggggggggggcggtaggggggggggggggggggggggggggggggggggacctagagcgtcgggggaggatagcgagaatgagaagacagactggaaggcgccctcaagctacccctatagcgcaaaaacatgatataccagaaaagcccgctagttacaccgaacggaatacagaccaacctaatatacctatctactagaagcgattacccgcgacaagctaactactaagatttcaaaggccaaaaataacccgagaagtttcattaccaatataattatggcgaccctagcacccccataactgtaatgcagcctaacccccaagttagcgacctgggccataaatcgacttgtcattttatagccaaccccccagtatcaacccctggtattcgcgacatgtcttccataggcaacctatcccccaaatcaag

SEQ ID NO: 105448 - DNA, 394 bp, Glycine max
  Clone ID: PAT_MRT3847_66235C.1
cccaccccaaacaaacaaatggggggtttttaatggccaaacaaagactaactggggaactttaaacagaaaaatttactttaaagatttccctaagaccccccccaaaaaaaagggggccccccctggagttttccaccttcccgggaaaatggcaaaaggccgccctaggcaaaatttaaaacttcccacgggggctttgaaccgaatcataaaaaaaaaggggtaaaaaaataagggccccaaagggaaccccatacccctttaaattcccccagtatttaagggggggagggcaatgggattttttttgggacccacacgggggggggggcccgaaccaaaaataaaaccctcttcttgggggcccgaatgaaaaatttgggaaaagccc

SEQ ID NO: 105449 - DNA, 463 bp, Glycine max
  Clone ID: PAT_MRT3847_66236C.1
gaatgtatgcacgagttaactagctcactaggctggcggacaccacccttcatggttcttattaagattaaggagatagcggaggcgcaactaggttatcaccatatagaaagcagatgacactgtgcctgcttacttcaacgactcacaacgataaggccaccatgaccccagttgaaatatctgggctcaacgcgatgcgaattaacaactagcctaccggggatgtcatagacactgggctcgacaaaaatgccactatctatggggagaagaatgatttcatcttcgcaactcagaggtgggacacatgatgtctctcttataaccaacgaggatggtattttccaggcgaatgccactgatggcgaaactcacgggggaggcgtagataatgattgcagaaagatgaaccattttgttcaagggtgcacgaggaagaacgagaaggatattaaaggaa

SEQ ID NO: 105450 - DNA, 249 bp, Glycine max
  unsure (1)..(249): unsure at all n locations
  Clone ID: PAT_MRT3847_66237C.1
tctcgagctgaatcggctcgacgcattgcgatctgggttttgctatgtttgatccacttcttcgactttgcttcatctcattctctgggttttttaaatattgttcttttatgtgccttttttgtttgaattttcaagctggtttttttctacacctgctggaaatcctgaatggannnttgctntnaaaaaatattaaaatttgtggtccaaatttttaggttgagggatcagggagagataaataat

SEQ ID NO: 105451 - DNA, 278 bp, Glycine max
  Clone ID: PAT_MRT3847_66238C.1
cccacgcgtgcgagaacaaagatccttatggtgttcggatctacatctatatatttccatatattggatccggaaaggaaagactgactggacccctcatggtgcctcttgaaaggcacgattcaattgatagaaagcactgtgcttttaatatgaaacaaacacaatccgctactgaggttgcaatatgtgtcctggacacaaaaaccatctgagaagcaggcattaaatttaccgtggaatgtaaatactcagatcgccacaaatacggttaaggt

SEQ ID NO: 105452 - DNA, 586 bp, Glycine max
  Clone ID: PAT_MRT3847_66239C.1
ccatcatgtaggacccatcgccaacgaagcaaaccacctctttttcaggtgccgcaagcttgatgccaaacgcacccgcgacctcgtagcccatgcaggaatagccatattccatgtgatatccgccagcagctgcgcgccatagaacttgcaatgcaccatgcatggttcctgccgcgcacatggcgaccgtctgcggtccggcaactctttgcacggctccgatgacctgagcgtcggatggcagaaaattgggtgcgggcgtgaccggcgcagcagtcacgtcatcggacgccttgaaccaagcgtcccgcgctgcgaaatcagggtcggcaaaacggtgcgagcctagtgcgtcggagattcgtgacaatgcaatcttggcgtcgcaaaccagtgggacagcgccgtgcttggctgcatcatagccggtgagattgaccgagacgagcttgtgcatcggattgccgaagattgcccagctgccggtggtgaagtcctgagagcgggtgcctacgccaagtatgagatcgggctttgccgcaatctggttgccgcaatcggtaccggtaacgcccggtgagcc

SEQ ID NO: 105453 - DNA, 369 bp, Glycine max
  Clone ID: PAT_MRT3847_6623C.1
gagattgatgagcgtcatgatgttggacagtgtgactagcaagcagagtcattggagacgtcgatgtcacagttgcgggggcatggaaaggacgggagtacaataagtgaacgttcaaaatgttcagtttcaagggtgtggataccgatgcacgtctggaaatgtccatcgatgaatgcttgaaaatcataagtgatcgctcacgtagagagtactacagaggactcagtagaaagcccataggcttgaatacaaggcttcgcatagcgataagagaagctccaccatgatgagaagccagaacctgtacgcacacatctccgcaacacgatcactgtgactgatatgagtggaatcaatattgcagtg

SEQ ID NO: 105454 - DNA, 714 bp, Glycine max
  Clone ID: PAT_MRT3847_66240C.1
tctcgagccgctagtattttatctaatctctgttaatcaaacatgttgtaaataaaaattaaagccaacaatttggccaaaatgtttttttcttgggtattctcgataaaccagtcttaacaatatacataccgggagctcttgctgttttcacagtcaaactcttgcctattagttttgattcgatcaaaccataaaccctagctagctaagtagcgttcgagatggagatggagatggagatggagatggaggagaataatggattattgaatttacaggcagtggcaccggaaatgtccggcgagggatttccatatgcgccggaaaattggccggaagagggtgacatttggggatggagaactgggcggagaattgtcgcaaatcgttcccgctttcaggatcggtatctgtatctgccaaatcgactaatccgtgccttgaaagaggagaaggagaaggagaacccagggtcaggggctgactcaggcccaagttcaagctcaatccgaaggcaacagcacatctttgctagcaagcttgctgttgaacgctacatcaagacacattttcctgatgcggatattgatgccttttttgcttccttctcctggaagattcccgctctacgatccaatggtcctttcttctctctctctcttttcagatgttgactttatctctcttttttgtttaactccaggacattac

SEQ ID NO: 105455 - DNA, 297 bp, Glycine max
  Clone ID: PAT_MRT3847_66241C.1
cgcccttctgtaaacttttctttttttttttttttttttggcgaatgtttacccaaaacaaacgggttttttattcccttttttcaaaattggggttttccaaagaaatttccccggtgggggttataaaaacaatgtttttccccggtggaaatctgccccaaacatttatttccaaacaaaagaaaattaaaaccgtttagaaattgtggccaaacattccagggaccttgttaaccccttctttaaaattaaaggcttggttccactttgccccccctttttttttaacttttg

SEQ ID NO: 105456 - DNA, 725 bp, Glycine max
  Clone ID: PAT_MRT3847_66242C.1
ggcgttcacggcagcgttttctggaactttcggacccaagtgtttgtaatttttgattgtaacatttttttattaacaatgtttgactaataaaaacaattaacgaaaacccaattttttattttcacttcagctgtccgttatataatttggcctgtgacctgatctgatcctattactgttttgattcggtccgagcataaaccctagctagctaagtagcgttcgagatggagatggagaataatggattcctgaatttacaggcagtggcaccggaaatgtccggcgagggatttccatatgcaccggaaaattggccggaagatggtgacatttggggatggagaactgggcggagaattgtcgcaaatcgttcccactttcaggatcggtatctttatctgccgaatcgactaatccgtgccttgaaagaggaaaaggagaaagagaacccacaggtcaggggctgactcacgctctaattctagctgaatccgcaggcaacaacacatctttgctagcaagcttgctgatgaacgttacatcaagacatattttcctgatgctgatattgatgccttttttgcttcctttctctggaagagacccgctctacgatccaatggcaatgcattgcctatagctgctgtaccacttcgacagatagcacaagatgcctatgactccgactctggtgatgttgtcacgtgtcaagcatgaaa

SEQ ID NO: 105457 - DNA, 285 bp, Glycine max
  Clone ID: PAT_MRT3847_66243C.1
gtttctgaggctcccctcacctctctctccgaaatctccaaatttcctgtgaatgctataaaccctaggcacggtctatttgatgctggggcatttgcaatcaagggctagcgcatttgtttcttgcacgcaaggctgttactaccgcttcattggtcttgagccctgaattcatcattctttctcgtaccattcttttttatttcctatccgatttgttgtttgttttgttcttttataattattttagttttttatgttttatttatttgttttcattttttt

SEQ ID NO: 105458 - DNA, 876 bp, Glycine max
  Clone ID: PAT_MRT3847_66244C.1
tttgcccccttttttgtttccttgaaaccttttgctgcgttcttcactgaaccatgttgagtctcaacataagaagcattcttagggagatctttttggacaagtgtaattaacattctaatttttctgctttttcttttaatctctcttttttttttttcctttttgttttctatatctatagtttgatttcaaatgaagattgtgtatgttttaggctaagttctatctaggtgatgcttttacattctatatagtgtgtctcaaggtgatcatgaagtattgaaaattagaggccacaaacacaagctcaacttgtcacttgattttcatgtttatgtgcaggttttgaagaagttaaatcacatattcttgagctaagatggacaaatcatccaactttgatgaaaattctgatgtggggtatcacccttcttcaccttccaatactcctgctttttccccaatgagtagagattcttttgcatattgcccaacatggacaagctcagagtctgagactgtagacgagagcagctatgccagtgaaccttcaccttctcggtggagggctaaacaggatgttctttcaaagctaggaatgaagctgcgtgagcattcaaaggatgataaacttgatggctgtgttgattcagccgagcttgaattaatgaaggaaagatttgcaaagcttctgctgggagaagacatgtctggaagtgggaaaggtgtttgcactgcagttacaatctcaaatgccattaccaatctctatgcaacagtatttggacaaagtttaaagttggaaccactaaagcctgaaaagaaggctatgtggaagagagaaaagaaagttttgttatcatggtgtgacta

SEQ ID NO: 105459 - DNA, 233 bp, Glycine max
  Clone ID: PAT_MRT3847_66245C.1
ccggcccccccttgggggcccggggaacgggaaaagggggccggcccaaggaacgggggcgggggcctaaaccgggggggggggaaacaaaaaaaaggcgggtttgagggccgaaaaaccggaccaaagggaagggcgcggaatccatttataaccttaggggggggggtcacctcaacccccctttggaaaagcccaccctccccccgcaaagagccgttctttccttcccc

SEQ ID NO: 105460 - DNA, 359 bp, Glycine max
  unsure (1)..(359): unsure at all n locations
  Clone ID: PAT_MRT3847_66246C.1
ctcgagcaggctttccgctggcattgaagagttagtccagaagttgaaggctaatggcatagttgtttatctgatctctggtggcttccgtcaaatgatcaatgtacagagaatatttgtaattaatggtttttctgattcattttgggctcgggaggaaatcaatagttactgacatattgtgaatttggatagactttntaatctgtattgcacactgccattgaaaatatttcagaactagtacatacagtctttgcatgcccataatctttattaagattagcgcgatgctaaaccctaaacatatctcttgcaaaatacatattttaattttgaatgtggaatgaatatgagag

SEQ ID NO: 105461 - DNA, 437 bp, Glycine max
  Clone ID: PAT_MRT3847_66247C.1
atttcttttgttttatttttggtgtgggagtgggatggatgttctaccatatgtattacaggaattctttgatattaatgacgaatcattaattttttcttacagtaatatagttaaatcaaagttatttaacttgactacgtactgagaaattaattttaaaaatgttaagttaattgtctgtttcagttgatgatataggcatattgtatgtcctatagttaacttacacattagttatatatctcatcaaaatgtttgctgtcaccacacatttaacaaaaaaaacaaatgtaaagaaaaggctgaaaattgaaagttcttcatttaacaataaaaggccgaaaaaggttaaaataatatttggataaatacatagtgctgcaatagtaatgcttctctaacatctaaatcagtggcaaatacagagaggtaac

SEQ ID NO: 105462 - DNA, 214 bp, Glycine max
  Clone ID: PAT_MRT3847_66248C.1
aactatttcatatcttctgtagattagagagcgtgtgctgttgctgagaggtacacttagtctctacaacacaggatggaggaccgaaatgtcagtgataagcagagccatggtcgttccaaggagaagccgcaccttgctatattagtcccttcactctctctacatcaggtatgtatatcatcactactggcggctttcaagcacggcatga

SEQ ID NO: 105463 - DNA, 348 bp, Glycine max
  Clone ID: PAT_MRT3847_66249C.1
accggttttgaataattccggccgacgagctcactattcgggccgcttttccagttttctatatacccaaacgggagaaaaagagggggctttgtattaaaagtaaaacgacacacgagattggatcgtggcatacaaacttatgccaacaaattccccctcacacatgtctaaatggaacccagggactttcacctatagattctcaacaccaatatgaaaaccaccaacgtatgcataacaccctgctcttaacatagttgatataaaaatgctaacaacacattatcttatacacacttttaaaaacattttttttaaagcttgaaattttttagaaatcacata

SEQ ID NO: 105464 - DNA, 1293 bp, Glycine max
  Clone ID: PAT_MRT3847_6624C.1
ccacgcgtccgctctctctctcactatctatctatcccaccataagccattaagccaccagcctctgtaaatatgttttccacaaatcaccaaaatttcccatttttttcaccctctgaatcacaatcttttttctttctaactaaaatcgcttctgcacacacaaggattcagcatgttttggctagaatttggataattgcttttgattatcagaggcagaaggaaacaataccttgaaagtagatagatgtcgggggcttcttctttgatgtttgcttccagtgaaaggtggattgaccgtcttcagtactcctcattgttctggcctcctccaccggatggtcaacagagaaaggatcaaattgctgcatatgttgagtacttcattcagtttacatcagaacagtttgctgatgatattgctgagttgatccgtaaccgttatccatccaaggatattcttctctttgatgatgttttggcaacatttgtccttcatcatccagagcatgggcatgccagttgtgcttccaattatttcatgtattattgatggtacactagtctatgataaggctagtcctccatttgcttctttcatatcttcagtctgcccaaaaattgagaatgaatactcggaggaatgggctctagcatgtgggtgaaattttgcgcattttaactcaattacaatcggctcaagtacaaaacggaaagacaatctggtgaaacagaaagaagcactagtggcagtcatgccacaactagtgaacctgggaaatctgggcataattctttgacacagcaagagaagaaacctattaggccgttgtccccctggattactgatatattgttggcttcaccagttggtattagaagtgactatttccgatggtgcagtggtgttatgggtaaatatgctgcaggagaactgaagcctccatcaaccgcttcttcccgtggttctgggaagcatcctcaacttgtgccttcaactccaagatgggctgttgccaatggtgctggtgttatattgagtgtttgtgatgatgaagttgctcgcaatgagactactactttaacagcagctgctgtccctgcacttttgcttcctcctccaacgacagctttggatgagcatcttgttgctggattaccagctctggaaccatatgctcgtttatttcatagatattatgcaattgctactccaagtgctacacaaagacttcttcttggacttctagaagcacccccatcgtgggcttcagatgcacttgatgctgt

SEQ ID NO: 105465 - DNA, 685 bp, Glycine max
  unsure (1)..(685): unsure at all n locations
  Clone ID: PAT_MRT3847_66250C.1
acaagagcttcacgcgtcctgcacgcggacagtatagcttggagtgtggaactgaggtatttaatacttatgggctattgggtaatgctgctttgcttcatagatatggatttactgagcaagataattcctatgatattgtaaacatagatatggaactggtacttcaatggtgtacttctgtgttttctgaccgccacagtagagcaagagtttccctttggagaaagttaggctattctgcatgtggcagccaaaactctgaatattttgagatctcatttgatggagaaccacagattgaactcctcgttttattacacatcatgttattaccagataatgcctaccataagttagacctatcggtatcggttgctggaaattgtgatgaatcaagtggaaccacctttctgaatggtaatatctttcctagtaaagcatttaatatgagcaagaaatccttgctgcctaaaaaagcttgtgatgtcctgttgtcacttgctgatatgagggagagtctctatggcttgaaatcaattgaagatgatattgaggcattgggaaaaggtgtagtttaattagagagagaaagctgnatcattcttttgatgctgcgcatcaatgaaaggaaagatcctccagaagctcagaaanatatgcttctcagccatttaaaaataaa

SEQ ID NO: 105466 - DNA, 277 bp, Glycine max
  Clone ID: PAT_MRT3847_66251C.1
ggggttttaaaagaatcactaataaaataccaaatgtacaagcccattgacttcacacatttagacaaagatggaatagcgaccctcgggtcgtgggtagaaacgggtgatctttaagcgggtcaatcaacacctcaaatggcaaaagaatcctcgtattgccccggagatggattattacgagcgatacttggcattcagggatccacctcaaaggaaacttggataatactacctacaggcgggaggggtagagttattgatgagagatggatcc

SEQ ID NO: 105467 - DNA, 318 bp, Glycine max
  Clone ID: PAT_MRT3847_66252C.1
ggggcaaagaggaggcatcttttggttaccagataactactacggaaggtaactgatatccaactacaaagcgttagagcctctacaacggggctcaacctttacacaaaaaccggtggacccataataacatccatgcaagcggtcacgtaaaaacaacgtggagaaaattaatcagatcagctaagtactaccttttggggccctcaatgggggatttggttccaagggcatcaataccgggaaactttcgacatgatccctgtggatgtggaggtaaacacaaaacttccttgatgttactaaaagcgcgaggtc

SEQ ID NO: 105468 - DNA, 128 bp, Glycine max
  Clone ID: PAT_MRT3847_66253C.1
gagataggacttttgtaactaaaaaattttcaatggaggaaccttcacatttaaaatatccatctggtggaaaggtcaccacgttaaaataaaaaacggcgattgcaactctactataaaacaattac

SEQ ID NO: 105469 - DNA, 397 bp, Glycine max
  Clone ID: PAT_MRT3847_66254C.1
ggggagcattgatttggggggtttacagcgggctcgtacggtttttacgccctagatagcgattgatgataagcttgtggtggctaccacacaataattcttctgctggaaattaaaacagtgggcattttactggatacacaatctttgcgtggaagtggctctactcttactagtatgtacactaaccgttcagtaagctgacattcgttaatggcatatgtcgcactggacgtggaggataacccatcaatgcttgcatcagttttgcgcctaacaatcgctcctcagtatatcaacagtaagatctgagcaggactcgtgacaggtaagaaaaccgcttcacttactcgattcgctcctttgccaaaagctggactggctgatctatgtggcg

SEQ ID NO: 105470 - DNA, 201 bp, Glycine max
  Clone ID: PAT_MRT3847_66255C.1
tgctagaatactatagtaagggatgcaactgaatatttaacaaaagccatttccatagcagcctaagactatcaatatcactagcgctgtgcgctatctttccactttacgccttcagctcatacctaacttctgccaccgctcagcatgtgctcgacttctattgtcatccgattctgataagtttcatagactacgttt

SEQ ID NO: 105471 - DNA, 122 bp, Glycine max
  Clone ID: PAT_MRT3847_66256C.1
gatcccgccagtgccattgctgagagcctctaaccaaccactgcgaactccaccaccgcacttccattactatattgcacttaacagcaaaatctcacaaccaatcatgattccacacaaca

SEQ ID NO: 105472 - DNA, 575 bp, Glycine max
  Clone ID: PAT_MRT3847_66257C.1
agtcatcaacgggaaaatgcctccatatttctttatgactctatgactggatacctgtatctcttcccctccgaataaacggagaaagcgagagcctcttacaggaacttcaggggggtgcattacaaagaaaaaaaaaaaaaaccccttttttccccctcaatcatcttccccttaaaaccgccttttcaaaagggtcaacctcctccaagatccttgcccttcgtttggcggaaatgggagcgggtggtccaaaactaatgtggggcccccacacaggggggagcgcggaatatctggccctaaaggaagcgcgtccaaaaaacgctttctccctcctgtactttgccacccatgattgagaggtttttcttaactcccgttccgcgggtgccacgtgggggtcattgttggccatcacgaatggcggcctaacttaggggatcactccctgtggatgcttaacctattcctcatgcgatgatgccagggccatgctcaaagggaacaaccagggggtggtgatgatggacaacaattccccgacacgaaggtggggggaggaggatggggtg

SEQ ID NO: 105473 - DNA, 411 bp, Glycine max
  Clone ID: PAT_MRT3847_66258C.1
cggactaatggaccgaagcgaccggataaataggatatcatttgtgtgactggatggactgccaccccaatgcaggacgaccagggtaccatagactggactatacactataaagaatgtgctcccaggacctatggagtgataaatgcacaaaaaaccaaagggataaatagggggatggggaaacagactgcccatcaatgcactaaacaaagtgctaaaaaaaggctcatggatctaaggggaggagctgacacaaagaatgctactaatgatgaatatgccagatgctgtactaacaatgagcagatattttgtggagatcttaaacttcgaactgataagatgactactgagtacatcaatgtacagactctatcttatagcatgtgagaatcatgctgatgacac

SEQ ID NO: 105474 - DNA, 456 bp, Glycine max
  Clone ID: PAT_MRT3847_66259C.1
tgaaagtaattctctatacccatttcagatagaacatgaattctttgaccacacaaatcgtgacatggctgaagcaggtagcagtatggaaatttgttgtttttgtttcaactgttgttggacttgtttgttatgctctcagctcctccttcagctgtctatttggagaatggaccatgttgaagatcttcatcttcctttggagtctgtttccaaagacaccacatcatacgagaatcttcgagtccaagatgattctgtagtgattgatgtcaacaatgctaggatgatgcaacaactaatgacttgtatcagtgcgcttcagcgtggaaactcaaatctcaccaacatactttttgagtaccttgatgataaatctgaagtagcaggtattgaccataacccatttgttaaggtaattgttcggccagatgtcaaggagaatccaatgacctg

SEQ ID NO: 105475 - DNA, 879 bp, Glycine max
  unsure (1)..(879): unsure at all n locations
  Clone ID: PAT_MRT3847_6625C.1
ctcgagccgattcggctcgaggagcaatgtcactacatactttcacccaatgttactcagttcttattcttactaaatttccttatcaacactgaaaaagatgtgaacatactagttgataagaaaattatagtcaattggatgggtgatgctaatgctgtagttaaaatgtttaacagtctttgctcaaatgttatagtgtcatacatgagtgaagagtattgtactctctaccatgatttgattaaattccatgaaaaccctcgcaacaagtacaaggctatcttttatcatgagtacttcaacactccatggaaaaaagcatctacaactgctgcagttctactacttttgtttactttaattcaagctatatgttcagtcatctcattgttttaaaggtaagaaattatgatacactaaatcctaatcacattttgtaatatttctagtaagacttttttattagcaattagtaaatttctctctagctcttgataggtgtagatatttatagaactggcaatgatatataccaacttctatgagcatttttcaaaaaaattatcattattcatttatcttctcatggacaagtgttcctttttgttgaaaatgtttcgattcagagaacaagccactcatgcgagttttaggagatgcttacagttggacacaaggatgggatcttttttgctactcgctctaattaacaacaattgattatatgtagtttaagaaatgatgctatgtttgcctcaaataaccattatttgttgtggttttgagaattctgagcccttctaagagaacgaataatgattgttatattgaaataagataaataagatgaacgctagtgagagaacnnnnnnntga

SEQ ID NO: 105476 - DNA, 166 bp, Glycine max
  Clone ID: PAT_MRT3847_66260C.1
actcatgtatataccttgcaagtgctactattaactcggcaaatggagcatagcaccactcaatcaaccgctgctaaagctgcaatatcaaagagccgccaacacgcaataatggatgcctatctctgactcttacatctaactgcacgaatacaagtggaaccct

SEQ ID NO: 105477 - DNA, 355 bp, Glycine max
  Clone ID: PAT_MRT3847_66261C.1
gtgttcggggttgttgattgaggcgcttaaatgggggtgtttataaactacttgttttgttgcaagtgggttggggagggaacccaaagagaagggctcggagttgttgaagttgttgaatagtgcaggagcaaagctgagtgtgttcatcattcttcgtggatttaagcatttgaagaatccctttaatttgatctggctataggatatgagatttgatttcacttctttttttttgtataggttgatcatactgtagaaacagaatataatactcttgtacaaagacgtacacatacggaggatacaaattgtatctcttaacactcaattgaagttttgaaattcttttttt

SEQ ID NO: 105478 - DNA, 293 bp, Glycine max
  Clone ID: PAT_MRT3847_66262C.1
atcgctgtcgccgtcgccgtcaaacaccgcccaccgtatccgctcgttttctcggacggactgacacactcgttacgccgtcggcctccaggatccattacggagtatagtgaagccctcgtgacaacacagcaagtcctgtcaatcagttatccggtccaaacccatcaccatgaaaccctcaatccaacaagcgctcctcctagccagcttgttcgcatgcacgaatgctctgaagctccaagtcggctccaactacgacgaaggcgtaaaagtcaacaccctgagcaaaa

SEQ ID NO: 105479 - DNA, 324 bp, Glycine max
  Clone ID: PAT_MRT3847_66263C.1
ggaggcaattattgtgagttttcaatatacaacaactggaactatgttatagctttcaactgggttggtttttttttttttcaagagatgatttaagtaagaaggatggatgttcatattatcgtatatcatctgacaaggaaggtggaatcgccataactagacacaaattttatcccttgaacagaaaagggtcgaacaagcccaggctctctaataattttaaaaacaatttggaacaattgtaactatagttttgggaacaactttaactgactcacccaatgcacggggcaattagagcaaaaaaaaaaaaaaaaaaaa

SEQ ID NO: 105480 - DNA, 214 bp, Glycine max
  Clone ID: PAT_MRT3847_66264C.1
tcgtagttgtttgggatatgccaaaaagtatgtttcgtagaaagtcaccaacatgcccatgccattggcgagtgtctgctacgtgtactgcaatcgcgtgatccgcgacagcgtcgtgtacttggctaaggtctccgttcagaaccctgtattccacttcgcaatcccatgtgtgagagcaagtactccctcattaggtgctgcaggtttctat

SEQ ID NO: 105481 - DNA, 1064 bp, Glycine max
  Clone ID: PAT_MRT3847_66265C.1
ggtccggaaacagccaggcgtttgatttggaacaaacaacaatagaggggttgtggtgctctgtgtgctgcaatttccttttgagcttgtgtttgattcatcaaatcatcaaagatgactgtaggggcaggaatatctgttgcagatgggaacttgatggtgttggggaacaaagtgctgagccatgtccatgacaaggttcttgttacccctgcatgtggtggtgctttgctcaatggggcattcattggggttcaatcccatcacaagggtagccgcacagtcttcccaattggcaagcttcaggggttgcgatttatgtgtgttttccggttcaagatgtggtggatgacgcagagaatgggcacttgtggacaagatatccccattgagacgcagttcttgctcgttgaagcacacaatggctctgatattgaaggaggaggagaccaaggtgctgctacctatgcagttttcttaccccttctcgaaggagatttcagagcagttcttcaggggaatgatcaagacgagattgaaatctgtgtggaaagtggttgtcctgctgtggaggaatttgatgggactcatttggtttatattggggctggatccgatccttttgaagtcataacaaattctgtcaagactgttgagaaacacttacagacctttgcacatcgcgagcgaaagaagatgccagatatgttgaactggtttggatggtgtacatgggatgctttctacactaatgtcacttcagagaatgtgaagcaaggattgcagagctttgagaaaggtggaattcctgctaagtttgttataattgatgatggatggcaatctgttgggatggaccccaatggtgttgaatggaaatctgatagttcagccaactttgcaaatcgcttaactaacatcaaagagaatcacaaattccagaaagatggcaaggaaggtcaacgggtagaggacccagctttgggacttcgtcatatgaccaatgaaatcaaactagagcataatataaagcatgtatatgtgtggcatgcaataacaggata

SEQ ID NO: 105482 - DNA, 542 bp, Glycine max
  Clone ID: PAT_MRT3847_66266C.1
ggaattcctgctaagtttgttataattgatgatggatggcaatctgttgggatggaccccaatggtgttgaatggaaatctgatagttcagccaagtgggtacttcttttctaagtttcattatcagattgtaattccatccattttacattgttgaataagtccatttttgtgctttcttgtccaacagctttgcaaatcgtttattatacataaaagagaatcacaaattccagaaagatggcaaggaaggtcagcgggtagaggacccagctttgggacttcgtcatatgaccaatgaaatcaaactagagcataatataaagtattgccattttcattttattgtttctatttctccataagatattcagttcacgcatagtactcatgatctttggaaaatgttccccaggcatgtatatgtgtggcatgcaataacaggatattggggggggtgttaaacccggggttccgggcatggagcactaccagtcaaagatggccttccctatctcatctgctgggagtttgagtcaaat

SEQ ID NO: 105483 - DNA, 416 bp, Glycine max
  Clone ID: PAT_MRT3847_66267C.1
ttttttcatctaaccattttactcactttttggtatagagaacattttagacttatatgatatctgttttgtgtttgttttttgtgtgtgtgggagagagagaaagatagagaaactgagaaagggaggaatttgctttttcattattgtttaaattgacaatccttttttttttctgtcccgagagagtaatgtcaccgaaattttactctggttagcattttagaattgtgccctatatgctcttcagatccatccaataacttgatcatgactgttttagcttaataatcaacatagagactaagcagatctctggggggcaaagttgagatatcctttctctgttttagaatgtaaaaaattccctaattggatgtagtttcccatgcttccatttctgaactctcaacctt

SEQ ID NO: 105484 - DNA, 156 bp, Glycine max
  Clone ID: PAT_MRT3847_66268C.1
tgctgagggtgtcttgagtcccttccattggtgatagaagatatattattcgaccaagggctgaccctaacgtgagggtatggagggtgaaagcatcagctctgcttgtagcaatcttctccaaggaactgaagatgcacgagtggcctgcttcca

SEQ ID NO: 105485 - DNA, 259 bp, Glycine max
  Clone ID: PAT_MRT3847_66269C.1
acgacggcttccgttaaccatatggcccgccactcagcgcacacgcaacaccgaaatcactcgcctcatcgaaaccctatcctacccctccgtcctctccaagcgctacggtacaatgtcccccgacgaggcctccacctccgcccgccatatcgaggacgaggccttctccgtcgtcgtcagctcctccgcctccgacaatgacaggatcgagatcctccaggcctactccaaggatatcagcaaacggatgctcgac

SEQ ID NO: 105486 - DNA, 715 bp, Glycine max
  Clone ID: PAT_MRT3847_6626C.1
gaatctgtgaatgatgtcactgttctgctctgtggacatacaatacataagagctgcctaaaggaaatgagggaacatttccataaatgttgtgatttttgtgtttgattctgcatcaggtatgcatgccctctctgcttgaagtcggtttgtgatatgtcaaaggtttgggagaaatttgacttggagattgctgctacaccaatgcctgaaccgtatcaaaacaaaatggtttggatcctttgcaatgattgtggcaaaagttctcacgtgcagttccatcttgttgctcaaaagtgcttgaactgcaagtcctacaacacacgggaaacaagaggctgagcaagtggcaatggttatttataggaccacttttgctctcacttcattgctgtgtaggtgtagtggcaatccaagtgcatcctttattgaggaaaatgcatgtgggaattgtcattcaattgcaggcaggccgaaccacatccaagagaaaaacggtttatcacgttgatgtggtgtcgagggtagtgtagagtcagcaattgtcgtgttggttatttcgtgttggggaaacccttttagtgttccagtgttcactcctgtaatgtttgtttgggattaattccaactttcaaattagctgttactttatatatttgtagaatcgtaacactgtcttaaaagttgtgttaagatgtaaccttcatcgcgtatg

SEQ ID NO: 105487 - DNA, 1447 bp, Glycine max
  Clone ID: PAT_MRT3847_66270C.1
gggggtgtatttagtaaaatggggggtgcaaatagtaattttcgaatctaggcccttctagaggtttctgggaaatttcttgcttaaggttgaagcaacctagctcgcctgggcgagctaggtggccaccacacccccattttgttgaaaaatgggatttcggggcttttgggatacccgtaatgcttccgtaaaattcccataaccctaaataatcataattaacttaatacgggtgagacggaagaaaaaaaaagaataaaatcaagtcatatatgcttctgtaaggcttccgtaacttttccgtaaattacgaaagaagggggtgaacttatcaaaattggggggtgcaaatagcaatttcaaaaatttgaattgggccttccagaatgttttttgaagctggattgcttctggaggaagcaacccagctcgcctgggcgagctgggcgacaacctcctccccctttttcctataaataggctgaagggggttgttctaaggatcccggatgcccctggtgaggtatttcagctgttttgggtgaaaaaaaattgtttccatgaagaaaatccaagccgaggtgcttccgtaacgcttccgagaggtttccgtaagcaaatccatgaaagttttcctccgttattcaccgttcttcattcgttcttcgttcttcaacgggtaagtttccaaatcgagcttttcaattcattctatgtacccgtggtggtccccatttgtttttacgtgcttttcattttatttactttctgtacccccttttggcgtgctttagtcattttctcatctaatcaaaaaatgaaataaatttcgaccgatcatttgaattgtaatatccgttagtttctgttaaaatgaaatccgaccgttcggtcacgccgtaactacgttggaagccaaaaaaaagggtaaaataataatataataatcaaaaatatcttttaataaaataaatcaaaaataatcaatcgaacactttcctttgggatttctctttcttaatcgaatcgattaataaccaaagtgaaactaatgcaaaaatcaattcataaaccaaacttttgacgttgcctaaaaaagccattttcaaaggtccaaagccttgaaatggtcttttccgcttttatcgattaagtgtaaatttcaaaaaagctaaaatcaacatatagctatattacctctttcaaaaataaagagaacattaaatggtccaatgccttaatgtcttctctcttttcaaaagaatcgaaagtttgtttaacggtccaacgccttaaataacctttcattcaacaaaaacatatcttgcaaaaaggataaaaacaacttaaccaaacattttgttctcaaagaactacgtaggtctgatttccttatcgcaattaaggaatacgtaggagcaagggaaacaccctcgtcgactgc

SEQ ID NO: 105488 - DNA, 275 bp, Glycine max
  Clone ID: PAT_MRT3847_66271C.1
caggtcaatcgacctggcgggacatcatctccgaagatgggaacatcgacatctgctgcgctatcgaacgagtatggatcgatgccgcgaccgaatggaatgccgagttctctcccatcacactccacgtcttcttcgatgtcgccaccccgcagtcgggcgattacggatcgatgccgcgaccaggatcggtatctctaaccggcatgccgaacgctttgggatcttctggaacggtcccgaggacgagttctccatcgccagggatgccaagc

SEQ ID NO: 105489 - DNA, 237 bp, Glycine max
  Clone ID: PAT_MRT3847_66272C.1
acccccattcttctcaattgtgtcaatcaacctccatgcgctgggcttatactaaaggtgcgtctgctctctacatactactccatctttttttaatcgatcctcattaactacacatactaattcacaacctattctagcgccatttttctaaaagatatcaaactctccatcttaccccatctatatttcaatctttctatacacactctacattttttcaacctttttaatctc

SEQ ID NO: 105490 - DNA, 308 bp, Glycine max
  Clone ID: PAT_MRT3847_66273C.1
gtcaaccaaaaactgggattatactcattaatcagcacgcacaagcataagaaatccagttcagctacctgagacgcagtgagcaggaaaagacaacaggcctaccactgatactgaaacggctgcagtggcttcaagatgatgcccagccagaagggttgcttgtgccggattggggtgcctccccaactgctacaggttagacgactgtgatgctcttggctgcagggtcactggacgagagtgatttcttactgataatgcgtgagatctctgccagaatagtttggaaagcatggtcaacatta

SEQ ID NO: 105491 - DNA, 516 bp, Glycine max
  Clone ID: PAT_MRT3847_66274C.1
cccacgcgtccggtggcacccaaatgtcctgtttgtcgtcaggagattcgagattcagtgcggatttatgaatcttgaacagacacaggctgattcttatgttctctctgtggcaggaaacttttttgcttgctaacgagaagaatgtttgctttttatttcgataagatatagaatctggagttgtagggaaaaccctcctttgctcttatttcctgtgaaacatttatcaggggtagataataggttggtcgaggttaattttataggattttctaattatcccagttgcagtgtacataaatatttaattttgcctaactcctttagaatgaactctgatatgttattgtgcaaaaaaaaaaaatgaaaaaaaaaaaataaaaaaataaaaaaggaaaagagttaaacttgatgaacaaacttgaatatacttgagtggcttagggatcgtatatagtttaatgtccctgcaattgttcccctctaaaaagttgatctttctgcccattgtaa

SEQ ID NO: 105492 - DNA, 469 bp, Glycine max
  unsure (1)..(469): unsure at all n locations
  Clone ID: PAT_MRT3847_66275C.1
acggctgcgagaagacgacagaagggccctacaacaaacaaactaaacatggaaaagttcttatgagaactaggactnanaaatccttgatttattcgtcagcttaaaattctggatcgtcatgcactttcaaaatagcaatatgcttcgacaagaaagggttgttcactcagttgcatatatgtctttacaatgccagaaaggaagaaggggtgtcaattaatccaacattcaacgtttctgttatatttggcaaacgggatgaggtatgcttgactatgtatgaaaatatttgttcttcttgatcttttatatgaaattgtgcttcttgttcactgaatgcattgatgcagccaatgttagtagcatgtgcacgccagatgattgagcacatgaggtaagtattcttttcttaagagaaaatctacttttttgagttttattactcatcttctggagtgttcaactt

SEQ ID NO: 105493 - DNA, 1313 bp, Glycine max
  Clone ID: PAT_MRT3847_66276C.1
ctcagagtaacattagtggtgaaactcaaaactctcacataattgaggatggaaaccttgtcatttctatacaagtactacgcaaggttaccaatgattttgcttcagaaaatgaactaggccgtggagggtttgggactgtttacaagggagaactagaagatgggacaaaaatagcagtgaagagaatggagcatggggttattagcagtaaggcattggaggagtttcaagctgaaatagctgttctttccaaggtccggcaccggcatctggtatccttgttggggtattccattgatggcaatgaaagacttttggtttatgaatatatgtctcttggagctctaagccagcatctttttcattggaaaagcttgaagttggagcctttgtcttggtcacagaggcttgcaatagcactagatgttgctagagggatggagtaccttcacagtcttgcccgtcagacctttattcatcgagatcttaaatcttctaatatcttattgggtgatgattttcgggctaaaatttcagactttggtttggtgaagcatgccccagatagtgagaagtctgtagcaaccaagcttgctgggacatttggataccttgcccctgaatatgcagtgatggggaaaatcaccacaaaagttgatgtgttcagctacggtgtggtgttgatggaacttctgactggacttgtggcacttgacgagagtcggccagaggaaagccggtacttggccgaatggttttggcgaattaaatcaagcaaggagaagcttatggctgctattgatccagttctggaagcatctgaagaaacttttgagagcataaccattgtagctgaacttgctggacactgtactgcaagggaagcacatcataggccagatatgggtcatgcagtcaatgtcttggcagcattagtggaaaaatggaaaccagttgatgatgaattagattgctactctggcattgactacacaagaccacttcctcaaatgttgaagatttggaaggaagcagaaagtggagagtttagctatgcttcttgtctcgagaacagcagaagcagtattgcagccaggccttctggttttgcagactcttttacctctgctgatgcaagatgacttagaggtaacttcagtgaaatgttgctgtgtccttttaaaatttacttggatttaagtctgtgtctgcagccaagaggaaatttttttatgtatttgctctttgtactgattttggacactaaaatacttcaaaataccatacaaagatgtagataaatttaaaaa

SEQ ID NO: 105494 - DNA, 396 bp, Glycine max
  Clone ID: PAT_MRT3847_66277C.1
ggctcgaggaagatgccagtccaaacttgcaaaataattaaagctacacgtcgatcacttaacaagaactatggtggactgtgaaattgcctttcaaacttgaaccgttatgagcaacaagtttgaatacaagcagcaattgggcgtgtgatgcactttcaggcacacagggctaatgttcctaaggctgaactaaaggagaagctgtttaagaagaatgaattgaaatactgttgtactgtgtgtgtcttgaaatttcaaacacattcaggaggttaataatacactggagatggtatgatttatgatgcagcatatgatggcaagatatatcatctcagatacagacttaaaatgaacggctaacgacaccaaagtaccgaagttatggaagca

SEQ ID NO: 105495 - DNA, 773 bp, Glycine max
  Clone ID: PAT_MRT3847_66278C.1
gtcacccatcgtcgatgtccgtcatgtcgtccatcggtgcaaccaactcaaaacaccgccacacgcaaccatatgcaaggccttggcacgtgaagttcacgcacacgacgtgagatgcatttaacggccaacgtcacactggtcttctctccctctaccttgaggcatccttggcggacctttctgctttttcacaggtgagtagtgcccatcgtcattgccgaagaccaccacgctgttcatatgcacaaccaactcaaaacaccgccgtatgtgatccctctcagggcccgaactcgtgaagttaatgcacacgtcgcgtgacgcatctccggtgagcgtcacattagtctccatcgtcattgtgggtcttcattggctgccgccaagccatgtttatccggcacaaccactcgactagaaccggctttagtttctatcggggtgaccacatttataacaagctcggttcatttaacatatacgctcaagcttgaggagagtgttagatttatatattattctcttatttatgaatatatagcaattagtgatttagtccttattactcattatgaaattgatcctatgtaatcaatattgatcctatttgctcattataaataaaggcttagtgtgatcaccacaacacacaacactatagtaaaacactgttatatgctcaatgccataatttttgtcaatgatatatagtaatagttgattagttaagacaaaagagtaaaatctaaactcgagttgtggagaagctt

SEQ ID NO: 105496 - DNA, 1099 bp, Glycine max
  unsure (1)..(1099): unsure at all n locations
  Clone ID: PAT_MRT3847_66279C.1
ctgccccttcttctcgaggttcctctcacaccatcatctccactaccaaccaacctcctaattcataacattcttattaatttaatacaacaaaatcacaaaaaaataaataaataaccgttatttttttgggttctgtgcagctgttggcgctggatccttgttcttcactggtcattgttttgttgttgggtttgcttccttttcctaaagggtcttgctcctgcgttctgctaaggattgctcacaccaaaaatcattgctttttagttggtattgtgattctgtttcccttttgtttggttgattgagatgtggagagatccgggagtttcagctgattctttctatgaaatccgccccgaatgcaccgatgttcccgttactcgatttaagatcaaggctggcaaaacactaagtgcaagaaaatggcatgctgcatttactccagaagggtatctagatataggcaagactctaagccgaatctaccgcgggggagtccatccatcaattaagggagaagtttgggaatttctacttggttgctatgatcccaagagtacatttgaggaaagagatcagataagacaacgccgaagaatgcaatatgctacatggaaagaagaatgccaccaattgtttcctcttgttggaagtggtagatttgtcacagcacctgttattactgaagatggtcagccaattcaagatccattggtgttgaaagaaacaagtcaggccaagggattggctgtacatcctcaatataataatagtccttcaagtatggatgctgcaaataatttagaaaaggtgacagacaagacagtagtccagtggatgttaactctccatcaaataggttcgtgaataatttgttctcattgggctgtccattatattgatatttgtagtgtattttgatatttgtttttccttttcatattttacagtgtccacttttgaatatggttaatttctttaaccatcagggatcgactaaattaattttacatccattttattgtttnaaaaaaaaaaaaaaaaaaaaaaaaaaaaaaataaaaattaaaaaaaaaaaaattaataaaaaata

SEQ ID NO: 105497 - DNA, 246 bp, Glycine max
  Clone ID: PAT_MRT3847_6627C.1
ctctcctcgttcacgctacccctttctgctcttcttctacctttcaagttttaaaagtataaagatggcagagacattcctatttacctcagagtcggtgaacgagggacaccctgacaagctcatggacaaaatcatcgatgctgtcctcgaggttgcatcgagaaggaccagaacagcaaatttgcctgcaaacatgaacgaaaacaaccttggtcatggtctccggagaaatcacgaccaagg

SEQ ID NO: 105498 - DNA, 347 bp, Glycine max
  Clone ID: PAT_MRT3847_66280C.1
gaattcagctcgagtgtacacataaatctagctccttttcctttttacctgggtaaattctacacatagggctgggaggatccaactttaacctgaagaacgtattcaaaacgtcagctgcgccaaccatgattcgcggccgtgggcggagcttctaccgccagatctcaactgatgcgatcgttgaacagagacactagcacggttgcggcgcctttggaagctttctctttcagaggaagtgcactcttccataggtaaaggatcaggacttactatataaaaaaaacgaagcctacgacaccattaacactcgagttactagttactggcgaattacaaggccc

SEQ ID NO: 105499 - DNA, 647 bp, Glycine max
  Clone ID: PAT_MRT3847_66281C.1
ctgttcctaattcctattccacccttttgacagggttcatgttcctctcacaccatcatcaccactaccaacccaaccacctccacaatgtcataacattctaacttttagcttaatacaataatatccaaaaaaaaccgttatttttttttgttctgtgtagctttttggagttgtatcctccttgaattcttcacttgataagtttttgtttctgggtttgcttgatcttcccaaagggtccagcccctgcattctgctaaggattgttgataccacaaatcattgctttttagttgattttgtttcccttttgtttggttaattgggatgtggagagatccgggagttccagctgattctttctatgaaatccgccccgaatgcaccgatgttcccgttactcgatttaagatcaaggctggtaaaacactaagtgcaagaaaatggcatgctgcatttactccagaagggtatctagatataggcaagactctaagccgaatctaccgtgggggagtccatccatcaattaagggagaagtttgggaatttctacttggttgctatgatcccaagagtacatttgaggaaagatatcagataagacaccggcgaaaatgcaatatgctacatggaaaagaaaa

SEQ ID NO: 105500 - DNA, 281 bp, Glycine max
  unsure (1)..(281): unsure at all n locations
  Clone ID: PAT_MRT3847_66282C.1
ggcccgcganccacccgctttgttaaattagaaaggaaaagcataacccccctgggacagggatctaacaacccttggggcttaaaaaaaataatttaattctcaaccccctcgggggcattacacatcatattaatttaaagggtaaaaaaagggggttttttacgttaagagttcattttctaaaattaaaccttccattgggagggttgcttccattgggactattaaaggggaggcctttaaaggggcctcctaaaggtcccccattttttttattt

SEQ ID NO: 105501 - DNA, 584 bp, Glycine max
  Clone ID: PAT_MRT3847_66283C.1
cttcttctcttgcggctagggttttagcgcaccttcttctaaatttaaggaagatgggttaggaaaaggttcacattaatatgtgtggttatttggcgcattgttagacatctcgggtaagttccacctactcactggaccacctcgatgctacaagcttggaggctttgacatgcgtgttattgagagattcgagaaggaagctgctgagatgaacaagaggcttttcaagtttgcctgggtgcttgataagcttaacgctgaccgtgaaagcatgaatcacaattgatattgccttgaggaagtttgaaaccaccaagtactattgcacagtcattgatgcccctgcacacatggatttcatcaagaacatgatcactggtacatcccaagctgactgtgctgatcttatcattgattccactactggcggctgtgaagctggaattttacatgattggacagactcgtgaccatgctctgctttcattcacccttgctgtgaaacacatgatttgctgcttgaacaagatggatgctactacaccctaccactacactgccacgtatgatgaaattgtgaa

SEQ ID NO: 105502 - DNA, 370 bp, Glycine max
  Clone ID: PAT_MRT3847_66284C.1
ttttttttttttttttttttttttttttttgtttgtttttttttttttttttttttttttttttttttttttttttggggccaaaaaaaaaaaattttttatgggcccagcggcctaatgaatcaattccaatcccaatttaatgggttatttattgaccaaaattttgggggagataatgttttgcctttatatttcaaaacgttttatacaatttaattaaaaacgggggatggatctcccaaaaacattttcaaaactgattttttgacagaaatactaaagggagggggcaaaaaaaaggcttgtccaaaccctttttttagggaaaaggcctggtggttaacccctcccaaaaaattcccatttt

SEQ ID NO: 105503 - DNA, 771 bp, Glycine max
  Clone ID: PAT_MRT3847_66285C.1
cgaattcgagctcggtacccggggatcctctagagtcgacctgcagtcattctaattattttttttttaattcataaaggtttttcatgctaaattctagaataaagatcctatgtaaccattattatagccatgtcaatatctccctaattttgctactccttttcttccatagttctattgcatgttatcaaggtgcttaacattatcaaactttatatgaaaaaccctcatgtttgaataaggcattcacatgaagcttataccttgacttttatattctcctttgtgtgtacatggtatttaagtatgaaatctgcaaacataaagcttatacgttctactatattacatattacacattcatgttcatcattttcaattgaactaaagttttagggagggtttatttattaaatatgatctttagattcactgtttatttacgttattaggttttctatatcttattgcttactaatcttttattttgtttatgtgaactatcaaatttttcagttaagtgtgtcgtttcgtttccccttgacctgactctctatttatagcggctgaagtggactttaggttttcgtagacacgcttagcgcgacctccctcgcttaacacgtgtagatcgcgcgcttagcgagctcctctcgcttagcgtgtgttgcacgctgagcgcgagtaccaactctcgtgcttaaagcttcacttagtgcttgtgtctcctgtctcgcttagtgcgaactgtgcgcttagcaagacact

SEQ ID NO: 105504 - DNA, 589 bp, Glycine max
  unsure (1)..(589): unsure at all n locations
  Clone ID: PAT_MRT3847_66286C.1
ggactagctgtcgacgtgtgggtagcaactgtccaggtcctgtcaccaacaggcgcatagcctgaagggctgtataagcggggggcggagccaaagcagaagacgcacgccgtgtacgggtccactaacgccttgcaatagcaaggatgatggcggcacggcgttggggcggcaattgcggcggaacaatatgcgtaatacactgtgctaccagcagtttatttgactgctaccgtggcggacaagctatggttagcatgcgggtagacacccagcgcagccggtacggtgcaggcatgttatgaaccataatatactacaaaaccaggtattactaaagggcactggcacacctgagcaacgtagtcagcatagtaaccaacactggcaaaagtaagctttcccacgccgggtagctctgcagaggcggcttagccttctgacacagctacggggtgggctacccccgttgcgagagcatagattaaaaccgaccaaccagccaataaccgttaaaaggcaacagatgagtaagtgcttgctttttgggngtaagctggtgcactgtaggtacagcggtccctaatcg

SEQ ID NO: 105505 - DNA, 604 bp, Glycine max
  Clone ID: PAT_MRT3847_66287C.1
agatctaaacagagttgagatgacagatgcatactattacgatgagttcccttccagagatgtgtttgaaggagcctgtgactgtgctagagaatggaatggtttgttgtgggaagattcaaagaagatgcacatggtggttaagactgaggtacatcagtatgtacgagattatttgcgccgtcaaaagtagtagcaaaggcaacatcatcttatgcatcctggtcatcctggtcctgtcaacatgcaaagggaaacctgggaaaaaatgcttttattttgagcttctttacaaggaaacagcaatggagaaagcgatttggtcatataattggcacacatctcatactttttgtttcacatttttcccctcccttttagaatttttaaaaaaatgtattttccttcaaggtaagttttgacattcttcctttttttttttggttttgggaggggatccttttattacttgaatgctgtgaaacttttttttatttagaattaaaaattaaaatttataactttgtatagtcaaaatattgtaagcataaaatttcaaatgatttgattaattaaattaaattttttatatccataaaacaac

SEQ ID NO: 105506 - DNA, 206 bp, Glycine max
  Clone ID: PAT_MRT3847_66288C.1
gcggtcatccgtgctagatcacacgcattcagttttcgtgctgtcgtcatgtcaaacagggggagtgctcacatctaacgagaaggggttccagagcgtattcaatgccttaactgggaaaaaagctaaatcggcccgcgtgaaggccgtcacataattggccaagatgcggatacctgaattaaactacaacggcagggtgcgaa

SEQ ID NO: 105507 - DNA, 278 bp, Glycine max
  unsure (1)..(278): unsure at all n locations
  Clone ID: PAT_MRT3847_66289C.1
tgaggttcaggctcagatggaaacaaattngtttaaattgtctcttgatgatgttgaaantcctaaaggttccatcttggatctaaanttnctcaatctaaaattgcacttcccaagaacacagttggnggaaccattctgcgtagtgatctantggcanatttnttgacagagggcaattttagagcaagtgttgatttgcagcgnacttcatcgtattanaggaatgattaanatggtggnacagttggtattgccgnagaatacaggtatagcat

SEQ ID NO: 105508 - DNA, 263 bp, Glycine max
  Clone ID: PAT_MRT3847_6628C.1
caccgcggaaccgcagcgggagcccaccacgatccagtcagcaccgcagacgccgcaggcagaccaagaagagatcagaggcgaacatctggcagagacaaggaccctaagagccatcgcgtcaccgcgaaggagtccacgatcaaggaagaaccgaaggccggcccaccgcacgctgggagaacaacagccccccgcgaagtcaccccgacggcgaccaaagaaaaactggcgccccgcatggcacagcctgtaagaggagc

SEQ ID NO: 105509 - DNA, 449 bp, Glycine max
  Clone ID: PAT_MRT3847_66290C.1
cacgcgtccgcaaccatttccgactcatctcaagaccttgtccaacttttcgatagtgctttatatcattgtcagtgtttcatcttcaatcctccccctccaaccccctaatctactacaaataacaccaaacatactccttctttgacgtccgccgttcacaaatctagcatacctttacccaatttgaaaacaaagaaaaatgctaaacagacagcttccaaagacagccacttctcggatgcactcaacaatctcatatagcaaaccatacaagctattaaagctctggagtctatatccccacccacttccgatgatttatataaggataccttgattgaatattcaatcaaacaatctgaccatctttctctctctcaggacatggaatctattgtgtagaccatgatacatcaacttctttccaatgatattcttcattaacc

SEQ ID NO: 105510 - DNA, 292 bp, Glycine max
  unsure (1)..(292): unsure at all n locations
  Clone ID: PAT_MRT3847_66291C.1
gtcgcangcccgcgtncgtcagctcggnnttcggctcgngctgaaanntccnagcctaangcttcttcaacnaaganganagncaagnctncnggccnngncctctgctttcattgtcagcnggtactgncgtatncanattnaantacntcnanggcgaaacttncgtggctgacctgnntgctaganggnnctgatgctacnttnacctgnnntncangggcaanattngagagtgagatgacacgcttttggaggcnctggacannctggtngatcttcttcctanatc

SEQ ID NO: 105511 - DNA, 563 bp, Glycine max
  Clone ID: PAT_MRT3847_66292C.1
tttttagtaaatagaaagtcaatcttatatatgctcttgcacaaggctttcgtattgaataaatgcccttagacattgacaacgtaagtatatacaaatgcttattcactatagacttcaaatagtcctcatcctcaccttacatatctacaaaagaaaaatctggtcaaggagaatgtgtcaacccaagtctcttaagctgtacatgtgcaagcaggagcttttcctgtaactatgggcttgacattagcacatttagcaactattggagctccattgaatgtaagagcaacgttatttagttccacatcctcacatggtacacccttgctacatataagagtcactccttccttggtttttgaagtgccctgaatattcttgaaggtaaccttgcttatctttatttttgatggagcctgttttgagcactgattccaaggacaatactcttggtctatgatcactgggttcatgacatcaaccatggtaatatcttcaaaatgcatatcagtaataggagaagctcctgagaactaggccaagtcttgacggacgcgtgg

SEQ ID NO: 105512 - DNA, 272 bp, Glycine max
  unsure (1)..(272): unsure at all n locations
  Clone ID: PAT_MRT3847_66293C.1
aacagttaattcaaggtcgtttccagatcatcaacgtatggcggccanttgaaaaccctgcttccgaccaccctctcgcagtagtagactggcgcagnacctcgccagangattttattgccacagatctcatgtatcccaagcncgnggntcattaganctagatnancgcggtaaggtngtcctgcnagatccgaacaactacaattctacggacgggtncgangtcaagggtgagaccatgggcgangcaccaaacgacaagcacaagt

SEQ ID NO: 105513 - DNA, 464 bp, Glycine max
  Clone ID: PAT_MRT3847_66294C.1
ttgggatttggaaattccatggcggcgaacttgttagcaactctgggggatctggagagggactccttcgtgcctcttctctcgaagctgattggtgaatcgaagcacccgccggagcttattccgcaagaggacagagtggtgaagcacgtcttggacattctgttaccgttcagcaccacctccagcggtggccccttgctcgtcaaccacgtcacataccacgccggcagagggaacctcatcatcgagtaccccggcaccgttcccggcaaaatcctctccttcgtcggatgccacatggacgtcgtcaccgtcaatcccaacgactgggatttcgatcctttttcgttgaccgttgacggggataagcttcggggtcgtggaactaccgattgtttgtgacacgtggcacttgtcaccgcactcgtttggaaacttggggaaaccaagtccaatttgaa

SEQ ID NO: 105514 - DNA, 677 bp, Glycine max
  Clone ID: PAT_MRT3847_66295C.1
ggccggcccaattcccgttacctaccgtcgttttctactctatgacttcacttccgtgttctttgatatttgcagtgtaattgacatttctctctccaaaccaaccaccacgcgtccagagcttcttcttctgctgctgctgatccaataacggggtcgatttgcacttcctctgccaatgtcgaacctcgcattctcagattcgtctattccctctaccttttgaatcccttctatctcctcaacttcttctttccccgtctcaggagaggaaaatctcttgctaattgatgacatggagcagtatgaaatacttgagcaaattggaaaaggtgctttcgggtctgctcttcttgtgaagcataagcatgagaagaaaaaatatgtgctgaagaagattcgccttgcccgccaaactgagcgctctcgtaggtctgcacacctggagatggagctcctctccaaattaagaaatccatttcttggggaggataaagattcatgggtagaaaaggggtgctatgtgttcattattatagggtattgtgaggggggagacatggcggaagctataaagaaagctagggggggtatggttcctgaggagaaactatgtaagtggcttggtcaacttcttatggcacttgattacttgcacgtgaatcatattcttcatc

SEQ ID NO: 105515 - DNA, 389 bp, Glycine max
  Clone ID: PAT_MRT3847_66296C.1
acgcgtgcctaagctaggaatacggctcgagctagatttgaggagcctcttgaaaattattttcaggatgcctattgacttgagatgaaactgttcctttatgaagcaaagcaacagacagatgctatcaggtgaacggaccttcttgaacgtgtagttaacgctctccctcacacaacttgcatgagacatggagggggatgaacccaccttaaggactatcttgatgacatacaagctcaagacacatgctgatgatagtgaagggtaaactacatccactgccgatttaaagtattatattggggatgactcggaccatgttatggtgccttagcctgccaaccgggatcgggacaacgtcatgagtctaattggcaagctcgacc

SEQ ID NO: 105516 - DNA, 231 bp, Glycine max
  Clone ID: PAT_MRT3847_66297C.1
tcaagactacgccttccctgcgactccaaacacaatgacgtcgtcatccatgcctgactccgtctccgatgtcgaagatgtctactgcgaactattgtgcctccacggccatggtacagcctcttaatctcccagttcaatcccctttgggaccagcatgtcgatcagtatagcctacacgcgtatcttcccgcaaagtttccggtggaagcttcctgattgctgctgttg

SEQ ID NO: 105517 - DNA, 382 bp, Glycine max
  unsure (1)..(382): unsure at all n locations
  Clone ID: PAT_MRT3847_66298C.1
ggctcgaggtgtatctttaatgggatcaaagcctttttccatttatcaggnaaaaaacagaatcattaggtgtgcggtacaaaaactacatactatttccaccaaacgttttttttatttcatatgcagaagactgaattaagtaaagatagctattcttaaaaaaaactttaagtttaacaacaaagcggcaaataattaccaacgaggtttaacgcatgttgattggcttaacaaaactgaaacacacattgtcacaagtggagcttttgtgtgaacttacaacaacccatgagtaaactctgagaaaacccccgttttgtaatggcccaataaccctgtgctattagtacctctgatctaaaaacttagacattatacc

SEQ ID NO: 105518 - DNA, 495 bp, Glycine max
  Clone ID: PAT_MRT3847_66299C.1
ggctggagacggctgcgagaagacgacagaagggggtgcatttggagatgccgcaaccacaaaatataatactccacctcaaatatcattatcacatgcgattcactttctgtttgaaggaccaaagtgagagatagagttctctagcaactcactctacattgccccgaatgaatctgctcaagatctcgagtggtgcaagcttgtggcgggattccttaaagtatatattgatgcaggaatcttcgaagaaccaaatctctttggtgctggtattgtacgtggtgtgtgatgatcagtgaaggtttaatttcttaaagcaagagcagtccatataaacgggagacccgatccaagagaagctgaagctttgggcttatttcatgcaattaaatgcatggaggaactgcaacttgagaatattatccaagaaatagactgtaaaacggttactgatgctttatcttctaagaaaaaaggcatagattaatttca

SEQ ID NO: 105519 - DNA, 200 bp, Glycine max
  unsure (1)..(200): unsure at all n locations
  Clone ID: PAT_MRT3847_6629C.1
ggaaatgggtgtcgctgtgttcgagaatccatacataggaataaccaaactaaactaactcgattcatattttcaaatgcaggggtttcagtttcaggggcaacatttaccttcgtgaacaagtgcgattacacagtatggccagggattttaggtacgnccggaactcggaagcacaggctttgaacttgcgaagggag

SEQ ID NO: 105520 - DNA, 386 bp, Glycine max
  Clone ID: PAT_MRT3847_662C.1
cttttctttttgtgaggctttccaaatttgggcagtatttgtatttacccttccactgagtttttctttcttgggacatagaaattgacagaagagagtgagcacacagaggcacttggtatagtatatatactattgcttttgcgtgctcacttctctttctgtcaacttccagtgctggaaaattccttacaattctggctctgctttgttccaaattccaaatccaaacaaaccccaaccccaccccagacacactctcgatctttctccacactctgatgaactgaagaacatcaatggcttcttcagcagatataggatgaagagttggattcatcctaatcactaaacatacatggattgagaagatgtcattttatatt

SEQ ID NO: 105521 - DNA, 281 bp, Glycine max
  Clone ID: PAT_MRT3847_66300C.1
aacgaagtacctttgctcaaaaaaaactcaggctgagaagggggaacaccagatggggatttttttcggttttttttcgggacttcttcttttttacttttgcaggaaaacctgagagaccgcttgtttcaatcccaagtaagacctctacagacaaagaatatttctgtcctttttttttccctttaggacaataagcctttcttccctctggggattcttcattgggccctaccccaactaaccctcggggggacttattcagatcttggggagggacc

SEQ ID NO: 105522 - DNA, 380 bp, Glycine max
  Clone ID: PAT_MRT3847_66301C.1
cccggaacgacccacgcgcccacgtgttcgatgtgagctgtaggctggttcctcgggaggtgaatatgaaatagaatgattgctcagttgatggacacctaatgatagcaaggtcatgccatggcgcaggctacccactggttcctcaccgaatgaataccggctattgcaagctttcatacatgtgagactgcaatagggataggactgatggaaaatcacacatcagcccacccttagaaaggatttctgaatagtgcggagaaccatcattggactacatttatggcgagcaagttagatcagactgtctgacagttacccaacaagctcatttttttgctagtgtacgcccagatcatcacaacaggatatttata

SEQ ID NO: 105523 - DNA, 348 bp, Glycine max
  unsure (1)..(348): unsure at all n locations
  Clone ID: PAT_MRT3847_66302C.1
ccnnngcnnnnnnggtattaaagtttctagctttgccatcactgtacagagtaacttgtggtacaaatccacaaatttggcaaagtattgctaaaataaaatgacaagtaatgctgtacaattaaattaaataatactacaaagaaaaaaactactgctagtaaaatctagcagaatcctaccaatttgctatttctatatacattgcctttcatatctacctatgtcattctaatagaccatcaaataaaaaagtttgatctaatttagggagtctagatattgcaatatcaccataagctttgttttgctccacatctacatagcctgtagttttcggacgcgtgg

SEQ ID NO: 105524 - DNA, 446 bp, Glycine max
  Clone ID: PAT_MRT3847_66303C.1
ttccaggaaggtttcccgtcatcactgtatgacgtcctccttctttgggggggggggggggggtactccccgggcagtttcctaatcctaacgggtggggggggaaaataaaggatgccaggcagggttacgagtagggggatagatacaaaccatgcgaagttacaagacaagtagggtttgtgaaggagtttaggatggacatgggcgagccagcggataaacgagcaggttaataggagtactaagtagttataggggtggtagcgtgataagagatataggtggggcatgagtcgcacgacgaatttacgtgtacggtaaagaattatacgtacacaagcgagtatgcgtgattaatgggaacggtaaattagtaatagtaaccatggaaaggagccaggatcgtaagaccggggccgtaacgctatatgatatggggaaat

SEQ ID NO: 105525 - DNA, 488 bp, Glycine max
  unsure (1)..(488): unsure at all n locations
  Clone ID: PAT_MRT3847_66304C.1
tcccaatcgctttctcagtttctctccgtcatcaaatctagggttcctgcagttgtagttgccgtcaccaccgcgagcgccacctccagaataggtggcgccaatgtctggtccgttctctttctctctctctctctcctcgttgtatgtatattgattggatgatttttattcttcgttggtaatgctttgaatgaaagaccgagaaggaaagaagtgtgttccgaataatcgagatgtaatcaaactagaataggatactgagccaaagatgttggttgcaacagagaatgcttgaaaaaccattgaattattattcgcatcgtgttgagaatcaaagtaattgagcttagtgttgtttttgtcattgggttcctatgggaatctttgccaattgatgatgagcttcgactctgaaggatttcaattaacatgtgagggaaaaaggtgaagtgtttattgtatactaatcaaactntattcattag

SEQ ID NO: 105526 - DNA, 520 bp, Glycine max
  Clone ID: PAT_MRT3847_66305C.1
tattgtttccagtgcccggtcttgctgaaaaccacatgaagtctcctggtgaacaccctctgacacatggaacatacatagcaaggatgtaggcccaatggactcgtaccatacgcatgaggtttgggtcttacggctgcctacggtggactccaccactactctgtaggctgtcggccaacagctatagactcttactatggctatttggatccacccaaaccctactgcgtgcggaacttgaaccttacctccatagtcaactcaccgaccttgtgtctatcaagataaaactggcacgcactgagtgaatgctagcgcctcttggacccagccccaaactaggggccctgcctatgtatgcgcagtgtgcctaaggccttgtgctccgagtgtaaaggagaaaaagctatctctcgcgcacctagaccgtgtcctcaactataagtctagtaatgcaggcgcatgctctagtaatctaaggagctatgtgcactactgtatgaacgcgactccctct

SEQ ID NO: 105527 - DNA, 775 bp, Glycine max
  unsure (1)..(775): unsure at all n locations
  Clone ID: PAT_MRT3847_66306C.1
tcccggcgtcgacccacgcgtccgtttggattttgacgtgtttttaactttttttaaaactgtggttagtctcactcccgctctcgctgctgcgctcacgctcctcctaagcttttattccactgtgcagctgtgctcttttttttcacactcacacccttctgtttcgttctctctctcgttgaatttcaaggtcgcgacgcgaaatatgagctctgaataacaaacaaacagagttggtgttggtctgacatgagaagatggatagagaaaatgctgtaatgggtggtgtaagagagggtgaagagcgtggtgttcgggtcactcgagcaatggcaagagctgctttgggttgggtctctgcctcttctagaccgtctttcaagaaggaatgtaaaaacaacagtaggacagcactagcagatgtatctaacataagcagaaaatcacaggcaagaggaggttacaagaagactaacacaaagggatcttccaatgtctccattcaagttttgtcaactcaagaagatgttagagcagagttagcaaaagatttatccacaatatcgatggtacagacacatgatgctattgtagaaaggccggaagacacagagctagtgcaaccctctatgtctgttatggcaggtcctctgctttcaatgcagaactctatgaagtctgatgaaatccttagcccctccaacanagacattgatatgattactgagaaactaanactttcagaacgtttgggcattgtggacattgattc

SEQ ID NO: 105528 - DNA, 2203 bp, Glycine max
  unsure (1)..(2203): unsure at all n locations
  Clone ID: PAT_MRT3847_66307C.1
ccacgcgtccggaaacaactcctctctactcaaacccttcttcctcataacaacaaaaacaacccctttcccccaaaccctagaatcgccccacacagatcctcatcgctcccaaccaatttcccaacaatttttttctatccgaaacaccgttgaccacacacactcgagtttttatccataaaagttccgctttttattcctgggtcccctttttttctcttttttttttattgggcataggaatgttgggtactgggttgaacttcgggcgcgctcgcggcgaggatcggttctattctccggcaaaggctcgccggtcgcttctaactatggagaatgacaagctgcgtagggcccaaagcgacgttgccgcgtctcgctccgttagagacaaatcggtggattcgggtaaccggataccggagaaccgggtcgggtcggacgaggcaaagaagagtggcgcggttccttcgtgtgaaccggtggcgaaccggttgagtaatctggagcggttcttgcaggcgatcacaccctccgtgcctgctcagtgtctgcctaagaggacgacaggaggactcagggcgtgtggggcggagtttcagccttacttcgttctcggggatttgtgggaatcctttcgggaatggagtgcttatggcgcaggagtgccacttgtactgaatgacaaggatagtgttgttcagtactatgttccgtatctgtctgggatccaaatttattcccagaatgtgaagccaactgtaaagtcaaggcaactcggggaggatagtgacagtgattttagggactcaagtagtgatggtagcagtgatagcgaacctgtacatggaaggggattgaggaatcttccccatctgttagaagaggtgcctcaatggatgggcggattatctttgagagaccaccattctcttccacaagatgggttttctagtgatgatggagaatctgtcaattctcagggttacttgatttttgagtatcttgaacgggaccctccttacagccgtgagcctttggctgataagataatggatcttgcttttcaattccctgaactggtgacccttagaagttgtgatatactaccatcaagttggatatctgtagcctggtatccaatttacaggataccaactggtccaacattaaaagatctcgatgcttgttttctgacataccattctctttatatgcccatgggaggttcacaaagagtccaggctcccatgccacatcctactgagatggacaatgtccataaaatgtctttacctgtttttggtcttgcttcatataagttcaaaggatctctgtggactcctaatggtggacacgaatgccagcggtctcttttgcagggtgctgatgactggttaagactgcatcaagtcagtcacccagattttcagtttttcagccgttgatgatgttaaggtgactgtaatattatactttggccatttaagaatagaacattagcatttgccagtgcctcttggttcatttcttagatggccatacttgatgaagttggagttaataacataattgacagaaggaagatgaaaaatggagaaaagatgtttagcactgtccttggtaattttctgtatcgtttccttccgtaataagtgaaagaatcagaaaagataatggtaataaagcagtaaagctttggacaagaggcagtgttgaggcttaaatgtgttcatggtggatgtacagattaacaagcagcttctcaagtgctagctgatttgtttgtttgctaacatcaatgagtcctccatcagttgcttatctgttgttgggttatgttaaaagagaacaggctacattttttctgtcctggtgatgttctataattggactttagctttaatttattggggaaattttactggatatggtgtttagatgtattcatgcttgaatttcccccaactctatttgaattctttaagttatctttctttgctgcataaaaaaaaaaaaaaataatattgaattttaccgatgcgacncgttgagtatctgagcgttctgcagcgacaccctcgtgctgttgattgctagaacacagagaccagcgggagcggtcagctactcgctggatggagtttngatgggctagcagagcctgcgagcagtggtgcgcatgtctatttgacatatc

SEQ ID NO: 105529 - DNA, 440 bp, Glycine max
  Clone ID: PAT_MRT3847_66308C.1
cccacgcgtccgcagagggtgatgttagcagggcgagttgagttcttcgaacacttaagtcggagggactgctgaagacgcaacccaaccaaccatggctgcttctgatcccaacaagttgatggccaaagctgataaacaaacaagactcagtctcacgaggtggagtgcggattggaaaagtgctactgttctatatgagcaggcagctaatgggtttagagttgccaaggactatgagaatgccaaaatagcatatgagaaagcttcgaaaggacaagagatgctttcttcaccttgggatgcagctaagcacatggaatctgctgctgctctagcgaaggatctaagacactggcaagaagttgtggacttctatcgaagggcatctgaattgtatatggagtgtgggagaccccaacctgcatcagacgctcttg

SEQ ID NO: 105530 - DNA, 1225 bp, Glycine max
  Clone ID: PAT_MRT3847_66309C.1
cgcagacgggaactcgcgtcgtgagtggacccagagggtgatgttagcagggcgagttgagttcttcgaacacttaagtcggagggactgctgaagacgcaacccaaccaaccatggctgcttctgatcccaacaagtgtctcaaccaaaccaaccatggcagcttctgatcccgacaagttgatggtcaaagctgataaactaacaagactcagtctcacgaggtggagtgcggattggaaaagtgctactgttctttatgagcaggcagctaatgggtttagagttgccaaggactatgagaatgctaaaatagcatatgagaaagcttcgaaaggacaagaaatgctttcttcaccttgggatgcggctaagcacatggaatccgctgctgctctcgcaaaggatctaagacactggcaagaagttgtggacttctatcgaaaggcatctgaattatatatggagtgtgggagaccacaacctgcatcagatgctcttgcaaagggagcccgtgctctggaagatagcatgtctgaagaagctattcagctatatacagatgcttgtacgattctcgaagatgatggaagagaacaaatggcctttgatctttatcgtgctgccactaatgtttatataaaacttgaaaaatatacagatgcagcatctttcatgttgagattgggctttgcagctgacaagtgtaatgctaccaatagccagtgcaaggcatatcttaatgcaattgttatctacctttatgcccatgactttaaccaagctgagaagtgttataatgactgttctcagattgatgcttttctgagaagtgaccagaatcgttgtgctagcaacctacttgctgcctacacagatggagatgttgaagaaatcaaacgtattgctcagtcaagtgttatttcacatcttgaccatgtgatcattaagcttgcgaggaaacttccaacaggcgatgtgagttcattgaaggctaacaaggctgaagatgaagaggagccactcgatgaaaatgacctcacttaacctggctctttttctatctgtgtctatttagtaggaatgttgatgaacccatttcaatttaatgagtgaattgaattgatcagttatagattggtttttgtataaaaaaaacagttcttttgtgatacatgtgcaatgcaggtaataagaggagcgctgttgtttattcgaatgagaa

SEQ ID NO: 105531 - DNA, 487 bp, Glycine max
  unsure (1)..(487): unsure at all n locations
  Clone ID: PAT_MRT3847_6630C.1
tggacgcgtgggcggacgcgtgggggggaagctatggttgccttcaactggagtaacgtacactgcgggactcatactttagtttaacacaaattaatactgccaaagaggaaattataggggttatgcatttaagtgttttgtggttagcattaacgagcttcaacaacaatccatcggtttggcgaaattttcttttctttgtgggggtgacttcatttggtgtggtgacaaatcgctgcatgagaaatactaatactattttacaacgagccagtgctaattaatgaagtcccaactaactacatttgtagaaattgcagcaaaaaaataaatataaaactacactgtagagagtagagttcttgcacatgttgtatccatttagattggatagtatttctggtccccagctcctgattctagcacggaattatgtcaatgtgttagtttattttctaaaaaaaacancaataggttttttttt

SEQ ID NO: 105532 - DNA, 396 bp, Glycine max
  Clone ID: PAT_MRT3847_66310C.1
cccccttccttaacttggattcttttaaacgggcggttttttttttttttttttttttttttttttggggaaaatcgtcccaaagtttttgggtccaagccccacaaccgtttttactaacaaaactaaggcaaagctccctggtcccaaaaattaggtgtaaaggagccccttttctttaaaatttttattataattgcataaccccataaaagtttttgaaagcgggaaatacctttggggaattgaaaagccggcctttccaaaattttgaaaaaaaaaaaacttataggctaaaaagctggaaacttccatgatttttttaaattgggaaaggcttaccaaagggaagagttactgcgcaaaaatttaattttaccttgaaaagcgtggaaa

SEQ ID NO: 105533 - DNA, 220 bp, Glycine max
  Clone ID: PAT_MRT3847_66311C.1
ggatgcctgcgtgtacactgacgaagctgtcaccagagctcttctgaacctgaatggctctgcacctgagatttcagctaccagttcatccttctctggcagcagcttgaagaacgttattggttcaagggtgcccagcacacagacttgctctggaagctgtaagattgcagctcgagaagagaagaaagagattgaagagacccagcagaccgacaag

SEQ ID NO: 105534 - DNA, 368 bp, Glycine max
  Clone ID: PAT_MRT3847_66312C.1
atggttttacatggatcacttgttagattagtagaaacttcaatcttgtgtttatgcaggcatatgtgcattgtatgaaaggaaattgaaagagttaaatccggccatcagaaatctctcttatgatattgtggatctctacaacttcatagatggtcttgctgacatgagtgctctagtgtctctctctctctctctctctctctctctcaagtcatgattcttgagcaataaccatgcattataccctgacagattagttagtacttatctgtatttatgattttgagactttatagaaaaaaaggaaaaatagaaaaagtgagagaatataccgattgctttgtacattttacaattctagtcaa

SEQ ID NO: 105535 - DNA, 342 bp, Glycine max
  Clone ID: PAT_MRT3847_66313C.1
gccttcgtccttttttttttttttttttgaaaggaatgttttcttgaaaaagccaaacggcgttgtatacataaaccttcggacgtggtcaaaacgtcatagcctattaaaactcagggggccttgcattttttttcattggtacaccatgaaacggtgccgtcctacccccatcccttgttgtttcttgtgccaccttttgtttaaatcgtgcgcacttaggtgacacctacaggatgaccaattgtcccggcctatggttcggcgggaattccaaggctaagtgtttggacatacaaaacacattggcggagaaccgtggggaccttctaaaaaaacatt

SEQ ID NO: 105536 - DNA, 668 bp, Glycine max
  Clone ID: PAT_MRT3847_66314C.1
ccacgcgtccggagctgaggaaatctaatgaacctggagagtgatgttttccaatatgttttgatgtagttttggtatgaaaatgaaatacccatgctaaaaattcacataggactatagggcattagaagttagttgtgtgtactgctgtccctgatatcctgagatcagtatggcttattttctgctaaaatgctcaaatttaggagtgaatatttatcaattgtgcatgatgctgtatgacaaaggtatggttgaatcttgttctgtagcatgtgagagtgtacggaaccttgtgaaaaccatccagataagaatggctaaagtgagtgttatttaacaaaatcaagaattgaaaatgaatcctggtagagagtatcatttctaccttggctttctttatctctggtcaggactcagaagatcgtcacctatatcgggccatacgaagaaagaaaggttcagctcatcgtcaactatgtgcactaagctatagtgatcaaatgaaatgcgtcaatattttagtgcgaccaacacctgaaaagtgagggctttgttttgttgtcctccaagttactggatgtttgtattggaacaaatgcatgtatcattattttaacttgtatatcggattttttttttaatatacaatgtactctacatttgtc

SEQ ID NO: 105537 - DNA, 421 bp, Glycine max
  Clone ID: PAT_MRT3847_66315C.1
gtctatcggttcatggatgggaatcaagatcaggctgagaccaagtttcggatcactgatgggtctacatgatggccccaaaattgatcctgcaagttctactattgctacattcatagagacggttcacgatcaggggccaagagactgggcgaatggcccggagaccgtctcagaggcgaagttaattatcgcgtgaaagatcgtggggaacaccatatcatatggcgaatgcgacagtgcgtgacatgataccccttatgctgccacaacaacggatgcggctgtgcaacaggctgcgccggagaaagatacgaaagcggcgaacaaagcagcacacaacaaatgcatgagcgagatcgtatagcatacagaatgaacagcagatggcatctgtcttagcagattacggacaggacat

SEQ ID NO: 105538 - DNA, 366 bp, Glycine max
  Clone ID: PAT_MRT3847_66316C.1
tatcagggccaaaccattcgtatataatcatcagattgaaaagaaaccaaaattgatgtgaaatacaaagcttaaaattgacatacaacgacttaacaaaaaaacaggggagtttttgagttggaacatagaagttcacactggaatggagggttcctcatatgggctatgcaaatttcgaaagcaagctctagactccaaggacagaaggccttttacaacttgtaccatggatggacttgtctcaggcaccacataagtgcaaccaatcgcaatgtctaaggctccaatcattacttggagacaagtgtgtgagattttagggccaagaaccttgtgcaccccattagtgatattcactatcct

SEQ ID NO: 105539 - DNA, 187 bp, Glycine max
  Clone ID: PAT_MRT3847_66317C.1
gatagaggtcgcttgtatcgacttgttctgtcttgaaaatccattttgcgtcatgtcattcctcagatttgtttcgcctccggagagagcttgttgggtctgctgcgacttcatgttcatcagggtgtcctccttggcagcacgggtgtggtcagcggtgtcgcatacggtggtaggcgcatgggca

SEQ ID NO: 105540 - DNA, 489 bp, Glycine max
  Clone ID: PAT_MRT3847_66318C.1
gtcgagcccagaggtagacacgaccatggtattagcagagctcgggtcccgattacaggacgcgctggccaagctaaaccgcacgacggtagtggacgatgaggcacttaacgctttgctcaaggagatctgcggtgcgttgctccagtcggacgtacaggtgaatcttgtgcgccagcttcgcgacaatgtcaagctggctgtgaatcttgaggacgtgagctcgggcatgtaccgtcgccgtctcatccagaagtcggtggtagaccagctggtgcagattctgcagcctgaggcgcagccttacaagatgaagaaaggccagagcaacgtcattatgttcgtaggacttcagggcagcggcaagactacgagcatcgccaagtttgctcactactatcaacgaaaaggctggaaaacttgtatggtctgtgctgatacgtttcgtgctggagctttcgaccagctaaagcaaaactcgaccaagct

SEQ ID NO: 105541 - DNA, 406 bp, Glycine max
  Clone ID: PAT_MRT3847_66319C.1
ctcaaccctgtcttttggtaattgattacgctttctggtgatcgattaccagagtcttgcatgtcttgaaagtactttgttttaaggcagggcttggtctttagtgaatcttgaaacaaggctttgtttgttgaaacaatcttgaattattcttgaagcaaatgcttatcatttgaagcagccttgttagattcttctttgacatcatcaaaatcatgtatacatacattcacatctcctacctgaaagcacatttgtagagattgagagatgtttgacactttgaaaaccaatagagaattcggtcatttcatgttacggaatggtggtaaaatgaaggttgaaggcatatggagtgtgaggatgaagctttacgatggtgtcatgcgaactttctcatatgtga

SEQ ID NO: 105542 - DNA, 333 bp, Glycine max
  Clone ID: PAT_MRT3847_6631C.1
aacaaaacaaagacgagaaaaaggaagaaacaaacgaagacaaacatgaggagaataaagaggacaacaacgaagaaaataacgaagagaagaaggaggagaaaaaataataaacaatacttgattatcatctggttttgtctaattctacccttttattttcttttctttttttttaactttgttttgcatattttcccatattcacaaccacttgttacctgcagcaacctcctccatctacttcactctcacgccgccgctctataggatccatgcttacctccccctccatcctacgtcctccctcttctgtagtgtcacccaaattca

SEQ ID NO: 105543 - DNA, 401 bp, Glycine max
  Clone ID: PAT_MRT3847_66320C.1
catacggattgagacgagcaaatctactacgactattcacacgataccaccgcagcgggattcgaggttctgagggaggaccctcacggctcttcatagactggtaccaggggctctgccactctgccactgcttcagcacacaatctgacctcatacaacggaatctacatagattgaggcgaacataaactgcacagtagccataacgacgaaaaggaagaataatgtctgaggtcattgaatcagagatgtgtgaagtacaaatcggatcccaagtcgtgatagcagaactttgagaagatgacatgagctattgataaatagaatgcgagagatgaagatgatgcacttgccagaatgcacatcaacatcaaccaagaatgtgatgagactatattg

SEQ ID NO: 105544 - DNA, 258 bp, Glycine max
  Clone ID: PAT_MRT3847_66321C.1
cagctgacgatgcgggatcctactgagtatctggaatccggcttgcacttcagctgttacgactggctaattccctaaaccgagttctgcatcaccctcttgttaagtactgtactcgcatatgtgaacatttcgaaaactactgtgatcgtcgtaatgactgtctcccctgtgcatgatgttcaggttacaattgaatggcttatttcctctcaggaatgtgttcccaggacctattgtgttttaaatccacaaaat

SEQ ID NO: 105545 - DNA, 364 bp, Glycine max
  Clone ID: PAT_MRT3847_66322C.1
aaaaaggatgaatctaggcaagccagaaacaagttaggagaaggtggatttggaccggtatataagggaatattggaagatggacaagagattgcagtcaagaggctttctaaaacttcaagacaaggaactgaggagtttaaaaatgaagtaaagttgatggcaactcttcagcaccgtaatcttgtaaaacttcttggttgttctattcaacaagatgaaaagttgttgatctatgagttcatgcccaacagaagcttggattactttatttttgatacaatgcaaggtaaattactagattggactaggtgctttcaaattatagaaggaattgctcgtggacttctgtaccttcatcaag

SEQ ID NO: 105546 - DNA, 159 bp, Glycine max
  Clone ID: PAT_MRT3847_66323C.1
attcggctcgtgggaggacattcgcttcatggtcattccaggactgatggatggcatgtctcttcttgccaaatatggtagatattagtaggctatatgtattgttaagtgtagaaaggttctcaagttatacaggggatgcgtcatcatctcggttgt

SEQ ID NO: 105547 - DNA, 754 bp, Glycine max
  unsure (1)..(754): unsure at all n locations
  Clone ID: PAT_MRT3847_66324C.1
tccgaccgtctttgtggcgtgagtaaaataagtgccctaggtcacgcgcgcttgtccgatcgaaaaccacatcaaactgctagttgttgccctgtgttgtgcctctcgccctcattagctaggcctgagtttgcacgtttctaccaaaatatgattttggagctcaatgcatccgatgatagaggaattgatgtcgtgcgccagcagattcaagattttgctagcactcagcttatcatttgggcttgatgttgaggacagcggcttagcagcttttgttcggcttagcaatggtgatatgagaaaggctttgaatattcctcagattcttgcttgaaaactttcaactttaatggctagcaatatacattacaacaacatttatatccttatgccattagattcacactgccaccatttttgacattgaagaactttgaaggattggaccttggaaagatggacaacgtcatcacagaatgatttatgtaggttaattttcttttctttatcactaattgaattcttgtcatgatcctttcaggctgatgactctggacttgcttcatatgttgtgggtcaaattgatcgcactcttagctaaaagtaggttagatgatgcgtcaaaatcgatgtagaaagatganaataaccgatataaaaagtttgttttctagtagtgattggccatatatcacaattcacagattaagattttcgaatgtttctcaattggnccttagaaccatccagc

SEQ ID NO: 105548 - DNA, 365 bp, Glycine max
  Clone ID: PAT_MRT3847_66325C.1
gacaaagaatacacacaattacacgaggtgggtttactatctacattttacattaacaaccaaaaaagggatcaccatggtctgtatggaattttacaatacattcagacatttaacgtctctccaatgtgctcctacaataaaaaccattactaaaatatgacagaaattatgtaaattacattaggacccagccaacccaaaattattcacttttttcaagatgagggcaacaaaatccatgctaatattctccataaaataaaataaattttatactttgttgttttatatatttcaagcttttttgtaaattttttttccctatttatgaatagatgtttttaatttatcattggagatag

SEQ ID NO: 105549 - DNA, 300 bp, Glycine max
  unsure (1)..(300): unsure at all n locations
  Clone ID: PAT_MRT3847_66326C.1
aatangggcgccgcggaccaacgaggcaacggcgcggcttttagctggtcttgggaactccacccaccctctggcagtgatagaactcctgaccctcatcttctggatcaggctgaacaatctgctaagaggcaaaagctgaaaatctgggagaatcttgctgaaggagaggaagcatctaatggtgcagcagttgaaaacacacagcaagaagcactcaaggtaactgctacagaagcccagggtggtggccacacctatgtccagacagctggagaacaaaagatcgcatacagtcag

SEQ ID NO: 105550 - DNA, 357 bp, Glycine max
  Clone ID: PAT_MRT3847_66327C.1
gatccaaaatcgaatctttgtttgaaacatggcttcctcctccttcctctgccccgcagcatttaccttctcacagaagccacttcaatccacttttcttcattcctcctctcttctcactctaagcattcttcctaagaaattgagaaaaccccaccaactgagaagcctcatagtggccaaatccattccctcatatttaacttcctcctttgatgaattcctgtgtccaatccatctctgttctctgatgtggcattaattacttctagagtagttttgtctttggtttcagtatccactttaaaaagcaattgggatttcatatttgcattggtatactctcttcattattta

SEQ ID NO: 105551 - DNA, 225 bp, Glycine max
  unsure (1)..(225): unsure at all n locations
  Clone ID: PAT_MRT3847_66328C.1
gaatactacatattggactaacgatttataatagcgatttataagttatagaatcttgcggtttcaatcacgagggtggtcattatnttattttctaataatgaaatgattattctgatttcatatctctattcttctgttaagacaaccatctttaacaaactctatcttttataattcttcaccacttttcccaccatctcattttatcttttatactttttt

SEQ ID NO: 105552 - DNA, 355 bp, Glycine max
  unsure (1)..(355): unsure at all n locations
  Clone ID: PAT_MRT3847_66329C.1
gtgataaccttaatttaagtgttcaatgaatattgtcaacgccgttacgtgttaagtgtgttctaaaaattgaaaacagctttctaagctaggtcataaacatcaccacttacctgatgtgtatttgaccacaaactacgtgcaactttgcaatttaagaaacgttagcaagattggtgatttttctcaaagagaaacctttaaagcaagattgtctatatgtnntttgtgggtgtgctccttgaggacaaaggcgaagtttattggtcacacacttcattattgtttcgtgtaataaatctggaaatgcaagaagcttatcttgtcaatctccgaaatgtgttacgagaattgt

SEQ ID NO: 105553 - DNA, 282 bp, Glycine max
  unsure (1)..(282): unsure at all n locations
  Clone ID: PAT_MRT3847_6632C.1
cgngcanggacgcgtacgtnagctcggaattcggcnnnagngcatttgcagagacgcantcgcgtatgtctgaggnnnnnnnttggaaggntgcnacnagtgntgacatacatnttggtggcggntaaanaantganggagntttagggtgcnatgntgagncgcnatnagnngcnnnaantnttcccncancannntcngcntcagnntgttacntcgaatanctaaganttgannaaagggcattcnatggtctcgnnnaggttnttcnnccgcgagccc

SEQ ID NO: 105554 - DNA, 353 bp, Glycine max
  Clone ID: PAT_MRT3847_66330C.1
accactcgtccgaacaaacatacacacatttttaaaaaacataaaaaaatattacaaataaggatcttattgcttaaaatctatctccaaagacgatcttcaatacaaccacctttacaatcaaacttcagttgcttgcctcttataccactgaaacgggtccttaccttttcaatagccaccccaactaaaataattatcaaaaaaagcaggccatctccttgtagcatcaccccttaagccttatttactcatatggaaaatatcctatcatgtgtgatagccaacttcaatacttataatcccaaactctcaattttccaaattgttacatacaattctattacaccttt

SEQ ID NO: 105555 - DNA, 162 bp, Glycine max
  Clone ID: PAT_MRT3847_66331C.1
aaaacttttaggaagacagtttgggaatgttggagagagagctcagtacaagggtggggaggctttgtattaaaagaaaaattgaagttgctgaaacagagattaaaagtgtggagctaagagcagttggggatattcagcagaagttaaagagggcagagc

SEQ ID NO: 105556 - DNA, 281 bp, Glycine max
  Clone ID: PAT_MRT3847_66332C.1
aaacaaaaaaacaatcattcggatcgtttattgatcagggcacaatatctacaaccattaacacttaaattttttataaaaaatacaaatcattcttctaaaatttcaagtgcctttaaaaactctttactcaaacactattttaacactgttttctttacacttttccaattaatacatacaattaaaaaataccatatcttctatttacctttattgcaaaattcataagaaaacctttcctcctttcaatttcttttctccgtcataaattacatttc

SEQ ID NO: 105557 - DNA, 798 bp, Glycine max
  unsure (1)..(798): unsure at all n locations
  Clone ID: PAT_MRT3847_66333C.1
ctggcgtccggaagcagtctgcttctttcccctaagaggcacccgcttgagagccctgatgggaattcttctaattccactactgattctgccaattctcatgatttgaagccttcttcacccaatacacctgcttctgatgctttgcattcctcttcccacgcgccctctttggttgttcctccccatgctttgactaaaattaatgatggaaccgtggatttggattcttctgtaaccaagctcttggctgaaaatattttcagtgatgcagactctatgttgcagtttaaaagagggttggaggaggctagtaagtttcttcctcaggggcctcagcttttcactgggttggagagccccacggtgtcttcagagccaaagggaagaggtgtagctctgaagatggagaattcatttggggtgaagaatagaaagaatcatgcccgccaagatgatgaagaagaaagaagcaacaagcagtctgccgtgtctgcggtttgtgttgaggaggagagtgaaatatctgaaatatttgacagggtgttgcttagtgttgaaaatgtgccactgtgtgctgaaaataatggatctgtggcagtgggagatagtaacacaaagctaattgagaaatcgagtttgtctgatggggggaagggttcgatccaagaggcaagggagaaagaggaaacggtggatttgaggacccttttggttttgtgtgcgcaagctgtgtctttcagtgacaacaggactgcntatgaactgttgaagcagattagcagcattcttctgctt

SEQ ID NO: 105558 - DNA, 331 bp, Glycine max
  Clone ID: PAT_MRT3847_66334C.1
acgaggccaagactaaatacaaattggtttgtggtctttcatgcgttctacttgcagtggctactccattgctttggatcaataatcaagatgaaggccattatcttgtcccaacataaattgtagatcctgaaaattaagagcacttttaggtacgctaatgtgaaagtagttgttaattccaacagtgttggaaaatttagtatagcaggtgtatttagtaatgttctgttccattgagcatcttcaatgtgcattttgttttcctgtaaacaatttgagaacttgttttattgaattttactttctagtaaagtggaaacacaattga

SEQ ID NO: 105559 - DNA, 471 bp, Glycine max
  Clone ID: PAT_MRT3847_66335C.1
cgaggcggactttgaattttattgttgtctttttaaatgaattaatgtatatatatatatatatatatatatatatatatatatatatccacatggggggcaccgccgctacaacattataaacttggaggaaggtctgcgtctggttcggaggaactcatgctcggtcgcacttcaactgatatcaaagcggagtcatctatcgcaaacccacaggctgaagggctgaagtactctgcttattggccacaccctgccaacatgcaggatcatcgtgggtacgacgagacaccaaaaatttgtgaatatataagaagaaaaaacccgccaacaagacagcatcatcgtcgtcagcattaacgcttcgacaaaaagccaagtccacagatccatggtttgctcattttctccctttttgcaagggtgcgagaatcgtgaaagcctctgaggctctcagaagaactatatgta

SEQ ID NO: 105560 - DNA, 1584 bp, Glycine max
  Clone ID: PAT_MRT3847_66336C.1
atcacttccagaatcaattgtctcactgccacatttaaaatcgttgtattttggctgcaacaaacgcatgagcgaaggaggtccagcaaatttgaacagttcactaatcaatactgactacggaagatgcaaaggaaaagaacctagatttggacaagtattcgtcattggtgctattacatgtggatcacttttgattgctttggccgttggaatcatttttgtttgccgctatagacaaaagttgattccatgggaaggatttggtggaaagaactacataatggaaacaaatgtaatattctctttgccaagcaaagatgatttcttaataaagtctgtatcaattcaaacattcactttggaagatattgaggtggccacagaaaggtacaaaactttgattggggaaggaggatttggttctgtttaccgtggcaccctaaacaacagtcaagaagtggcagtgaaagtccggtcagccacatcaactcaaggaactcgagaatttgataatgagctaaacctactttcagcaatacagcatgagaacctggtgcctcttcttggttactgtaatgaaaatgatcaacaaattcttgtgtatcctttcatgtccaatggttctttgcaagatagaccctatggggaacctgcaaagagaaaaatattagactggccaactagactgtctattgctcttggtgcagctcgaggtttggcatatcttcacacatttccagggcgttcagtaatacacagggacgtgaaatcaagtaatatacttctagatcatagcatgtgtgctaaggttgccgattttggtttctcaaagtatgctcctcaggaaggagacagtaatgtttcccttgaagtaagaggaactgcagggtacctggatcctgagtactacaaaacccagcaattatctgaaaagagtgatgtcttcagcgtttggcgtggttttacttgaaattgtgagtggcagggaacctctcgacataagaggcccggattgagtgtagcttaatttgaatgggctaagccatacgttagagcatcaaagatggatgaaattgtggatcctggcatcaagggaggataccatgcagaggcaatgtggagagtagtggaagtagccctgcaatgtcttgaacccttctcagcatatagaccaaacatggttgacattgtccgggagttagaggatgctctcatcatagaaaacaatgcatcagaatacatgaagtcaatagacagccttggaggatccaaccgctactctattgtcatagagaaaagggtgctgccctcaacttcatcaacagcagaatcaaccatcacaacccaagccttgtcccacccacagccaagatagtaaatgggtgaaaatggaattcttttcattcgtttttcttaacagctttagtcataatacatatcaaatagtaaaggagagaatactactcgtttttgtgattgtactttcatccactctatgcctcttgaaactaatctctcttgcttagcctcatttttatgagtaataaattgggtcaaatgcaaaaggccatatcgtttgcc

SEQ ID NO: 105561 - DNA, 433 bp, Glycine max
  unsure (1)..(433): unsure at all n locations
  Clone ID: PAT_MRT3847_66337C.1
gcccacgcgttcgcccactcgttttttcacgcgtncgtattgcgccttctttaaatttttagggtttcgttctctcactctctcttaagcctcttctcccactatcgattcgatccaattcctttggtttccttcctctggatccctatttttttctcccgaaagcaaaagaaagagaaaattaataatggccgtgtccctgacgcagagtgcgataatggagatgtgcagtgcgaattgccccgagggcttgcaaccggtgctgcaggtgatcgagttgaagcttgtgcagtcgcagcaaaacagcaacgtcgagaggtaccgtttgggttcttctcgacggttcacattaccaacaagggatgctcgccacgcaagagaacgactttggtcatgctggaaagttacagaaaggttccgttgttagactcac

SEQ ID NO: 105562 - DNA, 270 bp, Glycine max
  Clone ID: PAT_MRT3847_66338C.1
ctcctctaagagcattcttttcaaacctatgataaatttgctttgtgaaactttctatctttgaaaattgcttaagatttacttaatacaatattcaacctcccttatagtgtaatatttgttacttcacctcctattgcaccacaatggagaagataatgcattgttgaagctcattcattcaaagaccatacctgaggcatactttgagaaatctgattttctggtcttagaggaacccctgctacaaagcaaagggcattatcttcc

SEQ ID NO: 105563 - DNA, 192 bp, Glycine max
  Clone ID: PAT_MRT3847_66339C.1
acatgaaaacaattcatttgggttgggtggcaggaaaaatacaatgatatttctaggatttcatcccaggtcccaagaaaaaaaattccctaggcacaacggaactacgcctgctaagagacaagcacaacgccctggcccccatggaggtaataccataatgtggcacgcattaacaggtttaactgatcc

SEQ ID NO: 105564 - DNA, 3770 bp, Glycine max
  Clone ID: PAT_MRT3847_6633C.1
ctttaccattctccatggagtggcggggaattattatgtttatactataatataataacataattatatttatagtaactactacttatttatttttttaaaatatcttaatttcccaccttaccctacaatcacggccaggcaaggcctcggtatacctcaaaaagccaagtgagaagcgaagtgtgaagacagacacagtgagaatgatgaagcgtcggttccttttggttctcttggttctctatgtcacagtggagttctacgtagaagcagatggtagtggtgggtttgtgagaacaagaggagtgcagcttatgctgaatagacagtgagaaatgatgatgaagcgtcggttccttttggttctcttggttctctatgtcacagtggagcagagtaagctactccaccacgtagaagccgatggtgggtttgtaaaaacaagaggagtgcagcttatgctgaatgggagtccctactatgctaatggctttaatgcctattggcttatgtaccttgcctctgatccttcccagagaaacaaaatctcatcggtatttcaacaggcttcaaatcatggactcaacattgccagaacttgggccttcagtgatggtggatatcaacccctacaatactctcctggatcctacaatgaccaaatgtttcagggcttggatttcgcaatagccgaagcaagaaaatatgggatcaagatggtgttgagtttggtgaataactatgagaacatgggtggaaagaaacagtatgtggaatgggcaaggagtcagggacagtccataaattctgaggatgacttttttacaaatcctgtggtgaagggatactacaaaaaccacatcaaggctgtacttacaagacgtaatagcatcactggagttgcttacaaagacgacccaactataatggcttgggaacttatgaatgagattaggtgcccttctgatcaatcaggaaggacagttcaggcttggatcactgagatggcatcttacctgaaatccatagatggaaaccacttgctggaagctggtctagagggtttctacggccagtcaaaacctgagtctaaccctaacttcaatgtaggaaccgatttcattgcaaacaaccaaatcccagggattgatttcgcaacagtgcattcctaccccgaccaatggatatcaagttcaggttatgaggaccaaatctcattcttaggccggtggctgaatgagcacatccaagatgcacagaacacccttcacaagccacttctatttgcggagtttggtatttccacaaagagttatggtggcaactcaacaccaagggatcggttattcaacacggtatattcagcaatatactcatcagcaagcagtggcggggctgctgttggtggcctgttttggcaacttatggctcaaggaatggattcttatcgagacggttacgaggtggtcttagatgagagcccttcaacggctaatttgattgctcaagagtctcaaaaactaaaccgaattcgcaagatgtacgccagactcagaaacattgagaaatggaatgaagctaagcaaattagaggatgaaactgaatatatatatatatatatagagagagagagagagagagaagggtgagttagaaactttaatttataacttaatcgtagtggcaagaattgcctgttattacaagtgaagtgtcctacaaatgcaataaacataactattatagagatatatcgagagaaactttgtaatgtacgagctagcatttcatctactattatgtcggaagtgaatgtacttatgtcaaaactattataaagtggcctgctggataacttgaagtgcttcatataactgttccatctttgattgttgcattttttaatgtaactgtgatgcccgacctaatgtagaatccttcctttgccctgtcagcttcttgaacaccatcggtgtttgctatgatcacatttcttcctatcttggcattcttgtcgattatgcaattcctgattttagtatttgccccgacaccaattggaaccttcccttctgccaccagagatgcaatttcatactcagtttgataatagtcagcacccatcatcatcgtatcctgaagctccacaccagactccaaacgtgagcgtactccaacaatagaatgttgaacgctgcactccctcaagaagcaaccatgagatataattgcatccacaatcttgcatttttatactttggtaggtggtaggaatcttggggaagtgaagaaaggagtctttggatcatagaattcaaatttaggaggttgttctgttagggcaagatttgcatcaaagaaggactttatagttccaatatcttcccagtagtcattgaataaatatgcctggacattgtgctcattcacagcagatgggataatttcagatccaaagtcattgcatgaagaacctttccatcttaatagttgcagcaaggtttcagttctaaacacgtagacacccatggatgcaatataaggatgtttttctgcttcttgtggcaataaccctaaaagagtggtgtcaacacgcattgcctttagatctgatcccttaggtttttctgcaaactgtataatccgtcctgttttatcaattttcatcagtccatagtctgatgcccgactgtcatccatgggtacacatgaaactgtgatatcggcatttgtgtcaacatgtctctgtacaaagtccatgtagtccattcggtaaagatgatcgccagaaagtatcaatatatgctcaacattcttgttcttggcatcctcaaaaacccatataaattgtcttacagcatcggcggtcccttggaaccacttcttcccagcctcacccggtgtttgagtagctgccaagacctccacaaacccatctccaaaagtcatgccatttccgaagctgtatgcacgggacaggtggcggttgagagagaaagaattgaactgcgtcaagatgaaaatttttctgatgccactattgatgcaattgctcatggggatatctatgagtctataacaccctccaattggaaccgctggcttggctcttctgccagtaagaggaaagagtcgagttcctgcacctccacccaatatgatggaagccacactttttgggtccacttcaggtttctcaaaagtgggtaccccttgaaatgccatggaatcttcgtcgatgtctgatgtgagaacagcgcgtgcaattccacttccaggcttggagtttctaagattcctattggttcgtgaagtcttgcatgattgaacactcaaaaacctttttgtgttcacacttcccctcgtactctcaccccagaagccacttgttctgtttcttccaattccctcactaactttggctagatggcggccattcagggttgcacaagctgaatccattgctaaatcaataacggaaatagaaacctttttggatttggtaactttctgctcaatggaatttgtatgagggaagagcaaaactactttaataaagtaccaaacttttcagacaatttgtaccataagttgaggaatcataactggggagattcaagtgaaaagagccccaaaaagatgagatttttcagagaaacgaaggtgggacctaggaggtagaaactacgtacagaaaaatttggtaatggagaaggagaagatagaaatgtagaatgagtcggacgcgtcaaatcgcccggttttt

SEQ ID NO: 105565 - DNA, 395 bp, Glycine max
  Clone ID: PAT_MRT3847_66340C.1
gcttaactaaatatgtttattttgttcaaaatccaaattctacacaagacagaatccttccattccactcaagcccaattggctgatttgagtgcttcaaacttcaccttttccttcatatccgcaatcatgtactatacaaagtataaaattatacatcaatctcttttcacagtcagttttttctctttctttacaatcaaaattcatagcgaatgcaaataaaaagaaaagaaaacccctcaaacccaaccaaaagaagtcaccgtggggccaacgagatccaaatacaacttcgacacctcatcagaaacccaacccatatcgggtctctcattcgggtcatccccgacacattccaatccgaccccgaacattctcttcccaacattcac

SEQ ID NO: 105566 - DNA, 482 bp, Glycine max
  unsure (1)..(482): unsure at all n locations
  Clone ID: PAT_MRT3847_66341C.1
cccacgcgtccgcccacgcgtccgtacggctgcgagaagacgacagaagggggttgttatgttatgctatgggattcgattactattgtgtgaaagttacccttctcttaagttatgttttcaacacttcatttggtttgatatttagatttttgtcttccgtccccattgataaccatgaaacccctaaactatctggtgtatgcaactaacaggtaattactctgtctatcactggggcgttgaatgcagtcttaactgaagaacatagaaaggaaatatgccgttacctctataatcatcaagtgagggacctaatgatggacaaggggaaatggagaaggcacgtgacttgattctagggcatggcggtgctacttatataacgtcatgggggaagatgtggctntcagtacttggagtttatgaatggtccggaaataatcccctgccccctgagatatggctccttccatacatgc

SEQ ID NO: 105567 - DNA, 584 bp, Glycine max
  Clone ID: PAT_MRT3847_66343C.1
aatgtctattgcttgtttagggagattgggtcaaagacatctcgtttccattgatccttcccttccctcacctgttgttgatgatagtgagagagtaatttaaaatcatttttaattggacgggtaaagaagaagagcagttgtagtaggagtaattgtgattggggaactgagactgagggagttgagtagcagaagagaagagaagatgggatctgtatgtatctgagactgtgcatcaccccattccctgttgcggttgattcttgaggacaggcagagataggattaacttaatatgacgacacgacaccattgcaatttaccattctacatttaggcaatgccagccacccaatagataatagcaataagtctttcttcacttcaactcgcactggtatttaaacaagtctgatgggttcaagattcccatctcatcagctcagcaatggcctgtatgtatcaggtcggcctgaacagccgaaagaaagaactccaacaatgagctcagttgccatgccttacactggtggagacatcaagaaatccggagaattagggaaaatgtttgatatccccat

SEQ ID NO: 105568 - DNA, 161 bp, Glycine max
  Clone ID: PAT_MRT3847_66344C.1
acgagggaaggtgcaactagcaatgcctcggtctggtgaagtagacggtattttctgattgtgggagagaaatggaattgggaaatgggttaccacctgatgaacctgaggacttgtgtgttgatatggagttatcaactccctagaaatatgtattggct

SEQ ID NO: 105569 - DNA, 278 bp, Glycine max
  Clone ID: PAT_MRT3847_66345C.1
gagagatatgtaacacatcgatcatttttattttttctttgtttccctttcatatgctaggactgatcctgaattacttaaggacattgttgcagatgttttgcaaaaattgcctcctagataccaaaatcaacgtaaaggactagttggaattgaggaacattgtaaacatattgaatcattacttaaaattgggccgacagaagttagaacccttggtatatggggtatgggtgggataggtaaaacggcccttgctactactttatatgacaaat

SEQ ID NO: 105570 - DNA, 865 bp, Glycine max
  Clone ID: PAT_MRT3847_66346C.1
cttaaacaataattataatgggactgagtaagtattttaatatcttcttctaaacaaatttattctaaaaaaatatattaaaaaatgtaattatttataataaatcaatatttataaatatattataataaataaaataaataaatatattaaattatattataaataatgaaataaatatctttataaattttattataaaataaatatctttaaatatgttgtataattaataaattattatttttcctcttacggatcaagttgatccgtaagaggaaaaataagcaagggcaattttgccatttttttagaatgctgggtgcacctagcaacactctccaaacaaagcaataatgactacaagtgtaagcggagtcgcgagtttgggttgaatttgatctaatctatgattcaacccaattaaatttaaatagattgatttgggttgattttctaaaagaaaaatgaaatctaacctaaatcaatcggtttataaacgatttgagttagattgaatcaacatatcaaaacatttaattttatttgttctttaaatgaattagacacaattgtttcttgtcaaattttttattaaaaagaatttttttttatgctaccacactccactccactccattgatataacacctcatttttcgtaaaataaataaaaagagttttatttaaaacttaataaagtttttataaattaaatacatgagaggaaatagtttttgttaattaaaataagggtctcatagtattagaaaataaatagagtaaaatgatattttagaaaataaaatgatgttttaattggttatttatttaataaaagagtaaaataaaattcattttttat

SEQ ID NO: 105571 - DNA, 320 bp, Glycine max
  Clone ID: PAT_MRT3847_66347C.1
ccgagaactggctgctgtcctcacttccatattagggcatgacttgcgtgccgttcacgaaatactgcatgatcacgtgccacacgaagcagttctcaccctcgaccgttgccacgcacctctcggcggaatttctcttggttacatcgtgcttgctgcttcttgccttttttggctattaggttccgtgtgggtcagtcgctcattcagtcgcagcaagtgaacagcacagcaattagtgcgcagtatttgcaaacaaacacactattgtacataataataatacaacactataataggtaaacacttgcattgactac

SEQ ID NO: 105572 - DNA, 246 bp, Glycine max
  Clone ID: PAT_MRT3847_66348C.1
tccgaacacatcacatcttaacatcaatattgtcatattatacaccatacataactgtatttgggaatcgatttttctataatcctgacctgatcattatactctccaactgagctcaactccatatttcatcaccatatcctatacctaatgattttttgtctgtcctataaatcctacgatcttaatgatccaatcatacttactcctgcatcctatgtcttaactattatcattggtcaccta

SEQ ID NO: 105573 - DNA, 268 bp, Glycine max
  Clone ID: PAT_MRT3847_66349C.1
ctggtttacgatcttaccctcgttctctctctcgcgtggtttgccttgccgagtttatctgctgtgccttgctgaattcttatcttccctcgagggcgggtggctcatgtttcgctctcgccgtctgcctattgtttgtcattgggtgttgctcagcgtgccgttggggtcttggcaataccacttttggtgcgaacatgggatcctgtgcgtaaatcctgttacctgatttctcccttccgtggtcggtccctcggctttcagactt

SEQ ID NO: 105574 - DNA, 446 bp, Glycine max
  Clone ID: PAT_MRT3847_6634C.1
cacccatgatgcaatataaggtttttttctgcttcttgtggcgataaccctaaaagagtggtgtcaacacgcattgcctttagatctgatcccttaggtttttctgcaaactgtataatccgtcctgttttgtcaattttcatcagtccatagtctgatgcccgactgtcatccatgggtacacatgaaactgtgatatcagcatttgtgtcaacatgtctctgtacaaagttcatgtagtccattcggtaaagatgatcaccagaaagtatcaatatatgctcaacattcttgttcttggcatcctggaagatgatacatgcccacgttcactactccgtgtatcaaactagtattttcagcaaaatacacaacatcataagtttttacctcaaaaacccatataaattgtcttacagcatcggcggtcccttggaaccacttct

SEQ ID NO: 105575 - DNA, 126 bp, Glycine max
  Clone ID: PAT_MRT3847_66350C.1
ccctttactttgtgtctgtgtgtcctggaatggctggcattggtttcattcaaattgcattattggtctctttttttggtgcaaccagggccagaattcctggaggttacacccgtgggccctggc

SEQ ID NO: 105576 - DNA, 122 bp, Glycine max
  Clone ID: PAT_MRT3847_66351C.1
ctctcatgtagtgtgtggtttcgcgttgctgtggcctagcgcgtctctcaatgagtactggaccactgtgtttctatgcccatcctatctacaacatcaatcccacgtctgtctcatacagc

SEQ ID NO: 105577 - DNA, 259 bp, Glycine max
  unsure (1)..(259): unsure at all n locations
  Clone ID: PAT_MRT3847_66352C.1
cgtaagttnggatcctctagaccggccgcttttttatttttttttntttctttttttttacaccaacaaaccaaacattttttttcaaatacgcaataaataacattcccgccactctatttaacaaattctaaaccccataaataaattccttacaactacattaataaactaaaaatttcaccacattcatctaattctctcacatccattaaaaccaattcctattactccttttttttatatatattctcaattc

SEQ ID NO: 105578 - DNA, 249 bp, Glycine max
  Clone ID: PAT_MRT3847_66353C.1
gcgatttggcattgctctttctttccctttgtcccctctgtcctcgtgcgcttcctccctgcaattcgctcttcggttcgcacctcaatacctgtctctctcaaccaaaccttacagatcttcttcccaaccatcattttttttcacgaagcggcgtttttattggcccaatatcacatgagtcgattcattgcatttcttctctcctcttctcctgttgatgttagttagcacctaagaatacagact

SEQ ID NO: 105579 - DNA, 709 bp, Glycine max
  Clone ID: PAT_MRT3847_66354C.1
cgcccttgtcatgcgatcttgattgagatgcctagcaaacgtgcttatattcccaattctctaaaaatgatatgagaagagtggggactagcccactcttatgtagatggtgctttattactaccctttatgcatcgagcaaagcaaagattcttgctttgtttgtattacataacacagcgcttggaaatgcctacagatcggaaaacttgggtttaaaacaaaacgaaactatacatgttcgacaaagaatcgcttgagaactataagggctcagacaatactgattaggcttgagaggcaagaggcattgcttataataaccatttgctgaccctagaggctgatcaattcccttaccagatgctcaccaaagtggtggtgctatactaagcttgctgaactccaacaagcctagcttaacataaacactatgatgagaacttggggactgaccactgcgggcaatccgaaactgaaaacgctcttctgcaatatcttcttcctctcaaggaaataaatctctgtctcagaaataaattaaccatgcctctctgaaaacaacatgtattgcttcctcttgacttaaacaaaaggcttccgaatatttggcatcaccatgcgctgtggaatctaatacagactggcgaacatgattacgtcgcacgagacgggctgatgcgagcacatcaacatcctacaccttaaa

SEQ ID NO: 105580 - DNA, 281 bp, Glycine max
  Clone ID: PAT_MRT3847_66355C.1
cccacgcgtccgagtggcttcatcacccccatttttctgtggatctccacctagcagggcttcaaaccctgtgatccaagatgagcaatttgccctccagatctcttggggagaatgatgtccagaagctcagccccaagagatctggagggcaagtggcttcatcacccccatttttctgtggatctccacctagcagggcttcaaaccctgtgatccaagatgagcaatttggtagtaatggtcatgagaaattttggtgcatttttcttggcaccccc

SEQ ID NO: 105581 - DNA, 787 bp, Glycine max
  Clone ID: PAT_MRT3847_66356C.1
acggctgcgagaagacgacagaaggggatggagaggaagtagaactgtagaggaaatgaagcatgcggtgccagctaagctggatgtcggttcctcgtcaataatcgtctttccctgcctcatgccatcatccagtggttagggtcggagagcttgccctcacttttctcttccatcttcactctcagtctcactcactcaccattcaccattgccctttgcgtcgctctaagcaacacgtccttttcgatccacatattccagtgtgtatataagtcatcatgctgttgtgacagttaaagatagtgtggtgtggagaaggagccttgtgattagttgtttgagaccaccaaggacgtaaacaagaggatgtcaaacagtaggaacactcattggtgttatagttgcaggaggccagttcggctggggcggcgagatgtggtttgtcctagctgtaatttgggatttgttcatgaacttaatgatattgtccatgttaatccttttgacctctttggaatggacaacaatgaagaacgagatcaaaggcttggactaatggaaacattctctgcctttatgaggcatcaaatggcagatagggggcgaagccatgacatcagggtgcgaacagattcaaatcctgaacacagtgcaagttttgctcctctgttgatctttggtggccacataccttttagattgtccagacatggtggctttgaagctctatttaatggggctcccagaatcggtctgacacagggtaacacaggcgattatttta

SEQ ID NO: 105582 - DNA, 1576 bp, Glycine max
  Clone ID: PAT_MRT3847_66357C.1
tacgccgcgacgtcacgacgggtgggctggggggggtagtacgtccgggactgtagaggaaatgaagcatgcggtgccagctaagctgtatgtcggttcctcgtcaataatcgtctttccctgcctcatgccatcatccagtggttagggttggagaacttgccctcacttttttcttccttcttcactcttagtctcactcactcaccattcaccattgtcctttgcatcgctctaagcaacacgtccttttcttcacatattccagtgtgctgttctgagattcggagagatgggtttggaagaagcttccagaaactgtatataagtcatcatgctgttgtgacagttaaaggtagtgtggtgtggggaaggagcctagtgattagttgtttgagaccactaaggaagtgaacaagaggatgtcaaacagtaggaacactcattggtgttatagttgcaggaggccagtttggctgggacggcgagatgcggtttgtcctagctgtaacgagggatttgttcatgaacttaatgatatggtgcatgttaatccttttgacttatttgaaatggacaacaatgaagaacgagatcaaaggcttggactcatggaaacattctctgcctttatgaggcatcaaatggcagatagggggcgaagccatgacatcagggcgcgaacagattcaaatcctgaacacagtgcaagttttgctcctctgttgatctttggtggccacataccttttagattgtccagacatggtggctttgaagctctatttaatggggctccaggaatcggtctgacacagggtaacacaggcgattattttatcggtcctggactagaagaactgtttgaacagctttcagctaacaacaggcaaggtcccctgccggcatcaaggtcctcgatcgatgcaatgcctaccatcaagatcgtgcagaggcatcttcgatcagattcgcattgtccggtgtgcaaagataaatttgaactgggatccaaagcaagacaaatgccatgcaaccatttatatcactcagattgtattgttccatggttggtgcagcataactcctgccccgtttgccgccaagaactgccgccacaaggattgagtagtagtaacggtggcgccaatggtagaagtagaagtgcaagggtaagtagtagtggtagggagagccatggaaggagaaatccattttcctttttgtggccttttcgttcttctcattctagcagtaatgatgaagcaacaggaagcagcacaccaacaccaactatccctgagaatagccatcatcatcatgctgggtattctgggtggccatttgaatgacttggtgtgagtataacattttcttttgtttattaatatgctcatgttgatttaaaaatcttatgtactgatgctgcttgcttggggtgaaaacggtttgagatctgagcctaccagtctggatttgctttctaaagttgtgaactattttgtataaatggttatttatgcataattgtttgaatctaatattcaatataacaagttttctttgtttaatagat

SEQ ID NO: 105583 - DNA, 284 bp, Glycine max
  Clone ID: PAT_MRT3847_66358C.1
ggggggcgagggaaaaacgatgaggtcatgaatgccaaaacattgcataaaggggccaagggtgctaagagtaagcaggggaaaggcctatagacgggagcgtgggacaaaaatgataaaatacaggaactatctggaaatgaaaatgaactggatgaaaaaacatatggatccatgccatgcaaagcatgggcaacagctatattaagcagccaaggaaaaccgtacggcggatatgcggacaagtccatcaaggatgatctgtaaacagtaagagagtatca

SEQ ID NO: 105584 - DNA, 200 bp, Glycine max
  Clone ID: PAT_MRT3847_66359C.1
acggctgcgaagacgacagaagggatccataggttcttcaaaacttttttgcgtacctcttcttctccggcgacaaaaaccgaccaaaatttaccgtgtactcctgaacaacgcacgtacaccaccggagaccaaatatgcttcaaaatcgaccttaacggaagaaacttacactaagtgatggagattttgtgggaaaa

SEQ ID NO: 105585 - DNA, 1646 bp, Glycine max
  Clone ID: PAT_MRT3847_6635C.1
aacaaggcaagggaaaagcgaagtgtgaagacagacacagtgagaatgatgaagcgtcggttccttttggttctcttggttctctatgtcacagtggagttctacgtagaagcagatggtagtggtgggtttgtgagaacaagaggagtgcagcttatgctgaatgggagcccctactatgctaatggctttaatgcctattggctaatgtatcttgcctctgatccttctcagagaaacaaagtctcatcagtgtttcaacaggcttcaaatcatggcctcaacattgccagaacttgggctttcagtgatggtggatatcaaccactacaatactctcctggatcttacaattaccaaatgtttcagggattggattttgcaatagccgaagcaagaaaatatgggatcaagatggtgttgagtttggtgaataactatgagaacatgggtgggaagaagcaatatgtggaatgggcaaagagtcaggggcagtccataaattctgaggatgactttttcacaaatcctgttgtgaagggatactacaaaaaccacatcaaggctgtacttacaagacgtaatagcatcactggagttgcttacaaagacgacccaactataatggcttgggaacttatgaatgagattaggtgcccttctgatcaatcaggaaggacagttcaggcttggatcactgagatggcatcttacctgaaatccatagatggaaaccacttgctggaagctggtctggagggtttctacggccagtcaaagcctcagtctaacccaaacttcaatgtaggaaccgatttcattgccaacaaccaaatcccaggcattgatttcgcaacagtgcactcctacccggaccaatggctatcaagttctagttatgaggaccaaatctcatttttaggccgttggctggatgagcacatccaagatgcacagaacacccttcacaagccacttctatttgcggagtttggtatttccacaaagagttatggtggcaactcaacaccaagggatcggttattcaacacagtatattctgcaatatactcatcagcaagcagtggcggggctgctgttggtggcttgttttggcaacttatggttcaaggaatggattcttatcgagacggttacgaagttgtcttagatgagagcccttcaacggctaatttgatcgctcaagagtctcaaaaactaaaccgaattcgcaagatgtacgccagacttagaaacattgagaagtggaatgaagctaagcaaattagaggtggaaactgaatatgatacgtcttaactaccatgatatatatatatagagagagagagagagagtgaagggagttagaaactttaattgataacttatttgcgtgtggattaatcttcagaatgaagtgtcccaataatcttagtggcaagaattgcctgttattttcgtcaaagtattccaagtgaagtgttctacaaatgcgatagacataactatttattattgagatatttcgagagaaactttgtaatgcacgaactagcatttcatctacactattatgtcggcaagtgaatgtactttgtctaaactgtttataaaatggactgctgacgataatttgaagtgcttc

SEQ ID NO: 105586 - DNA, 688 bp, Glycine max
  unsure (1)..(688): unsure at all n locations
  Clone ID: PAT_MRT3847_66360C.1
gacttatttgatttatcaaaagataatatacatattaaggagattaaatcacgaggaataattctacctggggttacagagatcactgtactggacccagctgaagcattgcaaagtctatccgtaagaaagaagcaagttgaatagcattttttggtttgattttacaatgcattttggcttctaattctgatctcaaatatgtagaggggaatagctaatcgggcagttggtgagacccaaatgaacgtggccagcagcagaagtcactgcatttatatattcacaattcagcaagaatttttgtccagagataaaaggacgaggttcgggaaactaattctagtggacttggctgggtcagagaaggtggagaaaacaggcgctgagggaagagttctagaagaagctaagaccataaacaaatccttgtctgcacttgggaatgtaatcaattctcttacgtgtggtttgccaggaaaagcaagccatatcccttatcgtgattccaaactcactcgaattcttcatgatgcacttggaggaaatgctagaactgcactactctgttgttgctcccccagcgcttttaatgcatccgagagtctgtccacacttcgttttggtgcaagggcgatacatataaaggagtcgctcgtgtcaatgtcagtgaaaaanaatgtgacac

SEQ ID NO: 105587 - DNA, 440 bp, Glycine max
  Clone ID: PAT_MRT3847_66361C.1
gaagagaggtataagaaggaaaaaaaaagtggaaaggcctactttaaggaggttaactaagaaaggcctttgttgaaaccgggaagaaattccaataggaggtcgtggggaaagccacttgaccaaaagggagaaggaaaaggagggggccaagggtttggttgggttctggggcacagttgttcaacacacactcatgaaacacacacacacacacaaccacacaccgccacacacacagacacacacacacacacatacacactgatcctcttttcattaatcctattttttatgtgattgtataaaagatcatgggttctccacctgcctccactactactcctcctcctgctcctgcttcttctccttctcctactcgacctcctgctatttcgaacgcatcggcttcgatgtctgccgtgaaagggacacgcaaa

SEQ ID NO: 105588 - DNA, 560 bp, Glycine max
  Clone ID: PAT_MRT3847_66362C.1
ttgcgtggtacatgtgtaggagtagcgcctgcttgggggggggggggggacgagtagtgaagaatagtaagaggaaggcgagcttatgagaaagatggggaactaaataaggtgcagggcgagatattagataagcgtatatgtatttgggaacatttcgaagtgtgtgggggaggggggtggggagtatggtatatgatgtagtagataaataggggtatgggggcgacgaggtgggggggggtgtggccgagtgacagcagtataacaaagagtgattaaataggggttggcgataaaataagttatcacctatgttggtaaatggcggttagctaataaatgatgcaccaatatttatatggttacacattaaacagaaaaagacccaaggaaggtggaaagaattaaacggtcaaggaagcaaaggcaatattgatttccttattagtagggggggatagggtatgtgcggtgggctgtgaaaaaaacttagggcaagaaactaaacgataagaataaccatagctaaggaaggccgacgctgtaagaaggaagtg

SEQ ID NO: 105589 - DNA, 1052 bp, Glycine max
  Clone ID: PAT_MRT3847_66363C.1
gcccttttgatgttctaaaagccaatagagtgtatctcacagtttcagttctgtatacagtggtaaattttaaatttgctccattgaattctgtttttctctcgaactcaagtgtctaaagcattaaagcagaagtgttgcactcatggaataatattgtcttcaatcttcatctcagctatgtctttcagctaccaaagtccatgatgttgtacccttattgaagtattaatctgagaggaaagagagttgctgccattattatcagttcagtgatatttctttcttgagtatggttggctacggtaaaaagttgagagaattacagattcaagaatggaaaggatattacatcaactataagttaatgaagaagaaagtcaagagatatgtagaacaaatggaggttggagctcaaaatcgccacaatgttctcagagacttctcaatgctgctagacaatcagatagaaaaaattgttttatttctgcttgaacaacaaggagtacttgcacataggctgtcagatattggacaagaacaccatgctcttttccagcagccaaatagtataatcatctctgaactccaagaagcatatagagatgctggacgagatcttttaaggcttcttaattttggggaaatgaatgctattggtttgagaaagatcttgaagaagtttgataaacggttcggctataaattcacagactattatgtcaagacacgtgcaaatcatccttattcccaattaaggcaggttttcaggcatgtgggcattggggctgttgttggagtcttatctcatggtctggctgaccttcaggatttacaacaatctctaggaagctacatttgtatatatgaccagccttcttatactcatcaggatcctattcttgattccatcaaagaagctgtagccagattgtcaaactcaacaaactttcttcagtttttgggaagacatgcttttatcatgaaagaggagctgccatttccaagtgaagatcatattgttgatgaaagatatcatttcatgtcgcttc

SEQ ID NO: 105590 - DNA, 514 bp, Glycine max
  Clone ID: PAT_MRT3847_66364C.1
ggctcgagagaagatattacagccatgtatgtccctgacaatgacaaggacaaagtgtttcagctaccaaagtccatgatgttgtacccttacaagtattccttttcttcggggtctgccaatagaagtattgatctctgagaggaaagagagttgctgctattatcatcagttcactgatatttctttcttcagtatgggtggctactgtaaaaagttgagagaattacaaattcaagaatggaaaggatattacatcaactataagttaatgaagaagaaagtcaagagatatgtagaacaaatggaggttggagctcaaaatcgccataatgttctaagagacttctcaatgctgctagacaatcagattgaaaaaattgttttatttctgcttgaacaacaaggagtacttgcacataggctgtcaaatattggacaagatcaccatactcttttccagcagtcaaatagtataaacatctctgaacttcaagagcatattgagacgttg

SEQ ID NO: 105591 - DNA, 146 bp, Glycine max
  Clone ID: PAT_MRT3847_66365C.1
ggctcgagcccaaacgcaagccagaacgaaccttccaatacacagcaacgacaaccgcaacagacaggacagggcatactcaagaaccaccgcccagcagacgaagggacgagagagcacaacacgactcaacaacggccaggaaa

SEQ ID NO: 105592 - DNA, 443 bp, Glycine max
  Clone ID: PAT_MRT3847_66366C.1
tccgtctttgaagcatctaagatgacttgtgcctacattaaatgggcagtctctttgtccatagcattaggaaatgtggctgatgacaccatcaattttgcggcccttgcccacaagccggtgcagtttggagagattcaggaaaaagttgtattgaaattttcacaagaggaatttcttacagcttggtcaactcaggtgcgtcctacaacaactctgttggctgatgggtgtccatatctgcatgctatggtgcacgagaggacagtgtgtacaataccaggtgattctgtcattggcggtaaggggacaaccataaacaatatgtgcgcatatgggctcaatcctggtatttcaagttctcgtcttttgggcaccattcctcagtccatttcgcagcaaactgtttggaatcaaatggcaaccgcgaggacaccattgaa

SEQ ID NO: 105593 - DNA, 310 bp, Glycine max
  unsure (1)..(310): unsure at all n locations
  Clone ID: PAT_MRT3847_66367C.1
agaaaggcctttaggaaattttttttttttttttttttttttttttttttcacacccacaggcccctaaaccaacaaaaataccaaaaagcttgaacccagacccaggtacacaaatccaaggggccagaaggaaaagtgaaaattttcctccaaaggggggtggganancaaacagccaccnagagacaaaaaaaaacccccnanggggggggggggggggggcccaaaatcctgaaagtgggggcccccggattctttttacgaagtaaccaaacacatgccgggggcgcattaagtggttccccccc

SEQ ID NO: 105594 - DNA, 1268 bp, Glycine max
  Clone ID: PAT_MRT3847_66368C.1
tttccataaagtagggtggtatatgtattagaagcacaaaagagtgcattaaagaaatccaacccccaaacaccaccccccggaacggggtaaattataacatcaaatgctctataaaatatattttaaaaaggcacgtgaaaaaatatacataggaaattcccatctttaatatgtaatccaaggcgatcttcgcataaatcagtaaaattgtagaagaattttcatgaaataaattttcaccgtggtttcactgtcaatcttattcattgaaaaattgttaacctgtaaaatgactgggcgccaagaaatagcatcattcagcataatgtttatttctgtagtccgtcacagatgtcagttgctactttctccactctatccataacccttattgtttacatgcttcgtaaggatgaagaatgtagcaatcacaatgatatttggcccttggctagtcggctgtgcaatcatatttggtctttgatcaagttatcagctcaacattttgttaatgaagataaggaataatatcagcatagatagttccagcataaacttaggacccgtcgtgtgttcaagaatttgctgccaccaatttccttcaaatttagagttgcttccctcctttatttccttctttgcaagttcttcaagtatagcacgttgtcgttcattgatttcaacaggaagattaacacggaatcgtacatactgatccccatgatgtacaaaaaatccatgctttggtagtcctttgcctcttaatactagaagctgtccatgttgaacacccttgggtatttttaactgcatcttcccagataaagtaggcacctcaactttgccgccaagaatagcctgcgtaaagctaatattagaatccacgtagatatctgcaccatctctgacaaagattgaatcctcagccacctttattttaatgtataaactcccaggttgacctccacttccagcagcattcccaccttctggcacatggattgtatctcctgaatccacacctgctggtattgtaactttaacctctttaaccccttcaaccgccccagatcctccacatgttagacaagagtccttaatgattcggcctgatcctttacaagtaatgcatgttgacgtaaatggggggattgtaacacgacccgagcccctgcatgttggacaaacttttgggatggcatcaagtggatagccctgcccattgcaatgatcgcatggaactaatgcatcaaatgacctggtgc

SEQ ID NO: 105595 - DNA, 207 bp, Glycine max
  Clone ID: PAT_MRT3847_66369C.1
ggtttaccagattcaactcatccctcatcatagctatcactttcaattcatagatgctccatgctcatgaaggatgataattcttatgactagtcgcactgaacacatccaacggagatactctcgagtataaaacaaacagttatattgcatacgcaaatctacaagacatatctttgataaacatgcacccatagcataattcca

SEQ ID NO: 105596 - DNA, 1320 bp, Glycine max
  Clone ID: PAT_MRT3847_6636C.1
gaaaacttcattcctgatgttaggtttacaggaactagttcagacttaaggtatgactatggtaaattctatgcttccaagtcattttttgactatgccaaaaacaggaggatattgtgggggtgggtgaacgagtctgactccacacaagatgacattgaaaaaggatgggctggtctacagtcaattcctaggcaagtttggcttgataaaagtgggaagcgattggtgcaatggccaattgaagaggtagagaaactacgtgataaacacataagtataatgggagagaaactcgtctatggatcaaatcttgaagtctcaggtatcactgcatcccaggccgatgtagaagtgttgtttgagctacctgagctacaaagtgccgagtttcttgatcccgatggagttgatccccaactactctgtagccaagaagatgcatcaagaagtggcataatagggccatttggtttgttagctttagcttcaaaggatctcaaagagcatactgcaatcttcttcaaaatatatagagcccccaatagatatgttggtctaatgtgcaatgaccaaagaaggtcctcatttcgccatgatcttgacaaaactgcatatggaactatctttgacatagatcctaatctcaaaaatatttcactaagaagcttgattgaccactccattattgagagttttggggatgaagggagagtttgtatcactagtagagtttatccatcgttggctatagacaaagatgcccatctttatgcatttaacaatggaagccagagtgtggtggtctcaaaactgaatgcttggagcatgaagcaagcggagattggccgtgagggaaacataagctatacctaagaatgattagaagattttggatattgttgcattgaataaaaccatcaatttagtatccgaagtattgcattctctcctatttactctctaaaagtaataaaattatattagtaatccactaagtattgagcatccatcagtttagtgcttgaattagtatattttacaaacctttagggaccaatttgatagattttacaatacttgaaggattacttattatgatttctaatgtgagagaatacttgtataattttcttactaaccatttaggagagagtaatacttcagggatgaaattgagggttttctcttgttgtagttgtgtcttataatttgtttttccctctttattggtctctccaaggttgtcttattcgggatgtaactctgctgtctattgttatttaagaactaatagtaatgagtctctgcagatcaacg

SEQ ID NO: 105597 - DNA, 423 bp, Glycine max
  Clone ID: PAT_MRT3847_66370C.1
cccacgcgtccgcaaaaatgcatgatatttttcccccaaccaacattctgatgatttataaattgcggttatcatcaggcggatattgcctatgtttcatttcttgaaaggttccaaattgtcttctctgaaatttttaagcacgacatcacagcaggaagacccaaactagccacatggattcaggttcgtagttctgtgcaatccaagaacatagtaatttgaaattaattaagttcgcattcatctataagatgaaatggaatggtctatttgaataaggcccgaccatcctcctaattttgatttcgttagatttttcttttccaaaatatgtacatgattttgtcaattgttaatgcatgaagggaataagatcgatggttataagcagacacaagttgacagggaggaatatctgga

SEQ ID NO: 105598 - DNA, 589 bp, Glycine max
  Clone ID: PAT_MRT3847_66371C.1
gccaacaagcattcagttttccattcccaaaatagaaatttttaagataacaacttggataactgcacactgaccaactaaaattacatacaatgtcagcaccgtgcataaaattctcagtccgagttcatttcccacaacaaaattgtgtctaagcagatggggaaacgatgctacaatttaccaactatagtaaatgcattctttccacataagagtggaccaaccattgactaagaggctccccacatcccacaaaacaacctgaattgccattttcagggaaaaatgggaaactgaatacatgcagcagttcttgcactgcctgtctcacaagaaaaaaacctgtcaccctactcctacgaccccatccagtgatgatatctatccggttagggccaaccccaaatgccagcatttgccttcgaaaccaagcaagggtcctaaacaatgctgttacagcagttccatcagacatgacatggagatttataagccaataacaagtgcttttctccttgatggcatcaggatacacatttttttgtgcagccacctcccaaaccgaaccagcctcctccttgagtcc

SEQ ID NO: 105599 - DNA, 256 bp, Glycine max
  Clone ID: PAT_MRT3847_66372C.1
aaaccccttaaaggagaagttctagcgggggacccgcttttttcaaatgggttttcattattaaaaaaagggaacaaagataaaatacgagcttggtttaaagcaatgggtataaaacggggggggtttaagggcaatctatttacccggcgggaaaaaatttttccttggccactaaaaaatcgactaattaaacccaggtttttataatcaattcggccccccgattgggtcgggggcaaacccccccgaaaag

SEQ ID NO: 105600 - DNA, 291 bp, Glycine max
  Clone ID: PAT_MRT3847_66373C.1
ttctcttcgtccatttcctttggtatcagaggaatttgtctgaggttagtcgatttccttctcgtcttgcattagtggagaggttcgcggcttcgctgcctgggaggcgacgttgatgcgatacttgctctggcatacgggttactgtaacgttgtgacctgaccactggtggctttcacgtataggatacattctgttcttgtcatatgtaatgatccattgtcatttgtggaaaacgttctatcagattagtgttatcgtgaccttgagtctgcagctgctaaacgggg

SEQ ID NO: 105601 - DNA, 475 bp, Glycine max
  Clone ID: PAT_MRT3847_66374C.1
gcacttttggggaagaggtcgagtttcacagcagcaatggtgtacgtcaaggctcagaaatcaaaagcctacttcaagagatatcaagtcaagttcaagagaagaagagagggaaaaaccgattaccgtgccaggattcggttgattaatcaggacaagaacaaatataacactccgaaataccgatttgttgttcgctttgtatccttttgtttattgatatcttaattaggttaattcaggcatggagcgatggtttagtgaatgggaataacgataattgattattactgcaattaaacttgatttagtaaaaatatagattggttattgctaggtaaaaatgattttgcctcaaaaacatagatttgacttgaagtgataaaagtagcttctgtgtctttcagtataaaacttcaagtaataaatcactatgacttttcttgaaaatcaatttaacaaaaataattttgtt

SEQ ID NO: 105602 - DNA, 225 bp, Glycine max
  Clone ID: PAT_MRT3847_66375C.1
atggatcatggaaagcacttcagtggcagtggcagtggaatcaacaagaatgaaagtaaagataggaagaagttattgatgagcagacaaatagttttggggaatgagaaagaagacatcaacaaaatggctgatgcgttcatcaacaacttccgcaaacagttgaagattgagagagaaaattcgttcaaacgttttcaggatatgatacacggaggcgcatga

SEQ ID NO: 105603 - DNA, 599 bp, Glycine max
  Clone ID: PAT_MRT3847_66376C.1
accgagacggctgcgagacgacgacagaagggggaacgcccacttttagcattttgttctctgccactggagttatcttcttgtcttggatgagctttcaggaaatcatagagttcctcaatttcttatatgctgtaggaatgcttcttgagtttgcagcttttatcactttgaggctgaagaagccaaatctttatagaccttacagagttccactgtcaacattttgggcgaccatgctttgtttgcctcctgctttactgcttattcttgtaatgtgcttggcttctttgacaactttctttgtgagtggagcagtaattctggtggggtttatcctgtaccctttcttggttcaagccaaaaataacaattggattttatttgaagaagccactggctggcagcaatgccattcagaactgactgaccaagaaaatagcggtgttgagcttcttgtgagctcaccattggctagcgtggaaaagcatttttctttaatgcaatgtgattcttagccattctcgcaagacctagtcttttacatattaatttttactagcattcaatttgttggaacgtcttggacatttctgaat

SEQ ID NO: 105604 - DNA, 527 bp, Glycine max
  Clone ID: PAT_MRT3847_66377C.1
acgagtgcaacatgtgctacttaatttttttgttatatacgaggtaccgagaacgaggtgcaggtgcatctgcagatctagatccacgtacggaggtggaggcaatcgaatccataacgttcaaatttttacaaagggtttgcagacattttccatttacatatattgaatctgcccacctttaaattgagatgttggtattctacaaggaaagaattgaagacacatgagaaactagcatgaatcacatcacgtattatcgtacatatcacacatatatacatggctcagtttcaaagtctacaattggctcatgaactgtaagataatcgatacggcgaggatcagcatagccatctacctatatagatcatggccacaagagttggtcccaaatctttgatgatttgagtgtatcactcttaccctgccctgctcccgctcaatccccttctctaggggcctcgtatttcgtcggccccggtgtggttgctgctgcttgtgcttccaagttttttgttttttat

SEQ ID NO: 105605 - DNA, 153 bp, Glycine max
  unsure (1)..(153): unsure at all n locations
  Clone ID: PAT_MRT3847_66378C.1
agttataggggnnaaaannacctcataaattatntanntnnntctcttcccattattctttnaaaaatcttaacaaaaaatctaccttaaaatatcacaaaattttctcnataaaatcctacctttacacaaatcttatccatcaaattatat

SEQ ID NO: 105606 - DNA, 593 bp, Glycine max
  Clone ID: PAT_MRT3847_66379C.1
aaaagaatatatattttgtgttaatagaatactatactgatttatgtagagcattttgctttgctaagcattttggaagtgttgtagtatactgtatgttatgaaatgattatctctttatttatttaattaaatataaatgaacgagcatttattttatagtgatagaaggtcatattgatttatgttaggacattgtgcctctctacacattatagtgttgtcgtgactatttgatataacatgataaggttagtatttggcagttttgaagttttttaatactcatggtaagcttacagatttctccctttttatatgaaaagtatgaaacaaaagatggttgagctattattttctcacgcctatcatttgaattcaaatgcttaaattgtttggattaagttggtatttggttagagtttcttagttcttttagactttcctatttcctagataccttatctcattgctattccgatctaattgcttctatatatttagggtaggaaattctggacacttgctgtaaatggttcatctaattctttgaatggttgtgattcaattatgcagtgatgtaaatataaatc

SEQ ID NO: 105607 - DNA, 561 bp, Glycine max
  unsure (1)..(561): unsure at all n locations
  Clone ID: PAT_MRT3847_6637C.1
gcttctcgaggttcagagtcagaattcttttctggagacagagctgtggatgcagatggtggaggtgcatcacttgctagcaagttgcggagcctatcatctgactgttttgtgcatcttctgagtgctattttcttgatagtacaggcacatttagtgcgggctgctgaagtgaaaaaggccatcgaatggatcttaagcaaccgtgatggtcattatgctgctgattcagttgtggcggcaattgctcatggtgcagcagctgcagaaacatcccaagaaagcgagtctcatggtactacatttttgccatattcagcacaaagaagtgttgccaagggttcttcatttcagggaaaagcaattgattctatgagctcctcaaacatgtcaaaaaatttcagagctgatatattgcgagaaaacgcagaagctgtctttgcggcatgtgatgctgctcatggaagatgggcaaagcttcttggggtccgtgcaattcttcatcctangttgaaattgctggagtttctaaccatatacaacattacccaggagttcatt

SEQ ID NO: 105608 - DNA, 141 bp, Glycine max
  Clone ID: PAT_MRT3847_66380C.1
ccggtttttgctccttatcttatgcttgtgtaaaatttttatttattccaccttcccagaacattgctaaagaacaataactgtagttaatcgttttcaaatctaggggtggttgaacgttttaaacttttcttgattcga

SEQ ID NO: 105609 - DNA, 184 bp, Glycine max
  unsure (1)..(184): unsure at all n locations
  Clone ID: PAT_MRT3847_66381C.1
ggnggaaaagaactgggaatccatttttcgcgaattttttccatggtggaaacactgagagaaaaaaaaaactttatgtgtagagacatctatgggcttaacggatcttcgtgggaaattagacaaaggaccacctcaaacaatatctgtaggtttgaaaccacaaacattgggtgggatggat

SEQ ID NO: 105610 - DNA, 163 bp, Glycine max
  Clone ID: PAT_MRT3847_66382C.1
agcaccaacagcatcggctgtgacagtcactctccgacaacaacacttgcgcggcgaaaaatgtctctggtggcgaacgaggatttccagcacattctgcgcgtgctgaacaccaacgtggatcggaagcagatgataatgctcgctatgacccctaacatgg

SEQ ID NO: 105611 - DNA, 702 bp, Glycine max
  unsure (1)..(702): unsure at all n locations
  Clone ID: PAT_MRT3847_66383C.1
ccacgcgtccggaagaagcaaaaaagtgtaatagaagatgccttgtgttcaaagttgattatgaaaaggagtatgactcagttagatgggattttgtaccaaatagattagatggattgatgactgcttgaaatcgacttctatttccatattggttaatgggagtccaacaacggagttcactcctcaaagaggactcaggcaaggggatccactagtcccattcctgtttaatattgtagcagagagcctaactagtctgatgagagaagcctaggagaaggatttgtttgaaggctttacagtaggcagaaatgtggaaatcagtatactacagtatgccgatgacatgattttctttgggaccacaatgatgacaaatgtaagagcaattaaggtgatgttgaggactaaagctaaacttcgccaaaagtagttttgggacgactgggatgcctgagcaatggatgaacaatgccgctagttatttaaattgtagattgttgtcagtaatcttttcttatttgggtatccctattcggacagactcatggtgtagtgagatatcaaatccaatagtcaagagatgtgagaaaactatcaaaatggaaacataattatctttttttcgagggaagggagactttgatagagtcagtcttgaacttgatctctatttatttcgnttctttttttagggct

SEQ ID NO: 105612 - DNA, 736 bp, Glycine max
  Clone ID: PAT_MRT3847_66384C.1
aaaaatatcatggaaaatgcttgagaatgcaagagttttgaaggaaggaattgagagaacagggcggtttaacatcatctcaaaggatattggcgtgccacttgtagccttttccttgaaagacagtagccaacacacggtgtttgagatagcagaccatctgagaaaattcgggtggatagttccggcctatacaatgccaccggacgcgcaacacatagcggtcctccgggtggtgatcagggaggatttcagccgtggcttggccgagagacttgctgctgacatagagaaggttgtgaagctcttggacacacttcctagccccctcactaccaaagttgctcatatcacagccatcactagtgagactagtgagactagtgagaaggttaagagtgcaatagagactcagaaagagattgctttgtactggaagcgacttgtggatggcaagagacttggagcatgttaggcttaccatatatttttgccttatggcaaccttgttgtgagttaagttggtggtttgttatctatgtgcatatatgtgagtgtgtaatggctatgtagcaataagcaatggcaatgcatgacggattctagtagtcattgctgttcttgcttaagagaacattttctcttttgtctttttgaggtgttagtttggtactcctgagaaggcactattatcatataatattataatgcaagtaaattttattaaagatgaagg

SEQ ID NO: 105613 - DNA, 216 bp, Glycine max
  Clone ID: PAT_MRT3847_66385C.1
tggaaacaaaacgacacgaccatattaaaatgcacattgcagccaaggacttaatttactgaaataacatatgctgacacaacactcatatatacgaaatacttttttgataagatttacgatttgactatagaataacagcttcttgataacagcgacacaaacctgtctagcgaattccatcactaccacgcagtgcaaaattatgcgtgacca

SEQ ID NO: 105614 - DNA, 2076 bp, Glycine max
  Clone ID: PAT_MRT3847_66386C.1
gttgaagaaagcataaaacaaatatatgagttggtttctattgaaacgaggttaatttctttgtttgtgatgaaaatgttgagagcagaggctcacaagaaaaaaaagcatccaaaaatggttctcacatccactgccactcacccagatgaaaaagaccagagcctaaactctacttttgcttccagatatgtgcgtgatcctattccaaaattcaagatgccagagaaacccacctagacaattggctcagaagaaaagaaaagcaaccaaaaatggttctcacatccactgccacacacccagatgaacaagaccagagcctaaactatacttttgcttccagatatgtgcgtgaacctattccaaagttcaagatgccggagaaatccataccaaaagatgctgcttatcagataataaacgatgagttgatgttggatggtgcaccaaggctcaacttggcctcgtttgtgaccacttggatggagcctgagtgtgacaagctcataatggcttcacttaacaagaactacgttgacatggatgagtatcctgtcaccactgagctccagaaccggtgtgttaatatcatagcaaatctattccatgctcctataagtgatgatgagactgcagtaggtgtgggaactgtggggtcatcggaggcaataatgttggcaggtctagcttttaaaaggaaatggcagacaaagagaaaagcagaaggcaaaccatatgataagcccaacatagtaactggggctaatgtgcaggtttgttgggaaaaatttgcaaggtactttgaggtagagctcaaggaagtgaaactcaaagaaggatactatgtgatggaccctgcgaaagcagttgaaatggtagatgagaacaccatctgtgttgcagccattttggggtcaactatgaccggagagtttgaggatgtgaagcttctcgatgaacttcttactaaaaagaacaatgagacaggttgggataccccaattcatgtagatgctgccagtggggggtttattgccccatttctatatcctgatttagagtgggacttccgtttgccgttggtgaaaagcatcaatgttagtggtcacaagtatggtcttgtctaccctggtgttggttgggttgtatggaggagcaaagatgacttgccagatgaacttgtttttcacataaattatcttggatctgatcagcccactttcacattgaatttctccaaaggatctagtcaaattatagctcaatattatcaattgattcggcttggctttgagggttacaaaaatatcatggaaaattgctgggagaatgcaagagttctgaaggaaggaatcgagagaacaggtcggtttaacatcatctccaaggatatcggtgtgccacttgtagccttctccttgaaagacagtagtcaacacacagtgtttgagatagcacaccatctgagaaaattcgggtggatagttcctgcctatacaatgccaccagatgctcaacacattgctgtccttcgggtggtgatcagggaggatttcagccgcggcttggccgagagactcgccgctgacatagagaaagttgtgaagctcttggacacacttcctagccccctcactaccaaagctgttcatatcacagctatcactagtgagactggtgagaagattaagaaagctgcaatagagactcagaaagagattgctttctactggaagcgacttgtggatggcaagagacttggagcatgctaggcttaccaaatcttggccttttggccaccttgctatgagttatggtgctttgtttcttatctttgaggatatgtgagtgtgtaatggctttgtagcaataagcaatgccaatgcatgatggattctaatactcattgctgctcttgcctaagggataattctctctctctcttttgagttggcaatttggtactcatcaaaaggcactattatcatataatgctcaagttaatttttattagagtaaaaatttttattagagatgaaggaatagagaaaagggaaaaagacaagaaagaat

SEQ ID NO: 105615 - DNA, 279 bp, Glycine max
  unsure (1)..(279): unsure at all n locations
  Clone ID: PAT_MRT3847_66387C.1
tttagcaggtgaacaacacttttgtgttcgtgccattatctagttctcaattctcttcaccctttncgtctgagagagatggggagtgcttnaggcggggagagcaacagtgggggtgggagcgagagagccttcagggggtctctgggggggcacctacaatctaagaaacacaggccctgaggaggtgtacattaaagtgcactactggggggtttgcgcttctgagctccaccagagtaaaaatgagcttggggtgtgcaactatcgcatggggcc

SEQ ID NO: 105616 - DNA, 148 bp, Glycine max
  Clone ID: PAT_MRT3847_66388C.1
tgactgagctaaaacctttctgatcaccttaacgacccagcgcacagcgatgcctggggatgaaccagcaaatcgccccataggcagacagcctgtaacaaaacgatgacctgtggattaatgcaagtggctcgataggtgtccggac

SEQ ID NO: 105617 - DNA, 1090 bp, Glycine max
  Clone ID: PAT_MRT3847_66389C.1
gagctcacattgtcatcctctattgtcttgtgtttctcgcagcagatatgcgacaagttcgagatgcagaggctcgagttcctcttcccactaatgaggttcaaacagtggggcaagcccccaatcaattcattcagtggccgagaagacttgtgaagtctatttcagttaagactattgtcgaatctagcaaagatgttcgacacaaaaggttggaacctcaacttggtccgcttgaacgcttgttgataatagttagcaaaattaggaaggatcatgtacagctaccttgggatcctgatgtactaagcaagccctctaccatgtcatttcatatctatcggagggatatttttgaattatgtatgggtagcgagatgctaaacatctcagttatacaattgtggctgatgtatctgcatagcttatgtactgataaggggaatgcacatatctatggatttatggacccgcaatccattcaaagtgttgggaataatgcaacagaagttcagggctacttgcaaagtcggctacatgaaaggaaaaaacaatgttacctagcaccttatttgcattcggaccactggcaattgcttattatttgtcctaagcaaaatgttgtggtgttgttgtgttcattgcacaagaaaacgatcaacaaagaaatgaaaactatagttaatttagctatggacgagtatcaaaggttggtgggttcgcaatcaagatctagaaggaagaagcctacgtggattttgccccgttgtcaaacacaatccaagggttatgagtgtgggtattatgtcatgaagcaaatgttcactgttgtcactgtagatattgttgattcgtggaagcagctcttcaacaattcgggtccattccctgaggaggatattgcagacattcaacaacgttgggcagcatttttacttcaaattagtaatttgtaaagttatttgtttagaatgttagttataggttttgtaaacctgtttgtttagaatgtttacactatagattcaaatagaacatttgtctttataccatgttaagaaaatatattatgctgtgaccaacttgtgtt

SEQ ID NO: 105618 - DNA, 372 bp, Glycine max
  Clone ID: PAT_MRT3847_6638C.1
ggctcgaggttttttttttaacttttttaatttctaaacctcatcttcctgatcatgaacaggcaccatattcataaattaaaggccctactttgttttccaagtgccatgcgcatacttcagaactggcagcgagaaattccccttgatgcaaggcatcatccactgctaagacactccatggtagactagtagatcatagacttgtgaatgccaagatattgtcctacaccagcaattgatccttttatcagggtctccaactcttccttcaggcagattgtttgttgttaacgccggggagtcttacgaatcgacttcatatccttgcttgcattccgtgccagctccaatacctcagcatgtgagacc

SEQ ID NO: 105619 - DNA, 345 bp, Glycine max
  Clone ID: PAT_MRT3847_66390C.1
gcctcgtcctacacacactgaccctagccactgacccagccacagcctacaccttcggatgcattcaagaggccacagggagctcactgccaccacaagggctaatgtgcctgggccgacgcccattattactcttggcccaaacacaaaaactgtaccaatctaccttgtctaattgcttgcccacctttaaaacactcaactttagtgacgtcactgagacttgggcccgtggcccatgccacgaggatcaagtataccagtcttatcaaaaatcctagacgatcttcactttactatgtgacatacctggctatgagagcctaccatgagaattgacgatat

SEQ ID NO: 105620 - DNA, 581 bp, Glycine max
  Clone ID: PAT_MRT3847_66391C.1
taagcaaaattttccgcgtgtcattgtgttcattgccccacaaccccatcatcagagaaatgaaaactccagttgatttagctatggacgaatatcaaaggttggtgggttcacagtcaagatctagaaggaagaagcctacatggattttgccccgttgtcaaacacaaactgagggttatgagtgtgggtattatgtcatgaagcaaatgctcactgttgtcacagtagatattgttgattcatggaagaagatcttcaacagttcgggtccattccctgaggaggatattgcagacattcaacaacgttgggcagcatttttacttcaaattagtaatttgtaaagttgtttgtttagaatgtttactttagattcaaatagaacatttgtctttatactaagttaagaaaatatattaggttatgatcaacctgtttatgctgtgtctgtggttgttgtgtgtgtctatttttcaaattacagggagggaaaaagataaaatttatcatatatttttaaaacatgacttttttatattggttatttttatgattgatgtagaaagctaagattttac

SEQ ID NO: 105621 - DNA, 537 bp, Glycine max
  Clone ID: PAT_MRT3847_66392C.1
cttggtctattaagacttactacgctaatacgataattatgacgattttacaaatgatctgatttttacatcaacaattgcagaacaggccggtaattggagcgattcaataccaaagcgttaaaccatcatcctattcctgaggataggccaaccctaaccattctacagccaaatgtgaagaaaactctgatgtagtggctgttgcgcaaattgtattggaacactaaaggtggatgctacttctccgcccagaattacaacattgatcctgtttacggaaagacatttcccttagcagtgctaaaccaccataagatagccgctattagccacatgaccccgcaaacttgttgcttacttcaatggtttagtggaccgggaggaatgcaaaaacagtcccaattggttcttgataactgtccgggataatgattgattgcatatgaatggaaactgaacccgtcataggagaagacgctggtgactaccggggggatctatctggcgacttgggggacaccggaactctcgata

SEQ ID NO: 105622 - DNA, 220 bp, Glycine max
  Clone ID: PAT_MRT3847_66393C.1
acaaaaataaatagtcgcactccatgttcctgacttttgaaaaaaacctttgcgttatacaactcttcgagccctaatttctctttttttttcccatcaaattaagaatatacacgccttgtgcgcggcactcttcatcaacaaccccttcaccatgtctacctaactaatgcaccagttactaaatttacaaatgaaactcaatagctatgtaacggta

SEQ ID NO: 105623 - DNA, 731 bp, Glycine max
  Clone ID: PAT_MRT3847_66394C.1
ccacgcgtccgcggacgcgtgggcggacgcgtgggaaaagtggttaagacatggcgatggtgaagagaagcattggtgtttgtaagaggctttctggttcttcttcttgtttgagcacttcaactgcaacaagtgataatgatattgctcggaggcttcagcttccaccatttgattacaaaccacggccatacaaaggacctttggctgatgaagtttttgccaaacggaaaaagttccttggtccttccttgttccacttctatcaaaaacctctcaacattgtggagggcaagatgcaatatctattcgatgagaatggtaggcgttatcttgatgcttttgctggaatagttactatctcctgtggacattgccatcctgaagttttgaatgctataatggagcaaagtaaactcttgcagcatacaacaaccatatatctacaccatgcaatagctgattttgcagaggccttggcatccaaagtgcctggaaaccttaaggttgtttattttgtaaattctggttcagaggcaaatgacttggcgatgctgatggcccgtttatacactggtaatatgggtatgatttccttaaggaatgcatatcatggaggaagttctagtacaattggactcaccgcgatgaacacatgggaatacccaataccgagggggagaagttcatcatatcatgaatccagatccataccgtggaatctttggctc

SEQ ID NO: 105624 - DNA, 1348 bp, Glycine max
  Clone ID: PAT_MRT3847_66395C.1
gtaacaagtaacaataattgagaaaaaggagtgtagtaggatgaagttatagtttttcctcctccagagcaaagcatggccctcagcatcctttacctgagtctgagtctcctcactgtcactgttcagtcatctaaaccagaagcacctttcgcttgcgacttctccaacccttcatccagatcctacccattctgcaaccccaagctccccattccccaaagaaccaaagaccttctctcccgtctcaccttggacgaaaagctctcccagctggtcaacaccgcccctcccatcccccgcctcggcatccccgcctaccagtggtggagcgaagccctccacggcgtctcaggagtcggccccggcatcctcttcgacaacaactccaccatctcctccgccaccagcttccctcaggtcatcctcaccgccgcctccttcgactcccgcctctggtaccgaatcggccacgccatcggcatcgaagccagggcaatcttcaatgctggccaagccaatggcctcacgttctgggctcctaatatcaacatctttagggacccaagatggggcagaggccaagagactgctggtgaagaccctctcctcacttctcgctatgcggtttcttttgtcagaggccttcaaggagattcctttaagggagcccatcttctagcctctgcgtgctgcaagcatttcaccgcttatgatttggacaattggaagggcgtcgatcgctttgtcttcgatgctcgcgtatctttgcaagatttagcggacacataccagcctccgtttcagagttgcgtgcagcaaggacgagccagtgggataatgtgtgcttacaatcgtgtcaacggagttcccaactgtgctgattacggtctgttaacccaaaccgccagaaatcaatgggatttcaatgggtatatcacttcggattgtggagcagtggggttcatacacgacaggcaaaggtatgcaaaatcaccagaggatgttgtagccgatgttcttcgggctgggatggatttggaatgtggttcttatttgacatatcacgctaaatcagcagtgttgcagaaaaagttaggcatgtctgaaatagaccgtgcccttcagaatctgttctctattagaatgaggctaggcctatttgatggaaatccaacaaggctctcattcggcttgattggctccaatcatgtatgttccaaagagcaccaatatctggctcttgaagctgcaagaaatggcatagtcctcttaaaaaactctcccacacttctcccacttccaaaaacaagccccagcattttcttagcagtgataggtccccatg

SEQ ID NO: 105625 - DNA, 451 bp, Glycine max
  Clone ID: PAT_MRT3847_66396C.1
cgaagtttatgaatttgcctaaggctgcttggttttgatcatgtgagaaggtcaagaaagattttctagtgagaaaaaacgaatcagatggaagttagttcaactaaaatggtacagtaagaccaaataaaaacttggtagaagaaatcattaaaaatgatctttatcaaagttttttgaaatgtggtttttgctagagtccaatgacaattttacttcattgttaacttcatctaatgttttattaagttctcgtagctaaggcgtggttgtcaatactgttgttgcgattttgtgtttatcttgttctcctcgacatgtgttgagtttgacttctcaatttttggtttgttgcaattttgagtggtgtattcaactgctgctttagcttgcaaagatttttcgtttattcttaagaaacttcatttgtgttccctttccctgaccttat

SEQ ID NO: 105626 - DNA, 303 bp, Glycine max
  Clone ID: PAT_MRT3847_66397C.1
atgatttcagctgttgcacacaagagatcatcagctgtaatagccattggtccatcacaatggactagtttccctccagcctccccacctgcttcaacatcaccaccagcaactggagggactcctttttctgtcctcatagtggccgctctaccctcggtggcttggccgttcccggccttagatgttgatctctttctgatcaggcagaaaagcaggacacatcaaagaggtggggcaatgactccttgtgatggagcttgggaaagacatggggttgaagggctgtatccacatagttga

SEQ ID NO: 105627 - DNA, 688 bp, Glycine max
  Clone ID: PAT_MRT3847_66398C.1
aattcggctcgagttagggtgttagtgaaacttttttataaagggcagcagcaaattctgaaacaacacaaaacacaacaaaaatttacaagcaactatggcttcaagcaatggccgaaaagcaactgagatcttccaaggacaagctatcttatacagatgcatgtttgccttcctagattccatgtgtctcaaatcgattattgagcttggcataccagacataatccacaagcatggccaacccattactctttctgagttggtgtcaattctgaatgttccaccagctagagttggtcacgtgcaaagtctcatgcgctaccttgcacaccatggattctttgaaagactaagaatccatcatgaaaaagaatcttatgctctcactgctgcttcagagctacttgacaaaagcagtgagctttgtttaactccaatggctgagaaagtgctagacccaactctctcagcttcattccatcaaatgaagaagtgggtttatgaggaagatctctaagcgtttgatatctccttaggctgtagtttgagggattttcttaacaaacacccttcatacaagtgagttattcaatgaggcaatgactagagattctcaagtgagtaacttggcattgagagattgcaagttggaagttcgagggactggaatccattgtggacgttg

SEQ ID NO: 105628 - DNA, 2911 bp, Glycine max
  Clone ID: PAT_MRT3847_66399C.1
cacacacactcacacccgctgtttttttgttccactaaatcaaaacctcttatctcttactctcattacattcattcttttgattttcgttatggtagtagcagtggagaaaaccaacctcacttcacaatcacaatgcttcaaccgtgtttctgacaagaagaaagaaagatgcaagacacacatgaacaacgttaacccatgttgttttttgtttctcttatgtgtgtggagccttgttgtgctcccctcatgcgtgaggccagttttgtgtgaagatgaaggttgggatggagtggttgtgacagcatcaaacctcttagcacttgaagctttcaagcaagagttggttgatccagaagggttcttgcggagctggaatgacagtggctatggagcttgttccggaggttgggttggaatcaagtgtgctcagggacaggttattgtgatccagcttccttggaagggtttgaggggtcgaatcaccgacaaaattggccaacttcaaggcctcaggaagcttagtcttcatgataaccaaattggtggttcaatcccttcaactttgggacttcttcccaaccttagaggggttcagttattcaacaataggcttacaggttccatacctctttctttaggtttctgccctttgcttcagtctcttgacctcagcaacaacttgctcacaggagcaatcccttatagtcttgctaattccactaagctttattggcttaacttgagtttcaactccttctctggtcctttaccagctagcctaactcactcattttctctcacttttctttctcttcaaaataacaatctttctggctcccttcctaactcttggggtgggaattccaagaatggcttctttaggcttcaaaatttgatcctagatcataactttttcactggtgacgttcctgcttctttgggtagcttaagagagctcaatgagatttcccttagtcataataagtttagtggagctataccaaatgaaataggaaccctttctaggcttaagacacttgacatttctaataatgccttgaatgggaacttgcctgctaccctatctaatttatcctcacttacactgctgaatgcagagaacaacctccttgacaatcaaattcctcaaagtttaggtagattgcgtaatctttctgttctgattttgagtagaaaccaatttagtggacatattccttcaagtattgcaaacatttcctcgcttaggcagcttgatttgtcactgaataatttcagtggagaaattccagtctcctttgacagtcagcgcagtctaaatctcttcaatgtttcctacaatagcctctcaggttctgtcccccctctgcttgccaagaaatttaactcaagctcatttgtgggaaatattcaactatgtggatacagcccttcaaccccatgtctttcccaagctccatcacaaggagtcattgccccacctcctgaagtgtcaaaacatcaccatcataggaagctaagcaccaaagacataattctcatagtagcaggagttctcctcgtagtcctgattatactttgttgtgtcctgcttttctgcctgatcagaaagagatcaacatctaaggccgggaacggccaagccaccgagggtagagcggccactatgaggacagaaaaaggagtccctccagttgctggtggtgatgttgaagcaggtggggaggctggagggaaactagtccattttgatggaccaatggcttttacagctgatgatctcttgtgtgcaacagctgagatcatgggaaagagcacctatggaactgtttataaggctattttggaggatggaagtcaagttgcagtaaagagattgagggaaaagatcactaaaggtcatagagaatttgaatcagaagtcagtgttctaggaaaaattagacaccccaatgttttggctctgagggcctattacttgggacccaaaggggaaaagcttctggtttttgattacatgtctaaaggaagtcttgcttctttcctacatggtggtggaactgaaacattcattgattggccaacaagaatgaaaatagcacaagacttggcccgtggcttgttctgccttcattcccaggagaacatcatacatgggaacctcacatccagcaatgtgttgcttgatgagaatacaaatgctaaaattgcagattttggtctttctcggttgatgtcaactgctgctaattccaacgtgatagctacagctggagcattgggataccgggcacctgagctctcaaagctcaagaaagcaaacactaaaactgatatctacagtcttggtgttatcttgttagaactcctaacgaggaaatcacctggggtgtctatgaatggactagatttgcctcagtgggttgcctcagttgtcaaagaggagtggacaaatgaggtttttgatgcagacttgatgagagatgcatccacagttggcgacgagttgctaaacacgttgaagctcgctttgcactgtgttgatccttctccatcagcacgaccagaagttcatcaagttctccagcagctggaagagattagaccagagagatcagtcacagccagtcccgggtgacgatggagccatcccttcgactagtgaatgaatattgggtgtgttattgtggacaatttttgagtttacttttctctttaggactaacgtgtagtagtagtgtagtgtaggtaggacaatctattattctttcattcttacattattttttgcctgtttggagtgcctgtgtctgtacatagtactgtgctttctaatcagcgagtgttatctttaacacttcattagtttcatttcataatagaaactagttcttgttctccccct

SEQ ID NO: 105629 - DNA, 662 bp, Glycine max
  Clone ID: PAT_MRT3847_6639C.1
cccacacttacgcttacctgctaagactaacacacttacacataccaaatagagagagaaaatataacacacttacacaaagcaaagcatagcatatcgtggcaaaggataaagaaaggatcaaacaaagtaaaaaaaaaacagagcacctttgtgttcgtatttctctaggtgcgcctctgcccgccccataacttcttcttctttccgaaggtgcccaggttcaaattttgttcctttcctgcaccatttattgcctctgctcaagttactgcaatttggctcataattttgaacatggtatttgccttctgagtgcaaacctggaagattggtttgaaaaaattatataaaacaatgacttggaaaagcaggggagacctgcttcctaaaagtgttatgtctcagaaatggatgatttttctctgtgttggaagcttctgtgctggatgtggactattcctgaacctaaaggacttgcacggacaacagctatggaagctgaaaaattgaatgtagtttcagagggttgcaattcaagaattttgcaagagaaggaagtgaagcgtgaaaccaaaggcatctatagtgaggttttcaagacacaaaatgccatacaaacccctggacaaaactatttcaaaactggagatggaattagc

SEQ ID NO: 105630 - DNA, 318 bp, Glycine max
  Clone ID: PAT_MRT3847_663C.1
agttgaggaagcacacaaattcttgtgagcagtgcaatgcagttgtatggatatgttgaacttggagataaggtaggaaagcatctaacaacgtttcctcattcattatattgataagggcagaataattacagagtgattatcctgagttttaaactgaataatctcataaatatcttgatagattgatgttttgttatgtatttcttataacatcatagatctcaacaattcatccacatggcatgtatatttgcttcttcctattgttcaaatgtaaatactgtaatagattaaaaaaatgtaaattttgtaaaa

SEQ ID NO: 105631 - DNA, 388 bp, Glycine max
  Clone ID: PAT_MRT3847_66400C.1
ctatactggaataaggaaacatatctttaggaaagctgtctatgttgcatagaatactcccaatttttaatcttaggtaaaaattgatctttaaaggaggcattctatcggaagaaagcttaggtctattattgtgcagattgataccaagcgaatgtaaacttcttttgattttttgtttttgcaatctttgaaatttattctctgccaatgtgttagggtctgggacacgctgttctggcttcaattctctggtttcatgccaaatctgtagatttgaaaagcaaagcttcgataacatccttctatatgtttatttggaagctattttatgcagaatacttactcattccttttgttagatgaggatgcagcggcaatattgact

SEQ ID NO: 105632 - DNA, 359 bp, Glycine max
  Clone ID: PAT_MRT3847_66401C.1
ctcgagccgttgaaattttcacaagaggaatttcttacagcgtggtcaactcaggtgcgggctgcatcaactatgatggctgatgggtgtccatatttgtatgctatggtgcatgatagttcagtgtctacaataccaggtgattttgccattggtgttaagtagacaaccatgaacaatatgtgtgcattatgggttcaatcctggtatttcaggatctcgtctttatggcaccattccttagtctatttcacagtttacttgtttggaattaaatgggcaccagtcgagaacaccattcgtattttgattttttgcaaagtaaagctttttgttaaatttttctgattgaccctttc

SEQ ID NO: 105633 - DNA, 1534 bp, Glycine max
  Clone ID: PAT_MRT3847_66402C.1
tgaattactgaactgcgagctccctccaattcgcttctccttcttcttcattccttggcagtacacaaatctgtcatatcttgctgctcgatcgttacgatgatggcgctcaattcattgtcaccactttcaattaattctcttcacgtatcttcaagctcaacttcaaagatttcgcattctcattccaagtcctttcccgtcgttgtgtgccaaattaactcaaacagagatcatcgtcaagaatccacaaaatggggaaaagtggtttcggccacgttggcggctgctgttattgccttcagctctgacatgtctgcccttgctgatctcaacaaatttgaggctgaaatgaggggtgaatttggaataggatcggctgcgcagtttggctctgctgacctcaggaaagcggtgcatgtcaatgaaaatttcagaagagccaatttcacagctgctgatatgagagaatctgattttagtggttcaactttcaatggtgcataccttgagaaagctgttgcatacaaggcaaacttttcaggtgctgatttaagtgatacattgatggatcgcatggttctaaatgaagccaatctcactaatgccattctccttagaacagtcctcacacggagtgaccttgggggagccatcatcgaaggtgctgactttagtgatgctgtgttggatcttcctcaaaagcaggcgctatgcaagtatgctagtggcacaaatcctgtgacaggagtaagcacaagagtaagcttaggttgtgggaacaaacgacgaaatgcatatggctccccgtcatctccccttttaagtgctccaccacagaaactgcttgaccgagacggtttttgtgatgatgcaacaggactttgcgatgcaaagtagtaactagttgtaatatttgctacaaggccatattcgtgtaaatatatcagagactacaattgaggcctctatttgcctttgcatttctgagagcatatccgcattcaacaaatgatgccctctcttgaatctatgttggatattgctggtctctgtttagcaagccagaacctattttgtccagccactttctcctatgtaagatctacgggatataaaatgatgcttcgtgttcataatttctcacccatttgccacaaaactttaatgaaccatgtaagtccaatttcttgtttaaatttatattacacaaacacactcacattctctcttatagatgttaatattcgtcggagatcgaattcaactattggaattcttctatgaaataggcatcttttatttatttttacattattaattttctctgtagataagttaatcacacctgttattaatcacaatcacatcaacattttctctaattttgggtgattgactatcagtggactaaaattgttcaattttgaaaatattgtggatcaaatgtgtaattaaatttttatagtgatcaaaattgcatttttgtgaaattataaggaccaaaaataaatttaagtcaaaaaattaaaat

SEQ ID NO: 105634 - DNA, 156 bp, Glycine max
  unsure (1)..(156): unsure at all n locations
  Clone ID: PAT_MRT3847_66403C.1
tcctcaaaataagaaataacacttttatattatctgcacgttttgcatttgtgtnnctgatnntngngnccctaatcccaacccgtttcttttcnntcttctcttcnaccccatttcctaaatctncttntnncttccatcaacaacttttcaggg

SEQ ID NO: 105635 - DNA, 655 bp, Glycine max
  unsure (1)..(655): unsure at all n locations
  Clone ID: PAT_MRT3847_66404C.1
ccacgcgtccgctctctctctctacagtagtagtagtagtattcattcatattcatacttgatatcatgtcacacacacactagctctctctctctctctctaatggcagagctagctcagacccttaacacagaccacagcctctgagagaaaccactctcactctcactctccttaacctttcaccttccatatctggcgaaaatgaaagctctgtacagaagctctctcttgctcctcttcttcctctccgtctgttctgcatcttcttcttcggttcccactctgcaactcctaagcttcaaaaactctctcccgaacccaaccctgctcccgaactggctcccgaaccaaagcccatgctcattcaccggcatcacctgcaacgacacccagcacctcacttccatagacctctccggcgtccctctcaccacaaacctcaccgtcatcgccaccttcctcctcaccctcgacaacctccagtcactctccttaaaatccaccaacctctccggccccgccgccatgcctcctcctctctcccactccaagtgcgcctccacattaacctccctagatctatcacaaaacgccctctccggttccctcaacgacatgancgtttgtctcctactgcttcaacctgccatg

SEQ ID NO: 105636 - DNA, 710 bp, Glycine max
  Clone ID: PAT_MRT3847_66405C.1
ccacgcgtccgattctttcttcgatgttgggagaaggggtgttttgattttgaggaatatagtatatgtattcctgatttcgaacaacacttccattaaactctgaagagggtcatgcttgcatttccttatggcgtagaaaagctgatgactttctcattcttcaccgctattcgagcttcccattaccgtactcttactcaggcaacagcttctgataaagggttaatcataacaacacctgattcctggtttgtcaagattgtttctaccctttttctatgctctaactctttggatgataggtttttgggttattttcgtgagcacttaactccttctcatgttttggaggttgttaaaagggttaacaatcccaacctgggtttcaagttctttcggttcactagggagagggtgagtatgtctcactcattttggacttataatatgcttttgagggccctttgtcaagcaggtttacacaattcagcaaaacttctatatgattctatgagggctgatgggcaattgcctgattctaggcttttgggatttttggtttcttcttttgcactggctgacaggtttgatgtttcaaaggaattgcttgctgaagctcactgcaaggggggtcaagtagatgtgattggttataataaccttttgaacatattggtaaaacataatagattagatgatgccctttg

SEQ ID NO: 105637 - DNA, 2050 bp, Glycine max
  unsure (1)..(2050): unsure at all n locations
  Clone ID: PAT_MRT3847_66406C.1
cggttcgagaaactattttttaacgagggggagaaggaaacaaaacaacgaattaacgattgaggttgagttggtgcaaaatctgataatggcagaaacagaagacaaaacccttcaagcctcgcccatgaacgaaaccaagaagatgaagaagaataagaataagaagaagagcgacaaaaaaagacctcgggagattgctaccgaggagcgtccagaggaagaggagaatgagaataatacagatagcgatggagaatcctcgaagaagaagaagaagaagaaggtggaaggagaaagtgaagtgaaagagaaaaaggtgaagaacaatggtggctctggaattatgagcactgagtcatttgaatctctcggattgtctgaacctacttataaagccattatggatatgggattccaccacatgactcagattcaagcgagggcaattccaccacttttgattggaaaagatgttcttggtgctgcaaggactggttctgggaaaactcttgccttcttggctcctgctctggagctgttgtacaatgttaagtttacgcctcgtaatggagctggtgttattgttatatgccctactagagagcttgcaatacagacacatgctgtggccaaggagctgctcaagtatcattcacaaactcttggattggttattggaggttcagctagaaaaattgaagctgaacgcattgctaaagggataaatttattggtaggaactcctggtcgtcttctagatcatcttcaaaacacaaaaggattcatatataaaaacttgaagtgcctcatgattgatgaagctgacaggattttggaagcaaactttgaggaggaaatgaagcagattatcaagatccttccaaagaataggcaaacagctttattttcggctacacaaacaaagaaggttgaggatcttgcccgtctgtcatttcagacgactcctatctatattgatgtagatgatgggagaaccaaggtcacaaatgagggattgcttcagggttatgttgtggttccctgtgccaagcgatttattgttctctattcctttttgaagagacaccagtcaaaanaagtgatggtttttttctcttcatgcaactctgtcaaattccacgcagacattcttaatcttattcaattggactgtttaaatattcatggaaaacaaaagcaacatgccaggactactacgttcttcaacttctgcaaagcagaaaaggggatcttgctctgtactgatgttgctgctcgtggacttgacatacctgatgtggactggattgtgcagtatgatcctcctgatgaaccaaaggaatatatccacagggttggtagaacagctcgtggggaaggtggaaaaggaaatgctttacttttcctgattcctgaagaattgcaatttcttcactatttgaaggcagcaaaggttcccgtgaaagaatatgcgtttgatcataagaagcttgcaaatgtacaatctcaactggagaagttggtggctggcatttatcatttgaatgttatggctaaagatgcatataggtcatatatattagcatataattcacactccatgaaagatatattcaatgttcaccgccttgatttacaggctgttgctgcttcattctgtttttctaacccaccgaaggtgaatctgaacatagatagcagtgcttcaaagcataggaagaaaatacgcaaagtagaaggaaagagaagatgataaaaggcattttctcacggccgtgcagtggtgtgatccccacattctcccacccacaccacaccaccccataaagttttggtaggcaccccaattttatataaagagatggatttgtaactttatcaaacaaccttggttattagaagcatcagaaaatttaaattagaatgtgttatgcgcatttttgaaccgtaatattccacatgacgaccggtgtcccatcccatgttcgaatttgtaagcttattcttttgttgttgaaaattatatcatgaattttcaagcacttgt

SEQ ID NO: 105638 - DNA, 193 bp, Glycine max
  Clone ID: PAT_MRT3847_66407C.1
cactaagggaaatgccttaatcatttatcatccgatgcttatggagcttgcctttgtaatgattgcttgtccccgacttgatactgttcatgcggctgtattaactcttttttctgcaggaactctatcccagaaaattattggtcgtgaaccaaatgctgatcttacgagcaatgctattaacaaggcgccc

SEQ ID NO: 105639 - DNA, 568 bp, Glycine max
  Clone ID: PAT_MRT3847_66408C.1
aagaagataataagaagagcgacaaaaaaagactcgggatattgctacagaggagcgtccagaggaagaggagaatgagaataatacagatagcgatggagaatcctcgaagaagaagaagaagaaggtggaaggagaaagtgaagtggaagagaaaaaggtgaagaacaacggtggctctggaattatgagcaccgagtcatttgaatctctgggattgtctgaacctacttataaagccattatggatatgggattccaccacatgactcagtggtaattgcatgcaacgcatcagaattgatgctaaatcaagaatgcagattcaagcgagggcaattccgccacttttgattggaaaagatgttcttggtgctgcaaggactggttctgggaaaactcttgccttcttaattcctgctctggagctgttgtacaatgttaagtttacgcctcgtaatggagctggtgttattgttatatgcccaactagagagcttgcaatacagacgcatgctgtggccaaggagctgctcaagtatcattctcaaactcttggattagttat

SEQ ID NO: 105640 - DNA, 547 bp, Glycine max
  unsure (1)..(547): unsure at all n locations
  Clone ID: PAT_MRT3847_66409C.1
cantggttatttggaaaaaatttggaccattcggggtaccaaaaccttgaattcaaggacaaagaattttcaaactttggaatggaaacactacctcgnaaaccctacccctcccagaagggaagacactaatttcctttttctccttttcggcccttggggccgaccttggggggccccacctagctagagggcgtttggatggaccctaaccctggtccttctttccagatcccaggaagccgggcatgtcaaagggggcagaaaccttctcaccttcggctttgagatcttcaagggccttgttgtggccggggccctggttgaactccttgggaagttggccttgctccttggggatctccagggggggagtccccgcccggggagggacctcaccagtcggctcaaaggccttttcacccccgcccctataagtcatggggggggccccccttcgcactcccccgggggccagggccctgttttccccaaaaacggcgttctttttaccaggaaggtggcggaggtcccggggttctccccc

SEQ ID NO: 105641 - DNA, 174 bp, Glycine max
  Clone ID: PAT_MRT3847_6640C.1
cttgtgtttgaaaagctccacgattctcttcaatcctccgactttcctaggaatgctgctgcagcacttgctagcaggtatgggatccaagcttggcaagcattcaagtcacggcccccaaaacccagattgcgcaagttctacgagggtggtttcaatctacatgacaggaag

SEQ ID NO: 105642 - DNA, 304 bp, Glycine max
  Clone ID: PAT_MRT3847_66410C.1
agctgattccatcactccctttgtagctataagtgggttggctcacgtagggacctatgctgggtacaaagatagaactttgcatataccaatgtatgacacaagtggggagtgtactgcttggcccgacttaacgtatgataaggatgtctctgctggtgtaggtgcaatagacggtgctgtccaaacgtctaaggacggcgtcacaatatgccataactccattgatcttatcaatgagacagatgttcgcccaatttatgcttcaccaaatttgccatgactattcgtgagatcaaacctt

SEQ ID NO: 105643 - DNA, 303 bp, Glycine max
  Clone ID: PAT_MRT3847_66411C.1
atggtgaagggttgtatgaagcaagaagagggacctaagccatttagagtgctagattgttggtttgagaaagctttgtggcaagagatgaaaattcaagggtgggagccatatgcgttaaaagagaaattgaagcatttcaagaataagcttaaggaatggaatttctcatattttggaaatgtccatgaggcacataagggaattgttgatgagttgaacaagttagataagaaggaggaagttttaccattgaatgaaaaggacttttggttaaggcttaagttgcaagaggacttttag

SEQ ID NO: 105644 - DNA, 513 bp, Glycine max
  Clone ID: PAT_MRT3847_66412C.1
attatcactcgtatgcttggaatccaaatggctgttatgatgggtgccaacttggctggtgaagtagctgatggaaacttctgtgaaaccacaattggctgcaatgacaaagccatggctcctattcttaaagaattgtgccaagccgacttcttcagagttgtggtggttgatgacaggaacacagtggagatttgtggtgccctgaagaacattgttgcctgcgctgcgggtttcacagatggcttaggtctgggagacaacaccaaggctgctgtgatcagattgggtttgatggagatgatcaaatttgttgacactttcttccctggctctaagcttagcactttctttgaaagttgtggagttgctgacttgatcactacttgctatgttggccgcaacaggagggtgtctgaggcatttgtcaagacaggcaagtccatccctgatctggaggcagagatgttgaacggacagaagctgcaagggccaattactgctgaggaatta

SEQ ID NO: 105645 - DNA, 285 bp, Glycine max
  Clone ID: PAT_MRT3847_66413C.1
aaaaaaaaaaaaaaaaaaaaaaaaaaatttaaattttaaaaaaaaaaaaaaaaaaaagacggtcgtttctatatttacacatgacatacctactccctctttcatctaaaatacctctcttatatttactcccatacctaatttactcaccttcttttctcaaaaatcctactttttaaacaattcattacctaacttaatatctctcctacactttctctcttattaacttatcgttataatttattatcccttaccaacacttcttctttacaattttttatt

SEQ ID NO: 105646 - DNA, 286 bp, Glycine max
  Clone ID: PAT_MRT3847_66414C.1
ggttctgggcttttttgggtttggtggaaaaaaagggaaaccttttttttgggaccaaaaaaaggaaattccccccccaaagccggggctaaaagggagaggaccttttgggggttaatttccctttatgggccccgggaccaaaaacccaagggtaggggacccaaaaaaaaagtgttcggtttccggaaagggtgtaaatgggggccccgctcgactggtcgtggcggatgcaatggcgggggggggacaaagggggggcccccccaaaggggggggggtgggg

SEQ ID NO: 105647 - DNA, 200 bp, Glycine max
  Clone ID: PAT_MRT3847_66415C.1
ggtaaaaggcgtggtgtcatagattcacaaataaaggtgaccctgatttcaagatatgttggttttacttttcattgatattcatttcacattttcaagatttagaaaatgggattattttctatttttcaaaaataaaaacgttgaaaatgtgtttgatttaatcgcagcctggaacagtgaccagctttctatctatg

SEQ ID NO: 105648 - DNA, 733 bp, Glycine max
  Clone ID: PAT_MRT3847_66416C.1
cttccaacttctcattggtaagttcagattgtaacatgattctgttctctccctctccccaaaagtgcttgtaactattttatgaatacgaagggtgctcaatatgtttgcattaacgcatacccttttcttgttttccccgtttcatattggattaagcgccaaattttccgaatttgcattatggtattgctagttggaattgcattgcttctgggtctcttcctcgctgttcttctattcaacccacgacaccgtaaatctgggcacaagggaaaagctcaagccagtttaaacgataataaggcatcaaagtcctacagtaaaacagaaatttcattgcataacaagagaacagattgttggataatcatcaagaacaaggtatatgatgttacctcatatgtggaagaacatccaggtggtgattccattcttgcacatgcaggagatgattcaactgaagggttttttggaccacagcatgcaactcgagtctttgacatgattgaagacttctacattggagatttggagcagtagcttagtcagttactccaggaatgtattgttcaagagatgtatgatttgagaatttcaacattctgctgctggttatctccccaattttcacttcttgtgcatggttttgatatatatttgtgcatgaaatcatttgtgctctcttgtggatgtgtgcagaaatagtaaaacaaatgaggttccagtctat

SEQ ID NO: 105649 - DNA, 785 bp, Glycine max
  Clone ID: PAT_MRT3847_66417C.1
cttccgtgtgcgtatgcgaagatgacagatgtggggtgagtggcgacataaataagcatttgcctacgttgttcgtgttggatgcttcccacctctcattgattggattaagcgccaaagtttccgaatttgcataatggtattgctagttgggcttacattgcttttgggtctcttcctcgctgttcttctattcaacccacgacaccgcaaatctgggcataaggcaaaagctcaagccagtttaaacgttgataaggcatcaaaatcctacagtaaaacagaagtttcattgcataacaagagaacagactgttggataatcatcaagaacaaggtatatgatgttacctcatatgtggaagaacatccaggtggtgatgccattcttgcacatgcgggagatgattcaactgaaggattttttggacctcagcatgcaactcgagtctttgacatgattgaagacttctgcattggagatttggagcaatagctaagtcagttgctccaggattgtaatgttcaagagatgtatgatttgagaatttcaactttctagtgcttgttatctccataatttttcactccttgtctgatcatttatcttcattagatagtaattcaggtgtcactgatcgaattaatcccatgcatgatcttgatataattgtgcatgaaatcatttgtgctctcttgtggatgtgtgcagaaatagtaaaacaatgaggctcccctcttcatttcatgtgccaaccaccattattatcctagatttgtctcta

SEQ ID NO: 105650 - DNA, 271 bp, Glycine max
  Clone ID: PAT_MRT3847_66418C.1
gaaagaaggagaacattgcccggaaattaagctttttccaaacataacggggcacaaattttttttggggcaaacgacagccccgaggggaaactttattggggaggaaagcaaattaaggggcatcttctccgggtgaaatttttcagcaaggtgcggctgatcatatgctttgcgacccgtcccaccaaaagttggtttttatgtgtgacggaaaatgcttcactctttttctgcgagcgggggaatggcggatggcttaccttgtctt

SEQ ID NO: 105651 - DNA, 232 bp, Glycine max
  Clone ID: PAT_MRT3847_66419C.1
gtataaacacctacattcagaaagctgacaaaccaatcacatgccaggtcatctacaaactctgaagcacaccctacgattgatggttcctctgcaactggccccataaaacataccatacaaattaacgctggttaattctagatgtcccgctcgcccctatatcctatataataaaagaaaggagctgggagggggattctcaaactgcgctgtactaaatagaaaagca

SEQ ID NO: 105652 - DNA, 272 bp, Glycine max
  Clone ID: PAT_MRT3847_6641C.1
attgaataattttttttttaattttccttaagtgcataactaatcttatgctttcttttatgcaccgggtagtttgtggttgaggccccgtggcggctaaaacctagggttgttgtgaggggggccatgccctttgtagggcgccggataagcctcgtaacccagttttccccgcacgattcctagccgatccagaatggttcgtcgccccgcctaagaatggagaggccttttgccccttcccctagaagtgatacccaatggctgaccct

SEQ ID NO: 105653 - DNA, 2014 bp, Glycine max
  Clone ID: PAT_MRT3847_66420C.1
ggctcgagttttcaccataagccatgaggctccttagcatcatcaccccctccttaacactattcttcatttacatagcgagccagttggctgagaaccacgctgatgttatgcaatggagccaccatcagaaaggtctcgctgtgcagagaaactatgccgttttaattccgaaggacaatactcagaaaaaggttaatctctcgcttcggatggatccttatgcaactaatgataaaacgaaatacagcgacgcgttcttgaacggtctcgagatcttcaaaatcagtgaggctgggtcaaacaaccttgccggacctaacccggacccggttcagactccacacaacaacatacccgccccaaagggaaaccgcaaaagcggaacgacgtcgataatcggcatcgtggcaggtgtggtatccggcgtcgttttgatctcactcatcatccttttcctcatcgtcttcttccgacgcaagacaatcactacgcccaaggactacaacaagtccaagtcctccgcgacctccaagtggggcccactctccttcacaacgaccaagtcaaccaccaccacgaagtcctccctcccctccgatctatgccgccacttctccctcccggagatcaagtccgccaccaacaacttcgacgacgtcttcatcgttggcgtcggcggattcggccacgtgtacaaaggctacatcgacaacggctccacccccgtcgccatcaagcgcctcaagccgggttcacagcaaggcgcgcacgagttcatgaacgagatcgagatgctctcgcagctccgccacctccacctcgtatctctcataggttattgcaacgagaacaacgagatgatcctcgtctacgacttcatggcgcgtggaacgctacgcgatcatctatacaacaccgacaacccccctttgacgtggaagcagcgcttgcagatctgcatcggcgccgcgcgtggactgcattacctccacaccggcgcgaagcacacgatcatccaccgcgacgtgaaaactaccaacattttgttggatgataagtgggtggccaaggtttcggacttcgggctttcgagaatcgggcccacgggcaacgccaaggcccacgtcagcaccgttgtgaaaggcagcattgggtatttggacccggagtattataaacgacagcgtttaactgagaaatctgacgtgtattcctttggagtggtgctgtttgagttactctgcgctcgtccgcctctgatcagaactgcggagaagaaacaggtgtcgcttgctgattgggcgaggcactgctgccaaaatgggaccataggccagattgtggaccccactttaaaggggaggatggcgccagagtgtttgaggaaattctgcgaggttgcggtgagttgtttgttggacgacggaacgctgaggccgtcgatgaacgacgtcgtttggatgctggagtttgcgttgcagttgcaggagagtgctgagcagcgtgaaaatactaatattgttgataatgaaattaatgagagaagagaggaggaggctagtgatgatttgtttagtactggaaccagtgtgggccaggtttcggattttaacaagagtagcggtgtggtgagtgtgagtactgatagcgaagagcttagtagtagctacaaagagagtgataagttgatgtctgggactgttttctctgagattgtggatccaaagccacgttgagagaatcaaattgatctcaagaatgaagacctaatactactagggctagcttgaggctcgcaagttatgtgtttagtttcataatatatagttgtaatattacaatgtctgtgtacagaaatcaagttgcttctatctcttgggaatctagacaagtgcaaaggttaattggttggtaagtcataaatttcaatcatttttgtaaccagcctatgtgttacgtgttcaatcattattataacattttttttgtccaaaaaaaaaaaaaaaagggc

SEQ ID NO: 105654 - DNA, 118 bp, Glycine max
  Clone ID: PAT_MRT3847_66421C.1
gtcactctttcgaacataccatgcaattgctctacttattccgtttttcattgccacgtggtggaatccctacgaagacgaattgcattgataaacgcatatagtgatgttgtgtatt

SEQ ID NO: 105655 - DNA, 618 bp, Glycine max
  Clone ID: PAT_MRT3847_66422C.1
aaaaacatgatgttcattttccttacttctttaacacaaatatagatatcttctcaaagtattgcatgtgattatctttccaaatagaaattttctgtattggtttcctatggttctgcatcttctaaaaattctaaaaaaatgtatgctggttctttctggattggattctacataacttaacagtcctaacctgactaacttcagaaaaatatgtgtatgcaagagtaaacaatttcccccctttcaataaatattgaattctcttcttattatgcagactgctttgctcacataggcctcaattccccaaagaaaggtacattaaaatcaatgctttgttatgcttgtatgaatatgtactctcatcttgttctttagtctatccctggttgattcattgtatatttgtattacacttcagtgctagtgtagattgcatcattgttaaccagatacattcattatgttcatgtgtcagttaacatcttggtcatttcaaaatatggagcgagtggagattatcctccttgtactgacttggcatatgaaaaaactatttcagatgggggtgtgttcttgacctgccttgtcaaaatgtcaaagatgggataccct

SEQ ID NO: 105656 - DNA, 1311 bp, Glycine max
  Clone ID: PAT_MRT3847_66423C.1
cattgcgtccgcgacaccgccgcagttaccgccacctcaatgtcttcacgcccacttcaccgaggacgcggcagaggcttctccggccgcccctactccggcgacgcgcacttacgctccgtccgcgacgccaatttaggactccgccgtggggttggcggaagcttcctgaaccaaacgccgcaccatcagaatccgccttacaatccgaggcctcatccgccgccgccgcctcaccatcatcggcctcagttccgtccatatccgcctcagttccgtccgcctccgccgcagtttcgtccgcatccgatgcaatttcgtccgcctccgccgtctgatcaccggccggcgtttcgtccgccgcagcatcttcggccacgaccgccagattatcgagactgggagcttgcttggactccgccgccgcctcctcattgtgagcgtaaggaagttctttcctataatatattggctgatgccctggcttttgtctgcgggaataatctttattttcacatacctcgactattttactttatgtcgtggaggaagtgaggcatattttttgagctggggatggggtctgctgatatcttgtgtttacaggaggttgatagatatcatgagttggaagaggagttgaagcctaagggatatagcggcatctggaagatgcgtacaggtaatccagttgatggctgtgcaatcttttggcgtaactcaaggttcaaactgttatacgaagaatgcattgagtttaataagctgggactcagggataatgttgctcaactatgtgtactagaattcattaatcaaaatggatctctcccatccagcttgacagggtctagtaaagttgtggtttgcaacattcatgtgctttacaatcctaacaggggagaaattaagcttggccaggttcgagtgctgcttgataaggctaaagccgtttctaaactctggaatgatgcccctgtagctatctgtggggattttaattgtactcccaagagtccattatataactttatatcagaacagaagttagatctgtccggaatagataggaataaggtatcaggacaagcttctgctacaattcatgcatcaaagctctattatggtcctaattctagtgaaatatctgctaatggttcagttcaggcaacatccactgaaggtgacaaagaagacattgaacaaaataattctcggttggacacgagggacctggacactaaatgtcacagtttggataatcaacatactcagactgtttcagatatgtctgttaactcttgtacaaat

SEQ ID NO: 105657 - DNA, 268 bp, Glycine max
  unsure (1)..(268): unsure at all n locations
  Clone ID: PAT_MRT3847_66424C.1
ccaaaaggnncgtattgatgtcaaggctttcaattctgatggatcttactacaagctttcgggcattgttgaacatgactnccagacagaacaaaggtggttcatttccagccgcacacattgttcattaatagatttggnttagtctctgcctgcagcaatgtgatactcagtcagctgtatggattcatcccacggattctccaaagccttttgcttggcagttatcagccaaagttgaacttctgaagttgcgcattgatggcta

SEQ ID NO: 105658 - DNA, 348 bp, Glycine max
  Clone ID: PAT_MRT3847_66425C.1
tacaatgggaggaagggggtgaaatccacatcctaattaccagaggagtttcagatatgcaaagaaggcatagactaaactctgaaccctacttgagtatactacacctaatttctatccagataagacagatgatgatctagtacatggccttcatataagatggcaatcttagatgactctctaccacattgcttgagctagaaactctagaggatacacaggatgggtgtatagcccatctggagactgaccatacgcttctactcaccaaaatctaagaacttggccgagagatcattaattgttgtacttacctgagcaggacatcttcttcaactgggaact

SEQ ID NO: 105659 - DNA, 256 bp, Glycine max
  unsure (1)..(256): unsure at all n locations
  Clone ID: PAT_MRT3847_66426C.1
cctaattcaagcattataaaaaagtgcttcagtgccacaattttttcatccttccttagctccattttgtatgatncaacantnggattttacangnactancattcattccgtaggaaacaacgactacagagactcctacagacttaaatcaggtgatgccctgagagttccctgaagaaccacatactatgtagttaaccctaacgacaaccaatatcagattaataactttcgccatacccgttaacaagac

SEQ ID NO: 105660 - DNA, 186 bp, Glycine max
  Clone ID: PAT_MRT3847_66427C.1
ttttattaatggttttttttttacatgaaaagagtcattctgtggaagaattttacctgtataaaaggaaaattgcctcaattggggcctacagcacactgttggccaaacttaattacctgggacagaggacacccaaacttttttttgcagaaaggttgcgcattttttttgtaaagagtcccc

SEQ ID NO: 105661 - DNA, 477 bp, Glycine max
  Clone ID: PAT_MRT3847_66428C.1
caatgaagactttttcctatactaatagatttcataccgatatatttgtttcttctgctgacaattttgttatgtgtgcacttaggagaatactcgtcaaaggtttatcatcctattttcgttgatcggatcgccacacccggctttcctgactgacttaccaccaacccaatatcgatgaaaaaacacgcctacctctgacaaggacgtgaacgaagctccaatgagtcgctcctctctggaatgagggccggaccgtcaattcatctagtcactacctacgctataactgatcctcggacggagccatacctgtgttaccaaaacttgctagccgacaccggctaccgcaaagggttcagttggtgggttgaaatctcgtcacttcttttgaaagtcaaaaacactccttgccgctgccaaacatgtatgttgaagtctcgggtaatcctagatcaatcatagagctggggcctt

SEQ ID NO: 105662 - DNA, 484 bp, Glycine max
  Clone ID: PAT_MRT3847_66429C.1
cttttggttataaaagatgaaaagtgatggatctcagaatcgtcactggctagtgaaatatgctcaggtcatatgattgatattccatgcacattttggggttacaactttcaatggattaatttctgcagttgtacaactttcaatgcattaatttctgcagttctgctgccagagcggggagctcggttgcttcctcaatgatccctccttatcctggtagcaatgctcgtgcccgtgatagagtccaggctcttcaggcatactatcaaccacagcaacctcctaattcaaccacaatgcggacacctatcgcttctggcacccgaagatccagtagtcataatggaccagctcaattagctccaatggccacatcgccagaccaaggtggtggcttctttcttatcccatcaagttcatcaggacgcaattttcaagaagaaaatcatcatctaccaaatcacttccatgcttgggaaag

SEQ ID NO: 105663 - DNA, 475 bp, Glycine max
  Clone ID: PAT_MRT3847_6642C.1
ccgattatgcttgcccaccattccggttccggagattacttttttgcggcggtgctggtggcggagactccgcgccggaatataccttcccacgcctcctcctccatctccctcaccttcttcttcttcttcgctgtagcgttcaaaacaacgtgatctctcttgcattctctggttcggttcttctcgtcgttttatcgatccggcttctagaacttccctttctcattgcttctcctctctctcgcctaagcgagaaatttcctagctgatttggctcgattcgtcttttccttgttcaattccatttttcaggtcttggttctttctttttctttaacccctaatttatgtataaaaaaatttatgctttagcattctgcattcgctgaggacgcgttgtctgcaatagtgtcttcgctttgtttttttttttttataaaaaaattaatatttttggggagggtcaggaaaa

SEQ ID NO: 105664 - DNA, 1139 bp, Glycine max
  Clone ID: PAT_MRT3847_66430C.1
gagctcggttgcttcctcaatgatccctccttatcctggtacatccgaaccacccctggctggcctttgactaccaggggatactgatggctgggctgcgtctcattcctgtcctttctcagacaacaccatctctctctctcttgttccctttttagggtttttgtaatgggtctcggtaacgacgaagaagaggataacaataacaataaggttgtggatgacggagatgttggaggaggaaagtctttcggttcagtgtcgcgttggttcagcattcaacataaaaggagcaatgcagtgccctaattgtcggaagattgagaaaggtcaatggctatatgctaatggttgtcgctcatatcctgaatttagcatggatgagtggactcacgatgaggatctttatgatcttagctactctgagatgtcctttggagttcattggtgcccttttggcaacctggcacgacttccatcatccttcgaggaaggggaattttcatcatctgcgtatcatgatgtattgggacaacatgccatatttgctgaacatacagctgtgtcatctgccagccatccttgcccgtatattgcttactttggaccaatacatccatcctcctccaattctggtggaactgtatcagaagcttcaaacttcaaccattggaatggctcgtctgtgcccagtgacatgccaacttcctacacatttcctgctgttgatcttcattatcgcagttgggaacaccactcccctcctttctctacagcaactagtcgtctacttgctgtagagaaaggaggggagtggtgttccaagatcaggatcttttatgcatcccttccttgttggtcacagagcggggagctcggttgcttcctcaatgatccctccttatcctggtagcaatgctcgtgcccgtgatagagtccaggctcttcaggcatactatcaaccacagcaacctcctaattcaaccacaatgcggacacctatcgcttctggcacccgaagatccagtagtcataatggaccagctcaattagctccaatggccacatcgccagaccaaggtggtggcttctttcttatcccatcaagttcatcaggacgcaattttcaagaagaaaat

SEQ ID NO: 105665 - DNA, 2106 bp, Glycine max
  Clone ID: PAT_MRT3847_66431C.1
aaagacttgagatctcagattacaccctttctcggctcgtcttcggaaataaaaaaatcccaaagaaattcaatcttcttcatccccaaaccaaagacttgagatctcagattacaccctttcttcctttgttttctcattcctgtcctttctcagacaacaccatctctctctctcttgttccctttttagggtttttgtaatgggtctcggtaacgacgaagaagaggataacaataacaatgataaggttgtggatgacggagatgttggaggaggaaagtctttcggttcagtgtcgtgttccatttgcctcgaggttgttgccgataatggggatagatcctggtctaagcttcaatgcggtcatcaatttcacctcgattgcattggttcagcattcaacataaaaggagcaatgcagtgccctaattgtcggaagattgagaaaggtcaatggctatatgctaatggttgtcgctcatatcctgaatttagcatggatgagtggactcacgatgaggatctttatgatcttagctactctgagatgtcctttggagttcattggtgcccttttggcaacctggcacgacttccatcatccttcgaggaaggggaattttcatcatctgcgtatcatgatgtattgggacaacatgccatatttgctgaacatacagctgtgtcatctgccagccatccttgcccgtatattgcttactttggaccaatacatccatcctcctccaattctggtggaactgtatcagaagcttcaaacttcaaccattggaatggctcgtctgtgcccagtgacatgccaacttcctacacatttcctgctgttgatcttcattatcgcagttgggaacaccactcccctcctttctctacagcaagtagtcgtctagttgctgcagatcagccatcagtatcccctggtagtcaaaggccagccaggggtggttcggatgtaccaagatcaggatcttttatgcatcccttccttgttggtcacagttctgctgccagagcggggagctcggttgcttcctcaatgatccctccttatcctggtagcaatgctcgtgcccgtgatagagtccaggctcttcaggcatactatcaaccacagcaacctcctaattcaaccacaatgcggacacctatcgcttctggcacccgaagatccagtagtcataatggaccagctcaattagctccaatggccacatcgccagaccaaggtggtggcttctttcttatcccatcaagttcatcaggacgcaattttcaagaagaaaatcatcatctaccaaatcacttccatgcttgggaaagagaccacttgccttcattatcattgaaccatgttgatagagattcaggttggagagcataccaccaggctaccagccggtcagacccagctaccaggtccagcagctttcgtttaaggcacggatcagatagaatgccttcacaaaatcggtaatacacttgtatcctgttcactgtgaagcaaactaccattactatggaaagttatgtatgctttgaaaaatgttacatattgctttggcacttcggcctttgggtctgtcctgttatgacagactatatactctggctggccttggaattgatttttccatagccaccggtgtgatggacatttgcttcctctagtttatttgccccggtgggcataaaataagatggtatatctagttggggaaatcaggttttggaagaaatactgggacgttgtgatttcaagtggtgaatcaagtggacgaaagcagctgtggctggatttgtagtgggtcaactatttatgtttgataacaacgctcatgcaaatgctgtgtattgagaatacaattttacttctactccatggcaagagtgatttgtaaactgttgtgcaagaattgagccaaggtatatggtaatggaactcgcatgagaactaccatacctcggaataataggagttcaaaggctggttttaaaacaatcgtataactggtttttttataaaatattatttcaaaaccaaaaaaaaaaaaaaaaaaaaaaaaaaaaaaaaaaaaacacgcc

SEQ ID NO: 105666 - DNA, 1736 bp, Glycine max
  Clone ID: PAT_MRT3847_66432C.1
cggacgcgtgggtagccagtgagaaactcctcattctccttcttcttctgctacccatggctttgtcttcttctgagcctcctccaccttcagttcctgctcccgttcaatctaaccctcctccacacttgatgtacaaaaatcgtttacaagagtttacttcaaagtcaggcattaactttcctgtgtatcagaccattaatgagggacaggatcatagtccaaaatttaggtcgactgtgtgggtcgctgatatgggttacacttcccaatccacattttcccataaaaaagctgctgagcaggaggcagctagacttgctttggaaagtatccttaagaggaccagagatgaaggactctctcttgtcaatcagatttctccattttccaagtctatcatgaatgagtacgctgacaaactgcatgtagaacaacctacatacaacactgatcagcaacagctaggaggggtgcttcctatctttataacttctttagtttccaatggtacaagttacactggtgatccagctagaacaaaaaaggaagctgagcagtcagccgcaaaggctgcaattctttcaattatgggtgattctagctcgggaactgtgcttgttgagattattaagtcaaagtctatattttatgatgcaatcaaaggaaagggacgatctctgtcacagcctagtgcagtgttatccacaacaaatgcaggacagatctctattacactggatcataaagatacagaagttgcagcttgtgtggctgataataataataatgagactaaagttgaatttcctgagtttcctaagatgctttccacatgtcaagaactccaaatgatacatcaagaatcttcccttgaagccaataatgtctctttgcagccgggttcagaacattccattgataatgattcaacttcaaaaaagcggaaaaagaacaagaagaagtctaataagaagttacggtcacagactccgctgtcaccgattactggggttcccttgaaccaagtccctccacgtactggagttctcatgaaccaagttactccttgttctacatttctcatgaaccaagttcctccttgtactgctgttcccatgaaccaagttcctccttgtactgcagttcccatgagccaactttatgctcgtacttctcccatggaccaagtccctcctcgtacagctcccatgaaccaagttatgccgtgtactgcagctcccatggaccaaggtcctcctcgtactgcagctcccatgaaccaagttccaccgtgtagtgcatttcccatgattcaagtcgctccttgtacttcagctactgcagctccgatgaaccaagttccccctgcagctccgatgaaccaagttcccccttgcactgcagcttccatgaacaaagtccctcttttataggtggcacagtaaaaatgtaaagtgtgatgaaattcttgtgtatgttgcaaactctcagactagagttcatggagagaaaaccgcagatccttgttaaaatttaggaattgttgttaaaatccttctttagtggccgtttttgtttattaagcccgtgtctttcatgttttgggcttcaaactttatatcatgttaaaattgatcttcaaatgttatatcatgttacaattgatattgtatgtttacctaatggtgtcatacattattggttggatttgaacttaaataaatgtacttgtt

SEQ ID NO: 105667 - DNA, 1857 bp, Glycine max
  Clone ID: PAT_MRT3847_66433C.1
ttcatttgtacgcccacgcgtccgctttttcgtttgttttctcatccctgtcctaactccatttcatttaaacgccgtcgttccctctctcgctcttgttccgattttagggtttttctaatgggtctcggtaacgatgaagaagaggacaataacaacaacaataataataataagaataacaatgataaggttgtggatgacggagatgctggaggaggaaagtctttcggttcagtgtcgtgttccatttgcctcgaggttgttgccgataatggggatagatcctggtctaagcttcaatgcggtcatcaatttcatctcgattgcattggttcggcattcaacataaaaggagcaatgcagtgccctaattgtcggaagattgagaaaggtcaatggctatatgctaatggttgtcggtcatatcctgaatttagcatggatgagtggactcacgatgaggacctttatgatcttagctactctgagatgtcctttggagttcattggtgcccttttggcaacctggcacgacttccatcatcctttgaggaaggggagttttcgtcatctgcatatcatgatgtattgggacaacatgctatatttgctgaacatacagctgtgtcatctgccagtcatccttgcccgtatattgcttactttggaccaatacatccatcctcctcgaattcgggtggaactgtatcagaagcttcaaacttcaaccattggaatggttcatctgtgcccagtgacatgccaacttcctacacatttcctgctgtggatcttcattatcacagttgggaacaccactcccctcctttctctacagcaagtagtcgtctagttgctgctgatcagccatcagtatcccctggtagtcaaaggccagccaggggtggttcggatgtaccaagatcaggatcttttatgcatcccttccttgttggtcacagagtggggagctcggttgcttcctcaatgatccctccttatcctggtagcaatgctcggacccgtgatagagtccaggctcttcaggcgtactatcaaccacagcaacctcctaattcaaccacaatgcggacacctattgcttctggcacccgaagatccagtagtcataatggatctcctcaattagccccaataaccacatcgtcagaccaaagtggtggcttctttcttatcccatcaagttcatcaggacacaattttcaagaagaaaatcatcatctaccaaatcacttccatgcttgggaaagagaccacttgccttcgttgtcattgagccatgtcgatagagattcaggttggagagcgtaccaccaggccaccagccggtcagacccaggtaccaggtccagcagctttcgtttgaggcatggatcggatagaacgccttcacaaaatcggtaatacacttgtatcctgttcactgtgaagcaaactaccattactatggaaaattatgtatgctttgaaaaatgttacatattgctttggcactttggcctttgggtctgtcctgttatgacagtatatactctggctggccttggaattgatttttccatagccaccagtgtgatggacatttgcttcctctagttttatttgccctggtgggcataaaataagatggtgtatctagttggggaaatcaggttttggaagaaatactggggcgttgtgatttcaagtgatgatgaatcaagtggatgaaagcagctgtggttggatttgtagtgggtcaactatttatgtttgataatgacactcatgcaattgctgtgtatttgagaatacaagtacttttacttctaccccatggcaagagtgatttgt

SEQ ID NO: 105668 - DNA, 262 bp, Glycine max
  Clone ID: PAT_MRT3847_66434C.1
cttcctttaaaaaaaaaaaaaattttaaaaaaaaaaaaaaaaaaaaaaagggggaaaaaaatttaaaattccggctcccttctcttgctccagcttctcctcttctttccgctcataaatctttttttgtccctgttttcctcgctgccctttgtattcaacatctttcccgtataacccccttgctcccatttatttttcccgcttacatcatacttttgccggctgttttcattcccaattggaccaaacccctggcctt

SEQ ID NO: 105669 - DNA, 713 bp, Glycine max
  Clone ID: PAT_MRT3847_66435C.1
gcacacttgatgtacaaaaatcgtttacaagagtttccttcaaagtcaggcattaaccttcctgtgtatcagaccacttaatgagggacaggactcacagtccaaaatttaaggtcgactgtgtgggtcgctgatatgggttacacttcccaatccacattttcccataaaaaagctgctgagcaggaggcagctagacttgctttggaaagtatccttaagaggaccagagatgaaggactctctcttgtcaatcaggtgtgaacaatttttcgttaataataattttatgcttagaataatcttgtctattcgaatagattttctataataaattaagtgtgcttctgcatgttatatttttattggataaaaataaatagctggtgaaatagctttaatacttaattatgcatttatgctttaattaagatttgtcattgcttcattttggtttggtttggtattatcattcaatattatctttatataaaatgttgattctttgttgtcattgtcttccagatttctccattttccaagtctatcatgaatgagtacgctgacaaactgcatgtagaacaacctacatacaacacttgatcagcaacagctaggaaggggtgcttcctatctttataacttctttagttttcaatggtacaagttacactgggtgatccagcttagacaaaaaaggagctgagcagtca

SEQ ID NO: 105670 - DNA, 152 bp, Glycine max
  unsure (1)..(152): unsure at all n locations
  Clone ID: PAT_MRT3847_66436C.1
ggcggataaatcagacatatgcctcgtccactgcgtatacanctacatgatgggcttctgctaatgtccgaggggacccctctcccatattataaggatcactcacaatctgctacagttgcttatctccactaacagtctatacagccatt

SEQ ID NO: 105671 - DNA, 1723 bp, Glycine max
  Clone ID: PAT_MRT3847_66437C.1
cgcagctccgttgtctttggtgcagctactagctggacatgcccggaaggtgagcgctgttcggtttggccgcataaataacatggatgaaatgttggagactaaagtaactcgcatggtccccaaaatcatgaaaagaaaatggagcagtgatgagaactcggacaatgatgcagaataggacggagttgcataagcaaagatgccacaggatcacattcctagtgaatatttagttgatcaggaaaagcataacagaggttaagtttgttcgttcttcatatttttctcctttctttatacctggcatgctttggtgccatttttgcaacagcctatgagatggaaaaattgagatacatgtacaaaatgagaagcaatgagttcaagcatgtaaaaccttgcaaaagacgaattagaggcatctttgataacgaaagtctttaaagatttggtgtaataaagaagctaagtttgatctaaaattgttgatgatattgcaattgataaaagtggcaatatggtagactttacaggatatgatgtcaaatgtgtgtaagataaaagacacacatgtcagagaggttatgacacctcttgttgatgttgttgcaattgatgcaagttcaagcctggtagactttcatcacttgtgggtcacacatcagtactcaagggtacctgtttttgagcaacgtgttgataatataatgggtatagcatatgcaatggatctgctggattatgttcaaaagggtgagttgctagaaagtactacggttggagatatggctcacaaacctgcttattttgtacctgattcaatgtctgtttggaatcttcttagagagttcagaatcaggaaggttcacatggcggttgttcttaacgagtatggtggaactgtggggattgtaacactcgaagatgttgttgaggaaattgttggtgaaatatttgatgaaaatgactcaaaggaggagatacagaaaaaaactggttacattgtaatgcgagctgagggtgtttttgatgtggatgcaaacacatccattgatcagctctctgaagatttgaacatcaagatgccagagggtcaccaatatgagacggtatcaggctttgtgtgtgaagcatttggatacattccaaggacaggtgagtgcatcaaagtagttcttgaaagggaagatgaagatgataacaatgagtccaatgctgaccagcaggatcagaaggagaagaaccagagtttcaaacttgagatactagctggaaatgccagaaaggtgagcgctgttcggtttgaacccataaataataatgatgaaatgttggagactaaagtaactcgcatgatccccaaaatcatgaaaagaaaatggaggagtgatgcaaactcagacaatgatgcagaatatgacggagatacatttgcaaagacaccacaggatgacatttctagtgaatatttagttgatcaggaaaattctaacagaggttaagtttgtccgttattcatattttttctcctttctttatacctggcatgcttttgtgccatttttgcaacagcctataagatgaaaaaattgagatacatgttcaaaatgagaagcaatgagttcaagcatgtaaaaccttgcaaaagacgaatttgaggcgtctttgctaacgaaagtctttggtataataaagatgtcaggtttgatcaaaaaaaaaa

SEQ ID NO: 105672 - DNA, 389 bp, Glycine max
  unsure (1)..(389): unsure at all n locations
  Clone ID: PAT_MRT3847_66438C.1
aacaccagacatatggatctagtacaagttctaactgctggtatctcaataccaaccttacagtcagtgaatatattggctgcggttttggcgtacagtgtcgttgcttctctaatcatcccaggaccatactttttaggagcaccattgaaggataaccgcccacgtgtcaattatagactcaatggcctacgtgtccacatcctcgcgatgatactttacgtcgttggaagcgactatggtctaaatttatacagggctaccattattcacgataactatggagccctcctcacaaccacagntgtttgggctttctttgtctcagcttacctttatgttagagcaacgttcatgatttcaaagatcgaccaaaactatcactcaag

SEQ ID NO: 105673 - DNA, 987 bp, Glycine max
  Clone ID: PAT_MRT3847_66439C.1
gaaggggcaatgtgcaaggtaagggcatatattctttatagttaacaacaacaagctccttatgttatttgagaaaacaaaagtgggtcaaaattgaactttcaattcttacagggcattgtatccttaacttactaatactatacactaacatcagaactattttttcttacatgccttttcttgaacttccaaaactcatctttctgcctcctcactttcacacccattttacttttaattataccaagcaaggaactccaatccttgtttttccgtgcaggtctggtctccaaaagggcctgaagcgtctggtatgaaccaccatccatcatctgcccactcttgatcatctgcttgtgataaaaaaatgcccgccgaaaatctcgaactcggacaaaggcaaatatcatagttgaataagttacagaatcgggttttaatttaagaactgccatctctttcaatagttgtggcagctttgagtgttgccctccacgtgcgtatgcatttatcagcatattgtaagtcaccactgttggtttcaatccaactttcccaaattcagatattacctctcttgcttccatgaagagaccttgtttcgcaaaaccatcaacaagaatgttgaatgtcgcccctgttccttcaactttctcactgatcatcaacttccatatttccattaatgtttgagcatcacctgcatgcctaaatgcatttagtaaagtagtgtaggtttctatggaaggtttaataccttcgtttttgcatgttttcaaatgctgcataagctttctcgtgcaagctcctgtccgagcttgctcgggccagccccgtaccggactggcatggggctgtgccgcctacgttcgtcatctgcgtgtttgccccgcctgctgcctcgtcacgcatgctcctgcgcctgccatgcgcgtgcattagacaagtatatgatgtggcatttggcttcaagccaacatcctg

SEQ ID NO: 105674 - DNA, 217 bp, Glycine max
  unsure (1)..(217): unsure at all n locations
  Clone ID: PAT_MRT3847_6643C.1
gtcgcangcncgcgtncgtnagctcggnnttcggctcgagnttgaacntnnttccatagaaggcaantcanttgtncaaatntccngcntgtntcaagaggtgtacaatnctncaatctataatcctntcagaaaaagtcntgcntcttaatttgcagatnagatccgtgacntaagttgtntnnttttnnngtttgttatgattntccatccnctn

SEQ ID NO: 105675 - DNA, 565 bp, Glycine max
  Clone ID: PAT_MRT3847_66440C.1
aaagaaccaatcttgattcaaagtttgaagaaaactaatttaaaagaaaaataatgtaggagacaaacatgttcaaataaagacaatttctgtcaaaaaaataaacacatgttgattgtatttagtaaaaaaagaaacatttttacttttaaattatatcgttagactattatcttgctttaatttaaaagaatatttattttctgttacataaacactagcaaaatttattctgaaaggatttactataatattattgttatattttataaaacattaaaactgtcacaaaaatttagaagatatgaacattaaagctgtttagatcccttgtacatcttgatggaaatccattgaagaaacaatgggacaaacatcatggaaatgccataaaaatgatcccatcccataccagatctgagagatgatgaattttcgaatatttgattttagcattgcaaacatttaataagttgttggtgctaatcctcttgagttcaagaaaccaagtcaaacccttagttttaaatggaataccagctgcacaaaattagcaagtgaaaaa

SEQ ID NO: 105676 - DNA, 197 bp, Glycine max
  Clone ID: PAT_MRT3847_66441C.1
gttcaaaacagttctttttgtttcagtacagactccacgaaaaaattgaacccggagggccccctattaaaggctttaaaagggccacctttgacataaataattgcctaggaaggttttatagatattccaccggttcagggggtaacctaacttttggctaacaggttcgtgagttgctccattctaacctagca

SEQ ID NO: 105677 - DNA, 356 bp, Glycine max
  Clone ID: PAT_MRT3847_66442C.1
ggcccaagccttccttaaattaaaaaggctcccaaaattttttcggggggtcccttaaaaaagccttcctttagtctactaaaaaagaggggaaaggtacttgggatactaacccattcttcaactaaactggcctaactaataacgggggaaaataatgcttgcccccagaagatgatttccccaaacgacccagtttcttggtacccggcccaaattcatttgacccccctggcccaggggagaaaaaattaaatgctgtgagcccaagacaggccccccgtcaaaaaataaaccgggggaataaatccccccttcctggtgacttggagaacaagaaagcttggccctgggat

SEQ ID NO: 105678 - DNA, 344 bp, Glycine max
  unsure (1)..(344): unsure at all n locations
  Clone ID: PAT_MRT3847_66443C.1
aacaaancaaccccgccattccccacatttaaaaccacacaacanntncttctccttcttctaaccttcacccaacttctcatcttaccataaccttctactacaaaatttactcattcaaacaaccaactctanaaccccaatattaactacactcacttctctaaaatcaaacatatctaccttcnatactatctctattataattaccaaataaaccaaacaatcatcatataaattaacaaaacacattatcaaacacgtaactcttaacatccactcacaaattctactaaattaactaaaaaaaacacctgtccattcaattttacaaaaacttacta

SEQ ID NO: 105679 - DNA, 283 bp, Glycine max
  Clone ID: PAT_MRT3847_66444C.1
agaacacaagaaattatatcacaatcagatccatataactatgacattgctgctgtacactctaccatcgctcatacctaactatgaatagtccacacctcaaactggaacagtccctggtcaagattaccactaagtgcgtcccccagaatcttcaccatctacggatgaaggatacaactttacatacaaagctcctaatacttcaagtcacatacacagatggatttaagcctaacattgacatcgattttagatgagggtttctcatgggaagataact

SEQ ID NO: 105680 - DNA, 2389 bp, Glycine max
  Clone ID: PAT_MRT3847_66445C.1
ggttcaccacacatagggtgggttggggttagcttcgcgattcttatttctctctttaactctctctctctctcgtcctcgcggatggagagagagaaagtaagagagaaagagcggtggttggtggttttggtttggtgaagttcgattcgatgcgatgcgattgcgttggggattttgattctctctctctcactgtgcggtctctaattcgcttggtgcaggtcgggaaccggttttcgcgcggaatggaggaacggtcgccggcggcgaattggatcccgccttgcatcaactgaatcggaggccgcggtgaagctttgcctcgttttccgctcagatctcatctccgagattctaccaccagtattttttaaatttattttaatctctgcttatcagatccgaaacgcttctagatttaagtttatcgtctctatgcagaaagtgtgatttatgcggtagatcccgatgcacagaatctacatctaagagaaatagttttagttaaaaagcttctgatgtgctttttccttgtatggatttttacttgacctgcttcctttcattgattaataatcaagctgaaattttttatattttgaaactgaaataaataatcttggatttattacactaatgaatttactgtatcggtataggttaagctaattgaggtgattgcgattcgattgggaaaaaaaaaacattttttaggttttctgatgaattaagagccttggatgaattgtattgcatgccacggtttgaagtgattaatgtgaagcataccgttgcgatgcttatacttgatctagtacaaactatttcatggtgtttgatattacttttagaaaagtgggcttctactcgatgaagcatttgtaagtgaattgtgtagcaggaattgatgacctgtttggggcatgatttgagtatctggctctctgtgtaactagcttctagacatagaaacccaagttaagacttgaggatggcttcaaattgcatactagctatgtcaaagcagttgatcttctttgtgtccattctccttgagataaatgtgaatgtttaattaattaagcaccgggactttcatatatcaaaatgcttcgcgacttcagtcaatttatttctaaaatcatgtgaattgaagtaacattttcctggtgtagcttaagatgaatatatcccatgcggatagtatttattactctacctggttctaacacttatccaataaaaaccttgtgaccatcttctaatatgttgtcaaatgagaaatttaacactattgacatctttggattaggtctgtttatttctgggatggggcgtttaggtaagcgccaagtttacattcatctgagaacttacgtgcgttcatttaagtctagaagagatttacttattctatgtttcttgccagttatggtgcattgattgtttgtttcttttttctcagttaacagactgctaactttattaattcatttactttgtcttgtcttgtaagttagaagaaattatgaatgctaagttaacctatttgttctgatgtatgatgtttttctgatcattggatctcggactaattaattcttcaatgattgatgcataatactataacacatagcaggttggccgctattctaaagttgtgaaatacacatggaataatttatactccacatttataaatgctgaaaataaaacccacacttttaagatatttatatgattaaaaatcaggaattgaagcttaataatactttatgtgagtgatgtcaataacaatagagagaacagagcagggtcacagactaaaaagagaacagaagtgagcaggtagcagaggtctttgctttgctagaaaatgctgaaagatgccgggatacatgttggagaaaagtgagtgtttgtccagagaatgatataaaggattagagtgaactgaacagaggttgcagaggcgggtaggaaaatgctggaaatcaccagagaagaacggtgttcgtttagggagacaacacaaagttatgtccctgaaagcatagggtttcagtttgaaccttttgctttaatgaaaggggatgagaaataattatgtgtttgccccctaaacagctgtaaatgatgttatttagtgcagtgaaattggatttttgatgctgttacctgtcaagccacctgcgattttgttattcaaacccctatagaggtgatgaccgctgcattgccaaactgtaatgcaggtttttttatgtagcgtcaaatggtgtgcccccatgccatgatatagtggcatgatctagcactattgacgtctgtggatttgtgtgttagttatgtatcgtatggaaaaatgcctagatacataatttcc

SEQ ID NO: 105681 - DNA, 282 bp, Glycine max
  Clone ID: PAT_MRT3847_66446C.1
agaggggaaaaaaaatattaataaagggggtggcccgtaggctagtgaatcatagggcctcatatattatatattccatgttttacagagataagaggggggctttttttgacatccctcaggataattttccacagttccggggtttcaaattatgcaagaatagcccgccccccatgatgaccggcaatgaaatgaaagaattaattgaacaacatttcacgtttacaccttatcattgagctataccctttggttaaatcccaaaaaaaaatgtttttt

SEQ ID NO: 105682 - DNA, 443 bp, Glycine max
  Clone ID: PAT_MRT3847_66447C.1
cccatttgtattacccccttttccttttttcctatttgggggtaattttaaaaaattttcgcgtttttaaccctcaattttttatttttcttaattttatcttatccataacacaaaaacagcgggaagaccaaaaaaaaacccccaccaaaacccccccccaccaaaagaaaaaacaaacaaaatttccccccccatcactcataaaaaaaccggcctacaaaaaaacattccccaccaaaaaaaggtcaccccccccccaaaaaccccgaaaaccaaaattcatcaaaaaacgggggggcccccacccccccaaattttcaaaaaacccgcctgaccagtcttcaccctgcaagaaagacacttttactgctccacgaaatcaccctttctaggggaaaaattaacacccttcctattttacccccccacacaaaaggggg

SEQ ID NO: 105683 - DNA, 534 bp, Glycine max
  unsure (1)..(534): unsure at all n locations
  Clone ID: PAT_MRT3847_66448C.1
aaagggaccactatcgattaatcataagtaagcgggacatgaacaagagatcaaaaatgtctggctcttgccggttttgaaggcactaatacactcctctaggggcaagaggttgatgcaaactgatcttgctgattttcaaactctagttgatgatgaacgcaggctcaagagattgagaagcatcgagccttgtgtcacaaagtgtgtggcaccgagagcacaatgtatataatgtggccgagcttgaccgaccactgcgctcggactgatactgacccgaaatctctagaggaacccttcctgggtggcttccttggcgctcgtgcacaacatagaatgctcacacttcatccctatataaatcgaaggggcgagttttacgaccacatgaagccttactggggccntcatgcataggatcactgacccgcgtgacaatctgtcctgctttgcacactgccctgatgagatgtggaagctgctccttcatattctgagcttccatacttgaaatcacagtgatcacacctg

SEQ ID NO: 105684 - DNA, 397 bp, Glycine max
  Clone ID: PAT_MRT3847_66449C.1
gtcatccaaccgcgcctcttcgcacggatacttgctgaaccgcgtcaccaaatacgcttccgcagcggcgggtgctaccgctcctgcctctgctccatctcctggcaagaaggagggtagcggcggcggtaaaatcaccgatgagttcaccgggaacggctccatcgggctcgtctgccatggcatatgcgccgtcgtcaatgtcagatcctaccatggcttgactccaatcatgaccgcgctggaggtcctggatcactcctcgtggctcgtggtggatgtgggtcaccattcgtgtgagggcgtatgtcgcaccatggccatggatgccaccgactgggatgctaaacggtggcgcggactcagcactggctcctctatgaccgatccagttggc

SEQ ID NO: 105685 - DNA, 2181 bp, Glycine max
  Clone ID: PAT_MRT3847_6644C.1
ccacgcgtccgatctaaaataagatttttggatccgattcatgcttgccacaccattccggttccggagattacttttttgcggcggtgctggtggcggagactccgcgccggaatataccttcccacgcctcctcctccatctccctcaccttcttcttcttcttcgctgtagcgttcaaaacaacgtgatctctcttgcattctctggttcggttcttctcgtcgttttatcgatccggcttctagaacttccctttctcattgcttctcctctctctcgcctaagcgagaaatttcttagctgatttggttcgattcgtcttttccttgttcaattccatttttcaggtgattgaagttttgtggtagaaggaagattgatatgctgtgggaaaatgtcgttgaaaagcatagtaagggagctaaaggagatgagggatgggattggtagcatgtcaaggcgaggtgtcgagagcaggcgttggaacggtcggacaaagtcacatgttgctcctgatgtcactctaacttcacttgaacctattcagcaagggcattgggcgaatttgccgcccgaattgcttctggacataataaggagggtggaagacagtgagactacctggccagcacgagccgttgtggtttattgtggttcagtttgtaaatcatggagggccgttacgaaagagattgttaagactcctgaacaatgtggaaggctcacatttcctatttcattgaagcagcctggtcctcgtgattctccaatacagtgttttatcaggaggaacagagaaacttcaacatatctattgtacattggcctggtaccatcggagaacgagactgataagttgttattagctgcaaaaaaggtaagaagggcaacaggcacagacttcgtcatatctttggttgcagatgatttttctcgctccagcaacacatatgttggaaaactcaggtctaattttttgggtaccaagttcactatttatgacagccaacccccacatggagctgcaattcaatcaaatagtcaatctagtaggagatttcattcaaagcaggtatctccaacagtttcagcatgtatatatgttgatagtactcttccctatcaggtgaatgaacaaaatgcacgagtgacagatataaagcatgcaagcttataagagctacctgtctcgacccaatgctcagccgagcaattagcaccgaatacctggctctaaatcattgatgaagcatcttcagtgctggcccgtaaaacttagaaaagggttgtatcagagatttcatgtaaagaaatttcaacttgtagctgatgttgatacagctcaggctaaggttagtgactagcaagaaaaaataaggctgcaagttggcatgagcggctgaaatgatggtgcctaaacttcaacggtcgtgttacagtggcttctgttaaaaactttcaacttgtggctgctgttgatccatctcataatgtttctgctgcagagcaagaaaaggtaatcttgcagtttggaaagattggaaaagacatatttacaatggattaccgttatccactctctgccttccaagcctttgccatatgcttgagcagctttgataccaaaccagcctgtgaatgagaccgatggcactggatcatctgctggagcagcattgataccaaaccagcctgtgaatgagaccaatgacactggatcgtctgctggtttgtatcatatatatataatttgctaggcacatcaggcctggtgggcatgcaactgagatcttagctatgcagtctttagtattttcccattgtgttgttagttattgattatggaatttaactttatgctgtttcatagccctgtaactaaaagtaagtttagtgaatcttcagttttataatataaagtcgcatggtatttctcaccgataccctcctttctttttctttaacccctaatttatgtataaaaaaatttatgctttagcattctgcattcgctgaggacgcgttcaatagtgtctcgctttgtttttttaaaatattggaaatttggtgaattctatgatatgtatgtctccggtgttcctcacgaatactttgatttgcttaaatactgttactgcaagaacgaatggaatgagttttgttctgaatccgaatccc

SEQ ID NO: 105686 - DNA, 443 bp, Glycine max
  unsure (1)..(443): unsure at all n locations
  Clone ID: PAT_MRT3847_66450C.1
aagggaggccgaagagcggcaccacattagtaaacaactgctgcacaaggagaaaagtagaaagaacagggcaggcgaggggtcagttcaagcaaatcatgagctaagcaagcaaatacaaaaggcaggaaagtaccaacagactgtaaacaaaaaataaagacaccaccccaaggaagaacaggacagtttcttatggtatttaagcaagcagcgaaacgaagtgaatggcagtacagcacacaatcagttttattctagaaaaaggggtagacaaaacgatacaaaacgctaaggagagcggagaacgaccctaagcctaggcaagctgtacatnaaaagtaggtcacaaaattcgagccttccactatgcagattgtagacccgcccataaacaaaactgggacctggaaagggaaagaaaggcttccccaaagcctaaa

SEQ ID NO: 105687 - DNA, 221 bp, Glycine max
  Clone ID: PAT_MRT3847_66451C.1
tccggaattcccggtcggaccaacgcttccgccaaggcttccgccaacgcttccgaagccttaggaaatttggaattcctgggcctgaatggagcggacggtttgtcctacgaggacgtctttcaagcctttattgccggggcgccactcttagagttttactcaaccaagtccaaaagttttgttccctaccaaggtggtttgcaccgattaaaaagggg

SEQ ID NO: 105688 - DNA, 441 bp, Glycine max
  Clone ID: PAT_MRT3847_66452C.1
aaaaaggaaaaggaaggaacctttcatatttttttttatgggaaattgatataaaaaatgaatgggaaggggttgtcctttcgggccccccccaaaaacatgaaaaatgacctctgcctttttatttaccccctcgttttaatttaatgagggaaccattttggacctcccacgggggggcccttattataaccccaaaaaaaaaatcttttaactggagtagggggggggtttaggcatatccttgacgattcccaaaacaagctgggtttttggggggtttccctcttccctaagggacctgttgggaaaaaaaaccctcccgtacaattgttggcccaggtaacaattttttgccttttccgacctaaagttccacattccagcgttggaaaaagtcaacatgattgccgcccaaaactttggaaacccctggatggg

SEQ ID NO: 105689 - DNA, 848 bp, Glycine max
  Clone ID: PAT_MRT3847_66453C.1
ctgattcattcataaatcttagttactttatcagtatcattcattatcactacgattgttctaaaagcaattattactcttgagaagaattaaaagatcatcatcacaataacaagatgagttcaggaattagagcatggagtgtggcagctagtgttggagttgtggaggccttgaaagaccaaggcatatgcaggtggaatcatgctttaagatcagctcaacaccatctcaaaaaccatgttggctcattctctcaggctaacaagctttcttcttctgctatgatctccacaacactaaaacatgagaaggcaaagcaatcagaggagtccttcagaactgtcatgtacttaagctgctggggccccaactagatatcataagtccaataagaaaatattctttctcttttaatttctagaaattatcaagcttagtcacaaaggaagatgagggttgagatttctggggtcacattgtatagtatttgaagtttgttttgctcatgtgacaatcagtttgtaaattttgataaatgatagtgtttagcattgccaaaaaaatgaaaaaaaaaaaaaaaaaaaaaaaaaaaaaaataaaaacatatatacaaaaagagagaaacactataataaaagaaacaaactacaagaaaatcatgaagcatgagatctgaaccaaacatgtacatttgcagatatacaaactcatgagcatgctaagtgctttcattcgggttgtgcagaaagagtataaatacttcttacgagctactcatcactagcggaacctattcataaatgacatcttaagcaaaaaactttttggccttgatcttatttgga

SEQ ID NO: 105690 - DNA, 1606 bp, Glycine max
  unsure (1)..(1606): unsure at all n locations
  Clone ID: PAT_MRT3847_66454C.1
ggctcgaggcgcattatagcacaccacacataaaagcataacagagagaacaactgttactcacacacgccatgggtaaatgaatggttattgagcaacagcagttaaaagagaaaagggattcaccagatagatgacattcctatggtgtggcaccaacttcaggtttgagagaagccagtgggcatggagcatgcctccagaggctgttgatttggtatcaagactactacaatactcccctaacttgcggtgcacagcttttgatgccttgacgcatcctttcttcgacgagcttcgtgatccaaatactcgcttgccaaatggccgattccttccaccactatttaatttcaaatcccatgaactgaaaggagtcccatctgagattttgctgaaataaacactatcatttatcaaaattaacaaactgattgtcacatgagcaaaacaaacttcaaatactatacaatgtgaccccagaaatctcaaccctcatcttcctttgggactaagcttgataatttctagaaattaaaagagaaagaagattttcttactagacttatgatatctagttggggccccagcagcttaagtacatgacagttctgaaagactcctctgattgctttgccttctcatgttttagtgttgtggagatcatagcagaagaagaaagcttgttagcctgagagaatgagccaacatggtttttgagatggtgttgagctgatcttaatgcatgattccacctgcatatgccttggtctttcaaggcctccacaactccaacactagttgccacactccatgctctaatattggagtctgccatcgggatatcaagcctcaaaatctattagttaatccacacactcaccaggttaaattatgtgactttggaagtgcaaaggttttggtacgttatatatgtctgcatttcagccccttcctccttaaattattcctcttcattcaacctttctgttttccttggttagattgtagttttacttttccttatttggtcttgacctttgacaggtaaaaggtgaaccaaatatatcatacatatgttctagatactatagagcacctgagctcatatttggcgcaactgaatatactacagccattgacgtctggtctgttggatgtgttttagctgagctgcttcttggacagcctttgttccctggtgagagtggagttgatcaactttttgagattatcaagattctgggcactccaacaagggaagagattaagtgcatgaaccctaattatactgattttaaattcccactcaactaagcacacacatggcacaagatcttgtataagcacatgcccagctaaaacacatccaacagaccagatgtcaatggctgaagtatattcagttgcgccaaatatgagctcaggtgctctatagtatctagaacatatgtatgatatatttggttcgcttttacccaaaacctttgcacttccaagtcacataatttaacttggtgagtgtgtggattgaccaatagcttttcaggcttgatatcccgatggcagactccaatacaacgatgaatataagcggacgcgtggn

SEQ ID NO: 105691 - DNA, 532 bp, Glycine max
  Clone ID: PAT_MRT3847_66455C.1
caagatgagttcaggaattagagcatggagtgtggcagcaagtgttggaattgtggaggccttgaaagaccaaggtatatgcaggtggaatcatgccttaagatcagctcaacaccatctcaaaaaccatgttggctcattctctcaggctaacaagctttcttcttctgctatgatctccacaacactaaaacatgagaaggcaaatcaatcagaagagtctttgagaactgtcatgtacttaagctgctggggtcccaactagatatcataagcccaacaacaaaatattcttttctcttttcgattataggaatcaagcaagcttaattagtctcaaatgatgatgagtattgaaagaatattgtttgtctttatggcagtcattatgtaaagtgcctgacgtggcatggttgcattgatatcataagatgcaaagttagttgcagtattaagtgagactaattaattaacacatacgcctttaaacaaaggaccaaatttcaataattcaatttgcttcccgtgccgg

SEQ ID NO: 105692 - DNA, 721 bp, Glycine max
  Clone ID: PAT_MRT3847_66456C.1
ccacgcgtccgcccacgcgtccgtacggctgcgagaagactacagaaggggccaacatttttgcccaggtctgaagatgaaagggagatgtgctcaagaacaatctattgcacaaatatcgacaagaagcttactcaagcagatgtcaaacacttcttcgaatctatttgcggagaggttcatcgcttgaggcttcttggggattaccatcattcaactcgaattgcatttgttgagttcgcactggcggagagtgcaattgcagctctgagctgtagcggtgtgatcttgggttcactgcctataagggttagtccatcaaagacaccagtgcgccctcgtgctcctcgtccccccatgcactgaatcatcctttctcgtgtttctgctgctgctgcaactcggagatatatttacatatatacatacatagaaacagatatattctaagggtacctatggcgttttgttgatacttttgtcctcgaggcttgcagtatggtatctttgtttcctgttggggtcatgagttgtgtttagctcgtagagttggatggcgttttgaggatctccaaggcttaattaatttatgatgggttgatcttgcaggagaaaattttataactggatttttctaacatctgggaatttatttaaaaggaacatgctacaaagtctttgttttaaaaaaaaaaaaacagcggccgctctacaggatcca

SEQ ID NO: 105693 - DNA, 1185 bp, Glycine max
  unsure (1)..(1185): unsure at all n locations
  Clone ID: PAT_MRT3847_66457C.1
gccatagcaaggaacgaagaggaagtgtctagaaggtggtcttatgagcattcattcttctacttcaacctaagcaacacaacacaacacaacacagtgtgaaagagagagaaatgggtagaggaagatgcttcttggacattagcataggggaagagcttgaagggagaatagtggtggagctttatgatgatgttgttcccaaaactgctgagaatttcagagccctatgcactggtgagaaaggcattggttcaaatactggagtgccccttcatttcaagggatcttgctttcatcgtgttattaaaggcttcatgattcaaggaggtgatatatctgctggggatggtactggaggagaatctatatatggacttaagtttgaagatgaaaatttcgagttgaagcatgaaaggaaagggatgttatcaatggcaaactctggtcctgatactaatgggtctcagttttttatcagcactacccgaacatctcacctagatggtaagcatgttgtatttgggaaagtagttaaaggaatgggagtggtccgatcagttgagcatgttgcgaccggagacaatgatcgtcccactctagatgttaaaattgtggactgtggagaaattcctgaaggagaagatgatgggatatctaactttttcaaagatggagacacctatcccgactggccagcagaccttgatgagagccctaatgaacttgagtggtggatgaaatctgttgactcgattaaagcttttggncatgattattacaggaaacaagattacaaaatggctctaaggaagtatcggaagtattgaagtagtctggatactaaatcggcagccgaggcatgcatgcgcttatggaagatcttgtgccatggatgtgctttaatctgtgggaatttaaattctgtataattagggttcatgcacttaatctcttcccttgttggagtgcccagaaccttgatgatctcaacaagttgatcaactccactctcaccagggaacagaggctgtccaagcagcagctcagctaaaacacatccaacagaccagatgtcaatggctgaagtatattcagttgcgccaaatatgagctcaggtgctctatagtatctagaacatatgtatgatatatttggttcgccttttacctgtcaaaggtcag

SEQ ID NO: 105694 - DNA, 897 bp, Glycine max
  unsure (1)..(897): unsure at all n locations
  Clone ID: PAT_MRT3847_66458C.1
ctcgcgattgattcataatcttagttactttatcagtatcattcattatcactacgattgttctaaaagcaattattactcttgagaagaccaggacttgagtgttttctcttgtcacagaacaattacattagtgttatcccatgttcattcaaataaaagcaagaacaattactttagtgttttctcttgtcacataaaagtcatctaagaagaattacaagatcatcatcacaataacaagatgagttcaggaattagagcatggagtgtggcagcaagtgttggaattgtggaggccttgaaagaccaaggcatatgcaggtggaatcatgccttaagatcagctcaacaccatctcaaaaaccatgttggctcattctctcaggctaacaagctttcttcttctgctatgatatccacaacactaaaacatgagaaggcaaatcaatcagaagagtctttgagaactgtcatgtacttaagctgctggggtcccaactagatatcataagcccaacaacaaaatattcttttctcttttcaattctaggaatcaagcaagcttaattagtctcaaatgatgatgagtattgaaagaatattgcttgtctttatggcagtcattatgtaaattttgatattgatagtgttgagctgttgccgcctaaagtggcatggtttaattgatatcataagatgcaaagttagttgcactattaagtgagactaattaattaacatataggctctaaacaaaggaccaaatttcaataattcaatttgcttcccgtgccgaaaaaaaaaaaaaaaaaaaaaaaaaaaaaaaaaaaaaaaaaaaanaaaaaaaaaaaaaaaaaaaaaaaaaaaaaaaaaaaagggggcggcgggttttaa

SEQ ID NO: 105695 - DNA, 516 bp, Glycine max
  Clone ID: PAT_MRT3847_66459C.1
ctgtcgtctgttttttgtgtttttcgtgtgcgtcgaaccctctgcgttcgttaattttgttttgtgtattcggatcgacttgtttcgcgttcggttgcggggatcttccgtttaggtaaacgagtggtttttgagcagaagcagttaaaagagaaagggattcagcgaagatgacatcggctggtgtggcaccaacttcgggtttgagagaagccagtgggcatggagcagcaggtgttgatagattgccagaggagatgaacgatatgaaaattagggatgatagagaaatggaagccacagttgttgatggcaatggtacggagacaggacatatcattgtgactaccattgggggtcgaaatggtcagcccaagcagactataagctacatggcagagcgtgttgtagggcatggatcatttggagttgccttccatgctaagtgcttggtaactggtgaaactgtggctatcaaaaaggttcttcaagacaagaggtacaagaaccggcagc

SEQ ID NO: 105696 - DNA, 453 bp, Glycine max
  Clone ID: PAT_MRT3847_6645C.1
gaaaatacttcacctattactcctaaatattgaacgctgcaaacgagtttcataagaactacaacggaaaatgagctcattattatgtgcaaaatttacattttaaatcatcaaatttacaaagcaatttgcgggggaggggcggggggagagtacaatggagaactcagcagccatttacggtaccatcatggggtaataactatatgaactttactcttggtgtgggggttagaagctgatacttagctgtgtttggcaaattgtttagaccacgttgaaggaaaaaacacatttcgagacaaacgccaaagcaacagcctagttgcttctccattgtgtcaaaccggacgttgacgcaaacacacacttgatggttttaagttaattatgtagcccgagagattattgacgcatttccttttcccaattttgaatgaatttggatttggt

SEQ ID NO: 105697 - DNA, 341 bp, Glycine max
  Clone ID: PAT_MRT3847_66460C.1
tgaggcaccgggtggaaaggggaatgattttcctggtcaaacagagagaaggaaagtgcagtggacagatacttgtggtagtgagcttgttgaaatacgggaatttgagcccagcgaagtggatgatgagtcagttgatgaatttgacaatgggaatctcaaaacttgttcctgtgctattatgtaaattggcattccaaaggatgacacagatccatttatgaggcgccaagttgttgattgctaacatattccatcactcagcttgaggaaaaggagcagatatttttcagtctagtggagatttatacaccatttcttgcctgagcgataatttgtgt

SEQ ID NO: 105698 - DNA, 504 bp, Glycine max
  Clone ID: PAT_MRT3847_66461C.1
ccgggtcctcatacttcctaatcttagttactttatcagtatcattcatcacaacaacaagatgagttcaggaattagagcatggagtgtggcaactagtgttggagttgtggaggccttgaaagaccaaggcatatgcaggtggaatcatgcattaagatcagctcaacaccatctcaaaaaccatgttggctcattctctcaggctaacaagctttcttcttctgctatgatctccacaacactaaaacatgagaaggcaaagcaatcagaggagtctttcagaactgtcatgtacttaagctgctggggccccaactagatatcataagtctaataagaaaatattctttctcttttaatttctagaaattatcaagcttagtcccaaaggaagatgagggttgagatttctggggtcacattgtatagtatttgaagtttgttttgctcatgtgacaatcagtttgttaattttgataaatgatagtgtttagcattgcc

SEQ ID NO: 105699 - DNA, 2269 bp, Glycine max
  Clone ID: PAT_MRT3847_66462C.1
cagggcggccggcagcgcattatagcacaccacacaaaaaagcaaaacagagagaacaactgttactcacacacgccatgggtaaatgaatggtttttgagcaacagcagttaaaagagaaaagggattcagcgaagatgacatcggttggtgtggcaccaacttcgggtttgagagaagccagtgggcatggagcagcagctgcggatagattgccagaggagatgaacgatatgaaaattagggatgatagagaaatggaagccacagttgttgatggcaacggaacggagacaggacatatcattgtgactaccattgggggtagaaatggtcagcccaagcagactataagctacatggcagagcgtgttgtagggcatggatcatttggagttgtcttccaggctaagtgcttggaaaccggtgaaactgtggctatcaaaaaggttcttcaagataagaggtacaagaaccgggagctgcaaacaatgcgccttcttgaccacccaaatgttggcgctttgaagcactgtttcttttcaaccactgaaaaggatgaactatacctatttttggtacttgaatatgcctgtgacactgaatcgtgtgatcaaacattacaacaagttaaaccaaaggatgccgctgatatatgtgaaactctatacataccagatctttagggcgttatcttatattcatcgtgctttcggagtctaaattcgggatttcattcctcagactttgttccccgatccgaacagtgttgatcaacttgttggggttattgagagaacctttgggatttcaaacgtccggcgaaccaaatatatcatacatatgttctagatactatagagcacctgagctcatatttggcgcaactgaatatacttcagccattgacatctggtctgttggatgtgttttagctgagctgctgcttggacagcctctgttccctggtgagagtggagttgatcaacttgttgagatcatcaaggttctgggcactccaacaagggaagagattaagtgcatgaaccctaattatacagaatttaaattcccacagattaaagcacatccatggcacaagatcttccataagcgcatgcctccagaggctgttgatttggtatcaagactactacaatactcccctaacttgcggtgcacagcttttgatgccttgacgcatcctttcttcgacgagcttcgtgatccaaatactcgcttgccaaatggccgattccttccaccactatttaatttcaaatcccatgaactgaaaggagtcccatctgagattttggtgaaattggttccagagcatgcaaggaagcaatgcccgtttctaggctcgtgaagtgttgtttccatatgagaatgctgcgctttccttttctatttaatatgatatttttgttggtatctttattgtattcggttgccctgtaaaagcagatttagagatacatgctactcattatcacccaacccccgatggttatgtagaataccctgtttcctgtatcacagcagattgtaacatacaatagaggacaaaatgtctgcaattatctaaatgttgcatcaatatttgtatttgttgagacaatgatgggttgttgtttaatttagttatgcttagcgtggtggttggaagttgtaatggccttgtttgggcatatgtttatttttccactctttaggacgacttgggacgaagtcttggtgcttgtctggacaaatattaaactccttaagtgaaagtgtatcgatgttatattatttgccggttcatgcacttaatctcttcccttgttggagtgcccagaaccttgatgatctcaacaagttgatcaaactccactctcaccagggaacagaggctgtccaagcagcagctcagcttaaaacacatccaacagaccagatgtcaatggctgaagtatattcagttgcgccaaatatgagctcaggtgctctatagtatctagaacatatgtatgatatatttggttcgccttttaccaaaacctttgcacttccaaagtcacataatttaacctggtgagtgtgtggattgaccaatagattttgaggcttgatatcccgatggcagactccaatacaacgatgaatataagataacgccctaaagatctggtatgtatagagtttcacatatatcagcggcatcctttggtttaacttgttgtaatgtttgatcacacgattaactgtttcaggaacatattca

SEQ ID NO: 105700 - DNA, 2508 bp, Glycine max
  Clone ID: PAT_MRT3847_66463C.1
aggtccctggccggaattcccgggtcgaatcggcccgcgtctccttctaaccgccgcttccgcatctcgcttccttctcttccttctctaactatatatattttctttttctctctgtttcttcctttttattttatgcttttttctccgatgtgactggcgtttgtttggtgtgtttttcgtgtgcgtcgaaccctctgcgttcgttaattttgttttgtgttttcggatcgacttgtttcgcgttcggttgcggggatcttcggtttaggtaaatgagtggtaaatgagtggtttttgagcagaagcagttaaaagagaaagggattcagcgaagatgacatcggttggtgtggcaccaacttcgggtttgagagaagccagtgggcatggagcagcaggtgttgatagattgccagaggagatgaacgatatgaaaattagggatgatagagaaatggaagccacagttgttgatggcaatggaacggagacaggacatatcattgtgactaccattgggggtagaaatggtcagcccaagcagactataagctacatggcagagcgtgttgtagggcatggatcatttggagttgtcttccaggctaagtgcttggaaactggtgaaactgtggctatcaaaaaggttcttcaagacaagacgtacaagaaccgggagctgcaaacaatgcgccttcttgaccacccaaatgtcgttgctttgaagcactgtttcttttcacccgctgacaaggatgaactataccttaatttgccactcgagtatgatcctgaatcaggtaatcgggggatagcaaaggttttgctagttgaagaagtcaatatatcccacgcgtccgcgcattatagcacaccacacaaaaaagcaaaacagagagaacaactgttactcacacacgccatgggtatgtaaatgaatggtttttgagcaacagcagttaaaagagaaaagggattcagcgaagatgacatcggttggtgtggcaccaacttcgggtttgagagaagccagtgggcatggagcagcagctgcggatagattgccagaggagatgaacgatatgaaaattagggatgatagagaaatggaagccacagttgttgatggcaacggaacggagacaggacatatcattgtgactaccattgggggtagaaatggtcagcccaagcagactataagctacatggcagagcgtgttgtagggcatggatcatttggagttgtcttccaggctaagtgcttggaaaccggtgaaactgtggctatcaaaaaggttcttcaagataagaggtacaagaaccgggagctgcaaacaatgcgccttcttgaccacccaaatgttgtcgctttgaagcactgtttcttttcaaccactgaaaaggatgaactatacctcaatttggtacttgaatatgttcctgaaacagttaatcgtgtgatcaaacattacaacaagttaaaccaaaggatgccgctgatatatgtgaaactctatacataccagatctttagggcgttatcttatattcatcgttgtattggagtctgccatcgggatatcaagcctcaaaatctattggtcaatccacacactcaccaggttaaattatgtgactttggaagtgcaaaggttttggtaaaaggcgaaccaaatatatcatacatatgttctagatactatagagcacctgagctcatatttggcgcaactgaatatacttcagccattgacatctggtctgttggatgtgttttagctgagctgctgcttggacagcctctgttccctggtgagagtggagttgatcaacttgttgagatcatcaaggttctgggcactccaacaagggaagagattaagtgcatgaaccctaattatacagaatttaaattcccacagattaaagcacatccatggcacaagatcttccataagcgcatgcctccattgtttgcagctttgggttcaagactactatatcttgaagaacctttttgatagccacagtttcaccggtttccaagcacttagcctggaagacaactccaaatgatccatgccctacaacacgctctgccatgtagcttatagtctgcttgggctgaccatttctacccccaatggtagtcacaatgatatgtcctgtctccgttccgttgccatcaacaactgtggcttccatttctctatcatccctaattttcatatcgttcatctcctctggcaatctatccgcagctgctgctccatgcccactggcttctctcaaacccgaagttggtgccacaccaaccgatgtcatcttcgctgaatcccttttctcttttaactgctgttgctcaaaaaccactcatttacagtttgggaaggaagcgagatgcggaaacagcggttagaaggaagagaaagagagagttagatcgatggatcgatgatgatgacatacatacccatggcgaagagtgagcggacgcgtggg

SEQ ID NO: 105701 - DNA, 240 bp, Glycine max
  Clone ID: PAT_MRT3847_66464C.1
attaataatttttgattttattattatgaaaaacagaggacaaggtaacataaaacgaaaaaagcaagccaaacaagaaacgctctgaaagagagctaggacgatggaagcaaaccgtacgggcaataaacctaataggaagaggccctaaataaacccagagacgaacaaccgcacatctacgatgacgaccatcgacaagggatcagttgccgagcaccatagcatcgacatgcaagc

SEQ ID NO: 105702 - DNA, 223 bp, Glycine max
  Clone ID: PAT_MRT3847_66465C.1
aggacttctgattgaaacacaacagagtttaacgggggagatgaccaacaacaccgtgatgaaaattaaccttcattttttattatgtcctacaattttggtagcatggcaccaatatacgaacaagctgttccatatatgaatgatcaattgatatcggacctcaactaactatattacaaactacctgatctagctagctatttaagcacaacacattttt

SEQ ID NO: 105703 - DNA, 260 bp, Glycine max
  Clone ID: PAT_MRT3847_66466C.1
cagcagagagcccgtcttaacaaacgctcttctctggaaactccccgttcttttccttctttcttcttctctgtctggtcttcgatcttcgatcttcgtccctgaaaatgacagagtgcatttcaatccagatcggccaggccgccattcaggttcgaaacgcctgctgggagctttactgcctcgaacacggcattcagcctgatgggcagatgccaagtgactagaccgttggtggaggtgatgatgctttcaacacc

SEQ ID NO: 105704 - DNA, 661 bp, Glycine max
  Clone ID: PAT_MRT3847_66467C.1
caccaatatttttataggtataattatagaaatgatcccttactcccagcttttttaaataaaaaatagtgcttctaaaattcaaattcaatctggcaacattatagaaaatgggaaaattaattttagattataatccactttcattataaccaaccacagctaagtggcaatagattgtttataagtttcacttagttgcactatttttgggtgacaagttgaatcatttaacactatcaaacggctcgcctaggttaaacactctccaacaaaccagggtctacttaacgaaatgtaaattggagtttgctctacttttttcttttgttaaaataaaagtttgacattgtcaaacaaatttagttaagtctacgcagttgatataatttatgaaaactcaaattcattcaaaaaaaaaaaaaaaattccacacagcatgaacaaaaacattgaaaaatgttacaacttttttttctggacttcgcagtttcaaaaaaaatgaaaaaaagtaacttagctttaactaaaaaaaatgtaaaaaaatgagtgaatttttaggaaaaaactaaaccttcactctcttcctacaatcctcggcccctttctcaaatcatttcttttaaactaaaaagataaaattatttaacttttattttta

SEQ ID NO: 105705 - DNA, 353 bp, Glycine max
  Clone ID: PAT_MRT3847_66468C.1
ttatcttatttgtttgaacctattatcccaaagcaataaaacttgcgcttattgcatgggatcgcaaatggacataacatatatgattacgcatttaatatatattatgcaaatgactaattagtagcacagctaacagtagttattatagcactatgaataatatagtcattaaaagaaatattcgtaagtttgcattagatcatacacctgagattattttgacccttaggaatgctgacttggcggtatcacgttcactgtcttcaccaagatgctgtccggaactgactcgaggcttcgtaactccgtctgccggaatctgcctgtccgatttaagggcttcaagccat

SEQ ID NO: 105706 - DNA, 212 bp, Glycine max
  Clone ID: PAT_MRT3847_66469C.1
gtgttttttttttatattattgcattctaccgtggaataataaaggacagaacagacccagttgtaaagtatgcactgacaacaatacattagagcccaaaaaccatgcttggactctttacaaaaccttgacttccccatttgtaaatgcataatcacgagagagttttccatctactgtacagcaatgggtaacctcccaaaaaagaaaa

SEQ ID NO: 105707 - DNA, 407 bp, Glycine max
  Clone ID: PAT_MRT3847_6646C.1
ttttgtaaggatgttttacgttgctcataccgtaatcaccccccacacccacatttagatggagggaaattttttcttgtgtattaaatcctcgctctaaagggaaaaaagccccctatactagagcactctttgttcgggggggaaccttaaaaaatgatataattggagctggttcacattcttcagaatattttgctgacccaggaatatcccgaaaaacccaaaaagattgatgccagattgagaccaagaatagatcctccctccaatgaggctcaggctcagatggaaacaaatttgtttaaattgtctcttgatgatggccaaactaccaaaggatccatgttggaccttaaaatttctccccctaaaaaaacacttaccaaaaacacattttgaagaac

SEQ ID NO: 105708 - DNA, 477 bp, Glycine max
  Clone ID: PAT_MRT3847_66470C.1
gcgtcttgaagtgggttttaaagaacaacttgccaaatatggggaaggcgaaatacctgtgaaggaggtagttcacaagctaatgaaggacaaaactaaagccgataacagtcatctacctcatatatgctctctcgattgggaattcaatttgagttccatatttgttgaagtagaaactccactgggtctatatggcactaggagtagtgctgctttaattgtaacatcaagtgaggaagtgagtttctttgaggcatatcttgatgagggcatgtggaaggagcatcttattgatttccatattcagaagatgacaaaagggcatacataatactccaattggtggatatatcaatgaaatcaattaaataaaattaacaatgatgcttttatgggaaattattatttattattaagatttatgtgatggacatctcatatattggactacaaagtgaaaaattagacacaaaa

SEQ ID NO: 105709 - DNA, 511 bp, Glycine max
  Clone ID: PAT_MRT3847_66471C.1
aaatacattcttttattttattttttcttagactttttttgctggaaaggatttaaagggctttattattgaataccctgaatccaccaaacaagttaaaaactctaaaacatttttttcacgcaacttttacttaaaaccgaaaatttaaaaaattttttgagccaaagcttaacgaactaacaaagatggcctctttgaaaaggtcttgccattggataaaaggaaatttctcaccccctttggcgcagagtttcaacaagtgcatcctttaaaaaagggtttgaagccgctcctccctgaaatgttatgtcaaaatttgcccccgccgggtcaaatccaacaccctcaggttttttaacaatgacagccccccctggttcatcccaagggccaccaaagtcaagttcaaagaatactttcagccttccaccttgaatttcacacaaatttagagcacagggcccccccattcgaagagaacctaccttgaaaagtaagcttttaaacc

SEQ ID NO: 105710 - DNA, 486 bp, Glycine max
  Clone ID: PAT_MRT3847_66472C.1
gaggagaaatttagagaatttgagcgcgtcaacttccagtttagcagggggtttgagatacaaaaagagcttgagaaaactcaagagtcttcaaactgggatcaagggggcgcttcaaaccaggggggggtacttagtgagcacagcatcatcattagccaaaggcggtaatttctagggggcgaaaacatccttaggagatttagagggagggtctgaggtgcaaaggtttgagatcgagtgagtcaggctcatccttgagttcctccctcttcttttgaggttccattgcctcaagaggagccttcttcagcgtcctccaggtgtggtttggctactttagggtctagctcctcttcatacgttcggagagcttcctttcgaggtccagggttcttagtagtcttagcagactcagccaggagagaggccattcctttcttagcagttctcaggaagggggtttttagatccttttcagctttg

SEQ ID NO: 105711 - DNA, 413 bp, Glycine max
  Clone ID: PAT_MRT3847_66473C.1
cccacgcgtccgcccacgcgtccgattctcgttctctctcttcttaccgacatacatgctggtcgccacacttctgtgggggaactcgattccattattctaataatcatatctgatagagacagtgtttgagattgagggaagatgctgaccaagttcgtgaccatacgtaatagagtgaatggactgagtctccacacgtagagaccctgtatcctctcgagtcttcacagagacgtgagacacctatgggattaccgcatgggtactgttagtgacagagtcgatgagcatgatggtgctgtcagaggtgttcatgctcataatgaccagcccctgtaggtctttggaggggatgattaccagattaatgcttggaactatgtgacgcctaggtgcttggtcactattct

SEQ ID NO: 105712 - DNA, 1173 bp, Glycine max
  Clone ID: PAT_MRT3847_66474C.1
gaaagtcctaatatcatactcagaaagagagagagagtgagatagagaggatggaaaaactaattttcagtggtctaattgtgcttgtggggttattaaccacagaaatcaaagtagcatctgcaatttggctgcgagctcatgcaactttctatggtggaagtgatgcctcaggaacaatgggtggggcatgtgggtatggaaatttgtacactgatggttatggaataaaaacagctgccttgagtactgctttgtttaatgatggcaagtcatgcggtggttgctatcagattgtttgcgacgcaagccaagtgccccaatggtgccttaggggaacttccatcacaatcactgccacaaatttctgccctccaaactatgcactccctagtgacaatggtggttggtgtaatcctcctagaccacactttgacatgtctcaacctgcctttgagaccatcgccaaatacaaggctggaattgttccaattatctacagaaaggttgggtgcaaaagaactggaggcatcagatttagcatcaatgggagagactattttgaactagtgcttataagcaacgtgggaggagcaggggatatttcaagagtttggatcaaagggtccaaaatgagtaactgggaaccaatgtcaagaaattggggatctaactggcagagcttaagctatctcaatggtcagagcttgtccttcagagtacaactcagcaatggaaggattcgcacagcttataatgtggcaccttcctcttggagatttggccagtctttcataagcaaggttcagttttgaaggggagaatacatataaatattactcggtatttttccacttcatcctttttaaaattatatatccagtttctgatttgttttatgttaaatttgtatgcttgccaaggagttgtggctcagcaattttagcattttgcgatgaggccccccaacttgggtaatggtttttctttttctttttttttcccacttgggcaaatatgtaagccaaacaagtgaatctagtaacccattgcaatgattgaaaaaaagaaaacagcttgtaattctaatttatcttgtaaaatgatatgcgccccttgtattacttttttttaagacaatgaaggccaattactcagtacggcccccccttt

SEQ ID NO: 105713 - DNA, 569 bp, Glycine max
  Clone ID: PAT_MRT3847_66475C.1
cttcaaggacaagttcctccttcacttggtcaacttaccagcctgcatatgctaaatctctcatataaccatcttaatggcctcattccctcaaccttttcagggtccccattaagctcctttctgaacaatgaccacttgtgtggccctccactaacattgtgcttggaagctacgggtaaggagcgaatgcagctatcaaacgcacaagtagcagcaatcatagtagccattgtccttacttccaccctgatatgcttagtaatgttgtatataatgttgagaatctggtgcaactggataaaggtagctgtttcaagtgaagatggtggcatggttgagcagcagaagacaagaaatggagagtactggaatatgaattctcctgagttgtttccttcaccagataaacaaatttcgccaacaatttgcatttgcagtctcaaaattgatgcagaagcccaggaaaataccttggtcagataataaaacgtacttgtttgtaaattgtaattttgtttttctgagtaaataatgatgtaatctatggctatatactgctatttagg

SEQ ID NO: 105714 - DNA, 479 bp, Glycine max
  Clone ID: PAT_MRT3847_66476C.1
agattaaagagcgcgaggagacaaataaaaagaagtgttaagaattgcctttgggactctgaaggctgaagaattgatgaattgcaagtttgtgcccgatagctgcacagactgcctgaagttacatttagagactgaaatcactgcaccttaaaaacaaaagattgagctgcactgtattcctggaaagcacctaccaaggcttcctattacctatttcacagcataagcctacagggtacgaagaatgaactctgagaatgtttggagaatgtttcatcattactaacaggatattcctcatgacattgctgtctgagaccctttgaaggcagaaaactataccagaacacccatatttttgacttgtgtgtgtatgtgtgtgtttatgtatgtatatatttaaacaaataccacatttgaaatgtttttcagtgttgtgtattatatacccaaggccagttttatctaaatcaaaa

SEQ ID NO: 105715 - DNA, 307 bp, Glycine max
  Clone ID: PAT_MRT3847_66477C.1
acggaaaattataaaccgtaatcttgccaacattgaataatacattgaattttaccacctcagggggtggagcaccctttggtgtcttaatgatcttaattatctgattaaccaaaatcatttacacaagctagactattattctgataaaacacttgaaagctactagtgagatgctcgatactcatgtgcccaccatgtgacttatctaaaccttatagcctaatataccttgcaaaatttacattcgtcatatcttcaacaattctaatcactgaaccactagaggtattgtaccacttttagg

SEQ ID NO: 105716 - DNA, 407 bp, Glycine max
  Clone ID: PAT_MRT3847_66478C.1
ataaaaataaaatttataaaaattttatttcccacgagacctaggacaatatataggtacccgtttaatacaagagattttggaaactgaaaaaggggtttttactaaaggaaactcaaacaggaacaacttacactcatttgggatttaccgggggaacccagggtcaaaaggagcttgtttgatagaacacacgtccgtttgatttgacatctttcacaggagggggtcatttctaacaggtagcttttggaacttaaaataatggcaaggcttttgcaaaggggtaacttttttttccccccttttttatgggtttgacaatgggatccgaatggaacattaaccaatccattggattggaagccgatttgggggttgggagcgaaccaccatttttgatttta

SEQ ID NO: 105717 - DNA, 629 bp, Glycine max
  Clone ID: PAT_MRT3847_66479C.1
ggctcgaggtaatccaggaaatttttgtaagtgagcttattctcttgggttatttagcagtaatatataaggattagatacttcaattaggaaacattgtttatgtcctcaggtggtgaagaaaaatcagattcaaatcagatgaagagtgaatattttagaattaaaactagcattatattcctgtactgaaataatacgataaagtcatgattacatctagctacttctctgtatccatattaatgtcatttttttgaaattttcatcatttattacattctatatcattttctctcattttaaagataaatggttcatgtcagtaagtctctatgactttatgaatgccacatgatagataaaatgattgtttttgaaagatgggaaatttgagcatattatttagaattttattttatttgttataatctcattaaatgaagtggtggcacatcattcgatgacaatgtaaaaaaccattttatattgacaatgcgtcaaaattaatccattataaatcctgttgactggctttcttactggttttctattttcttagagctataatgggtttgcaattatcatactgctctactgaagagccttatattatatttgcatcattc

SEQ ID NO: 105718 - DNA, 211 bp, Glycine max
  unsure (1)..(211): unsure at all n locations
  Clone ID: PAT_MRT3847_6647C.1
aaggattgcggcgaagccgcaaagatacaacattcattagggaaaacaggagtggggaaaaataaggggggaggggttgaggaagaatcaattgctcacagagcatgctgggacacctaattattccacacacagacattgnaacttcctgtataggatggaattgatttttggcgtaatagaatagaaaccattcgccaatgtctttgaa

SEQ ID NO: 105719 - DNA, 169 bp, Glycine max
  unsure (1)..(169): unsure at all n locations
  Clone ID: PAT_MRT3847_66480C.1
gaagaaagctgtgaagattttccccgnaatttagactggaccnntnagacccancggncatggtcaaactgagaaatacaacatgaaagtgagagctgtaaggggattgtcccttgaagaactcattgctttaaggattcccaaaaagcttgcaccaacaattggaatc

SEQ ID NO: 105720 - DNA, 268 bp, Glycine max
  unsure (1)..(268): unsure at all n locations
  Clone ID: PAT_MRT3847_66481C.1
agctgctaggaagcggcctttgtacggctgcgagaacactacagaaggggggtgcttagcaaaggtgcaaatagaggaacagaacagatctgaaagaagcccgtgttacactcaatcacctatgctaaaatcggatcgttttcattcctttcctttacggtttaaaaaaaagaaaaattttcattgatgattgacncccctcaatgagagctgcacctcattatgctgataacgacgacgacgaaggagttttgcttgatgaatccgc

SEQ ID NO: 105721 - DNA, 811 bp, Glycine max
  Clone ID: PAT_MRT3847_66482C.1
cggacgcgtgggtttcactttcaactttcaagtcaaaaggacaatgattttcaagtgtcaaactcttggtaagatttcctatatgcaaaccttcttgtcttgtagctgttgagaatttgggatagttataattctacaaggaaattttccttttgatcattatgcatgtctggccctgtggccacagttgataatttggatggagcactttcttgtgcagagagaacaaaatctcttgatgccatttctgaaatagatcatttatctatatttacaaacggtgaagctggtcattcctctgaagttgctggatttagagtaggggaactctcacttcctaatggagaatcatattctgggtcccttcttggtaacattccagagggtcaaggtaagtatgtatggccagatggttgtgtatacgagggtgagtggagacgagggatgagaaatggatatgggaaaatacaatggccttctggagtaatgtatgatggtgagttctcaggtggctatatccatggtacaggaacatatattggccctgataatctgacctacaaaggtcggtggcgattaaatgttaaacatgggttgggttatcaagtttatccaaatggagatatatttgaaggctcttggattcaaggagcacctgaggggccaggcaagtatacctgggccaatggaaatgtatatttgggaaatatgaaaggtgggagaatgtcaggaaaaggaactctcatggctctcacctggattagtggggactcatttgaaggaagctggttaaatggcatgatgcatgggc

SEQ ID NO: 105722 - DNA, 572 bp, Glycine max
  Clone ID: PAT_MRT3847_66483C.1
atgatgttcatttttagttatggaaagaagtgaagctgggttagttccagaatggttgagaagtgctggaagtgttgccggggctggcagttcagcccaacagtttgccttctcatatggtcatactgattctctttccgtagctcatcactcaaggaatagatcttctaagaatggtagtgattttgatagtgctcgttctgtgtttcttgaacggacatcctcatcaaattcccggaggagttctataaatggttctgccaagcatgcctacagtagtttcaacagaagtcatcgtgacaaggaccgtgacagagagaaagatagatccagttttggagatcactgggactgtgatggttctgacccattggctaacatctttcctggaaggatggagagggatacattacggcgttctcattcaatggtttccaggaaacagaatgaggttatacctcgtagagttgtagttgatactaaatctggtggcagccatcagaacaatagcaatggcatactttctgggagtaatgttagtaatagccccttctgtcgtcttctcgcaccgt

SEQ ID NO: 105723 - DNA, 382 bp, Glycine max
  Clone ID: PAT_MRT3847_66484C.1
ctttctcgcattttccctcttctttctctctcacgttttccgctctcagttttctcgggaatctcatggtgtccggtccaggcctctagtgaaaatcatggtggagagcccgcgactctacgttgaaggattatcaggatgtcgcgatcttctgttcaaggattatcagaatgaccacaagttcaccatcaccacttacacttccactggagtggaaatcacttcaactggagtcaggaaaggtgaaatatatttggccgatgtcagcactaaggtgaagaacaagatcatcacaactgatgtcgaagtggacactaagtgacatctgcgtagaatcattactgtggatgaacctgcccctggactcaagacagtttttagc

SEQ ID NO: 105724 - DNA, 363 bp, Glycine max
  Clone ID: PAT_MRT3847_66485C.1
gtttaaagtggctgcttggaagacagtaggtgtaaggggctggcattgtgctgtctgagattgcaactagtttagaggagtgtattggcgcctcattggctacaagtggttttaacaaacagccgcactaacttagcatttttgatgcatgttagtggacaaactcagaaccacatacctggctttcgaacttcccaggaaaggtatctggtcctaataatgtgttaataaatctggagctataagtgggcaactctaacttagaggcgtgaccataggcttattaacaatcccaaacagtctaaaaattttgatattatgatgggaaatccttaaaatctacgaaagtgccggagcatagtt

SEQ ID NO: 105725 - DNA, 303 bp, Glycine max
  Clone ID: PAT_MRT3847_66486C.1
cgccaggacataagtgtaaccctgacaacaaaactcaatctgtgttcttcattatctgatctgctacgtatcatgtcctagctgattcatcaccccaccatcagtagaactttgttccatagctctgacccgtgactgcaccactccgatcatcggcatgacatcgctacgaaccgctgtctgactgccaacgatgttgcagatctgacccacaagagcctggcttgcaatgctaagcgccatcggcataacgcggaaatgcgcgatcttttacaagcgacttctatccttatggaataaaca

SEQ ID NO: 105726 - DNA, 573 bp, Glycine max
  Clone ID: PAT_MRT3847_66487C.1
ttcaaacttgcttattattcttggaattgtcactggcgtactcttcatttccattgtatgtgtacttatactttgcttatgcacaatgaggccaaaaacaaaaacacctcccacagaaactggtaaatatttctatttcaaaatccctattactttttctttttcttttttgcattctctataaccacctagtaaaggtgaaagctgctgtggattattttttgccacctttttatgtttggatattgtataggcaataagtatagccattaaaggagggcaacttgggttcccttcaatgaaaattttctcatgacacagaaacaaggagagaagttctctggactaaattaattgcaattgtttaggatgagtattttcggagtggattataaattgctccaaaaaatatttattggaattcaatatggatgtctactaatatattgtgaaatgtgatcattgattgtgaaacttgatataatatacacttttatcaactgaatgaagaatagttatgctactggtgtagtgatggtttccagttttcacgtagttataaatctgtttgga

SEQ ID NO: 105727 - DNA, 194 bp, Glycine max
  Clone ID: PAT_MRT3847_66488C.1
ccgccaaactagaaacattgtgatgaaaatgaagggcggggggggcgtcgttcctacaattttggcaacatggcaatgccatgcgtacaatatgatccctctcccaatgaacactggctatagagcccgaactccgtgactcaaatccgcaagtcgaacgcttactgtggaagcacacaagatctctccctttg

SEQ ID NO: 105728 - DNA, 560 bp, Glycine max
  Clone ID: PAT_MRT3847_66489C.1
aattcggctcgaggctttcctcagatatgcagcatccgcaggaggatattggaagattgcatgagctggcaattctaattggaatcttcagacgaaatccttcaaatagatttttatgataccattgacgaatctatcatagggaagggttttgacgataaaatccttggtctcctcaaagttgcatgtgactgtgttaaaggatctttaaagcaaaggccaaagatggttgatatgcacaaaactataagagccatgtgggaaggctataaaccttggtttgattctgaaaggctgaaactctctctgggttgttctgaccatataacatgcatcagcgaaatagaatgtatttgttgaaacgtaagacctgttttgtatgtgtgtagtgtaggttccgcacttccgcttatcagacactttaggacaatgaatgtctgtttatttatatacaacactgtcaagttaaagctttgtaattttatgattcaaattgagcaaaataaggaatcatttaacgaggacgaggacttctaataataaatatattagacttgttt

SEQ ID NO: 105729 - DNA, 302 bp, Glycine max
  unsure (1)..(302): unsure at all n locations
  Clone ID: PAT_MRT3847_6648C.1
wtngntnntnnangngtangtaagntcggaattcgnntngagttgtttctggtttgtntaantaaantattntcantnttanttntntgttnnannantganttnnaganatgggttttntnaggngaattttnggngttanaaaaagatnngnttnnaatnngnaannntngaggantttnnnnaanntanngntggtannctantangnngnaangnnannntnnnngtnattatttgattntnaatnnttgnnnntannagntnnnangnngtnnngngnnannnngnnnannnantnn

SEQ ID NO: 105730 - DNA, 936 bp, Glycine max
  Clone ID: PAT_MRT3847_66490C.1
ttagaaacctggtaggaggtgcgaaacgcagctgcgcaatccaaagcacgaggaccactctctactcaaactccaccatctgtcatctacgccttcgcccctctcgtgtttcccacaacggttactccttctccctctcctatttcaacccatgccatggcttgtctgagccgctaccaccaccaccaccacccccgcggcgccacctggctctcttcccctgacgaaatgctccaacactgccccctctccgcccaccaccgccgtctccgcgatgacgacgccgaacctatctaccttccctctctctcctccgcctaccgcatcttccccgtctacgccatgggcgcccccgacccgacaccagaacccgaattagacggacccgacccgatttggaacgctgtcagggacgaagccaagctcgaggcggagaaggagccgattctgagtagcttcttgtacgctagcattttggcgcatgattgcttggagcaagcattggcgtttgtcgccgctaatcgtctccaaaaccctactctcttggccactcagcttatggatatcttctgcaatgtcattttgcatgacaaagctatccagcgatccattcgccttgatgttcaggcatttaaagatcgtgaccctgcttgtttgtcgtattgctccgcgcttttgtatatgaagggttatcatgctctgcaagtacatcgggtagcccatacattatggcaccaggggcgcaaagtcttggccctagctttgcaaagtcgtgttagtgacgtttttggtgtggacattcatccagctgcgccggttgcggctgggcttgcatttgttcatgcgactgggggggggactggtgttactgctatgggtgagtctgggtttaggaaagcaaactgagatgcaatatattgtggcaatagattcttg

SEQ ID NO: 105731 - DNA, 234 bp, Glycine max
  Clone ID: PAT_MRT3847_66491C.1
cctatatttaaggagcatttgtaaaagaggattaaggcagatgaaggagacaccgatccaagcgtccagtgttcaatagtaggtctagattcaatcctctcacgcgaagtccgcactgaaaggatcagccgatctccacaagggagaatcattaggtctcagatcaattgtaattgccagcaagctaggctctaaagctatggaatcggtcatgaaaagggccataaaataatc

SEQ ID NO: 105732 - DNA, 814 bp, Glycine max
  Clone ID: PAT_MRT3847_66492C.1
aagacgacagaagggggatccgcgcatattctcatttcaatttgcatttgcatttcatttggcgttttgtttctttctggaagcttcacttcggcatccatggcgtcgttcgaagaagctcctcccggaaactccaagaacggcgagaagatcttcaagaccaagtgcgctcagtgccacaccgtggacaaaggtgccggtcacaaacaaggacccaatctgaatggtttgtttggaaggcaatctggcacaactcctggatattcctattctactgctaacaaaaacatggctgtgatttgggaggaaaagaccttgtatgattacttgctcaaccccaaaaagtatattccagggacaaagatggtgtttcccggtcttaagaaacctcaggaacgtgcagatcttattgcatatcttaaagaatccactgcataatgattaaattttcatacatgcagttatgcactttactttcaaagttctggatatttaattttcagacattttattctgtggtgcagtaaatactgtatcaacaaataaagtagacttgattggtttgcaatgctattttgttcattttgcattgcttcttaagaggctgccatttattggctaatgttcaattaatttacctgttgagagttaaaacattgttattgatatatagttaagctggaagcacaattagtctttctttgccggataagtgatttttcgaatcatgtaattttttttctttggtttgcagagctgaatgcaaagggctgaattttaagctcaatggatatttattgagattcaaaaaaaa

SEQ ID NO: 105733 - DNA, 305 bp, Glycine max
  Clone ID: PAT_MRT3847_66493C.1
aataccactcccaccgaccaaaacgcgctttacgttgttatttaaacgtctctgaaactgatgggcgttgtcagcgaaaactcgaatccagacccagatgtgatacatcaggtcagggcttgaaatatggcattctaattacaacttatacgcgaactcatcgtccactatacttgaatgtagatggacacagaatttcccggtgttgattttcgaccacacctggacctcacataaccctacaagcacggatgcaacaatcgtaatcgacacttcgacgactacctgcttgtatagttcaacga

SEQ ID NO: 105734 - DNA, 285 bp, Glycine max
  Clone ID: PAT_MRT3847_66494C.1
acccacgcgtccgcccacgcgtccgaaaaaaaaaaaaaaaaaaacaaaaaaaaaaaaaaaaaaaaaaaaaaaaaaaaaaaacaaaaaaaaaaaaaaaaaaaacaaaaagggcggccgcacaaaaggtgtggaggctttacttacacgttgcacgcatacgttacacctcttcgaaagtttcacctacttccaattcacggcccatcttcttacaacgtgccgtcggttaaaaccctgtcgttaggcaacttactcgccttgcccaacttccccctttcgcaacct

SEQ ID NO: 105735 - DNA, 434 bp, Glycine max
  Clone ID: PAT_MRT3847_66495C.1
ggctcgaggaggaccaccacattcttgttagtcttaaacctggaaggaacgcaataactgatgagcttaaccagaagacgcattatttcattacttaacaactcattcagagatatgatgcagatcctgcagcgaaggcctcggctgcaactggaaagcatccagttgggcgcacactccccatatacagtgtatgtgggggatgaaacatatggtgagtcaaccgggtgcaccccagatgttgaaatggtgaagtttacagagtttcgaattcaaacacaagtgatctttatattcactacctcatgtacaactacaccggaacagtatcgtcaacaatggaatggttctggcaaagaggatcacacccaaactcctgaacataaaaaggtctggcttgttgcacctgacagtcctaaaagtttcacaatgaa

SEQ ID NO: 105736 - DNA, 241 bp, Glycine max
  Clone ID: PAT_MRT3847_66496C.1
gacagcactgcactcttcgcaagagaacagaaaaagacaacacagagagaagcgtcttaataaacgctcttctctgaaaaacctgatttcttctcttcttctcttctctttcgtttcgatcttcgatctctgaaaatgagagggggcgggtcaatccacatcggtcaggccggtagtcaggtcggaaacgcctgcggggaagggggggggctcgaagacgggaggggggctgatgggcaga

SEQ ID NO: 105737 - DNA, 687 bp, Glycine max
  unsure (1)..(687): unsure at all n locations
  Clone ID: PAT_MRT3847_66497C.1
tcctctagagcggncgcccttggtttttttttttatctattagaactctaattctcattctttattatgaaaaataaacacataagagaataaataagaatcctaattaaaattttaaaataaaataataatatctttcattcttatattctaaaattatttatttaaaaaaaacaaatataatttagaataaatatagtgtataatctcctaaaaacttaaaaaagtgaaataattcaatagattatcacctaacaaatgctgcctttatttcttttgatcgtcatagatatttagataccatagatggcactacttatattagcaatttagcatgtcactatgcacctatcgatcaaatatattatttaggtaaagaatgaagaacgaggagaatatttgaagtgttggcgtggaagttgttctgccaccaataggtagaaaatccccattacgcctgtgtgcccagggctgctactgtagttggattccatagtgaaagttttaccataaattatcttcacagaacctggtggaggataacatgtgctcattcctacaatgtaatttgtaatttgcctcatttcctgcttcttttccatttccatatcttggtattgaagagcatataacccttccatcctgaacgctgatgagcaacaccatagatgacataaccaccctttt

SEQ ID NO: 105738 - DNA, 585 bp, Glycine max
  unsure (1)..(585): unsure at all n locations
  Clone ID: PAT_MRT3847_66498C.1
aacgacataccacatgtaaaccaaaataaaccaacaaatgtataaaataaaagagttacaatatataattaaaatatcaactgattactcagctttcatatgtttacttgtgaatagctcatatgcagtataatcgtcagaatcaaattcagttgtgccttgttgaccgctcattcttttggcaggggtgatgaaggcagtgttcctttttcatagtcagctaactgggacaatgaaggcgtgggatggtaatcctataatgaagtttcagcacacgccgctggtgacttccctatacttgcttcatcctgtaaaccaagtgtggaggtcaatgtgtggatatgatgttcctcttggctaacatccaagacagatgattggcacatgtgtacatggaacttgaatctgacagccaatgtcttacccaccaaatcattcacacactcagggaacactttgatctcgtcaccaaccgaacattttgatacacgacgcnnnccagnaatgaaagttagctttctccccattgtgatccattttgacaactaatttatacctgggaaccgtatgactaacttggttctg

SEQ ID NO: 105739 - DNA, 672 bp, Glycine max
  Clone ID: PAT_MRT3847_66499C.1
cagcaaaaatagtaattatattaattgagtaccaggggtactaaaagatacaatataataatcagtgttaggctcgagattaacgatctctgaaccagtaactgataaagagttacaagctacatccgtatgcttaaataaaaattctatacatgactgctggaaaaagctgcactaatattagaagaccagtggttgtagtgaatactaaaatctttctccaactgcgtgagccatgtccatgtcaagaaaatagcttcatctagtattctgttggcattaaaagtcccattggagaagatcatattattcctttgcttccaaatactccatgtcagtgctagccaccaccatattattactgcctacttggttaatcattaaccctttcagactcttcaaaatagcagccccattcaattgttttccaagttttactcacactttaaaacttcaaataaccttgttcctagaatctttgggggggtgtccttttgcccacgttcattctcctcatcgaggaaaattgatccgagttattaaatgaatatattttggttactcccctacccaaaaaggatgcaagtgttgtcatcctgccacaaaaaaggcctttgtggctattgatggcacttttggttgaaactgaatggtttttttttcccaaccctt

SEQ ID NO: 105740 - DNA, 391 bp, Glycine max
  Clone ID: PAT_MRT3847_6649C.1
attaaaattgtacaaaaatttttttttttaagaggggtgaaccttaaaacccaatgaggaccccaccccccccccaacacccccaaaaaaccccggggaaaacctttttcaaacaaaggggtttgggcccccccctcccccatataaaacccgcataccttacccccctatgaaattttcaaatatcacacccccccaaatatgaggggcccccccccccctctcaaaagtttccgagggcccaaccccccctaaaccactcggaatgcaaaagtcgaaagggtaaccggggaaaaatgcagcatggaaacccctaaggggccccccctaagaccacaacccttctttacaagtgcatatccaccaagggcccccctcctctccccccata

SEQ ID NO: 105741 - DNA, 234 bp, Glycine max
  Clone ID: PAT_MRT3847_664C.1
atttacatccttatccttcccaattactaaagcgactctcattaatatctcattcctattcctatatcctaacccttaggctcattcattcttctactcaaaacaaaacatgtctcacacacaacccatctaatctcccccttcaacacaacaacttactgttatacaccttccgccacattattcaatccactatttcttcactctcattatagtcagtaacatatattcact

SEQ ID NO: 105742 - DNA, 262 bp, Glycine max
  Clone ID: PAT_MRT3847_66500C.1
ggaagagaccctagccactctcccggcgtcgcggtgcgtatctgcgtgaataccctaacgggtaaaacggtcgcgttgtaggttgtgtcttcggacaccatcgacaagagtggttgccaagatccaggaccaggtaggcatccctccggtccagcagctgctcatcttcgccgggaagcagctggagtacggccgcaccctcgccggctacaacatccatgaggagtccacgcttcacctcgtcctccgcctccgtggcggg

SEQ ID NO: 105743 - DNA, 150 bp, Glycine max
  Clone ID: PAT_MRT3847_66501C.1
attgctcggtgttcactgtttttcttgatgattacatccagttctctgttaaggtttttagcatcaaaatacacattattattatgtgctgtggatacttctcgcctaacagagcccacctaacaattataattagggctatgaaccaag

SEQ ID NO: 105744 - DNA, 199 bp, Glycine max
  Clone ID: PAT_MRT3847_66502C.1
tgctatggtggtgtcttttgcaccatctggtctgacatctgatgtcacgtctgtgtagatgctccatgaatctcttacagaggcacatccttgtgacaatgtgggattctgtgttaacaatgtttctgttaaggattctgcgcgtgtttgtgttgcctctctctcaatggatgtccctgtgcgtgtgtctgttatcttc

SEQ ID NO: 105745 - DNA, 103 bp, Glycine max
  Clone ID: PAT_MRT3847_66503C.1
gaattgtgctgcgttgtgctggacacactatggctaacctgtgagttacttgagccgtgtttggatggtgactaccgtggctggggcgtaaggccacaccctc

SEQ ID NO: 105746 - DNA, 1229 bp, Glycine max
  Clone ID: PAT_MRT3847_66504C.1
ggctcgaggttcttgacaatactgcactaaatagaattgctgtggaacggcttcatttatcaaatccatcatttgctcaaacaaattccttagtttctacagttaattcggctcgaggcacaacaactcttcgttatccagggtacatgaataatgacttggttggtcttcttgcctctttgattccaacaccaagatgccattttctaatgacaggatatacgcctttgactgtagaacgtcaggctaatttaattcgtaagactactgtacttgatgttatgagaagacttctgcaggcaaagaatattatggtctcttcttatgctcggacaaaagatgctagccaagcaaaatatatatcaattctgaatatcatccaaggagaggttgatccaactcaggttcatgaaagtttgcagaggattcgtgaaagaaaactggttaactttattgagtggggtcctgcaagtattcaggttgctctatcgaggaagtctccatatgttcaaactgcacacagggtcagtggccttatgctggcagtgatacgagcatccgtcaccttttcagtaaaacattgagccagtatgagaaggtgagaaagaaacaagcctttatagacgcctacaggaagtttcctatgtttgctgataatgacctctcagaatttgatgaatcaagggacataattgagactttggttgatgaatacaaggcctgtgagtccccagattatatcaaatggggaatggaggatccaaacaacatgctaacaggagaaggcaatgctacaggatcattggatccaaattcagtagcgtgaaaaaaccaagtccaaatttctgccttttcttggcaaggacaggatgattaagtgaatgggaagttatagtagtgctaaaatcatggatttgagaaacaacctctatttgccgtcgagtttttgccacatccagtggacatgtgacagctgatgctaaagttagggcaacaaaaccagcagaaaaatttgctccaaggacagtgacggcacttgctccatcaccagctaggccaacaatgtttttcctaatctgcaaagcagctccaaagtcaaggcataaaccctaaacaaaataaaaatcaactccttttcatttttttaattaaatgtaacaaaatctcacgggctcaagggttgaccagcaaattgcagagaatggaacatcacgagaaagttgtgctcc

SEQ ID NO: 105747 - DNA, 2423 bp, Glycine max
  Clone ID: PAT_MRT3847_66505C.1
gttccctctcttgtcacgagtgcgagtgacgaactaagaagtaaactaaggcgcgaagagaaatgtccgaaaacggagaagagaaattactcgctgtggcgcggcacatagccaaaacgctgggccacaacaacaccatgtctgatgacatattccaaatactatcgaacttcgatggaagattctcgagagagaatctttctgagaagggcgcagatgtggatcccagaggctgcgccgcactggatcattccctcaaatccctagaccgccggatctctccctacgtctcctccgaccgcacaatctgggccgacgccgccgattctgctgccttcctcgacgccgtggacgagctcgtcgccgtcgtcgccgagtggaaccacctcgcctccgacaagtccgtcgccgcctgcctcgtccgcgccgaggacatgctccagcacgccatgttccgcctcgaggacgagttccgctcgctcatggagcgcggcggcgaggccttcgacctcactcggagccaccggaaaggcgactcagcggggaatttgccgttcgagtcagacgaagacgtcgacgaagaagaagaagaagcgcggaacgttggaataggaggaggagacgaggaggagcagattccggtggcgctgccggtcaccgacttcgacatcgtcatcgacgcactgccgtcggggacgatcaacgacctgcacgagatcacgaagcgaatggtggcaggaggcttcgggaaggagtgctcgcatgtgtacagcagttgccggagggagttcttggaagaaagcgtgtcgagattagggttacagaagctcagcatcgaggaggttcacaagatgacgtggcaggatctcgaagacgagattgagaaatggattaaagcctccaacgtcgctctcaagatcctcttccccagcgagcgccgtctctgcgaccgcgtcttcttcggattcgcctccgccgcggacttctctttcatggaggtctgccgcggatccgcgattcagctgctgaatttcgcggacgccgtcgcgatcgggagccggtcgccggaacggctgttccgaatcctcgacgtgttcgagacgctgcgtgacctaattccggagtttgaggctctgttttctgatcagttcagtgtgtcgctcaggaatgaagcgattactatttggaggaggttgggggaagctattaggggcatttttatggagctggagaatttgattcgccgggacccggcaaagattgcagttcctggtggcggacttcatccgatcactcgctatgtgatgaactacctccgtgccgcatgtcggtcacggcagagcttggagcaggtttttgaagactatggcttgaaagagtacccaaagcttgatgatagggttccttcctcttcttctctgtcagtgcaaatggattggattatggaactgttggagagcaatttggaagcaaagtccaaaatttacaaggaccctgctttgtgttatattttcttgatgaacaatgggaggtacattgttcagaagaccaaagatagtgaattgggaaccctcttgggagaagattggatcagaaaacacgctgcaaaagttaggcaattccatgtgcactatcaaagaagctcgtggaataagctattagggattctgaagttggatagtaatgggtcaatgccccatattaacttggcaaagtcaatgaaggagaaactcaagtcgtttaacacagtttttgaggagatatgcaaggaacagtcttcatggtttgtctttgatgagcagcttagggaagaaataagaatttcgcttgagaaaatcttgcttcctgcgtatggaaactttgttgcaaggtttcagagtgttcctgagcttggaaagcatgctgataagtatattaagtatggaacggaggaaattcaagcaagactcaatggtttgtttcagggaagcagtggatcaactggtagccgaaagtgaaggtgaagctgctactagttcttcttgtgtatttgtagtgtaattaaaattaaaatacaatgttttgattatcacaaaattgtagtcttgtagtcgtgtactataaatactactgtatgttattcttcttagcatcatagtggaggattgaaaaaggattttcaagtaagagctacgagttacaaaattaacctttgtgttgtaacatttgaggtggttcttatattggtcattggtttcatcaactcttttcttgtgcagggcttagaatagtatagtatcagtatgtattttactgaatcaagcaattttgtatgttatatcatttatgtacgttttttgggtttccttgagtagatttgcttggttctattccaagagggggggggggggggggggggggggggggggggggggggggggagg

SEQ ID NO: 105748 - DNA, 2206 bp, Glycine max
  Clone ID: PAT_MRT3847_66506C.1
gggggccacgcttccttacggctgcgagaagacgacagaagggggaacgaactaaggcatcgttttcatttttgttttttgttttttgttttttgaaaaagggtcttccccgccaccaaaccctagctagcgctggaaaaatgccgagggaaatcatcactctccaggttggccaatgtgggaatcagatcggcatggagttctggaagcagctctgcctcgaacacggcatcagcaaagaaggcatcctcgaagacttcgccactcaggggggtgaccgtaaagacgtgttcttctaccaagctgatgaccagcattatataccacgggctctcctgattgacttggagccaagagtgattaatggaattcaaaatagtgactaccgaaatctctacaatcatgagaacatctttgtctcagatcacggaggtggtgctggaaacaattgggccagtggatacgatcagggacaacatgttgaagaagaaataatggacatgattgacagagaagcagatggcagtgacagtcttgagggttttgttctatgtcattcaattgcaggaggaacaggctcaggtatgggctcatacttgttggagactctgaatgaccgctacagcaaaaaactagttcagacatacagtgtgtttcctaaccaaatggagacaagtgatgtggtggtccaaccatacaattcacttttaacactcaagagattgacacttatgcagattgtgttgtagttcttgacaatactgcgctaaatagaattgctgtggaacggcttcatttatcaaacccatcatttgctcaaacaaattccttagtttctacagttatgtctgccagcacaacaactcttcgttatccagggtacatgaataatgacttggttggtcttcttgcctctttgattccaacaccaagatgccattttctaatgacaggatatacgcctttgactgtagaacgtcaggtgagatcactatgtcatttttttcctaaaagaatgattttggagcatcgaagcttttccataaatttgtgtcttcacttgtgaagatttctgttggtaaattgttgaactggaaggtatcagcagggaaattatgaattcatctctctttcttccccccccattttaaacttctgtaatctgattgctatatgcacacattgctcaaaaatgtatttttcttttaacacttgaaaattttgtgttatttccttgcaggctaatttaattcgtaagactactgtacttgatgttatgagaagacttctgcaggtcgactctagaggatccccgaagaatattatggttctcttcttatgctcggaccaaagatgctagccaagcaaaatatatatcaattctgaatatcatccaaggagaggctgatccaactcaggttcatgaaagtttgcagaggattcgtgaaagaaaactagttaactttattgagtggggtcctgcaagtattcagggtggtctatcgaggaagtctccttatgttcaaactgctcatagggtcagtggccttatgctggcaagtcatactagcatccgtcaccttttcagtaaaacattgagccagtatgagaagttgagaaagaaacaagcctttatagacgcctacaggaagtttcctatgtttgctgataatgacctctcagaatttgatgaatcaagggacataattgagactttggttgatgaatacaaggcctgtgagtccccagattatatcaaatggggaatggaggatccaaacaacatgctaacaggagaaggcaatgctacaggatcattggatccaaattcagtagcgtgaaaaaaccaagtaccacaaggaaagcataaaaaaggaaagggtttttctgaaagatcaacaaggtttcttttgaagtttttaacttttttggggtgtgagatggtttgcggtgtgattagttttgtttgtatttgtttgctaatcgtttgtgcccaagggaagggagattgagtacagaatctttctgtattgattcgtttttagcaatgtatatggttggttggtcattgaaatgtagagaattaggcaaacctagtttctttatctgtggatctgacgtgtttgttaggtgatattgctgtttggcatgaattgaaattgaaatatttaaattcaaaaaaaaaaaaaaatagatttacacgaaa

SEQ ID NO: 105749 - DNA, 447 bp, Glycine max
  Clone ID: PAT_MRT3847_66507C.1
cattccctttcttttttttttttttttgacatggaactatatggtggatgctgcagccccctattttattgaaactggccccccaaaggccgaggaaagaacatatggggaaagggtctaaattctgaaacggccccataaatacgcggaacaccccaaataggggggggagatttcaaaatcaggaccgggcttaaaaatattagtttggggccttccgattatccaaaagaaagctcgcattgcccccggcccatcttcatttctggctccccccttatgcagggcatacccaaccacaaaaccggcccaaaaaaaaaaaaacttcccccccttgattggacttggccttaggcctataaacacgcacaaaagaggagggcccaccaccaactttgtggggccctttaaaaaaaaaccaattaaaccgggtgggccctaggtttt

SEQ ID NO: 105750 - DNA, 1017 bp, Glycine max
  Clone ID: PAT_MRT3847_66508C.1
ccacgccgttcctccaggggtccccttcggtcctcttcttgggacttcttggttcttcctagctcctcctagctccccgttcctcttggcctactttggtcttgcttacatcagctttcgacaccagtcgatacctgtatatgcaccaaagtatgatacagctgggaaattttggcctattatacacaactcaatgatattttctcctggtactcatgcacatcattgcagtgggaatctttgctttgaaaaagcttttctctagcatctactttgacgatgcccctaccccccctcacaccctcacacttctctttaatgagtactgccgaaaacgattcctgcccatatttgttgcatattctgcagagagtttgaaaaagagggataggcaagatcaaaatgatgctacaatgacacagttttatgagaatttggtaaatgcttataaagaccctgcattgcttccaattcaacattcacaaaacaatgacaatcttcgcagtccccttatatctcaggcttaatgctaaggcacaatgtcattcaataataaaccagttgtgttggttcttcccagtatatgatgcaaatattcatatgtcaagggcaatgaagtgcaaaaggggcttgtatatgcttgtttgtatagatggaaaagtcttgaattccgaaagagtggccaattttttccagcttcttaaatgaagagcctaaaacttgcatatagcactgaagttatcttttgccttggctcttaaaccactttcctccttatttgcgtatatttcttacttttcttaattatttgcagagtaaaatattaaatgatatttagacttccaagatattgaacccttgtatttttattgaacattgtttttaacatgcattctctaaggatgcatcatgcacgttaacaaaaatttaagaaatgttaaatacttgctttattattaggtgaaaaaacatattgaaaaaaaaaaaaaaaaaaaaaaaaaaaaaaaaaaaaaaaaa

SEQ ID NO: 105751 - DNA, 308 bp, Glycine max
  Clone ID: PAT_MRT3847_66509C.1
gactcaccacttcaaaacactcataacacaaagcacaaagcaaagctcatccttgagttaaaaaatggcagcagcttcttccatggctctctcatccccatccttggctggcaaggccgtgaaactgggcccaacaaccccaaaaattggaaaggttaacaataaggaaaacgttaacaagcaaggctcctcaaggaacccaagggaacggccaaaacgagtcaagttccttggcccattctctggcgagcccccgttctagctaaccggtgagttcccaagcgaatacgggtgggacactgctgggc

SEQ ID NO: 105752 - DNA, 578 bp, Glycine max
  unsure (1)..(578): unsure at all n locations
  Clone ID: PAT_MRT3847_6650C.1
tnggtttttttttttaggggtttttttagaaacccaataagctgttgaggtgaaattttggggggggctaaaagggcctttaaaaaaaccaaaaaaagacaacgcgaaaattttattttcatggcaaacccaagggactgccaaaaaaaaggccaaagggaaaacaaccaaaatggcctgaaaaaagaaaaaggcataaatggtggggggtccttaaaagtaaggaacctgacctaaaaaaaaaaaaggaccaccaacaacaaaagcctgcttggctatggggggttgaagggaaatcttcctaaaaacaaacacctggggcaaaaacttggcatttttaaaaaaaaggaagggggggctgggcccaatggaaaaattcccaagaaaagggcctaatttaatcaaaagcgctttggggaagaacaaaccaggggttttctttggaaattttgcaagaaaggggggccaaaaaagggatgggccccacccggaaggaggaaaaaccaccccaagcaggttttggggggcttttgtgatctggggggggaagttccaaacaaaaaagggggggacgccga

SEQ ID NO: 105753 - DNA, 166 bp, Glycine max
  Clone ID: PAT_MRT3847_66510C.1
aatataacttattttttccactcccacctgaaattacaacctcaacatacccttcacaaaccaggcttcaccaccccaaccacaagatcgtaccaggttacaagatgtcgtaaattacgccaaacgtcttttattgacccttttgcccccaaacttttccaatttc

SEQ ID NO: 105754 - DNA, 485 bp, Glycine max
  Clone ID: PAT_MRT3847_66511C.1
tccaattctggccattagattatacgaccaaggtaaatgtaaaatacgaggcaacatggttgttcttgcttcagaattacctaaatgaccattgtgcagattaaggctgagcacttctaaactattgttacactacatatttgttgatttaatgagatttgagacagcttgcaagctgtatattcaaagctgcatttctacaaaataacaaaacacgattcaggttgtttgtagaaacaggaatgtagagtaaagttatatatcagcttttacatttgttgttaaagcagggattggctattatccaagcttacaccagatacatctgaaattttatttcaatttttagtttggaagattgcatcatcattttatcaacatcatacttgtcttctttaatattacatgagctgcattgcattcaatttttaacacatgggagctacaaatctcttgaaaagtttgtagatgacatgttgtagaaa

SEQ ID NO: 105755 - DNA, 498 bp, Glycine max
  Clone ID: PAT_MRT3847_66512C.1
ccacgcgtccggattttgtactactgaagcaggaccctgaggagggaaacggtccgattaatcttttgatatcgcacagcaaacgcaaccgggatggctcatgtttttatacttccatcgcctatggaaacggctatgatggactcttgctttatacctgaaagttctgttcacataacccttagtagattaatgtcctttacttatctccaagagcaggacaaggtttcctctgagaaagtcgacatgtacctggtgctcggcaacaaatgcgagcactctaaaagagcttatgtcttctatctcggcgacagaagcttttctcaaaagggaaagtatcacagaccatatatctgatcaaaataaggagcttgaatgctaggaccctgttatgaaaaggaggaaatgtatattgcaagcacctgtacaagaaaggtgcaccaaaagatagtacgaaatagtggcaaaaccagatgacgaactaagactgcaggtgct

SEQ ID NO: 105756 - DNA, 1022 bp, Glycine max
  Clone ID: PAT_MRT3847_66513C.1
attaattttttattatgtttttttttttctgaaatgagaagctttgacccctgtaatcagttatttacattaaaaacccatgataaataaaagtagaatgttgcaataataatatgtacaaatcatatcgtcccagattacattatttttctcctccaattagttgtactctcactttcctaattacattggggaaaaaaaattataacgatataatattttttagaattttgccttgttctttgtccatcctctgaagtcaaggactaggtcaatctccacttggttatttatgtgtgatggatatgaatatctgtacatgattacagctctgaaaaatcagctatactgtttatttgcatacaaaaatgctttattgttttagcaggcatttaagattctgaagtccctctgcagatatgcttcttcttactcgtgttctttccacaaccacaggtggtggaggatctaagttaaaacacaccatcacaactgtcaagttatctgttgatcctctcttgcttgcttcctgcactatttccttgcagcattgtttctcatcattgtgctcttgaagcctccttctagcaaaatctacagcattttggctactaaaaacatcccatattccatcactagcaattatcaagaattcatcttctttggtcaatgtcatcaatttaagttcaggttcagcactcagtggtcctcctctttcactcatttccttcattccttcaatgtgccagtctccaagagcacgagtgacacctaactggccatttaggtaaccatcatcaatgaagccacctagggactcaactcgtgtcctttcattgatgcagtttggcctatgatctttggacatttctatggcccttccatggtgggacaaaacagctcggcaatctccagcattggctacaagtaaagaccttccaaaaatacccgcagttattgcagttgtaccagaagaaagggaaggctcgtgagaggatgtttttagaaatgcagcatcagtc

SEQ ID NO: 105757 - DNA, 524 bp, Glycine max
  Clone ID: PAT_MRT3847_66514C.1
gcaatatgcaacatttttctctgtctgagtcttccatgtgttaagaacttaaagagcaacaaagaagagaaatggagagaggagaccaaaaccaaagtgcatctcttcagtctccattgattaagcactcacactcatcatcatcagggaggggtattgagagaagggaagttatagaagaagtgaagaagcagttatggcttgcagggcctttgatatcagtgacccttttgaatttttgcctcagtatcatagcgggcacctgggctgcccctctcggcgagttgtcgcgcgctggtgcttccatggccacttcttttgcctctgtcacaggtttcagtttattggtaggaatggcaagttccttggacacgttttgtggccagtcatatggagcaaaacagtatcacatgttaggcatacacttgcagagagccatgttcactctcatgatcgtcagcattccgcttgcaattatttgggcaaacacaaggtccattctaactttccttggccaggatcct

SEQ ID NO: 105758 - DNA, 495 bp, Glycine max
  Clone ID: PAT_MRT3847_66515C.1
ttaaaaaattcgcatttcatttggaatgtaccatgtttcacagtgaagctaatcatccccatggtgagaagaacatgctacgaggatagaatatgcggacaactgaaaccgattggatcccatgaaggcatccaacgtcatggccatgaataaaaccatgtgaaacttgtaccataatttttttaatttgagttgaagtgctcacactcacgggtaccacacctcaacacatatctctctctaattatatatatagaagcattaacattctttgcagtttgcacactcatggacaaagaattctccactataccggttgccggccggagctccgacgatgtgagctttgctgatacagtttttgggttttgggatttatccaattcaagcaatgatcgcgacgacgacgaatgatgacgacgatgatgaaaccatttgtactgcggaaaatggtaaagcattttgggaggaacaatatcaactttttaaggcaat

SEQ ID NO: 105759 - DNA, 540 bp, Glycine max
  Clone ID: PAT_MRT3847_66516C.1
cagatttttgtttaaaaaaaatataaaaaaaaaaaaaaaaaaaaaaaaaaaaaaaaaaaaaaaaaaaaaaaaataaaaaaaaaaaaaaaaaaaaaataaaaaaaaaaaacaaaaaaaattaaaacaaaaaaaaatagaaaaaattatgaaaataaaaaaaaaaaataaaataagaagggggtggcctttttaggaagctggtgttatatccccggaggtccgcaccttttgttttttttaaggggtgcccaaatttgaatggcgggcgggactttcaaataagcggaacattaaaaacctcgggtgtgcaaaatataatcagtttgacagaaaaactttttttccccatggggataaattataaaaattgcttacctttctttctttccaaattttgcggctttccaagtgaaaatgtaaacccccttttacctttacatttacgacgtgggggtttggggtttctccacccggaaaaatttttattttggagatggttttaagcccggggtttttttggttttgttccacttttttttt

SEQ ID NO: 105760 - DNA, 251 bp, Glycine max
  Clone ID: PAT_MRT3847_66517C.1
ctctcatcggagggaaacaatcaataaaagataaataaaaacccataaaaagattataacaaaaaaagtatgaaaggaaaagtactaggttccgcagtttctctcatcgagatggtgggcgtggtaattggcgtagatgctgaagttcaaagccaatggggggtgaaaagcatcatgaatggaggagaattgaaaacctgcaaaagggccgtgcacacgttgtgccaaggctcagacgaccagaaactgtg

SEQ ID NO: 105761 - DNA, 257 bp, Glycine max
  unsure (1)..(257): unsure at all n locations
  Clone ID: PAT_MRT3847_66518C.1
ctcgagccgcgccgccagatctcagacgagactcagtcacactttctctctttctcttccacaatgcagctcctacaggcggtgctcgcggcggcgctgctcctcctcgccactctctccgacgcccacaacatcacaaccatcctctcaaagcaccgctgagttctcaccatcaaccacgaccttaccctgacccacctggccccggaaatctacggcaaaaccaccagcatcggcngcgccgtggataacgccgc

SEQ ID NO: 105762 - DNA, 307 bp, Glycine max
  Clone ID: PAT_MRT3847_66519C.1
cggctgcgagaagacgacagaagggtcctccatgagataacgaggcaaaacaatcggattgatgacaaaacgctgcaacttgtgcaacttgataactggttctacatgttgacgccaatggagatagtttaagtcatcaagtttctcagcgatagagtttgggaacaactgagaaatgaaattcgaaggagtagaagccatggatgcatggatctggaacttgtgaagggacgatgattacgaaaaatggctctagatacaatattcgagaaactgcgagaaagaaagagagaaaaccacagaaaaa

SEQ ID NO: 105763 - DNA, 377 bp, Glycine max
  Clone ID: PAT_MRT3847_6651C.1
ttgttttttttttttttttttttttttttttttttttttttttttttttttttttggggttggagtggtttttactactggcttcatctacagctggtaaattgattaccatccccatacacaaaaaattggcgaaggcttcaaagacacggcccaaaacgaaacaaaagcggcagcatacaaaacacgcacaaaaatgacgacgatgatggaggaagggaaaccaaatgtccttgcttgtcaaaccaacaaaagatagtacctgttctgatccagaagggaccaaaaactcccctttcattgtaccactgcgcggcgagaaaccaaaccttccgccggtcatagggtgccccccaacaaaccaagggagcggcaag

SEQ ID NO: 105764 - DNA, 162 bp, Glycine max
  Clone ID: PAT_MRT3847_66520C.1
gcgtacggctgcgagaagacgacagaagggggacccaccatgcagaaaacgctacacatttggcgagctcatggctagacttcacatgacgtaaagcccccacgaccttgtgtcatgccacctgaacatgacccattacaacataaaagttatgatcagata

SEQ ID NO: 105765 - DNA, 207 bp, Glycine max
  Clone ID: PAT_MRT3847_66521C.1
aaaatcaagatatacttaagcgattttttgacaaaagcttggcttggtgtggggctggcttacttaggctgtgagagctggacttgggaaaaccatgcctgcccttttgaagcgcactgggtgctgctctagccatctgatcttacacaacagatgcaattggacacatatcctggcagacgtactgaggaagagggataagggact

SEQ ID NO: 105766 - DNA, 430 bp, Glycine max
  Clone ID: PAT_MRT3847_66522C.1
gtgcaactcactctagcagattgtctttttaaacccgctatcacgcacggtggcgatcacaatgaagtaagccatggagatgtgttgtaacgccagtatggaaagcattgtctggcgtttagcatgaggagggtagacaccaacaacatactattggtaatgccagaacattcgcatgcaagattggacatcagatcttgccctgatgtaattatatacggtgtcggtgatgagataattaatgaggttatcacactattttattgatgaaggggctgattctatctatcagattgtcgatcagaatactaacttatattggtgtcctacttgtgatacctacaagatgtctttatatggttactgtgactggcatataaactatctcagactgagtgaaaaatattgaataccttgacttgaaattgca

SEQ ID NO: 105767 - DNA, 416 bp, Glycine max
  Clone ID: PAT_MRT3847_66523C.1
accaaactaaatactctggattaaaatgatttgtatggctacaaatacaaaataatccacacaacataatcttattaacggaacacaagtcccctgccacatagattctgtttaaagacatggaatatcttcaattgaagtgagtccttacgaccataccgagtatcatgtacatacattgcaggtcccacaaacaccaattcattaacgaaggacatctccgagttttctttactaatttgcagaactagcataccttatagccacacttaggcctataacacttccagcatttaatgtatacatgttgagaacatgatacactgtcgacttaaactggctaggaacagcactgcttgtggattctgaatacatgttcaaacaggtttcattttcccatttataaatcttatata

SEQ ID NO: 105768 - DNA, 411 bp, Glycine max
  Clone ID: PAT_MRT3847_66524C.1
tgatcacctctatggtacaaacaatcaaaaaacttctttaagctgggttcgaaggttgaaaattgttgttgatgcaccaaaagctggactggcggtttcttcatgaaaccctcacgggttgcatcttgccaatgatgttggcggaacctacatcatgcatgctagatggatggtgcatggatgcatggaaaataagggtatctcgccagtagtattgacggaaccctttgagttactgtaggtgagtctcgtcaacaggaatacggaataaggggaataagagtttcaccaacagaaatggcggaacacttttaaaaaatagaccccgttaaaaaattatgtgaaaacagacccccttagataaattgtttgtaaaagagacccctgtaaatcattttgacattcatatga

SEQ ID NO: 105769 - DNA, 240 bp, Glycine max
  Clone ID: PAT_MRT3847_66525C.1
gaattctcgtcatacatttgttcaatcttcatcacttgcgtctagggattaaacgcagcttcatctagatttaaggcatatgggtaaagatgacgttcacatcagtattgtagacactcgcaatgtcaactctgggaaatcgatgaccattggtcagctgaattacaagcttgtgtgcattgaccacagtgttattgcaatggttgtgaaggacaccgctgaattgaaaattaggtcttt

SEQ ID NO: 105770 - DNA, 303 bp, Glycine max
  Clone ID: PAT_MRT3847_66526C.1
aaataattggggaaattccttcaccactgaaaatatagataaaatcaaacaattgggaattgtttaaaagatcaggctgaacaaaaggtggggcaacttaaggggggaaaaaacttatttttttttcggggatccatagtggcagggcggaaaacactacaatatgtttataagatatgggagccgagtagaaatgcgggatttccatccaataaacagaaggatgctggggggcgggcagagaacttcagcttgtggtgggagggggggaagcgaccgtgccgcagcgttgaggaggggggg

SEQ ID NO: 105771 - DNA, 289 bp, Glycine max
  Clone ID: PAT_MRT3847_66527C.1
ggctcgaggttgacgtaatacattggtggcggggatcactgccactgcacaagagtgcacggcagagatcctcatccctcgaattatcgtgcgggctcacacgctaattggagacggacagagacagggtcaactacatatgcgcgaggagaggaagagcgtccgcgactggagatccaacttcggctcactgccatggcggagggctctctgatagatgacctgccgggtctacacggactgtctcgctccgagcagcacgtctttctctgctaccagcggaaggctt

SEQ ID NO: 105772 - DNA, 231 bp, Glycine max
  Clone ID: PAT_MRT3847_66528C.1
gttctgattcggataagagacaacatcatctaggtttttctgttgaatgaaataagtgagataattcgacttaccatgtatgctgacaggatcagaattgatagcaaagcgagtcatcatgctaatgtcgcatggcgaaggtgaactggtcgtggattagatcatatcatggacttttatgcctgcaatctttacattggtacaaaggtgtgacatcaagtggatacaaga

SEQ ID NO: 105773 - DNA, 366 bp, Glycine max
  Clone ID: PAT_MRT3847_66529C.1
gaaacagaacaaaacaattaaattttcccgccctgcctaatgcatggcctattttatttttttaccctacatttttgcacacccttttgttttcaaacaaatttaaaaaaaaaattcccatgtttaaaaaccaacaaattttcttttttgctttgcccccccccttttaaaaaagaaaagaaaagaaagggaaagttttttctttttgttgcaaacttgttcaaacgggtccattttttgactttaaaatcccccttgggctccgaggaaaggtttttgggggatggagattttccagggaaggctttttttggtttcactagggacgggttaacccttgaaaagaagtcatttgattgcttttga

SEQ ID NO: 105774 - DNA, 337 bp, Glycine max
  Clone ID: PAT_MRT3847_6652C.1
gggtttttaaatttttttttttttttttttttttttttttttttttaatttggcaagttttctgataaaataagggtaaaaacctattagtgtcaaatttcaatgccaatcaaacttttacttgcaaaaggaaagaatttaccccaccaaaattggaaaagaatcccgatttgacaaaacacactttttttttcttctttgggttggaggaaaattatcccttctttggctttccacactggaaacagattcagatcagatgcttggctcaacttcttcaatcattcttgaattaaaatcagcaacactgatttttcaagtttacagacaccaaaat

SEQ ID NO: 105775 - DNA, 367 bp, Glycine max
  Clone ID: PAT_MRT3847_66530C.1
ctgggtgatgcaccagtaccatctgggtcagtacgaggaagagagagaaggagagcttgtggtgtcaaagatattctaccagacacaaccgaggcaatgcaattggtcagatagaagtgccacaaccggtgaaggaagtggagaacaacaatctaacaacaacaacaacaataatggaagaagagacagtggaagtgggacttgttcttcttctaaggaaattaatgttactcacagagatgaaatgtctgctgttgttggggtccctcccataacaaccttcaacactgccttggatattcaacaactaaaatccgaccattttggcttcatcccattcagaaaaggcttcgatgaggttggaata

SEQ ID NO: 105776 - DNA, 244 bp, Glycine max
  unsure (1)..(244): unsure at all n locations
  Clone ID: PAT_MRT3847_66531C.1
tccataacaacccatcanaaaacaaagaaaatgggggcggggactttcttcccgaaggggttcagcanaggaggagggagaaggggaaagggggccgtcttanaggggnngctcctcanctgtgnagtttncagcgatggncgatcaaagggggtatgacccattgtgcagggaactccactttngaaagtgtgtgtgctgnggtgccaatgagtacctggggctctcctccgccagcaatttt

SEQ ID NO: 105777 - DNA, 613 bp, Glycine max
  Clone ID: PAT_MRT3847_66532C.1
catgtccgaaccctctgacgtgtcttacaccattttacccaacatgggttacttcgagtttttaccgcatgatgattcctctcctattactctctccaaggactcaccctccaacgaaccaagttctgaaccagtgctgcttggtgatggaagagtcgctgaactccgtctatagacaagggagagttgccgataactctattgggccgttggagatacgagtggtgaagaatggaacgtttgaggagttgatggactacgctatctcgcgtggtgcgtcgataaaccagcacaaagtgccaaggtgcgtgagcttcacgcccataatggagctacttgactctagggtgctttcttttcattttagcccagctgcaccgcactggaccccagaacgacgtcgttgaaggaagggtagcaacgtacagcaacaacattcagtagtcatgcataagaatatctagtagtagtataataaagagaaaaaaaaatcgggttgttcattattgttgttattatccctgccgaacccgaaagtgtctgtatttgttgatttgatatttctaacgtgcttgttttttctcttcaaaaaaaaaaaaaaaaaaaaaaaaaa

SEQ ID NO: 105778 - DNA, 498 bp, Glycine max
  Clone ID: PAT_MRT3847_66533C.1
gcggtgtaaaagtaacagaggcggatagaacctaaaaacccatcaccgaccccgtgagcgtgcgtgactgatgcaggttctaatccgttctgtctctgtctctgctacctcttacctagctcgctacctcacttagtctttctccgaagcacctttttcttcttcaatcgctaccaaacttctttctctccatatattgctatctgtctgtaatgttactagtacatggaaccgcctttgcttcttggataacatggacttcatctccttcggatatactcaattacctctttatcgctaccttcaacaattatgtcgcatgcatgctgattctactttgggttatgaagctggtgttatcacttgctacattgatggacacttggtgccgccaggggctatcgttacatttatctagaagggtgtacagcactttgagatggtatccaacttgatgtgtttgtgaagcatacctgtaagaaaatttttcattcttac

SEQ ID NO: 105779 - DNA, 648 bp, Glycine max
  Clone ID: PAT_MRT3847_66534C.1
agatataataaataatatgatattgatggaatgtttaaaattaaggagtgttcaaatatcattgtccttggaaaatacacatggcaattaggtactcgacaattttgcacctgtggcacagtacatgatagaacgaaccatagcactgactaagtaagaacaacgtaagtgagagttttgggaatgggaacaactggtattattatccttaacagcttcgtctggcaaggaacctcaaattttaggcttatctcccctcaaacttcggtatagttcatctatttcaacctgataatacttgagcatattatttcttcgcttcttcattgttgaagtgaccaaatctctttccatgtcaaatggttgcgggtctaatatgacccctttgatatattcaaagcccttcagcttgtttctctcagcggtcatcttgagttcagataacacgtgcttcttcaattggtcaagagaacatagttttgagaaaggagccatgtgaccatttgaaaatgcccacttcttggtagtttcttcatttggaactactactgcaaccagagctgacttgaagctattcccataaacccagacatcttcactattggagtgattccataaacattttccaaatgctcaagagcgatatac

SEQ ID NO: 105780 - DNA, 266 bp, Glycine max
  Clone ID: PAT_MRT3847_66535C.1
gttttaaagcaaattggcaatcaaggtacaagcactaacagattctgaactgtataaacttcttcctttcaaagatattcaatcttatttagattgatgactcctgatggtcatctgtattcaaaaattgaaatatcgatcacttcactggttttgttttccgtttgaattaggaaccttgaaagaatcaaactactttcaatcaatattttcttttaataatttcactcattgaatgtcgagacaatatttactgaaagcttgat

SEQ ID NO: 105781 - DNA, 414 bp, Glycine max
  unsure (1)..(414): unsure at all n locations
  Clone ID: PAT_MRT3847_66536C.1
gggggcacctttcactctcattgacgaccaacaatagttaagagcaccaataccaccaagtcatgaggcaaanacagagctttgctccagtggggagtttctggcgcatctgcttantgngggccagnggtncgaaaccaaaaaagaggggggaanaagctgcgnagagnagtttcagactccctgggcagccaaaagtgtcatttaagcaattttctgggtatgtgactgtgaacagagggccgtnganagctctcttttactgggtcccgnaggctgcgcaaaatcctctcaccaaacctttnggcattgnggttaatgggggggcaggaggtgcatcactgnggtatggggcatctnagaagagtcngccatttanaataaacaaaacagcgttctngggtatacaaaaac

SEQ ID NO: 105782 - DNA, 431 bp, Glycine max
  Clone ID: PAT_MRT3847_66537C.1
gagtttctgttgtactagattgttgaggcaagtgtttggtcattgattttggtataagggtagtgaattttaggttcaatagaaaaagataattctgatgaaaattgaccatggcttccaaatgaagggtattgagtttttattgcagtagattgttgaggcttggtccctgattttggtagaaggttactgaattttgggttcagtagtgaactctggtgcaaacttatcttctggaagggtattaagtttttgctgcactgggttgttgaggctattgttcgtcatggattttggtgtaacttcctagtgagccatttatatccagtttagcagtggccacagtgcatcatggtttaatcataaatttaatcgtagtcaaatagagtatttgtcttgcctgttcaatcttcaatctaattttcaaagca

SEQ ID NO: 105783 - DNA, 230 bp, Glycine max
  Clone ID: PAT_MRT3847_66538C.1
agaaaaagcgtgcgctcatctatcgtggaaatatttaatgtcaatgaatatcaggaagtctccaggcgggttgttaacgtacgcatttcatatgttcaaaattgaacccctgcaagtgaaaacaataaattctgtttccaacttctataaaaacgccaacttctttaacttaaagttcttattcaacatattctattttatgtacttattgagctccaaactctacctta

SEQ ID NO: 105784 - DNA, 317 bp, Glycine max
  Clone ID: PAT_MRT3847_66539C.1
tctataagaaacgaatgaaaatggggcataatcacagaaagacaatcaaaaaaccacactctaaaaatgttaagcaacactaaatgtaaggatggacccctaaaaaaagaaaagcaagcttgtaaacaacaaaattattatagagagccaaaaaacgacaataaccacgcgaggaaactaatgcatagatcacccaaaaaatcacccaaaaaaaaaaaaaaggtccaaatttgacaaacgaaaaaacgtgaaaacctcaaaccaacatttttaaagcctcaccagaaaaaacggcctgtgcaggtgggggtcctatg

SEQ ID NO: 105785 - DNA, 102 bp, Glycine max
  Clone ID: PAT_MRT3847_6653C.1
ctgatttagtgaggattggaacttggagctggtggctgctcttaagaaggtgtgtatgagtgatggagaacgaacctgcaatagtgatcacatgatattatc

SEQ ID NO: 105786 - DNA, 243 bp, Glycine max
  unsure (1)..(243): unsure at all n locations
  Clone ID: PAT_MRT3847_66540C.1
tatatcttttgtngcattgaagcggctgaagtagacaataaaatgattgtnggtggttcagttaaccctnaaaacantacaaaattgtcagctgctttattangaggtacgcattctagttgccannccaatatgttcttanatcttaccctcaccaattccattatgctcttttccttcttncacacggatgcgcctcttattatttgatttaggtgatacaacanatatagattttttttt

SEQ ID NO: 105787 - DNA, 355 bp, Glycine max
  Clone ID: PAT_MRT3847_66541C.1
taaaagcccacgaatcacaatactgccgttccaaacccgaataaaatgccgcccatggacccatgcaagacacaacctctggcatggaacatgctccaaggacaagttccgctggcggctgaaagtcctcagggaggaaaacaaccatctcaaggactgcgaatccacactcagcatcgactttgggacaactcatgcagagttcttagtccgaccaaccaacaggactccaagaacgccattcatgcctgcattacattgctgctgaaagcaggaccagttactacctgacaccacttacgatcgatgactctgaccttgagagctgggacatctcatggatgctaatcctaag

SEQ ID NO: 105788 - DNA, 1081 bp, Glycine max
  Clone ID: PAT_MRT3847_66542C.1
ttttttttttttttttgtttgtttgttttgtcctgttcttgttcctgttacatcttctcgcgccctacttgaccaaactgaaaatactagatagaaagtaacaacctgaacctgaacatgaaacatctcacacccaacatggcaacacccagtgttccaggacgtgtaaaactcaaacgcaaatggctatagtaccattctacttaagtatttacaaacaacatttagttaaagctatacacagaaaaacaacggttccgttgtatgcgaactatatacgatcttttgctactatcagtaccaaaaaaaaaaatctaaaattaactacagcacatgataactattcctagccactagtcagcgagttttgaagcttggatgtttccatctttcctagacttgccaaatattaaagatgtcattcttttcagattcacggggactcaccagcttcttctcaacatcttcaaattttgcagtggcccatggtgccgtgcctacacttctttttgaatctgatgcatctatagtcagctcaaacacctcatcacgggaagcaaaccaggaatgaccacaggcagtacattccagctgatatcgatcaccatgtccagcatggataatatccctcaagcccaccttaccctctgtgcatctatggcatcgggcacctgtcatctgcatgtgttgtgactcatcaggctccttcttggctgtttcctaagcagtcaaaccctccttcaactcattgggcgtcatattcaatatttttggtgggccccgcgctccgtttgcttggcgccgggcttggattgctttgtgccggagcttttggactaattgtcgtagcttttggttatacttctgataatctgatgataaggtatcatgtgaagctttttccagagcaactacagctggaacagcatcatctggccaaacaaaaggcttggaactcttttgaaccttgtcttcacattcgttagcagattctaaacttttgttattgcttccattgttggcagcaccagaattgtcatttcctttctcttccttctttatgctgtcatcagaattaaac

SEQ ID NO: 105789 - DNA, 273 bp, Glycine max
  Clone ID: PAT_MRT3847_66543C.1
atcgacattattttgagtgatgtcacgcgtggcacactgggcggcctcaacctatatgcggcgcggaataggcccccttccgagggatgagcctacccggcgacctacaatcatgaaaaaagatgggggggcggcggctatgattcctcctaccaacatttttgggactaccaaattggggggggacgtactcggcccttttctgcccgcccttttctccagggccgtcttcttttgtggaaccgccggtgctttggcgggcccggtttttgc

SEQ ID NO: 105790 - DNA, 553 bp, Glycine max
  Clone ID: PAT_MRT3847_66544C.1
gaaatctcgtttgtgcttaacatgcatttgttttgattttcgttttctttttcagtgtatatgtttctcctaataattacaaaaatgtttccttgtttactatttttccttcatgatttttttaaaggaaaagctgaaaacaagaatgtctgtttttaaagaaaaaactttttttttttgattgaatgatagtgtaaaaaacttttacactgtcagcgcattctaattaaatttaaaaaaattgtgcatattagaattttaatttaatctgtaagctatgtagtactgtggtctgtgtttcatacttttctcatgggtttcttgatcatttatgcatatgaaagtatgacgcagccatcaaaattgtattctattgttgagtcttgttgctcccacttgtttattcacctcagttaaataaatccatttaccttctctttgctgctgaaaaacaaatgctttctagttcacgggtaatgcaagtttctatcgtctacctctggcttgacggattgtgtaccaggtggaagtttgtttcatctctgcttgtttt

SEQ ID NO: 105791 - DNA, 487 bp, Glycine max
  Clone ID: PAT_MRT3847_66545C.1
aaatggatgcaactgctaatcatcaaattaaaccaacagctacagtcaagcagccagaaaaggttgatgctgaagtggtcaggaaagatgatgatagcattcaagatttgtcttcatcttttaagagcagtttaattttaagcacctcagaaaaagaggaggaagtaactaaatcatgtgaagctgtgctcaaattctcccccggttgtgctattcaaaagaaagatgttcattcaatctccatatcagaaagacaatgtgatgtggaacagaatgattctgctaggaaatctgtacaagtcaaagggaaaacgagtagagttattgctaatgatgatgcttccacttccaatttagatcctgccaatgttgaagagaaattccaagtggaaaaagcaggtggatcattaaagactaaacccagatcttcccttaaatctgctggtgaaaagaaacttagtcgcactgttacttgggcggatgagaa

SEQ ID NO: 105792 - DNA, 421 bp, Glycine max
  Clone ID: PAT_MRT3847_66546C.1
gtttttgtaacttttttctttactaattttaattgctagttggggttttatctaaattatttgtaatacaattaggaaaatgaaaaataaatctctaattaaaaaaaagataccttgttattagaaaagattacctccccttactatgtcattagggtacaaaataagataacaaattatctttgtgaattatattattcaaatataaataccaaaagattgaacacaataagagtattcctatatcttgtggctacaacaacaaccaaagccttatcttaatagataggtttgatttcatgaaacaaataatgtcattgggctcaatcaaatatcaaattcctgataaatccattgatgcaactttggtgcccaaattggattggaattggacctatgtttgggttggagtttaatgcta

SEQ ID NO: 105793 - DNA, 1686 bp, Glycine max
  unsure (1)..(1686): unsure at all n locations
  Clone ID: PAT_MRT3847_66547C.1
ggcagtttcgtcctttcgatccaattctgtgccctagcaatccaacacgcgcgagtgagtcagtgttattataacggctgcaagaaaagaaccgggccggcgcagtagaaactcgaaaggaatcagtgtttgtgtgtttcgcatattcttctccgttttagatttgagagagaagaagaaagagaaaattggataagatagttttcgttttcggcgaagaattgaaatctgagtgaacgatgggagtcccagcgttctaccgatggctggcggagaagtatccgatggtgattgtggacgcgatcgaagaggaagcggtcgtaatcgacggcgttcaaatccccgtcgatacgagcaacaagaaccctaacaacatcgaatacgataacctctatctcgacatgaatggcatcattcatccttgctttcaccccgaggataggccgtctccgacgtcgtttgatgaggtgtttgagtgcatgttcgactacattgacagactattcgtcatggtgcggccgngggagctgctctatatggctattgacggtgttgcgccgagggcgaaaatgaaccagcaacggtctaggcggtttagggctgcgaaagatgcagctgatgcggctgctgaagaagcaaggttaagggaggaatttgagaaggagggaagaaaacttccttctaaaggagagtcacagacttttgattcaaatgtcattacacctggaactgaatttatggctgttttatcaattgcacttcagtactatgttcatcttaggttgaacaatgaccctggttggcaaaatattaaggttattctttctgatgcaaatgttcctggtgaaggggagcataagattatgtcctatatccgcctgcagagaaatcttaaaggttatgatccaaatacacgacattgcctatatggtttggatgccgatctgattatgttggcattggctacccatgaaattcatttttcaattcttagagagattgtatttactcctggacaagacaagtgcttcctctgtggtcagatgggtcatatggctgcaaactgtgaaggaaaggcaaaaaggaaggcaggagagtttgatgaaaaaggagaggctattgtgacgaaaaagcccttccagttcctaaatatttggactctgagagaatatctggagtatgagatgagaatatctaatcctccttccgagattgattttgattgcattgtggatgattttatcttcatgtgtttttttgtcggcaatgattttctaccacatatgcctacactagagattcgtgagggtgcaattaacttgctgatagcagtatacaagaaggaatttagggaatttggtggttatttaaccaatggaagcacgataaacttgagcagggtggagcacttcattcaggctgttggatcttatgaagataaaatattccagaaaagagctcgattgcatcagcgacaaacagaaagaataaagcgtgaaaaggcacaggcaaggaggggagatgatgctgagcctcaatttcaaccagagtctttagtcgcagtttcacgattccatggttctcgtcttgcttcagctccaactcctcaccatttcaaccttctgggcattataattctcaagcgtctgcatcagttagaaaagacaataaagaaccatttgagag

SEQ ID NO: 105794 - DNA, 401 bp, Glycine max
  Clone ID: PAT_MRT3847_66548C.1
gattgagggcgagttatatagagggaggagctggtgcggctattgctattgagatgaatatgccatacgcagtgctttgaatgagaggatatgatgatggagatgtcgtctctgaagtcattagatatgactggtggctacatcacatgtacagactgtttattacattgagattggtaatgtgggcctgctgacaccatctaaatgtaggccttaccggacaagctgctgcaggtggaacagattcaggttcaaggaatgttgaaattccaacatgaggaattccttacagcttgaacatatgaggagcgtcctacaacaactatggtgactgatgtgagaccatattagtattgtacctagcatgacatgatcactgctactactccaagctatattgc

SEQ ID NO: 105795 - DNA, 193 bp, Glycine max
  Clone ID: PAT_MRT3847_66549C.1
ccaactggacgtaaaatgcttgtttcacaatagtcatccctcatatctctggaagaatcgcaatgtgtgctagcagagaatgagatgggacttatataatcggatggtcgaaattgtgtagatgtcagtaaaattacgtgtttaaatgtatgtatgtatcttgtattattccaactatttattttttagacga

SEQ ID NO: 105796 - DNA, 172 bp, Glycine max
  unsure (1)..(172): unsure at all n locations
  Clone ID: PAT_MRT3847_6654C.1
tccacgcgtccgggttggggtcagaaaancgattggtactatggatctaggagtgggaaccagaaccagaactctcactggagttctgggcgcaatgagcccggcaatcaagatatccaacttggtcaagaaaagcaatcggtactctggacacagtgtaaaccaggcttcc

SEQ ID NO: 105797 - DNA, 420 bp, Glycine max
  Clone ID: PAT_MRT3847_66550C.1
gatcgagcaagcatgcgtaaacactagctttatttctgctcaacatgattacactatgacggaggcccaagtgaagcacgcgctcgtaaacaaatttatgggactacctgaatccagaggacaggtagcccagcttatgagagcaatgcctggacgatcagagccgacacatgatgaggaatgtgaaagggcaccggcgacaaggagaaaaatgacgctcctctactgtgaaaacagagcacgaaaaaggccctaggcagtgtgaagcatgtgctcatgcaatacaaacacaacaccgcgagattcaaggagtataatcagagtagacagacttcaaaaatgatcacgccatatctaatggtgtgactgacccatcaaagctagctgattatgtgtacaaactgaccaagatgcgagctt

SEQ ID NO: 105798 - DNA, 623 bp, Glycine max
  Clone ID: PAT_MRT3847_66551C.1
gttaaaaaccaagctaagacagcaaggcaagtgcttgcagctgcagaaaagaatatgacggatgccttacaattgaactatgatttccgaaacccatttgtaatttgtggagcaacctatgtgcccatttatcgtggacagaaggatgtcgcttgcccctattgtacttcccgtttcgtgccaagccaggcgggccagctatgtgctgtgtgtgagctttcggtggtaggggcggatgcttctgggttgctctgctctccttcccagattcgttgatttcactggatcaggagcggttaatgaattttgtttcaggtcagttttcaattttcaacagcagataagagtcctattgatcaattaatatattttctttgtgtagaagctagaagtagtcaagagttactgtttctgagtgaatttctgtctactttttttttcatggtttccctttataattctttttccccctatgctagggggaaaggctattaatctttcgtgcatgtgaagttttcttgtattatgttgaattaattttattagtttgagttggaaatcgtaacattttgaggctttaataatgtatttatagttattcatgattacttccttttttcaat

SEQ ID NO: 105799 - DNA, 2518 bp, Glycine max
  Clone ID: PAT_MRT3847_66552C.1
aattgcgtccggcattgcgtgcgtacggtacgatagggtatgaggatgaaggctctcacactggcatccctcttggcctctttctccttcacggagcttacctcgtacctggcatgcttcatcctcctcctgcttctcctggaacagatctcgtacatagtcaaaaaaggttccatcccaggaccctccttggtccttcccttcctaggcaacgcaatcccattggtccgaaaccctaccaaattctgggacctccaatcctctttcgctaaatccactcccttgggcttctccgccaactacatcatcggcaacttcatcgtcttcatccgagactcccaactctcccacaaaatcttctccaatgtcaggcccgacgccttccgcttagtgggccaccccttcgggaaaaagctcttcggcgaacacaacctcatctacatgactggccaagaccacaaaaatctccgccgtcggatcgcccccaatttcacccctaaagccctctccacctacacctcgctccagcagattatcatcctcaaccacctcaagtcatgggtcagtcaggcccaagcccaaggctcctattctattccgctccgcatcctggctcgtgacatgaacctcgagacctcccagaccgtcttcgtgggcccgtacttgggcctcaaagcccgagagcgatttgagagggattactttctattcaacgtggggctaatgaagctgccgtttgacttccccggcaccgcgtttcggaacgcgaggctcgccgtggaccggcttgtcgtagccctaggcacgtgcaccgagatgagcaaaacgaggatgcggacattaggggaagagccttcgtgcctcatcgattactggatgcaggacacgctcagggaaatcgaggaggccaagctcgccggagaaacgccgccgccgttctccaccgatgccgagatcggtggctacctcttcgacttcctcttcgcggcgcaggacgcgtccacttcgtcgcttctgtgggcggtggctttgctcgaatcgcacccggaggtgctcgcgaaggtgagggccgaagtcgccggaatctggtcgccggagtcggatgaactgattactgccgatatgcttagggagatgaagtacactcaggcggtggcacgtgaggtggtgaggttccggccgccggcgacgctggtgccgcacgtcgcggcggaaaggtttccgttgacggaatcgtacacgataccaaaaggagctatcgtgtttccgtcggcgttcgagtcgtcgtttcaagggttcactgaaccggaccggtttgacccggaccggttctcggaggagagacaggaggaccaaatatttaagagaaactttctcgcgttcggggctgggccccaccagtgtgtaggtcaaaggtacgcgttgaatcatcttgttctcttcatcgccttgttcacaacgttgatcgatttcaagagggacatatccgacggctgtgatgagattgcgtacgtgcccaccatttgccccaaagacgactgcagggtatttctgtccaaacggtgcgcacggtatccttcttttccttcggtagaggacctcgtcaaatgaccatattgcccttctctcatgggtttatttattcgtctcatgcaggtttatcattttttaaatttaattggataagatgcgttttggattccaatttttggtttaaattggataaattcaattttgactgaaaattaagacatccaaaatgtgtttttatcaaaatttgtttgtgttttgtgtctagcagccacaaaattgtgttgacttttcttctggttggtttttttgaaatgttgcaatccttgtaagagtttgtgtatgtgaatgtgagaggtgattggaaggtggatgattgggtgcttattagcaatcaaataaaatgatgtaacaaagaaagatgccaaatttactgaggtggcccttttgaacttttgggatgctgctgctgtatctgtacgtgtatcttttgtaaagttttgaaaggtgttcttttgggaaaaaacattattacatacttgtgatccctctgaatgatgaaattattgccgttattataataggttctacatctgtatagctaagtcagcaatgatttttaatagaaatgtataggagcagctcccgtgttgaaagttgaagccagcataagaaatggtgcttagcaaggttattttttctttaatgggtgtttgaaagagactaattaatagataaaaaaattgcctttctaattagataaatttgtattagtaaaatccctgataatacacttttattaaaagaatatttgttttatttttgaaataattggtggcttaaagacaattgtcacatgtcaacatagttttccccttgacattagataattttcttgcattaaaaataggttttttttttcttttttactttaattatattttaaacccctgttccccggatatataagaagtgtttaattttctcc

SEQ ID NO: 105800 - DNA, 259 bp, Glycine max
  Clone ID: PAT_MRT3847_66553C.1
gaattataatacgaacttctagaatagggctttaagtcaccatcacaaaaactttctgtgtgactattatgagacatcatggggggatatgataaacaaagatcgcaagtacactagaggacaactctaagtcagagggacatgagcacattgactgaactttaccatggggactaaagggagaagtaccagatgaagatggaaagctccaatccatgtatctgcttctaccataggaaccggtgctcatctgatcaaa

SEQ ID NO: 105801 - DNA, 1493 bp, Glycine max
  Clone ID: PAT_MRT3847_66554C.1
gttcgagaacgtgtgaagatattggaaaatgtgggccatttgcctcttgcttacatcactgcatcagtccatgggctacatgatgttgcagaacggcttgcagctgaattgggagataatgttccatctttgcctgcaggaaaagtgccttctctcgtgatgcctccatcacctgtcatgtgtggaagtgattggcctcttctcagggtcatgcgaggcatgtttgatggggagcttgacatagttgatgcagatggcttacaaaatggagatgttactgcgatttggaggatggagaagggctgaagaaaatgatgaaagggggatggagatggagtttaggtctgggccctgaagctgacactcccaaagcttctatcagtacacaatcttcagtttttgtgaccccaacacctggcatgccagtaagtcatatatggactcagaaatcatctcttgcggctgatcatgcagctgctggaaattttgatactgcaatgaggttgctgaaccggcaacttgggataacaaattttgcccccctgaaaaccatgtttctggatcttcatactggcagtcattcctatctccgggcattttcttctgctccgatcatatcacttgcagttgaaagaggttggactgagtcacaaccttcttttgccaggaggctacttgagaccaatcctactgttgaaaacccagctaagacagcaaggcaagtgctggcagctgcagaaaagaatatgactgatgccttacaattgaactatgatttccgaaacccatttgtaatttgtggagcaacctatgtgcccatttatcgtggacagaaggatatctcttgcccctattgtacttcccgttttgtgccaagccaggaggggcagctatgtgctgtgtgtgagctttcagtggtaggggcggatgcttctggattgctctgctctcctgcccaaattcgttgatttcactggatcaggagcggataatgaatttttgtttcaggtcaattttcaattttcaacagcagataagagtcctattgatcaattaatatattttctgtagaagctagaagtagtcaagagtcctattcatgattacttcctttttcaataatgactggctttgcagtataaaccatgtttccattttttagcattgtttaactgctcaattatctactatagatgtattatacaacgaccaaataaaaatggtaatgcacgtctgcgatataaattgattgaggcactgcgagagctgtctttactgtttctgagtgaatttctgtctactttttttttcatggtttccctttataattctttttccccctatgctagggggaaaggctattaatctttcgtgcatgtgaagttttcttgtattatgttgaattaattttattagtttgagttggaaatcgtaacattttgaggctttaataatgtatttatagttattcatgattacttccttttttcaat

SEQ ID NO: 105802 - DNA, 571 bp, Glycine max
  Clone ID: PAT_MRT3847_66555C.1
gcttgatgtttcaagtgtttataaaaaaattaaaaaaaaaaaaaaaaaaaaaaaaaaaaaaaaaaaaaaaaataaaaaaaaaaaaaacaaaaggggggggcggcctttatggtgcttcctttcttacgtccgcctgcatcctaggtccttgtttttttatggtgccacttttattcccctggctggccgttttttaactgggcgagggttgaaacacccctgtccctcccctatttatttttctcgcatttcctccttttttcgccggctgaaattgtacgaagggcgcccccatcgatccttccttcccaccggttgcccttttatggatggatgactcgctccccccccttttggtgactcttttcttctgggggggtttgttgttgcctccccccctttgttctctctttttttgccacccgcctacccggccgttcttttctctttctttccttcctttcccgccccctttcggtttctcccttaaggtgtttttttgtgggttgcttttttggtgcgggcctatttgactggttggcccccttccttcccttataaaaaatttttt

SEQ ID NO: 105803 - DNA, 892 bp, Glycine max
  Clone ID: PAT_MRT3847_66556C.1
cccacgcgtccgtacggctgcgagaacgacagaaggggtatctttcggaacactacaatggaatatgccctggtccattttcaagagtattgaaactcgtataagaattctccatttgcgtactagtggcgcatttacaacaccttttcaggtcaaatcctattttttcccgtgaaagttcatgttcaaataaataggccttgctgaaagaggggttttatgattatttttttcttcattaattttgatcctaaacattagaaaaaccatccaaattgagcaaatttttacccgaactctctcaagacgacagaaggggtagcacaaaccatccaatctctactccctgtgccagaacccaagatgcacgaatcagtaagaaaagaactcgaagaattggagaaagagaaagcaacaattgacaacaaagcaaacacaatggttcgacgtgagctttgggccgggttgggcttcctagtggtgcaaacagcagcattcatgaggctaacattttgggaactttcttgggacgtgatggaaccaatttgcttctacgtgacctcaatgtacttcatggctggctacaccttcttccttaggacctcgaaagagccttgctttgaagggttctaccaaagccgtttcagcagcaagcagaaaagcctaatgaaacttcacaattttgacattcaaaggtataatgaactcagggctaaggcaccaccctcttcatccattattggtcacaaaaaattgtagtaattatagaatactataattgcacaaatatcacccaccaaattattgggaaccatcatccaccttttttttctgatatcatactcatcgcggaaatccgtagagagagaaaaaatcatacaaaagagaggcc

SEQ ID NO: 105804 - DNA, 547 bp, Glycine max
  Clone ID: PAT_MRT3847_66557C.1
cttgggtgggggttagggatatgtatgtatctatcactggtaaaattaaaattaaatgtgcggtgaattgttaaatggggagcttaggtagcatgtagaatagtagacaaaaacaacaatgatgtatcaattctcattattattcataagaaaaccataataatcgtacgcgggaaaactagcaaaagctgcttattgtttattcttccaccgcttgtttatactcctcttccgcattctattcgccgccgccctagcaacagccatgtgtatactattcacggctgtatggccctgtgcggtaaacgcctgtactttccgcagcggcgctggctgtggtagcggtggcccaagcagcaaaggcgcaagtcacaacccaaagttgtcggcggggtatggcgtaaactagggcatgtgaggtggcttcgggagcaaccaggtgctaagggcaaataccgccagtggaacggtaaaagagcttccccggtagtacgcaccacaaggggccggtcacaactcaagctgcaggtgctaatatatagtagac

SEQ ID NO: 105805 - DNA, 382 bp, Glycine max
  unsure (1)..(382): unsure at all n locations
  Clone ID: PAT_MRT3847_66558C.1
ggggggagtgaagagtgcattgngtgtgatttgagtttttttcaacgttggcaagttcataagctgtgttgatttggtctttggggggaaaccatcaacgacaacgacagcatcaaaaggaagagaaagacccataacgggaacggctttcagaaacgcacaatcttttcaaaaagagcttcaaagtgaaggaaaaaaaagtgcccttttattcttggtcaccacaacgccaagacaaacaaacaaagcaaaacacacacacaaaaaaaagcgaacaagatgagccaccgtaccgcaacatgttttctgtaaccgaaacttgaagcagccactccatgtaataatactatataattcaaggtagttgttattggtgtgtaca

SEQ ID NO: 105806 - DNA, 396 bp, Glycine max
  Clone ID: PAT_MRT3847_66559C.1
gtgttttttttttttgcctttttttgcatgcacacattttaaaaatacatctcaaactcaagattgacaactttttatcatcccatgcgcctgttcacataacagttgccaaaatactaagcatgtgagtagatgcttgggaaatacacctcactggctgtgttcccgagaccaaaatcgacgatcaaacatgctctgtcccatgctaaagtgggggcaagtaatcccaaacactcgtgctatgcgctaccaccaatttgttatgtgctatccagcagccattaattattggatctctaatattcactaaaaaaaaaaggtcaaaataccggtgaaggatctttcagactactcttagagtgccaaattaaggtctactcgtgttcaaacagagta

SEQ ID NO: 105807 - DNA, 364 bp, Glycine max
  unsure (1)..(364): unsure at all n locations
  Clone ID: PAT_MRT3847_6655C.1
ttttttttttttttttttttttttttttttttttttttggcacaagaacatatcagggttcattctttaggggttaggcaaaattaatggtttttgtccccaccaccggggttattgggaaatccttccaggttccccaaaagaccttgccnagtgagaagcggggacactaccaattaaccttgaccaacctatttaaaccaagttcaaatattgaccccccattaaggtattagttcccaggaaacaagagccgaggccaggttttcctcataatccttattctccatcttctttaaaaagtaaaaaacaaacaccacttttctcaatagcaatcataaaagtttcccgccgcagggacaac

SEQ ID NO: 105808 - DNA, 268 bp, Glycine max
  Clone ID: PAT_MRT3847_66560C.1
cagccacaaaaccttggaggggaggaaccataactcaacaccaatgggaaaggggaatcgaggtataccgagcactttttgaagggggggcattcggggcttagttttctaagggtagggacaagggggataaaaggttttgaagggggccggtgaaacttcctttttaattaaaacaaaggccggggggttggaatttcttcatttatttcaacggggggtctactggccaagaacccatgctaaccatttccaaccgggcgcgggg

SEQ ID NO: 105809 - DNA, 303 bp, Glycine max
  unsure (1)..(303): unsure at all n locations
  Clone ID: PAT_MRT3847_66561C.1
gcgccgagcgatgggcatctctcgggacaactggnacaagcgacgcnagaccgggggnaaganaaaaccctacacaanaagcggaagtatgagntgggacggccggccgncancactaagattngcnctngccgcatanatacantccgagtncgaggaggcnatnagaagtatcgtgctctgagattggatgtgnggaactttncctggggctcagagngtngtnctcgcaaaacaaggatcattgannntgtcnacnatgcatccaataacgagcttgtccgcaccaagaccctggtgnng

SEQ ID NO: 105810 - DNA, 489 bp, Glycine max
  unsure (1)..(489): unsure at all n locations
  Clone ID: PAT_MRT3847_66562C.1
ggcttggaacctttcgtggaacctttgggctgatttatgtgcttgcatggtcgtgagaagatgatagcaccgggactccaaccctaaactacaaaacctccttattaagccacgggcccttccgcgccgtcctcccctctttctccaggctctctcctcagccttagtacactaatctactgccttacaccggattccgattcaattaagcccattatatagaaataggcgctcctatcgccttaatcacggaagagcgagtacggatgcgctcattacaattatgaagaagaggtaaagagatccgagacccctaagaacaatccgaatcacactagggatacgaacgtaaatagaaaactattttacctctactgcccaggaccgaataagcccgtcgatactatcttctaagagcctagtaaaaagcatccgtaagtctttaaggacgcgctgtagtaaactaaaacggttaatangaaaacgaag

SEQ ID NO: 105811 - DNA, 1348 bp, Glycine max
  Clone ID: PAT_MRT3847_66563C.1
cggctgcgagaagacgacagaagggggagagagagagttcgaggcagctagacggagagagagagggagaaagagaaggagatcgcacttaacacatcacacagcaagagaaagagtaatagaatcgtggttcgtttgcagaagaagaggttaagagaaggagtgaccgaagcgaagatcttaccaacagcttccaaaggacgttcttcttcttcctcctccttctcctcttcctctcgatcccacaatcccatgctacctccctacctccacaaaatcatcaagtgtctacatattgataatgaatatacttttgggcaaatgcgacagttatctatcagcctgctaattatcaatcagaaaccaagatttaatgggcacgtgatgatcctgcatttgtgggattctgcctgcattttttgtgatctgctgcctcctcttgtcatgtgcaattttggcttattgtgcggcatatacttcttgttctgctcatactgttctttttatcttctcaattgactgttgtatttttttgttgactgggttggttctggacactttttgttggttcctgagaggcgccaaatttcgagatggttgaacagcgtgttatgtggttgaacagcgtgttgaatggatgtatgcatttgttgcactgtgcaatttgttcttcgtgatttatgttttgctatatgttatactggatgttctttcttcattaccagtagttctgtgatttattccagtcatggttgtcaaatctgctgttcatggttggcgcttcatactatcattatctaaatttcttaggttatgatgttctgccctttttggagaggaccacctttttcctgtacccaattggaatcgtaattgtcctttctccaattttgattttaagtggtttcaatccttctagatactttatgaatatgtacttcagtcgacaaatatgatcattccagctagaacttttgacctatcggtgtccttgttgagtttatagagtattcagagaactgcaacatgagaaggctttaatgaatgtttgattgtttgtttgaagaatgcaatggcccagcaatgcctcattttaggccttctaatatactactactaccaatcgaagttggactgtagcgagtcagggtagttgttttttttttttacagttattagatagaatatttgttcaaatgaatatactcattgtaatgatttttcttggtcaatctggtagctttcctcccgacaaagaacaatttctattgatatattctttcatgaagctagatataattactctccccttgaaccccttgttttatagggtcaaaaaaaataaaaa

SEQ ID NO: 105812 - DNA, 272 bp, Glycine max
  Clone ID: PAT_MRT3847_66564C.1
cccttttggtaatagccaatgccaacttgtagtcttctctgggaacctacaatggtaactcaaagcttgctgattgttcctcaaagtgcctccatgtttaatactacaagtactgatcaatctaagtgctgctatgaatctttattctattggtacaaccttaattttcttgttaattaataattgtgcttttaactctttccaaaataataatacgtttgaaatttttccttttcttttatccttattgttcctttattatcaattttaat

SEQ ID NO: 105813 - DNA, 885 bp, Glycine max
  Clone ID: PAT_MRT3847_66565C.1
gcacgagagtcaaattaaaaaaaaaaagagctgttttcctgattgtttcgtactccgaaccaacactcacacatggtgtggtttctcttggatccatatccatagcaaggaaggaaaatcaaaagccaaatcccagtttccttttctttagatcaaacaatcaattaagcttaagcaacatggcaaatggaagcaatgacaagggtagcagcacaaccaacaacaacaactcctctattatacccaacccttcttctgcttctgcttcttcttcttcttttgtccctaataatccccgccccactgcaaatcacactgtccaattattctccggaactgtagagtcctttaacaactacgaaaatgggtcacaagatttcagccatgcaacgatcaagagctctagaattgggaattccttcaacaacctcggatcgggattgcaaactttcaggggcgctgagattcgctgtgttgacaaatctagaagcaaacgggttgcgtttagtttaccaccttgctggaaaccagaccgtgtggcccactctggaaccgttaactccttcaacaacaacggaagcggatctcagactttcgacggtttcaagtttaactgatgtacgaggtactcctgttgtgtgtgtgttcatatgtgtctctgctttcaattttacttttttcctctttttttgctggtgccagtatttactatttaggacttatgggtctgtatcttcatatccatttatttaggctgtaacttggatccatcttttgaagctattctcagtattattattcattgatgatgcccttttagctgtgaggatgtgcaataattaataaagcatatgagatccagtatttccaaaaaaaaaaaaaaaa

SEQ ID NO: 105814 - DNA, 553 bp, Glycine max
  unsure (1)..(553): unsure at all n locations
  Clone ID: PAT_MRT3847_66566C.1
gaccaaagaaaaagaaatcgtatatttaaaagagggcgtttctacttaacatttttcttgcttagatacaacatggaaatcacattgtgacacatgaaaatcactaatcagaatccgtcatacacaggatgcttaaacctcagtccaactgaatttgttttcacgcacctcacaaaacattaaaatactaaagtagactaaaaaagcctcttaaaaacataataaaaggcaagaaaattaattttcagcaaaaaaaaaggcaacaacattaataatgaattcactacaaacattaattgttgatgtagaatctgccttaccacatattttaacacaaataccatttaagagaaattcaactttagaaacatcatgcggacataaacagcaagcagaggaatccagttataaacgagacagaatcaaactaacttaaaacataggtattcacaatcatcaatgataatttcatggacagacagaacagacaccctgggggaaagtgatcatttctaataagaagtggatatttggncatgaacttcaatcaacc

SEQ ID NO: 105815 - DNA, 173 bp, Glycine max
  Clone ID: PAT_MRT3847_66567C.1
cctttctctgtctcttctctctctgctcctgaatttaacactactcagctttcatacacggcaaggcctttttattggccaccgttcccttcttcacagtgctactactgccttatccaacaccaattcccggttttctttttaggtttcggaatcaatcaatgcctggtttt

SEQ ID NO: 105816 - DNA, 410 bp, Glycine max
  Clone ID: PAT_MRT3847_66568C.1
cacattcaatggatgaatggcttattttcttttcaagggttcattggaccattcatttggttgaagggcctcccaacctaacccaattgggttaaccaagaaaccccaagggggaaccaaaggggaaaaacctaaaaattatttccaaggccttaaacctaattttccaaaattaaaaaagcctaaaaaaatggcttaagaaaatttaacacctaacagggccttaaaaacaaacctaccaaaggtgaaggcaccaaaccaaaaaaaaaaatggttttaaagtaaaaaaaaaaaatggtttaccattcttgtaattaaaaattggaggaggtaaggaaaaaaaaattagaatttgtgaaattatgttatcctttgtgggccaaaatggaaaaataatccttgtgtaaaaa

SEQ ID NO: 105817 - DNA, 577 bp, Glycine max
  Clone ID: PAT_MRT3847_66569C.1
gcacgaggctcgctgaacctgaagtacaacaacttaacggggaatattccgtggacggtgttggggtcgagaatgagccacgtggatctgagtcgaaacgcgttgagtgggcgcataccgaactcgttcggagaggactcgtatttcataagccttgatttgtcgtataacaatttgaggggttcggttcctaagtctatgggcgtgggtcaattacattggctacttggatttgagtcataataactgtctctgtgggcgcatgccacgtggcgtggccttcaaccaccttcaaccgctaaaaccatgctctcgtgcctctggtcgcatgcatgcgtgagtcaaatatgaaatacttactatctttgttgttgtgtcttgtgtgttcaatatcagaggcttgggtttcatcgttcagcagctagctttgcatgtcattcaactttgtttgtcgtcaaattaactaaatgtgtacttcaaaatagcaattcattttcttcttcttcttctaaacattagcttttgggacaatgtttgattttgaattgttttttttttttttaaatatatatatgtg

SEQ ID NO: 105818 - DNA, 487 bp, Glycine max
  Clone ID: PAT_MRT3847_6656C.1
gttgtggggttttttttttttttttttttttttttttttttttttttttttttttttttttttggggggaaaaagaaaaaaacccccccaacttttaaaacccgccggaaaagattaatttgggcaaaccacccgggggggggggggggggggaaaattgggagggggagggttggggcaaaaaacaaaaaaaaaaagaggacctcccaccccaaaaaagggggggggaattttccccccaaaataaaaagggggggggggcaaaagcggacccacgggaaaacggagcctatgggggggagccagcgggagatcttttgccccggggaaaaaaccaaccaaggtggagaggggggggaaaaaatgagacggggtcttataaaaggaaatttctcccaaagtttggggacaaaaaggggggttaagacccggggcgggggagagaaatttttttataagggggcaccacaaaaaaaagggggggggg

SEQ ID NO: 105819 - DNA, 216 bp, Glycine max
  Clone ID: PAT_MRT3847_66570C.1
gaagtgcgtgcttctgtttctgtcggtttggcggtgcgggttcccaaggcagagactccacaggtgactttccctttttaacgttaaaatgatgaaaactgaggccttactagttgtggtgtggttggggagctttgttttttttatgggctgagagggccgtccattgggtatcatggggggggggaaagagtctgtgggggggaagtggtggat

SEQ ID NO: 105820 - DNA, 721 bp, Glycine max
  Clone ID: PAT_MRT3847_66571C.1
ggctcgaggcaccctttggccattcatgatcgtacctatagcttccaatattctgattatcgagaggaagatcaggatggctggtgtttcttccatgcttcttttctttctatttgtaatattaatatctcaagtcagtgcccagttaagcgtaacctgtgattacagcaaggtcggaaattacacagcaaatagcacctataacaccaatctgaacacccttttatccactctctcttccaacacagaaattaattatggtttctacaacttctcacatggtcaaagcccagatagagtcaacgccattgggctctgcaggggagatgtggagccagataagtgccgcagttgcctcaactatgccagaagcaatctcacacaagattgtccaaatcagaaagaggcaattatacattttgacaattgcatgttgcgctactccaaccgcacaatatttggccaagtggaaaattttcctggtctctatatgtggaacttaaagaatgcaacggacgtggatgagttcaatcaagtgctcgcaaacttaatgaggaacctcaaaggagtagctgcatcgggtgactctcgtcgtaagtatgctacggatgatcaaactagtggaaattttgaaaccatatatggtcttgtgcagtgcacccctgatttgtctgagacacaatgcaatgactgcttggatgggactatctcagaaatccca

SEQ ID NO: 105821 - DNA, 165 bp, Glycine max
  Clone ID: PAT_MRT3847_66572C.1
tgttgagacctcatgacatgatgagctacccgctgattttaatcccaaaaaaaaaaatcaaataaaaaaaatatgctgccgctctaaagtaaccaaactaacttacgcttgcatgctaaatcataactcttctatagtctcacctaaattcaactaactgcccat

SEQ ID NO: 105822 - DNA, 689 bp, Glycine max
  Clone ID: PAT_MRT3847_66573C.1
aaaaaaattctattctggaattatatagttccaagattgagtaatacgaaacaaaataattgagcaaaaaataaaaaacgaaacaaaatagtggcagattagtcaatccaatccaaaccaatactaacatcattctagattgtcttaaatctgctcttggactcaatacacaatgaaaagatgggcccaaatcctgatatgtcacgaaaagagtgagacattgcaaatgccacggtcttgcaatctacctcggagattattttttgaagacattcctagttcggagaagcctccatcggattaacaaaaatgtatgcagccatttttttcacaggaaaatgcttttggaattgtcacatgtctcaaagatgatagaggccagtttattgtggcaaagagtgttgacaaaaaatgtgttctttacatttctcttttttattatacttgcataaatgcacattcaaaagaacagagagataaatgtctaacaaggtggtgagaagagcgatagtttaactctcatgatgtattctatgtttagcttagctgcacccaaatctccgttttcaatgtaagatgcacacattcatcccctcccctaaatgtggcattatattatcaagcgccttcgtgttgctctaccccttcagctcttgtaatgttttcatcattcggcaccgcgcctcggt

SEQ ID NO: 105823 - DNA, 2019 bp, Glycine max
  unsure (1)..(2019): unsure at all n locations
  Clone ID: PAT_MRT3847_66574C.1
atggcttcctcttcttctttactcctactcgagttcaaatttcttgcaccgcaaattacccccaaacggcgccgttctctatctagtttttgctctcgccattccgtttctctgaactccaggtacaatgttgctctccgtacgcgaatccgcgccgtcatggaagaaggtgccgtcattgacagagtgaacgacgtcaaatggagtggaaacggagttgccgccagcgaatacggtggtaacggctccgttaacggttacgtgaacggcgtctcgggagttatggagagtgaggatgcgaacggaagattggtaaagtacgtgaacggcaatggtgtagcggcagaagtggtggaagattttgcggaatctttgaagcggaaggaagatggaagaaagaagaggttggaggagattggtaaagaggatgcctggttcaaaaaacaaactggggaagcaccaattgaggtggcggttgcgcctggtggtcgctggagcaggttcaagacttactcgatgatccagaggacgttggagatttggggatttgttataacatttatcttcaagtcttggctgaataatcgcaagttctcttataaaggaggaatgacagaggaaaagaaaatcttaaggcgaaaggcccttgccaagtggctgaaggagagcattctgagattaggtcctacatttatcaaagttggccagcaattctccacaagagtggacattcttccacaagaatatgttgatcagttgtctgaacttcaggatcaagttcctccatttccctcagagactgctgtagctattgttgaagaagaacttggaagtcctttagctagcgtctttgatcattttgagtatgaaccaatagctgctgcaagtcttggtcaggttcatcgtgcaagattaaggggacaggaggttgttgttaaagtgcaaaggcctggtctcaaagctctttttgacattgatcttaaaaacctgagggttattgctgaatatcttcaaaaaattgatcccaaatcagatggtgcaaagagggattgggttgctatttatgatgagtgtgcctctgttttatatcaggtgatgattttctggaatcttgttgcactcttagtaacagcaagagccatgcttgttgggaatttcatatgtcatcagtcgttttctaaaaccttgaacaacattattgcttttcaagagattgattacaccaaggaagctgctaatgcagaactatttgcaagtaactttgaaaacttggattatgtgaaagtccctacaatcatctgggattataccacaccacagattctgacaatggagtatgttcctgggattaaaataaataaaatacaagctttagatcgactgggtcttgaccgcaaaaggttagggcgatatgcagttgagtcttacttggagcagatttatcacatggtttcttccatgctgaccctccaacatgttatgttcactatctttgaatttgctcttatactgcaaccttcaagcatctgttacccgaggtacaagaaacaatgctgcttgtgccatatagattatcatctgttgccttgggaagcttccctagggcttattcacaagggcattagattagaacatcctgaanatattgcagttgatgatgtcaatggtggaagattgatcttttatgattttggaatgatgggaagtatcagtcaaaatatccgagaagggttacttgaagctttttatggaatttatgagaagaatccagataaggtccttcaatcaatgattcaaatgggtgttcttgtcccaactggagatatgactgctgttaaacgaacagcacagttcttcctcaacagttttgaagagcgtttggctgcacaaaggagagagagagagatggaaacagctgaacttggattcaaacagccattaagcaaagaggaacaagtaatgaagaagaaagaacgtctggctgctattggtaatgcacctggtctagtgtgtctttaa

SEQ ID NO: 105824 - DNA, 489 bp, Glycine max
  Clone ID: PAT_MRT3847_66575C.1
gtagaatacaagaggaaaagaatgggggtatttggtggatattataggtgcaagagtcctatttaaaggcaaagggaagaggatgacttccccttttacattaaaaaaaaattaaagcctgttctgaaacctgaaaataggccatgttcaattttttcttctccaaatcctataactgaagcctattacaaagcatgcatgaactcctagactgaacctatctctgcatgacagtgcacggcacgaatcaatgcaaggttatcctactatgacaactggtggaatactgcatggggtaaccctttgggtgctttaaggccattcaggatggcagaaccatttttgttaaaagaaccctgcatggggtaaccctttgagtgctttaaggccatttaggatgacagaaccatttttgtaaaaggaacccgtcattttgccgtggaacctgcggaacacctttatatatctgacactttacattggtttatt

SEQ ID NO: 105825 - DNA, 245 bp, Glycine max
  Clone ID: PAT_MRT3847_66576C.1
gtctcactctacttgtcctctttgtagagccagcttgctccctgatcaattctctgcaaccaacgcatgttctcctattgttcttgtccttgaatctgggagtagtgagagctccagggaaatcgttcccgaaagagtgggttcttctgctgctgttggaaggactagttcggttatgaccacagattctcgccttggttgccgtggagatagtgaatttggatcgacccgtgtggatttgatga

SEQ ID NO: 105826 - DNA, 2285 bp, Glycine max
  Clone ID: PAT_MRT3847_66577C.1
ctgacaatggagtatgttcctgggattaaaataaacaaaatacaagctttagaccaactgggtgttgaccgcaaaaggttagggagatatgcggttgagtcatacttggaacaaattttatcacatggtttcttccatgctgaccctgtgagtttgtacttttagaatcaatatcagaaatctctttatatattatgttacattatatatggattagctatctggtaaattgtatagtaaagccaaaatgttaactgtctttgaacttgctcttatgttgcaacgttagcatctattgtctgagcaatgagatgtacgctacttgtgttttacaattattattcttttgctagtctgcttggttgtattttgacaatctcaggctatctctctcactaccttagagcaactgttattgttaagcaatccttaagggtcctgattggttttggtctacgggtataaagcaaaagggctttagggaccttgggactcacaggtattggattcctatcagatgatcttgtgtgtaacccatagatgtttacattgttcctgcagcatcctggaaatattgcagttgatgatgtcaatggtggaagattgatcttctatgattttggaatgatggggagtatcagtccaaacattcgagaaggtttgctcgaaacattttatggggtttatgagaaagatccagacaaggttctacaagcaatgattcaaatgggagttcttgtccccactggagatatgactgctgttagaagaacagcacaattcttcctcaacagttttgaagagcgcctggctgcacaaaggagagagagagaggaagcaacaactgaacttggattcaaaaaaccattaagcaaggaggaaaaaataaagaagaaaaaacaacgtctggctgctattggtaatgcacctggtgtataattgaatgcatatttaagtttaggctatataaatgtgtgcttgtaagtattattgttgatttatctgctgtatgtgaagataaaaaatgtgttggggaagagtatataatatgcaggctatctcccacccagctacaatataggaaggaattgggagagattcggacctcttgaatgtccaggactgttcttaacaaaaatcattccttcatttgtatctgaaccagtttctatcagatactcagctgtcttgctttaagcaggtgaagatttattatctattgcagcagaccagcccttccgatttcctgctacattcacatttgttgttagagccttctcagtgttggatggcattggaaaggggcttgacccacgttttgacatcactgagattgccaaaccttatgccctggagttgctcaggtttcgtgaagctggggttgaagttgtcctaaaggacttcaggaagagatgggatagacaatctcaagcattttacaacttaatcagacaggctgatagggttgacaagcttgctaacattatccaaagactggagcaaggtgatctaaagctgcgagttcgaactttggaatctgagagggcattccaacgtgttgctgcagtccagaagactatagggaatgcagtagctgctgggagcctaatcaatcttgcaacagttttgtatctcaactcaattcgtgtgcctgccattgcagcatatatcttctgtgcaatctttggttttcaagtgctcttgggcattgtaaaggtcaagaagctagatgaacgggaacgattgataacagggattgcatgagcagctacatgatttaggaccgagaaatagcacatgttacggtcatggttgcaagtcaaccttcagaaaaggattaaatgacctggggagctgatagaaagcattacccaacatttcgaaagacttcagcaagtacaaaaatttcaagcagcaaatgatgggggctttctccattcacctgtttctgttaataaaaaaaatgtgctctacgatagccaaattggcttagagccacatttttgtcatacaccccacctctcccaaaaaattataaatataagttattgccgcatagtaacttgtataggtatgatatagagttttcatatattcacaatccacaattacattccacgcccgaattggaccaaaatctgtcaaaattcagctactagtatttttctatgtagcatgacccttattgtaattaccatacggtataatgcagcttccgactaaaatttggagggaagctctgccccaaattgactaacataaatgaaaaaatgtctgcttgtgtc

SEQ ID NO: 105827 - DNA, 583 bp, Glycine max
  Clone ID: PAT_MRT3847_66578C.1
gattccctctctcttcttagaaaccttaaaatcataaacttttccaataacaagttcagtggaagtatctttcctctgactggttcaaattctctcactgttttggacttgacaaacaacagcttctcaggttccatcccttctattctaggcaactccagagatctcacgcgtctcagacttggaaacaattatctcacaggaaccattccttctgaacttggccacctcactgagctaaacttccttgatttgtcattcaacaacttgacaggacatgtgctacctcaactctcaaactgcaagaaaattgaacaccttctactgaataataacagattgagcggggaaatgtcgccttggctgggaagcttacaagaacttggtgagctggatctctcattcaacaactttcatggaagggttcctcctgagcttggtggctgctcaaagttgcttaagctttttctccatcacaacaatctctcgggtgaaatcccgcacgagattggacaccttacttcactcaatgtcttcaacttgcaaaagaatggtctctctggcctcattccatcaacaattc

SEQ ID NO: 105828 - DNA, 1648 bp, Glycine max
  Clone ID: PAT_MRT3847_66579C.1
aagctcggaattcggctcgagctattggtgaggatttattagccattgcagcagaccagccctttcggtttcctgctacattcacatttgttgttagggccttctcagtgttggatggcattggaaagggcctggttcctggtttggtatttccggaattggccaaacctattgctttgaagtggctaaaatccgtgaggcaggagttgaagttatcctaaaggacttcaggaagagatgggatagacaatctcaagcattttacaacttaatcagacaggctgatagggttgacaagcttgctaacattatccaaagactggtatttccctgattttcagatatatagttcaagttatttatttgattcatacctgttgtttgttttgaacttttggtactctagatcactgcttatttaatttttccacaggagcaaggtgatctaaagctgcgagttcgaactttggaatctgagagggcattccaacgtgttgctgcagtccagaagactatagggaatgcataggggagcctaataaatcttgcaacaattctgtatcttaactcaattagggtgcctgccactatagcatatgttttctgtgcaatatttggttttcaagtgctctttggcattgtgaagatcaaaaagctagatgaacgggaaaggttgattacagggactgcataagcaactacttgatttaggatggacatgctgctcatgttaatgtcatggttacaagtcaaccttcggggcatcaaaatgactaggagctcagagtaagagctagcatcttggaatatatcagcatgtgctaaatctttatactggcaggcatgctggaggcttctgttctcatttacttccctaaaatgattgagctgaggtagccaattggcgagccacatttttgtcattaacacgatcccccatgtgttttcattgctaaattttattatcaaataacatgtattagtgttttattttatttttttacctcatccatattgtaaatttaataggcattggtgtagattgtagcgtttattgttgtaatcaccatatggtatggtgcagcttccaatatagtttgacagcgggaagctttgcttgtaactgacgtacataaatttatccaatgaaaatgcaaatataagtattttctattttgcaagtcaatcaaaaaaaaaggattaaatgacctggggagctgatagaaagcattacccaacatttcgaaagacttcagcaagtacaaaaatttcaagcagcaaatgatgggggctttctccattcacctgtttctgttaataaaaaaaatgtgctctacgatagccaaattggcttagagccacatttttgtcatacaccccacctctcccaaaaaattataaatataagttattgccgcatagtaacttgtataggtatgatatagagttttcatatattcccaattcacaattacattccacgcccgaattggaccacaaaaaaacaaaattcagctactagtatttttctatgtagcatgacccttattgtaattaccatacggtataatgcagcttccgacaaaaatttggagggaagctctgccccaaattgactaacataaatgaaaaaatgtctgcttgtgtc

SEQ ID NO: 105829 - DNA, 164 bp, Glycine max
  Clone ID: PAT_MRT3847_6657C.1
ggggagaaaggtatttctctcgcatggaataattaggagaaaatatgcgaacattcaagcaaagcatttgtttgtttatgaaataagtgcacacattcctttattgtggggggcattaatttatttataagattggaattcatatgcctggaatggcgctaaaa

SEQ ID NO: 105830 - DNA, 1864 bp, Glycine max
  Clone ID: PAT_MRT3847_66580C.1
aaattaaggcttttctataatgcttatggtactatgagcaaatctgatataacttctgataatgtcttttctttaaccccaggttattgctgaatatcttcaaaaaatcgatccaaaatcagatggcgcaaagagggattgggttgctatttatgatgaatgtgcctctgtcttatatcaggagattgattacaccaaggaggctgctaatgcagaattgtttgcaagtaactttaagaacatggattatgtgaaagttcctacaatctactgggattataccacaccacagattctgacaatggagtatgttccagggattaaaataaacaaaatacaagctttagatcaactgggtgttgaccgcaaaaggttagggagatatgcggttgagtcatacttggaacaaattttatcacatggtttcttccatgctgaccctcatcctggaaatattgcagttgatgatgtcaatggtggaagattgatcttctatgattttggaatgatggggagtatcagtccaaacattcgagaaggtttgcttgaaacattttatggagtttatgagaaagatccagacaaggttctacaagcaatgattcaaatgggagttcttgtccctactggagatatgactgctgttagaagaacagcacaattcttccttaacagttttgaagagcgcctggctgcacaaaggcaagagagagaggaagcaacaactgaacttggattcaaaaaaccattaagcaaggaggaaaaaataaagaagaaaaagcaacgtctggctgctattggtgaagatttattatctattgcagcagaccagcccttccgatttcctgctacattcacatttgttgttagagccttctcagtgttggatggcattggaaaggggcttgacccacgttttgacatcactgagattgccaaaccttatgccctggagttgctcaggtttcgtgaagctggggttgaagttgtcctaaaggacttcaggaagagatgggatagacaatctcaagcattttacaacttattcagacaggctgatagggttgacaagcttgctgacattatccaaagactggagcaaggtgatctaaagctgcgagttcgaactttggaatctgagagggcattccagcgtgttgctgctgtccagaagactatagggagtgcagtagctgctgggagcctaatcaatcttgcaacagttttgtatctcaattcaattcgggtgcctgccattgcagcatatatcttctgtgcactctttggttttcaagtgctcttgggcattgtcaaggtcaagaagctagatgaacgggaacgattgataacagggactgcataagcagctacatgatttaggattaggaccgaaaaatagctcatgttaaggtcatggttacaagtcaaccttcagagcatgaaaaggattaaatgacctggggagctgaaagaaagcattacccaacatttcggaagacttcagcaagtataaaaatttcaattagcaaatgatgggggctttctccattcacctgtttcagttaataaaaaaattgtgctctacaatagccaattggctttagagccacatttttgtcattacaccccacctccctcccaaaaaaattatatgttattgccccatagtaacatgtataggtatgatgtagagtttggatatattcacaattcactactacattccacgcccgaacttaaccgaaatctgtcaaaattcagctactatttttctatgtagcatgactcttattgtaattactattacagtattatacagtatgatgcagcttccaacaaaaaattggagaggaagctttgcccg

SEQ ID NO: 105831 - DNA, 493 bp, Glycine max
  unsure (1)..(493): unsure at all n locations
  Clone ID: PAT_MRT3847_66581C.1
aggccccnnngaagnaacaanncaaancaaaggataattttaataagttagttacaatgtgcgtaaaaattattacatggacaaatacaattcaagcaacatattaatcgaaaacaataaacattctcaatgcctttcatcaaaacgtaaacaaagttgtcatttattgtatggacttggcaaaatgtactttttattttttaaaaatggacatcattgttttcaattcaattgaaataccatctaaatgatttagattgattttcgttttgcaacctttgtttcccatttaattcatttctgatgtcaactctgatgatattcaaacttccttttgtatgtctggtttcaatggatttcatttaagtggttcaaaatgatcccaatgacaattttgtatcaacatggactaatggaggacaatggacaatttcacctttataggaactaaagacacaaatttaacctttaaattaatccaaccctcacgtac

SEQ ID NO: 105832 - DNA, 607 bp, Glycine max
  Clone ID: PAT_MRT3847_66582C.1
cccactcgtcctagaaattatcacatgtgggaacagaagctgtacgagattatcagaataagaggaagaaaattgtttcagttggctccagacaacgttgttgtgagccaaagggtggtggtgaacccagatggttctggaaacttcacaactatcaatgatgcagtggttgcagctccaaataacaccggggttggaaatgggtttttcgtgattcacgtggtggctggagtgtatgaagaatatgtttctattcccaaaaacaagcagtacctgatgatgataggagatggaattaaccaaaccataatcaccggtaatcgcagcgtggttgatggttggactaccttcaattctgcaacatttgccgtggttgcacaaggttttgtggcaataaacataacatttcgcaacacagctggagcaatcaagcaccaagcagtagccctcagaagcggtgcagacctatctgcattttacaatcgtagcttcgaagggtaccaagacaccttatacactcattcccttagacaattttacagaaactgtgacatttatggcacggtggacttcatatttggtaacgcagcagttgtattacaggact

SEQ ID NO: 105833 - DNA, 4614 bp, Glycine max
  Clone ID: PAT_MRT3847_66583C.1
ggtccggattcgggcctcgacccccgctcccgtcacgcgcaatgaaatctaggttttgagtttgatcctgtcaatggcttcctcttcttctctactcttacttgagctcaaatttcttgcgccgcaaattacccccaaacgacgccgttctctctctagattttgctctcagaactccaggtacaatgttgctctccgtacgcgaatccgcgccttcaaggaagaaggtgccgtcattgacagagtgaacgacgtgaaatggagcggaaacggagttgccgcgagcgaatacggtgctaacggctccgttaacggttacgcgaacggcgtctcgggcgttagggagagtgagaatgcgaatggaagcttggtgaagtacgtgaacgacaatggcaatggcaatggtgtagcggcggaagtggttgaagattctgcagaagcgtcaaagcggatggaagatggaagaaagaagaggttggaggagattggtaaagaggaggcctggttcaaaaagcaaactggggaagcaccaattgaggtggcagttgcacctggaggtcgctggagcaggttcaagacttactcgatgatccagagaacgtttgagatttggggatttgttgccacgtttatctttaaggcttggctgaacaaccagaagttctcttacaaaggaggaatgaccgaggaaaaaaaaaccttaaggcgaaaggcccttgccaagtggctgaaggaaaacattctgagattaggtcctacattcatcaaaattggccagcagttctccactagagtggacattcttcctcaagaatatgttgaccagttgtccgaacttcaggatcaagttcctccatttccctcagagacttaacttccgattcatggcagcgtcttctcctctccctttacccgaactccatttcctttctccgcaaattatccccaaacgccgtatttccctctccaaactcccctccatttcccgccacgtcacttccaacgtttctctccgcaccgcacgaatccgcgcaagcagagaagaatccgccttggccgaccaggtaaacgacgtcgtatggaccggaaatggcgccgccgccgctgattccaacgccaatggctgtagctattgttgaagaagagcttggagctcctttaggtgatgtctttgatcagtttgagtatgaaccaatagctgctgcaagtcttggtcaggttcatcgtgcgagattaaatggacaggaggttgttattaaagtacaaaggcctggtctcaaggatctttttgatattgatcttaaaaacctgagggttattgctgaatatcttcaaaaaattgatccaaaatcagatggtgcaaagagggattgggttgctatttatgatgaatgtgcctctgtcttatatcaggagattgattacaccaaggaggctgctaatgctgaattgtttgcaagtaactttaagaacatggattatgtgaaagttcctacaatctactgggattataccacaccacagattctgacaatggagtatgttcctgggattaaaataaacaaaatacaagctttagatcaactgggtgttgaccgcaaaaggttagggagatatgcggttgagtcatacttggaacaaattttatcacatggtttcttccatgctgaccctcatcctggaaatattgcagttgatgatgtcaatggtggaagattgatcttttatgattttggaatgatgggaagtatcagtcaaaatattcgagaaggtttacttgaagctttttatggagtttatgagaagaatccagataaggtccttcaatcaatgattcaaatgggtgttcttgtcccaactggagatatgactgctgttaaacgaacagcacagttcttcctcaacagttttgaagagcgtctggctgcacaaaggcaagagagagagggatggaaacaactgaacttggattcaaaaaaccaattaagcaaggaggaacaaataaagaagaaaaagcaacgtctggctgctattggtgaagatttattatctattgcagcagaccagcccttccggtttcctgctacattcacatttgttgttagagccttctcagtgttggatggcattggaaaggggcttgaccctcgttttgatattactgagatcaccaaaccttatgccctggagttgctcaggtttcgtgaagctggggttgaagttttcctaaaggacttaaggaagagatgggacagacaatctcaagcattttacaacttatttagacaggctgatagctcaggttagcttgatgacattatgcaaagattcgagcaaggtgaactaaagctaggagtacgcaatttcaaacattttaggactttatcagaaggtgctatagtcttgacaactatccggagtgcagcagaagactggagccaaatcattcaaaaaagcgagttcgaactttggaatctgagagggcattccaacgtgttgctactgtccagaagactatagggaatgcagtagctgctgggagcctaataaatcttgcaacagttttgtatctcaactcaattcgtgtgcctgccattgcagcatatatcttctgtgcaatctttggttttcaagtgctcttgggcattgtaaaggtcaaaaagctagatgaacgggaacgattgataacagggactgcatgagcagctacatgatttaggaccgaaaaatagcacatgttacggtcgtataaaaatttcaatcagcaaatgatgggggctttctccattcacctgtttcagttaataaaaaaaatgtgctctacaatagccaattggctttagagccacatttttgtcattacaccccacctccctcccaaaaaaattatatgttattgccccatagtaacttgtataggtatgatgtagagtttgcatatattcacaattcactactacattccacgcccgaacttaaccgaaatctgtcaaaattcagctactatttttctatgtagcatgactcttattgtaattactattacagtattatacagtatgatgcagcttccaacaaaaatttggagaggaagctttgccccgaaattgacttccatagatttgtttcataagaacaaaaagcttgatggaggggaaaggttgattacagggactgcataagcaactaaagatttagggtggacatgttgcttatgttaaggtcatggttacaagtcaacctccggggcaccaaaatgattaggagctcaaagtaagagctaacatcttggaatatatcagcatgtgctaaatctttatactggcaggcatgctggaggcttctgttctcatttacttccctaaaatcatcgagctgaggtagccaactggcgagccacatttttgtcattaacacgatcccccttgcgtcttcattgcaaaattttatcatcaaataacatgtattagtgcttttttgtacctcatccatgttgtaaattttataggcattggtgtagattgtagtgtttattggtgtaatcacatatagtatggtgcagcttccaatatagtttgacaacgggaagctttgcttgtaactgacgtacataaatttatccaatgaaaatgcaaatataagtattttctataaggcaaaacaaaagccataggtctcgactcttcgccttttcctttgcaattgttaccaaacaattcttgcttagcccttacaagcaagcattaacaacaatgaaggtcagaactagactcttttatttcccctccttccccttaccaatgcatgaatcacgttattgaattttctgagatttttatttgactgtttccttaatttcacgttttatagatgtagctagaagtgattaattgttggttcttaacagctattttttacatacgcctgcgagaagacgacagtgggggacaacttcattagcaaaacaaaagccataggttactactcttcgccttttcctttgcaattgttaccaaacaattcttgcttagcccttacaagcaagcattaacaacaatgaagaaagtagtgttaaaggtgggcttacatgatgatagaatcaagcgaaaagttatgagaacagcatctggtctttcaggggttgaatcagtttctattgacatgaaagacgagaaaatgaccttattagggaacattgatccagtgaatgcagtgtgcaagctacgaaagtgttgtcaaactgaaatagttacagttggtccagcaaaagaggataaggagaaagagaaggtggagccagtaaaagaacctgttcctctcaaactctatgatgcctatccctattattatcaaatgacacccccactgtatatgtatagttaaaatgtaacataggctagaagttttgaagagaatcctataaagctgtgtcatctgctaaattttagaatattgaatattaggagtattattttcagcaaaaaaaataaaataatgcatgtatgcatgccttcgtaatgtctttggcttttcctgcaacacacgtcttcttatagtatagtttattggaagtaaaggcatcataatgaatgtgaatgacacaagtttacaccc

SEQ ID NO: 105834 - DNA, 481 bp, Glycine max
  Clone ID: PAT_MRT3847_66584C.1
gccacacgtcgcggcctctacgtatccttcacgcggaacagtaccatgattttctctactatcctcttgaggaatactacctgaatttctttgacttcgtgcaggagatcatctcgatggacctcacatgtgatgtacgtggggtcggggtggaagaccttcggacgatgttcgtggatatggtgggccgagatcgtgcgcatggaatgcgaggacacttgtaccgatatcgagcggatgcaccgcgacgccgagtctctggctcgtagggcgccgcgctgaatcgctgttgctcttgtatttacagctcggatctgagtccatattgtacttttacttactcgttggaggattgtaatgattatccttggactagattgtcaatggtctctggcattatgtttgaacattctatcactggccttgtggcttctgtctttgctgtctaatactgccctttggggcttcttttttttcctgc

SEQ ID NO: 105835 - DNA, 313 bp, Glycine max
  unsure (1)..(313): unsure at all n locations
  Clone ID: PAT_MRT3847_66585C.1
ctcttgtntttcacaaatctcggntcagtagagtactgacccagncanagaagattcaacaggtacctaagagaaggnaagagnggggatngaaagnnagacaaagagatagaaactgcacgtanaanagnnnnnnnnnnnnnnnnnnnnnnataggangaantcngcaaatattttgtttggataagatataaggcaatagtantattagtattgttganaataattaggtagaaganatattatggggaggggaagagtggaactgaaaggntagagaaccaagataaacaggcaggtaacgtttgcaaag

SEQ ID NO: 105836 - DNA, 2150 bp, Glycine max
  Clone ID: PAT_MRT3847_66586C.1
taaagatgatgagcacagccacatttatgggcagatgagtgattcagcgagcagtacttcttattcctctgaagataacgaaagtagtactgtcactggtcttgattcccctgtcactaaggtttgggatggaaaaagtaatagaaaccaggctgtttcttatgttcatcacccacttgaaaattttgacaatcacagtgcaaagaaaaggaataagagccattctcggtatccaagattatccagagcccaatctggcagtaaaaggtcttggcctggtggtcaaaaaatacaaacgtggcaggaagttgagagaacaagctttttatctggagatggtcaagacatacttaattcttcaaaatcacatataaattctgaggagtccagtgatgatgctgatatggaaagtttgggtagactttatagtggagcagctgcctcctcttctgcctactctatttctatatcagattcttgtagtttgtctgttgatcccctgaaaagttcctctgccgtagattccttttacaagttgagatgtgaggtgcaaatattgtgaagagtggctcaaaaacctttgctgtttactccatatccgttacagatgtaaataacaacagttggtcgattaaaagaaggtttcgccattttgaggagctacatcgacgcctgaaagagttccctgagtataatcttcatttgccaccaaaacattttctgtcaactggtttagatgtaccagtcattcaagagcggtgtgaattactggataaatatttgaagaaactcatgcaactaccaacagtttcggaatcaattgaagtatgggactttctcagtgttgattctcagacgtacatattctcaaattctttttctatcatggaaacattatcagttggcttgaatgccaaaccatttcagaagactaaaaacacttcgaacttctctgcacctgcaagtgatcctgtttcctttcagagagaaaactgcagtgctgaaagtaaagaggctgttttgggagcaagaactaatgttgaggccaatggattgaggtcaaaagtaaacagcacacctctttctctgccaaaaaagagtacacatgaacctagaaagtcatttgacaattctagcagcaatacagacattcaagcacagaagagtgcaccttctcccaataacttgcagaagacagcgaaagaaagagataattcagatcaagtttctgaagtgcaccatgatgcttccgatgcttttccaacagagtgggtgccaccaaatttgagtgtacccattttggatctggttgatgttatcttccaggttcatgatggtggatggattaggcggaaggctttttgggttgctaaacaaatcttacaactaggaatgggtgatgcctttgatgactggttgatagagaaaattcagcttctccgtaagggttcagtggttgcttcaggggtcaagcgagttgagcaaatactctggcctgatggaatattcataaccaagcatccaaatcgacgacctccgtcaccttctagtccatctcagaattctcctcatggcaatcaacctacacaagtgtcttctccaaggttggatgatgagcagaaacaggaggcagatcggcgtgcaaaatttgtatatgagctaatgattgatcatgcaccgccagctattgtaggtcttgttggtcggaaggagtacgagcaatgtgcaagggatttatattttttccttcagtcatccgttatcttgaagcagctggcttttgacatcctggagctgctgctgacatcggcatttccggagcttgataatgtatttaagcagctgcatgaagaaaagcataaatttggtgagttcagaacacagtaaatattacaattttcagacgaggcacggagaaataatggtttagatgtttcgtcttccgaaatacattctttttcttgtgattgttcctgattgcccttttgtctctgcaaccgctatccttctctttctgccaactaatgagccaaaggcaattcaatttttccatctaccaagtcaagttttgtaattaaggttggcattttgaggcagacgtcatgtaaattttgagattaatgcaattattttgagattctttattggct

SEQ ID NO: 105837 - DNA, 471 bp, Glycine max
  Clone ID: PAT_MRT3847_66587C.1
ttttcttttttttttttttttttttttttttttttttttttttttttttttttttttttttgggggaaaaaaaatccctcaggactcatttattacaataaaccagggcaacaaaaaaggatttttagcgagctaaagacaaaaatatacttggggggggaagccctctttttttttttgtaaaacccggccaaaaaaaaggaacaccaaagacaaaaaccgcaccagaaaaccaaactataagaatagcaggataatcatcatatataagagggggaggggggcattctctctgaaagaccaacaacaaattcaacatccctaaaggaagccccagattgggctttttccctttaagccacgggaggcatggccttgggccctgaatctagaggtttggcgatggggcgaacacgggaaccaatgggcctcaggggggggccgttggcgggggggggggggcgtgggggg

SEQ ID NO: 105838 - DNA, 951 bp, Glycine max
  unsure (1)..(951): unsure at all n locations
  Clone ID: PAT_MRT3847_66588C.1
tgctgattctttactgtacagctgctctctttctattccaactcttagagagacccaggcagggttgggggacattgagaaaaggattgctctggatagggattgtagctttgatcacatatctgttgatgaggacatgaccaagagcaagggcaaggatccacttgaaggacttggaggacctatgacaagggctagagaaaggaaatccaaggaagctcttcaacaagtgttgtccatactatttgaatacaagcccaagtttcaaggagaaaagtccaaggttgtgagttgtatcatggcccaaatggaggaggactgaatgacaccactttgtctttattttaaagtggttagtttatctagataatggcccaatccttttaacctcggctgaccaaaatatgtagccgaatttcgctgctgcaaaaatantcataggcgttgacagttaaggtatctccatgtggagtcattgcaatgatctgctatgtatcatgtcacctttatctcagaaaaaaattatgagtttctgccttgttgacttgcctctatctgagccccctccccccaaatctccaatttttttccttttaaaaagggaatttttttcatagatgcctattggggttctatacatcctagtaaagaactaaagtccttctgcatctagttgctgccgcagagcctagggctcgaatttctcacatatctgtactaatagtctttgaaacttagataattgtttttattttgttctaccagtcagaaacttgactaaattggtatggcgacaatgaggtggaaaaattctacccaatatcaaaggtaggttgcttaacatgggggtgagatctgaactgttgctataattgtagcaacttaggaatagacgcttactagtgattgtaaaacagggtataagattagtcaaatacttggtttttctgc

SEQ ID NO: 105839 - DNA, 358 bp, Glycine max
  Clone ID: PAT_MRT3847_66589C.1
ggagagcacttgtccatgaatagtaacgccataatttgtttcagaatccatctggtttgcgagtttgacagatatttacaacttatacattcataataattatctgcagatataatttattaaaaattacaaaacaaataaaaaagaattaattaattaaaagaagttttctaaataaatatgtttattcgatgcagtcaaaacaaatatatgttcatttgattaaatttttatttgaacaattaatagagttcacataaattcatttatcatgcctgagtgtcaccacaatattcacttgtgtgcgattctagttcgagtataggatataaacttctccttacgagaggaaataaaa

SEQ ID NO: 105840 - DNA, 421 bp, Glycine max
  Clone ID: PAT_MRT3847_6658C.1
ggccggccttttgttttttttgggggaagtaaacacgcttgtacaagaacagaaccatgcctattatcgcctacttgacagctataaccctgctgcggatctaggaaaatgcagctgccgccaaggaggccgttaccaaaaacgatgctctgtttgaaactatggacacttgtttgagaactaatctaactgggcgtgtgaatgggggactgcatggctccagaagatatgcatgcatctgccactatgctcatcaacacagacaccctgggccgggatgcgtccaccggaaaaacccttagtcttgcagctgaaatgctgcctaacctgttagtattgcccaaattataagataggatgggtatggcatggacaattgctgccatcacgtattactggaagtttatgggatcaacatgct

SEQ ID NO: 105841 - DNA, 371 bp, Glycine max
  Clone ID: PAT_MRT3847_66590C.1
gtagaaacccttaccatttacatgaagcctgattataatatcgctatgtgaccacacttttacctctggtaagggcgctgtatggaaacacacatactggatatgggacagcataaagttctcaagcctcacatttcctgcctgaaaaaaagactatactctcatacaacgttcataacacaccttggcaaagcaaagaatgcgcggaccataagcagggcagattgatctaatagtcaaaactatgctgcgaacttagcatctctggaacacaaactgaggccaaccacgcatgtagtcattaaagaacacatgtataaaacgaggcacacagttgacactaagggggtaactggatattatcctgggca

SEQ ID NO: 105842 - DNA, 329 bp, Glycine max
  Clone ID: PAT_MRT3847_66591C.1
ggtaccgaaccaaaattaattcccacgatccactcttctagtccgccctctccctttttttttttttgtcgggataaattaaacggggggtggctaacctatccccgtacctgacctcctagggataatgcttttatttactcatattataccccaattcgcaatgattgcaccgtaaataaatcgccaatgtagtctgcaccttttgagttgaccaattcatcctaatggaccacctcaagaatctattaccagattacactcccagtaaactcatacagtttacactaacagaccacatatattttgataagacccacaacacaata

SEQ ID NO: 105843 - DNA, 526 bp, Glycine max
  Clone ID: PAT_MRT3847_66592C.1
ccacgcgtccggagcggacgacacgaagcggccatagccgcacgttgggatcccctccgctacgcctctcgatggtctccgccagcgcgccgccgccgcaggcccagtccgacgcggccgggtcgggggaggaagtgagcaagaaggtgcggaagccgtacacaatcaccaagtcccgggagagctggacggagcaggagcacgacaagttcctcgaggccctgcagctctttgatcgtgactggaagaagatagaggcttttgttggctccaagactgtcatccagattaggagccatgcacagaagtaccttttgaaggttcagaaaaatggaaccagcgaacatgtcccacctccacgaccaaagcgaaaagctgcccatccatatcctcagaaggcttccaagaatggacacattttcgtcatttccgaagagaagatgtctcaagacaagaaggcagttgctgagacgaagctaactgaagaggaaaagcttcttgaggagaagattgctgggtttggtga

SEQ ID NO: 105844 - DNA, 390 bp, Glycine max
  Clone ID: PAT_MRT3847_66593C.1
agcactaccacctgcttgcgtgggggggggggggtggagggggcacgcggcggaataggaaagagcgcaaagcacaccaacgggataacaacataatagtgaagttaaaccggactgacacaagtatttaacgtgtgactggtaatttggatagtaacactttatccacaacctttccctgtcccaacgatatatgtacttactatggcaatgcatcctgagctttaaacaacagcttctagagttcgttcctgggctctaagctagcatgggtctagctctttcgcgagtggtgtccttactatccctcaataggcctagttaaccgtgatgctatttcggatggtgcatagccctccaagcctgcgtgacctactcaatctgcttgtc

SEQ ID NO: 105845 - DNA, 417 bp, Glycine max
  Clone ID: PAT_MRT3847_66594C.1
tttttatttttctcatattcttttttttcaaaaaaatatcaccatttaatagagtggagaagaaacctttataagcacaaaggttgggttatgctagtggacctgtcactatccggagaactaaacgcttttttgtgattggaatttttgtaaagtggcgtctttagaactaaagaagaccaccggggccccccctttgtggactgctgaagaaggcgcctaagttggaaaatggatgctgcatacgggaagagaacataacacctcttctgatgcgattcacaggacccctaagtgggacggtacgcgggcagttatttacattggagcaggaaattataatgtgcaaccctaaatttagacaaccaagactcttgtcacctttgttggagtaccacagaaaatgccacacttgac

SEQ ID NO: 105846 - DNA, 419 bp, Glycine max
  Clone ID: PAT_MRT3847_66595C.1
gggtcggccttgaggtatattaaatagaactttttttttttttttttgtatttgggggtcggaagagaaggctcccgttcaagtttaatcttaaagagagatgccaagtcctatcagtgggggtggtgtctcgggagcctagaacatggttcctaacgacgttgttttacagcggggacataaaatagaacggcacggtcgcgcatctctgtcacttgttcatccaattggggcgacaggaaagcgtaagggcccggagggatttgaccagtcaaaaatcgatcgggtatgggtatgtcaactttagaagccggctggacactggtagagcaccggatgttattaacgtcactattctccataacaggacgagatagtttattggtgttcatcaaggtccgcctctccggcagagtgga

SEQ ID NO: 105847 - DNA, 411 bp, Glycine max
  Clone ID: PAT_MRT3847_66596C.1
cagctaaatgagaaacaacaaaaggaaataattgatcttttaaaatgcaaggaggaaagaaagctggagagtccatcaaggaaacagctgcaaacattggtgcctctgccaagggtggcatggagaaaaccaatggcaatgtccaagaaaaaggaaaaagaatgacagcacgtgattccaagcaaaaaggattgggcacccaaaataaagatgcaaagatgagccacgcagagctggacaaggcaggcggcgcgtcagcataacacggcggcgaagcatgctgccacggcatggcacatgggacaacccatggggaaccatcagacgtcagctatgcccggtcatggaaccggacagcccacgggccatgtcaccgacggaatggtgggctcacaccctattggaaccaac

SEQ ID NO: 105848 - DNA, 437 bp, Glycine max
  Clone ID: PAT_MRT3847_66597C.1
tggaagatatagaacggccgcgaaaaaaaaaaaaaaaaaaaacaacaaaccccccacccaaacacaaagaacccatcaaaccggcaaaccacctagcggcactaaccaacagcgggggcaccatccacacgactaaaaccagtttagcttccaaaatataaaaacacggacacaagcaattagtgtatgcccaaaactcctccaaattaacaataaaactgaaataatttcttacaaggcaaaaaaacagtaacaatcctttcattaccaccattttcgtcattttatggtgctggaaaaaccaaaacaacccctttaatactcaccccacgaaatgtacaatttgccataattgggttctgtccattcaaaattatcccatataaatataaacttttcaaattacaaacgttaagtttaccccataaacataaaat

SEQ ID NO: 105849 - DNA, 800 bp, Glycine max
  Clone ID: PAT_MRT3847_66598C.1
ggctcgaggggtaaaagaacagaggcgaaaaaccttgagcggagttgaagctatgggaagcagattgggaagaagagtggtgcagttcgcgaacctccccataaagcttctgatgccgaacagcttcaccaacatccacgaaatcgctctcaagaccattccttcggccacgaagatcgagatcaagcgcgtccttcaatccctctacggcttcgatgtcgataaggtccgaacgctcaacatggagggcaagaagaagaagcgtggtggcttgttgattgcaaaacccgactacaaaaaagcctacgtcaccctcaaaacccctctctccatttccccggatctctacccgatccgaatcatcgatgaggacaagaagaggatcaataagcaagccaagtccagcctcgttcaggaccacgaggcccacaccgaggcccaccaccactggctccatgaccgcaaggaggcccaaccacccttcaggcctcaaaagcatggccgtttgggccggcccgagggcgcttccaatgctaagtttccctggtctagcatgaggtctgctagtggctctactaggtagtggctgttattaactcatttgaggataatagaaaatggtttgaagggtttctttcactggcttttgttcattagtagtggtggtggtggtagtgcttttgttcttttaaaatgaaataattgttttgactctgagatgatgatgctgtgtttgagcaggacacagttatgctagaatttgcaacctgatttggtgaaagaagcatttgaatttgcgt

SEQ ID NO: 105850 - DNA, 143 bp, Glycine max
  Clone ID: PAT_MRT3847_66599C.1
atggggtgtgcttcctcgaagcgtgttgatgcggcagcatcctcctaccgtccctcaccctaacaagaacctcaacctccagaaaagaccaagtccttccacacggtggaagagctagacgccaagctcagccccaagctcga

SEQ ID NO: 105851 - DNA, 401 bp, Glycine max
  Clone ID: PAT_MRT3847_6659C.1
aaggaacaagggcccctattttttttttgcccccaaaggaaaaaccacttatgggaggcttttaccagatttgggggcccccagtggtaacaacattaaggggagcgagggcccctttttgaccccctttttttacattttgagggatgggggccacctttcttggtgaggggggaaggaacaccctgatggctcacagggggttaggaagcctaaagggcctgtttttccctttggggccccccaggggaacgctccattgggtttcaaagcatcccaacaagggtgtgtccccgccttataagaatacttctctcccggtgttttgtgtaaaacctcctttgggggggaagggtcctttggacccctggaaaaaaaattcttccctgtggggtagcccc

SEQ ID NO: 105852 - DNA, 293 bp, Glycine max
  unsure (1)..(293): unsure at all n locations
  Clone ID: PAT_MRT3847_665C.1
tgctcgtactcggtctcggacattcccgggntcgactccacgtcgtctcgtccccttctctccaaggaatggcgttatgttgccacatcggaaatgcaagatttcaacctctttattcgctaaaatnttgcaatgttctcaatgtgggtatgttctatctttgcctcttcttgcgacccgggacctgatatatcttgtacaagtctttcaatcagagcgaaccactcaattcgcctagtgtttaacatggaaaagcggaattttgtctctatcagaaaaagcgatttatattg

SEQ ID NO: 105853 - DNA, 383 bp, Glycine max
  Clone ID: PAT_MRT3847_66600C.1
gaaaaaaccgttttccctctctgcattgtcttccttcctttccatttctgtctcccgtgtcttttcccagttttgcggggatttcccaaacaaacccgaaacgacaccgaaactcgcacgcacgccggccgaaacgacgaacgatgaagacggcgattctggccccgaataaacggcacgagtttgggctctggtgctgcgttttgtgcctcgcgatctgcgctagggtttgcggcggggccagatccgaccaggaaacgcgggagaggttcaacgggacacaaccaattgggcttcgagcgagttcaaaaaaacccctggccaagatgttcgaacgcggtctcgagaaagagttctccgagaatgaccaaccagaagaacct

SEQ ID NO: 105854 - DNA, 1430 bp, Glycine max
  Clone ID: PAT_MRT3847_66601C.1
caatcttcaaccttctgtttcccaacaacaattcacatccttcaacatctcacactctccatggctcccagcacagaacaaaacccttctctctccaaacaaaaacttcactgcaggcttctttcccctgccaaactcttcacgcgtccgaagaggttcacctactcagaaatcaaagctgccaccaaagatttctccaacttaataggcaaagggggctttggagatgtgtacaagggtgagttacctgaccatagagtggtggcagtgaagtgcctcaagaatgtcacaggtggagatgctgagttttgggcagaagtcacaatcattgccagaatgcaccacctcaacttggtgaggctgtggggattctgtgctgagaagggccaaaggatacttgtctatgaacacatccctggtggatcattggacaagtacctcttcagggtcaataagtctcataacaataaccatctcaagcagcaatcaagtagtttgaatccaaacacaccacaacaagaaaggcatgttttggattggagcatgaggtacagaatagcccttggtatggcaagggccattgcctacttacatgaggagtgtttggagtgggttttgcactgtgacatcaagccagagaacattctactaggtgatgacttttgtcccaagatatcagattttgggcttgccaagttgaggaaaaaagaggacatggtgaccatgtctaggaggaggggcacaccagggtacatggcaccagaatggatcactgcagacccaattacctcaaaggctgatgtgtatagttttggcatggtgcttttggagcttgtgagtgggattaggaactttgagatccaaggttctgtggttaggagtgaggagtggtacttccctggttgggcctttgataagatgtttaaggagatgagagtggaggagattttggatgggcaaattagggatgcttatgatagtagggcacactttgagatggttaataggatggtgaagactgcaatgtggtgtctgcaagataggcctgagttgaggcccactatggggaaggtggccaagatgttggaagggactgtggagatcactgagcccaaaaagcccactgttttcttccttggtgaagagtagattcatgataaagtttctgtgtgatgttcagcctttcttgtttaagtttctctcgttatatctcttgtaccggcatggtagcatgtatgctcaatagttggaacgatggcaaataaattgggtgatcaagtgtataaatattacctttgtttttcttctaatggtatgttttattcgagtatagtttcaaaaaaaaaggtatagaatataaatgattatacagtcgcagggaaatcacagacatatataatgaatgtttttgtgttgaaaaagttggttta

SEQ ID NO: 105855 - DNA, 295 bp, Glycine max
  Clone ID: PAT_MRT3847_66602C.1
gctggaaaattgtcatactctagcatgatataatatccagaaggacttcactctgcatatgcagatgaagcatcgtggaagactgcagatatatgtgaatactctaaccaggaaaaccattaccttggacgatggaagctctggtactgtttacaatgcgatagctgagattcaagacaacgagagtaacttgcagatcccaagaagcttattaatgctgggatgcatgtgaagatagacaaaccttgacatagacggaagatacaaagaatccacgttagagatgaactatcgc

SEQ ID NO: 105856 - DNA, 529 bp, Glycine max
  unsure (1)..(529): unsure at all n locations
  Clone ID: PAT_MRT3847_66603C.1
ggctcgagttcagggatactcatctcatgattttatataggactgggaggaggaaatctgagttatacaaccatacattgatggttaagattaaatgttatgtaatttatagaagtcatttaatttttttaagttggaagtcaacctaattttgaacatggcgaattaattacaagttacaacaaatagtggaaggtcacctgagttaaattcttatatgatctgttatatactcattgtaatatgcagttctttgtgcttgtatgttaaaatttgcttgtggttgaatgttaaaactacatgcatactggctccaaattttatgaattactaatattctatttgtaaggcagcattgttggctagcacttaacactttccaaccaatcagtaccagcaacttcttgctggtactcaagttgtcctgcatcttctgtggnggatgacatgactcanaacagcatactgaatcacagtagagctctgagggtgtccatgggtccaagtggcccctactcgccattgattt

SEQ ID NO: 105857 - DNA, 125 bp, Glycine max
  Clone ID: PAT_MRT3847_66604C.1
cctagattcatccacagtttccgaggagaagaaaatagtccttcgaggttaagttttcttcccaaatttggggattgaggggttatattcttggcctttggggttcctgtggattcccaaacccc

SEQ ID NO: 105858 - DNA, 809 bp, Glycine max
  unsure (1)..(809): unsure at all n locations
  Clone ID: PAT_MRT3847_66605C.1
gcgtacggctgcgagagacgacagaagggggagacaaattgagaagaaaaatcttcaattgtgactcctcaacccacttgattcaccccaactcaataattttagccaccagtgtgtagataacttaagccaaaacaactcaccaattcttttggataccaccttccatatattgatattgcaaaagatagttaaatttcattccgaaacaatgatcaacaaagtagcagttctattagttgttttgcttttcatcattgctgctttggcttctgatcctgatccagtaatggacttttgcatagccaaatcaccagacaatagcttcagttgcaagaactcatctacagcaacagtggaagatttcacctattctggcataaagtctcctgggaacttcaagcaaactggattctcttctatggcagtgaattcgaatgtctttccgggtttgaacactcttggtgtgtcatttgtgcgagcagattttggtgttggcggcgtcaatgtgccacacttccatccaagagcaacagaggttgcttttgtgctggaaggaaaaatttattcaggatttgtggacaccaacaacaaggtttttgccaaagtattggagaaaggagaggtcatggtgttcccaagaggcctagtgcactttcagatgaatgttggagataggcctgctaccattttgggcagttttgacagccaaaatcctggcctgatgaggattcctaatgcagtttttggttctgacatanaggangagctttttggagaaggcttttggactgagttctaggagcttt

SEQ ID NO: 105859 - DNA, 620 bp, Glycine max
  Clone ID: PAT_MRT3847_66606C.1
tcaagatcagactcagcaacaaaacaacggttttgtagttggagaacatcaaagtagtggagttcaagaactttaccacaagctcaggtcatcgtcatcagttaattattggggaagtgataactcaccagtgtttctaagcaacatggcttcttcatcctcttctttgtccaacattttggagtcatcttcagtttctgggagtgaattcgggtgctggaatccaaccctttcctggtctgaccttcccactaccaatggagcatatccttgattaattaaccgcatgcaataactactttcctcttttttgttcactgttcaaatttttcttttcgagttattagatatatagaactccttaatctatagtttatagatgttaatctgtatgctagagttttttctcgtgtttgtttggttgctttggggtggtggataagtaatatggatgtgtaggtagcattagatctttttaatttccactctcgcgtctttctatcatttgcttctttctgtatttctggatgatggtgtgtttatcttatctctctcaaatggtatttcaagaactaccagagagtttagaatgaatggaaaacacagtgtttgattctcaa

SEQ ID NO: 105860 - DNA, 508 bp, Glycine max
  Clone ID: PAT_MRT3847_66607C.1
ccattataaaaaaacctcagcccaaaggctttttttttattgttttaaaaagcgcacctgtccatgaaaaacacaaaatcctacctaaggacccccataaaaaactttcccaccagccgccctttgggcatagccatcattaacatttttaacaggacccctaaggcgggccttaccggcccaggcacaaaaaggcattactccattaaggcatcacacggtccttttttggaaaaggaattttttactttgggggtgaaaaaacaggggacccttccccctgatatttcttcccatcaaaaaaccaaaatttttcataggatttaggtttttaagttcataaagggggggggccccccggacaaaataaacaacctaccctggaccgcaaaaataatgggggaagggcaatttggaagtaactaagaaaaaaagggcacttttatcggtgggggagctttccaatttttgcacctaacactcaattttccaaacactcgattttttt

SEQ ID NO: 105861 - DNA, 394 bp, Glycine max
  Clone ID: PAT_MRT3847_66608C.1
gttggtttaggtgatggagatggtggtggactgagacttgtatacataaggaggaggaggtggtgactcgtattcataacgcggcggtggttaatagtaaggataaccattattatctgacggaaaccacattggattaatatgaaactccagggcaatgccaaggccatttgttgtcaatgacaacctcttatggtgttgactgacccttgctgcaattccataaaacgaaaaagcatgccacctttgatcaatgtttcttttaatatcctaactcattcagaaggatgaggaagcatgcatcaagggaagcgagaatactgtcttgcggtgttaatgatgacatgaacatactgcatgacttacttaccacttatagtgaaagggagacgat

SEQ ID NO: 105862 - DNA, 279 bp, Glycine max
  Clone ID: PAT_MRT3847_66609C.1
ttgagacttatagcctattatatagatttttgtggcactaaaaagcgttcgccttaacactatttgcacaatgacatcccacccaacagagggggaaaaaaacaaccctttcctgagaaaaaaaatatcccctacccattttctccatacactgaaaactaaggctttccctatatcccacactgggtatggatgctaattggcctctaccaagcaccaatcctatgccacacgggacaacccagtttaagctcgtaccgttagtttccccccaattta

SEQ ID NO: 105863 - DNA, 346 bp, Glycine max
  Clone ID: PAT_MRT3847_6660C.1
ccacacgtaacatgacgcataaacagacgcttaattatacacatacactcccatacaccttgtctaatataataatatcgcccccacacacaaaacctaattaatctctttaccattcattcattcattcatttatccataataatcctcttcctatcactaccaaccaaactaaaccatattttcttaactatggttctctttttattcttaacaaactaaaacatcccactattttgtgttacatatatttactttttttttttcaacaatcatcaattactaactaatttctatccaaataattcttacacgtaacatttttttaatttaaaccacctaaaac

SEQ ID NO: 105864 - DNA, 635 bp, Glycine max
  Clone ID: PAT_MRT3847_66610C.1
tgttgtacggctgcgagaagacgacagaagggcaggataattcatgtgtatactccagaaatcatcaaaactgatgctgcaaatttcagagagttggttcaaaggctcacaggaaagccaaaagaagaaggaacaggtggaagcaagtccgaaactgcactaaccaaagaaccaatggattcacaccccaagaaggccatgatcatgcaagatgaagaggagtttctgagtctacaaaatgggacaaggctaaagaatgaacataaagaggaggaagttcaagatgatgtgtggaggtcaaagtcaaacgagaagttcagtggtttccttgatgggttctcagaattggatggttttatggaagagttaagtactttgcctgcagggaatcaaaattaaggcctgtgttttttatatgctgttatgtgtctatcttttcgatatgaacaaatttatcatgaaaatgacttactgaagaactgatgcttctcccaattgtagctagattgagtattgacaattaccttggttccgatacagtacatgtgtattgatctcaattagtcctttggatgcttaaggattgtagtgagtattcattaccattacatgccataatactttgttgtgggccc

SEQ ID NO: 105865 - DNA, 235 bp, Glycine max
  Clone ID: PAT_MRT3847_66611C.1
attaagagagagaagaagtaaagaagaacaaagacgcaatcctcaaaggtgaagatgaaaaacatggcaagtgctgccaatgaacaagtcgatatctataaagctaaaatagacgagaaggcagagcaagcaacggcaagaacagatgaggagagggcgatagcccatgagcacgcaaagtcaaaggaagcttgagcaaagatggagctgcatgatgctaaagcaagtcatgcag

SEQ ID NO: 105866 - DNA, 286 bp, Glycine max
  Clone ID: PAT_MRT3847_66612C.1
cgtttatagcgtttttgttgcttcagagcctttattttgttctgtgattgttttcgcttgtgaaaaaaaaaaaaaaagggctggccgcatctagtgagtgtttttgcgcggaaatttatttcaggccgtaacctgcatgcttaccggtttttgcttttgagagtacaattagcgcttttccctattctggtcatgcccgcttcatggtgtgaatttgctttccttcacaattcccacacaatattcaggtcggatgcattaagcgtatttccttgggtgcctaatt

SEQ ID NO: 105867 - DNA, 370 bp, Glycine max
  Clone ID: PAT_MRT3847_66613C.1
ggtgtgcccaagccttccaccgagttgtacgttgggtctgatgattttgattctgccacctttacgaggggcccccgtcttgtgaggcatctagctgcttggtgggacatactctttcactggcttacctttgacggtggccccacgccctgcggggcggtacgtgacaaatgtgaagattctgccaacaggtctggcgtggcctgctctagacgaatgaggcagaatatggaagatccgttcatactatgcaatcaaaggagtccttcacgccctcagaggttcaaacatatatgtgatcctcacggtgcctaatgacctgcttcattctctgaccagcacttgagctggcacagattggatcaacaag

SEQ ID NO: 105868 - DNA, 464 bp, Glycine max
  Clone ID: PAT_MRT3847_66614C.1
gtgtacgctgctttctttgcttatcctccgcccattgaaccttaaaaaaacatgaatgcttatagtatctctaccagagacaaagaagtgtttttttatggcctgcaatgaaaaaaaaaaaaaggggcgggtggggagccgcttcttttcacttttggggatggaaggaaggggaacaaagctggggacacttcccctaaaattgtttctgggagccaggcccctgtagaaaagcccccctgacatttttcccaaagttttgtgcatttttatttaaaaatcgcccctattgaacaaataatctcatatttttccccatccttctaaaagggcttttttcttaaaagggcagaagggatctcagggctttcccagggggaaaaaaccgaagggtttgtgtttctcccaaaaggggaccgggaggggaggaattattcagctttccccccccttggaccattttt

SEQ ID NO: 105869 - DNA, 308 bp, Glycine max
  Clone ID: PAT_MRT3847_66615C.1
cgatatccgaatacacttgtactacaggcagccaatttagcaacggtaagacattcacgcatactccaccatctgaccctgatgagcgccacccttgtggatgatgacattgggtaaaaggggctccggactaggaggttataacgagtgtggaccggagggattgaccgggccatcgccgtggaccagtttttcaaacagtgacggagataaatgcgcacctgctgccataatgatggaagggagattacttaaacaattgctagagcattctcaaccaggcaaaacatgtgagagagccttaaagt

SEQ ID NO: 105870 - DNA, 377 bp, Glycine max
  Clone ID: PAT_MRT3847_66616C.1
ttcctttttttttggatttaatatggattgccttgttttgagtccggataactttatttttttatttgaacaatttctataatgttttcattaagtgagtgtgaactctttatcttttgaaattaatttaaagtcaatgtgtttaaaaaaaaatccgcatgatttcattttcttttattcgttatttgtaagggtagaaggtgttacacataggagtaaaccaactaaccataatctgcctgcagtgacaggatttctgtctttgtatgaacattgcagaagggctatctgtgatttctagacaaaccatttatacctgtctcctaactcctaagaactgcatcatccaattcttgtggcttattcgccaaaccttt

SEQ ID NO: 105871 - DNA, 218 bp, Glycine max
  unsure (1)..(218): unsure at all n locations
  Clone ID: PAT_MRT3847_66617C.1
tcgagcgagggccttaaaaaactttattctcatttaatttactacccanacatcattgccgcccgcttaattctatacgcgccccacacacttactgtcacctttaccaatattaaaacaagtccattataaaccaccaatgccacctttacaaagccccctattaatttaaaataatacaatcactttaactttatcaccttgtcttctacacttta

SEQ ID NO: 105872 - DNA, 289 bp, Glycine max
  unsure (1)..(289): unsure at all n locations
  Clone ID: PAT_MRT3847_66618C.1
aacacaaatncagctcgagccccgcgccactcaaccaccacacctatnttaacacacactatttttttttcatccccacctaccttacaaattcgaatcgtataaaaaaaacatagtctttgctatttacctcacaatccattaacaataaataccctcacaacctctacaaccaaaattcccatacttatctcaacncttacctcaatcataacccacacaacaaattcccctcttaaacattcaccaaaaccaacttaatcatactcttcaaacaaatcactaccaa

SEQ ID NO: 105873 - DNA, 268 bp, Glycine max
  Clone ID: PAT_MRT3847_66619C.1
acatagccggcctcactgttccaagggcgcatactcctgcctgagttccacttgcgaggatcggcgattcatctaaactcctttcttaattaagatcatcgtcatcatcatcatatgcaatatttactatgtgtgtacggataatcgtcatttcaataaggtctcattcatctacttcatatcaagtatataagcccttccatgcaacattgacaacaacggctgtccgccgtcacttgtgctgtataatcggactcagagcaccgtc

SEQ ID NO: 105874 - DNA, 251 bp, Glycine max
  Clone ID: PAT_MRT3847_6661C.1
attcggttctagctctatttatacaatcacaaaattttacatatacccggcctaattaataaccccgccgcaccatacattctcattcaataaaacatttataaacacaacttatcctcaaatcttcaaaatctatgctcatcaaaccttattcttttttcaactataacaacacaaccaatttcattctaatctaattattttacataaattattcaattctatactatcctccattaaataacttaatt

SEQ ID NO: 105875 - DNA, 124 bp, Glycine max
  Clone ID: PAT_MRT3847_66620C.1
acagtgtataacaaacacagcaatgccttaaaaaaaaatacgtgcatgattaataaaaaattagcctgtaccaatgccaacatttaatactacatgaccattcacgtgggccggtatttgttta

SEQ ID NO: 105876 - DNA, 807 bp, Glycine max
  Clone ID: PAT_MRT3847_66621C.1
agggcttcggatcccatggcgaccccggaggccagcggcagtggcgagaaggtcgagggctccgagccctccgtcacctactaccggctggaggaggtggcgaagcgaaactcggcggaagagacgtggatggtgatccacgggcgagtctacgatatcacccgcttcctcagcgagcatcctggcggggaagaggttctgctggaacaagcgggtgctgatgcaactgaaagctttgaagatgtcggccactcccctgatgccagggagatgctaaagcagtactacattggagatgtccatccgagtgaccttaaacctaaaggcgatgacaaggatccttccaagaacaattcatgccaaagttcctgggcgtattggtttgtccccatcgtgggcgctattcttataggtttcttgtatcgtcacttctgggctgacagcaaatcctcctgaggagacctcgttgaagtgcggagcacgtgctcctgcgatgagaggaggagacttgtgtggaggctgcagggtgttccctccttggaacctgccagttgttttctttccccttggagccaagatggttgaccagatatctatcctccttcagtgtacgaccagagtctttcatccgccagagcctgacgcccaaagcacctgctcacgctgtgtccttgtcagggtttctctcattggttcccactccttcctttcatttcaaaagttgatgccaatgacttagagttcctatgttgtagtgacatggcctttggggacagtacatgatttctcataatttgaattcatagt

SEQ ID NO: 105877 - DNA, 336 bp, Glycine max
  unsure (1)..(336): unsure at all n locations
  Clone ID: PAT_MRT3847_66622C.1
acagcggccgcttttttttttttttttttttttttgncctttagtctaaaacaagccaactctctcagagggggaaaactcttctaaggacacgtaccaacttttttaccactcccaaaaccattctaaatccaacaaaaaacctaccattcctaacaaccacatctattgaataaaaaaaggaatttaaaaaacaaaaacaccaatcgcagtctcattgcgaactaaaattacccctcttccctttattctcactaaacacataatacttcctacaagctaaatatacattggtattaaaaattaaatgcttttaaataacagttcacataaaaa

SEQ ID NO: 105878 - DNA, 407 bp, Glycine max
  unsure (1)..(407): unsure at all n locations
  Clone ID: PAT_MRT3847_66623C.1
gggagaagacgtgggggctatgggagaatggttgggtatggtcaattatggggccatggattcctatttaaccttaccttatgccttatttaccttcgggcctttacctggacaattttcttttttcttttccaccacttattggcttggttggctttatctatgcctaaaaccatcctaagcattccagcaccatttcccacatcacaatctgtaagcccaaagttaccgacataaacagtgaatgggtccaaggaaggaaggaaagaaaaaaagataaaatggtgccgaggcaactcttataatggtcatcagaagatctcttctgttcttttggttntgaggggaagggaaaacaaaaaagaaaaaaaacctaaacatgagtattagtatcctagtaagttaca

SEQ ID NO: 105879 - DNA, 462 bp, Glycine max
  Clone ID: PAT_MRT3847_66624C.1
ggctcgagctctacccgaatctgcttgagcggctcgagcggctcgaggtacaacaccgtccatggccagtggaagcattttgatgtgaaggtgaaggactctaaaacccttctctttggtgagaagcaccgtcactcggtttggaagtaggaaccctgaggaaattccatgaggagaggttggcgcatgctatgtcggcgagtcaactggtgtattcactgacacggacaaggctgctgctcactcgcacgctggagccaagaaggttgtaatctctggcccaagcaaagatgcacccatgcatgtcgacggtgttaacgagagcgagtacatctcctgagctagacattgcttccaatgctagcagcactaccaagtagtcttgctgccctcgccaaggctatgaacgatcgatatggaatagaggagggtctcatgaccacttgccatgccatcacagct

SEQ ID NO: 105880 - DNA, 529 bp, Glycine max
  Clone ID: PAT_MRT3847_66625C.1
tttcgcactttctttcagtcagcatctccgactctttctcttatctctaagtcaacatggctcaccttgaagattcaagtgcatggaattcgagtatacctcaccctaagctcaatgaaagaattctgtcttctctgtcacggagaactgttgctgctcacccctggcacgatttagagattgggccaggagctccagctgttttcaactgtgtggttgaaattggcaaaggcagtaaggttaagtatgagctggacaagacaagtggacttataaaggttgatcgtattctttactcatcagttgtctacccacacaactatggttttatcccaagaaccatttgtgaagacagtgatcctatggacgtgctggttctaatgcaggaacccgtgcttcctggttccttccttcgtgctcgtgctattggactaatgcctatgattgaccagggtgagagggatgacaagatcatagcagtttgtgctgatgaccctgagttccggcattacactgacatgaatgagct

SEQ ID NO: 105881 - DNA, 1238 bp, Glycine max
  Clone ID: PAT_MRT3847_66626C.1
ggtcgcccgctcgtgccgtcaccttctccgactctttctcttatctctaagtcaacatggctcaccttgaagattcaagtgcatggaattcgagtatacctcaccctaagctacaatgcagtcaccacctctgaactctctctctcatctataagtcaacatggctcatcatgaagattcaagtgcatggaattcgagtaaacctcaccctaagctcaatgaaagaattctgtcttctctgtcacggagaactgttgctgctcacccctggcacgacttagagattgggccaggagctccagcagttttcaactgtgtggttgaaattggcaaaggaagtaaggttaagtatgagctggacaagacaagtggacttataaaggttgatcgtattctttactcatcagtagtctacccacacaactatggttttatcccaagaaccatttgtgaagacagtgatcctatggacgtgctggttctaatgcaggaacccgtgcttcctggttccttccttcgtgctcgtgctattggactaatgcctatgattgaccagggtgagagggatgacaagatcatagcagtttgtgctgatgaccctgagttccgccattacacagacatcaaggagcttcctccacatcggcttgctgaaatcagaagattctttgaggactacaagaagaatgagaacaaaatagttgatgttgaagactttctaccagctgaagctgccattgatgccatcaagtactccatggacttgtatgctgcttacatagttgagagcttaaggcactaacttctttagaaactgaatagccaatttcagtgatctccaactaaatatgtaaaatgtgaatgaaactccataaacattgtgatttccgtgccgttctgttatggcactactgctgcctcggttcttgacacaacagtgtcaaaaactttctgctttgggatgcggctgtactgctactcaataatgagttcatttctagtattgaagtccttatcctttgtttggtattggagaaatagtaacacatgaatgaattttcagttaagcaaaattatgtaaattgtggatggagatccatacccattctcattcccgtgcccgtcccgttcggctctgccgctgccgcggccccggtccttgacacaacagtgtcaaaaactttctgctttgggatgcggctgtactgctactcaataatgagttcatttctagtatt

SEQ ID NO: 105882 - DNA, 422 bp, Glycine max
  Clone ID: PAT_MRT3847_66627C.1
gacagagaggcaaatataaagaagaagagaaatgggaaaatagagtactttggtgaagaacaggagatttcctcattcttagtttgtctcacaacaaagcagcttcaaaacgagggaagtattcataaaggagaatacagagaggcaaatataaagaagaaaagaaatgggaaaatagagtacttgctgaagaacaggagctttcctcattcttagtttgtctcacaacaaagagatgtaattgtacctagtacaagaaaatcaaggtcaaagcatggacgctgtgtcatccgcactactagagccagtaactaattctgtgttggatctgattaaaaagcaagtggattacatccgttataggcaaaactttgatgaactacgcgagtgtgtaaagcagcttaaacttgtaaaggagaaag

SEQ ID NO: 105883 - DNA, 1235 bp, Glycine max
  Clone ID: PAT_MRT3847_66628C.1
ccacgcgtccgctctgatagaggaactacagcaaccatggtgaaggcctaccttcgatacgagccggcggcgtcgtttggagtgatagcgtcggtggtttccaacataacatacgacagctctggcaagcacctcctctctccggcactcgagaaggtcggcgtctggcacgtgcgccagggcctctgcaccaaaaccctaactccttcctcttcgtcgcgcggtccttctctcgccgtcaattccatcgcctcctccccttcctccctgattgctagtggttacggtgatggtagcataaggatttgggactctgataaaggaacgtgcgagactacgttgaatggacacaagggagctgtcactgctcttcgttacaacaagactggctccttgctcgcctctggtagcagggataatgatgtcattttgtgggatgtggttggcgagactgggctctttcgccttcgcggccaccgcgatcaggctgctaagcaactcacagtgtcaaatgtcagtaccatgaaaatgaatgatgatgctcttgtggttgcaattagccctgatgctaaatatattgctgttgctctcttggatagtactgtgaaggttcactttgcagacacattcaaattcttcctttcattatatggccacaagctgcctgttctgtgtatggatatctcctcagatggagatttaattgtaactggctctgcagataaaaatataaaaatctggggtttggactttggtgactgtcataaatccatcttcgcgcatgctgacagtgttatggcagtgcaatttgttcccaagacacattatgtgttcagtgttggaaaagatcgcctagtaaaatattgggatgcagataaatttggactctcgaagactctcgaactacatcatgctgatatttggtgtcttgcagtcagtaatcgagctgattttatcggatctcatgatcgttctattcgccgctgggatcgcactgaagagcagttcttcattgaggaagaaaaggagaaaaggttggaggaaatgtttgaggctgatattgacaatgcatttgaaaacaaatatgcattgaaggaagaaataccagaggagggagctgtggctttagctgggaaacaaacccaggaaaccctttctgcaactgacttaattattgagagactagacattgcagaagctgaagaaaagtgtatcgcaaaacatcaggagaaaaa

SEQ ID NO: 105884 - DNA, 372 bp, Glycine max
  Clone ID: PAT_MRT3847_66629C.1
ctcgagcctaatcggctcgagggttatctctattctggattctgaatcttggatttgatttctacttttcaatgattactgagagctttattttatctccgtgattttgggttaatctacctgtgttatttcgtccttggaaattatctccctcaattctatctttctttgtttcattatgggcatttcacaatttagtgcttcatgattgctgcttgggtctcaaaggaagataagaaattttgtttatatttatcttctcaacaggagcaataagggacgggtttggttggctttcactttggtttcgagaatctgcatttgggtttgaagaactatgcaaatcttctttcatcattttcttgataatta

SEQ ID NO: 105885 - DNA, 670 bp, Glycine max
  Clone ID: PAT_MRT3847_6662C.1
gaataatgttaatatcagagagacagcttatccttaaggcttgacccaaagccactcactcgtgcgtgtgtatagcgtagcagctaatagcaatgcccactttgaatctcttcacaaacgttcctgtcgacaccgtcgttgcttctgacattctcagagatgccaccaaagctgttgcaaaaatcatcggaaaacccgaatcctatgtgatgattttgttgaatgggggagtgcctattgcatttgctggaactgaagagccagctgcttatggagaactgatctcgattgggggccttggtccgagtgtcaatggaaaactgagttctacaattgcagaaattcttgaaactaagctatacattgacagttcccgtttctatatcaagttttatgatgttcagcgctcattctttgggttcaatggctcaaccttttgatctaacttttgttctagtaatagattgtgagtttcactgtggaaaaatctggctaattcttcttcctgtggattattacaaatttgtatccatgattgtatgaatgaatacaattaatttagtaaaatgggaaaatccgtcctcctttgttccttttttataaaaaaataattattttattatttatttattttttattattaattttttattctttttattttcaattt

SEQ ID NO: 105886 - DNA, 1090 bp, Glycine max
  Clone ID: PAT_MRT3847_66630C.1
aagaaaaatttattcatttttataataattatcataaaaatcaagtttattatgagttttaattgatcaaatgaccgtctaaacttaaatgttgcctgaaaattaaacacccactaaaaaaagaaattcaaaataaatccgtgaagtagtgattgacaaaaaggttttgaaagcagaagaaaaaccaaacacattctataatgaaaattagcagttacacaaagcctatgacttgcattttacattttacaaagaaaccccccacccactatccaaagtcagtcatcatcatcaatccatgaagtagttaacttggacattcttgggcaaacatgaacccatgaacccatcactatccgatttcctatctcctttaccaccccaacaaagtgtaaaacctatacccctctccttccccccatcaccaaagttaacaactgtctgtaataaactgctttgaaaaatgtctttcagccatttctcaaacatgctgttagtaaaattaccaaaccccacaccaatttcctctatcaccctctcctctacagtaaaattcaccaccaccccatcaccattatcatcatcatatacctcctcaaaagactcttttatccttgacagaaacatttgtgtcacctccctctccctctccctctctggaccttcattaaactcaaaccggttctcaattaactcaagttgatcaaccactgtttcccttgtcaaatcacttgatattggactacttccatcatcatcctcttcttcatcagctttcatgttcaggtcaaggttgttgaagcttgaatgccttgaaaagactttcttaccctcctctttctcctcaacccttggactcttgacattggtaaacaaatccagtacttcagcccttctcttctgacccaaactaggtgatgaagactccaaactaggtttggtttcacttatctgcaacaccaacttcatcactgagtcattggttttcttctcttcattgctcctagtgtcaccattggtcaatatgaatattgcttggcctgaactcttctcattcatgcttaaatttccaaactttgcagtttcaaac

SEQ ID NO: 105887 - DNA, 694 bp, Glycine max
  Clone ID: PAT_MRT3847_66631C.1
gaaagcttaagaaaaacaaacacattctataatgaaaattagcagttacacgaagcctatctcacttgcattttacaacttgtggaccattttacaagaaacccccccacccactatccaaagtcagtcatcatcaatccatgaagtagttaacttggacattcttgggcaaacatgaacccatgaacccatcactatccgatttcctatctcctttaccaccccaacaaagtgtaaaacctatacccccttccttccccttatcaccaaagttaactgtctgtaataaactgctttgaaaaatgtctttcagccatttctcaaacatgctgttagtaaaattaccacaccccacaccaatttcctctatcaccctctcctctacagtaaaattcaccaccaccccatcatcatcatcatatacctcctcaaaagactcttttatccttgacagaaacatatctgccacctccctctccctctgtggaccttcattcaactcaaaccggttctcaattgactcaagtgcaccattccagctcaatggatcaaccactgtttcccttgtcaaatcacttgatattggactacttccacctgttttctcttccccttcatcatcatcctcttcttcatcagctttcatgttcaagtcaagatggttgaagcttgaatgccttaaaaagacttttta

SEQ ID NO: 105888 - DNA, 420 bp, Glycine max
  Clone ID: PAT_MRT3847_66632C.1
gggagcaccccgcatttaatacacgctttttccaaactaccggagggtttgttttttcatgaccgggggagaaaggaagtacctccctgtaatgctcgctgaaaaaaaaaaaaaaaacataaccgttaaaagcccatgcccccctggccatccggaaccgaagtgcttttagcaaaaactggggctcggggacagtttattaaaacgcgattgaaagtaacaccccccgggggagtcctttatctgggggacatggccttggggacaacccccttgagggcaagctccttttttttgagggcgtcgttggaggcgtcctcaatctcaagctgggccatggggtccttgagggggctttcaattttttccttttggccgcgcttgaacttaatgctcatgccggggggggtgacaaattcc

SEQ ID NO: 105889 - DNA, 329 bp, Glycine max
  Clone ID: PAT_MRT3847_66633C.1
gaggcacgcgtccaacggctactacgacgggagagaaagggagagcaacagggactcattccactgactacggtttgcggcttcagagattgcgacgcacgcacccacggtcaccacctagaacggtgcacgtatctccgtcgcgtcagctcacggagaaagtggtcgcatccagatgatgttggcaggagaatcgattgcagcagcaacgactgcaacttccatgtcgcatgtaacatcttcgaacgtcgcatcgacgggattgagactaggaaacttgggatcacatgggacaaccttcacttatcacctagggttactgttgcact

SEQ ID NO: 105890 - DNA, 181 bp, Glycine max
  unsure (1)..(181): unsure at all n locations
  Clone ID: PAT_MRT3847_66634C.1
ttcccggtcgacccacgcgtcctggtggttgtgtgcaggtgttcaattggtgatcctcgacggaggcaaagacttgtggacggtgagggggacgagggacgtgaaggagatgttgccgtaccttatccataagctgaaagcaaatcgtggaggtgatncctcctccgatgaaagacgacta

SEQ ID NO: 105891 - DNA, 220 bp, Glycine max
  unsure (1)..(220): unsure at all n locations
  Clone ID: PAT_MRT3847_66635C.1
aaaaanaagaaggggagaaggcacaaanccgccctccaacacactttttttttttncaccttatcacattattcttgacaatttcaaaaaatataggccctccaccttctctccccaaaacttctcaacttattcctgtcaattttataacattatctcacctatctttccataatgatctcttcacattaatactcccccatcaacctcacctaatcat

SEQ ID NO: 105892 - DNA, 368 bp, Glycine max
  unsure (1)..(368): unsure at all n locations
  Clone ID: PAT_MRT3847_66636C.1
cgacccacacgtncgnccacgcttacggntagctacttcaaccaatttatactcgcacattgcatagcttccctttggctgctgcctttgcttatctctgtacctctacgtcttgttcaagctttatgctccgtaatgattaacgaatcctctttaattaacttgataattagttagaagactaaaataatatactaggctgctgctgcttcttcttgacctgaactgtcatcatatgaaagaagataaacaatcatgcatttcaatcgttacaagacagtatgcatgtttactctctggatatcgagtacgcacaacatcgagtgatgcataaaaataaaactgttgcattgactttttatcgtatt

SEQ ID NO: 105893 - DNA, 484 bp, Glycine max
  unsure (1)..(484): unsure at all n locations
  Clone ID: PAT_MRT3847_66637C.1
ggctgcgagaagacgacagaagggactccattacattcataaaattgtgtagatgaacaacaacaatgtgttttgcaaacgacaaggaataaaatacgtgaatatgatgcgttttacgtaggatatactaaaaaagcatacggtaaaggtagaaaatttaacaaaatccttatatcactagaggtttcacaaattcaaagaatgtaggtcctaaagaagaagaaaaggataagagagttgttttgataagcttccacgacatgcgagttcaagtgtcatggaaataatggaatccataaattagagaagttgcttcaaaacttttttactattttttaaatgatttttcaaaagatccatacagcaataatgttttatgagatagaggtccaggtgtaaaaattattagattnttacttgttcagaaatataaatactaaatggtatttatttttaaaaaattaatatacattttttttattta

SEQ ID NO: 105894 - DNA, 436 bp, Glycine max
  Clone ID: PAT_MRT3847_66638C.1
tccaaatacagcagtttgcatatgaatttttatctgtttgcttataggagaaacataatctttattgttccttgtttccataatgaagaaaaagtgtgataaaacctcaaagtaaatcgaccttgtatgaaatgaatctggctatgagaaatacttgtttcagaggatttcctgtttgaaaccagtttggaatagttgcagtttatatttatggggaccagtgaaagattgatcatgaatcaggcgcctgaatcacttcagacggaattcaaggtagttcccacacttttgtttttaatattgtaatcccttgttactgattgcttatatatatgctacctgtggcaaatcattgagtattagcagttttggctccatttttttagcaaattgtctgggcatatcttgtcatactcattattcagcagaatgaata

SEQ ID NO: 105895 - DNA, 217 bp, Glycine max
  Clone ID: PAT_MRT3847_66639C.1
acattggatagcctctttcttgaccagactgtttggcatacgatctggtcttgcctgggttggctgtcttgcttttggtgtcatctcacagcatctcaagactcttcttggggtgtctcagcgtgatgtatatactaggaccgttgtgtctgtggaagatgtggttctttcttatgtcatcacgtactatgagttgtatgtcggtggtggtgcatcg

SEQ ID NO: 105896 - DNA, 413 bp, Glycine max
  Clone ID: PAT_MRT3847_6663C.1
gtggtctgtgtgaaacaataagtgaggttgtcttagaaagatggaagaggggacatttgaacaaccatctttggagaaacactattatgggaactgtcctggttgtaaggtggatcaagccaaagagctgagaaaggatgtttccattagaaatctttcttatatttggatggcagtgttatgtggcatacagcgctgcctgtagcatcactctttccctttgtttatttcatggtgaaggattttaatattgcaaaaactgaggcagatataagtacctatgctggttatgtgggattatcattcatgcttggcagggctttgacatccatattttggggaatgctatctgatcgctatggtagaaaacctgtattatttcagggatattacttgtgcattttcaacacata

SEQ ID NO: 105897 - DNA, 290 bp, Glycine max
  Clone ID: PAT_MRT3847_66640C.1
ggccccaagaccccaaacccatgttttaaattggggtcccgggcaaaaaattacaaaaagggaggaaacaagaaaaaaacccctttaaaaaaaaggaaacgggaaaagaaacccaaccctgggaaaggaaaatcactaaccccctcaagttttgacccaaaaagggaaaaaaccctccttttgatcttttaaacccattccaacgggtaaaaagggttggaaaggaggggccccaacccaaaattttgggtgtaaaaaacaaaaaaaaaaatttgaacttgggccccccg

SEQ ID NO: 105898 - DNA, 304 bp, Glycine max
  Clone ID: PAT_MRT3847_66641C.1
ccggtccggcatgtctgggccagacccacgctcacttttcatgaggcgatatcacgggggggcgctcgtttatgccggaaacaagaggactcgttcctagattaaaagaacagtcccattcctcactacatctgggaagtcgactgctgacagcaaagataatgaggctctgtgccacacgcaggcgcagtgaggcaagatccatgacactgttagattgtaagctgacacactatgctattcgttctgggaggtcaagtcaggtgcagtctgcatcagctctgttggctgatgggtgctcata

SEQ ID NO: 105899 - DNA, 252 bp, Glycine max
  unsure (1)..(252): unsure at all n locations
  Clone ID: PAT_MRT3847_66642C.1
gaaanaaaacataccatggattcctgtatataggtccacagcccttggattatccctttgacattaattccagtgttattttccaaaacagatgaaaaccaccatgtgctagcaatgatctaaaaataaaagaaactggaaagaatctcaagtttcaactccagagaaacgcagttcagaagaatcaatgaattgcgtcttcttgggctctcgccctgtacccttacaggggttgaacactcaaacctgggg

SEQ ID NO: 105900 - DNA, 310 bp, Glycine max
  Clone ID: PAT_MRT3847_66643C.1
aggggaccaattgaaccagtatacccaaggccctatacaaccatgccctaaaacacacccatttgattcacttccaagggctagcctcaaggttacatttttggcagcagtgctctgcatggttgtggtgagtgcacccatggcacatgcacctatcacgtgcgggcaggtgaccaatatcctgatcaattgcatcagttacctccataacggaggaacacagccgtcgggatgctgcaactgagtgaacagcctcaatgccgccgccaagaacaccaccgatcgccagacggcgtgcaactgcctcaag

SEQ ID NO: 105901 - DNA, 459 bp, Glycine max
  Clone ID: PAT_MRT3847_66644C.1
ctctgaataaacaaattgcaatccattgttattgaacaatatactgccacaatacctcatagtgcagttgtttgcaaatatacaagcacggcatagcgttaatacatctaagacgacgtttaatcctaattacgcagatagggtgcaatatgaaagccatgcgtacttgacctatacaaaagtatgattaatctgtcaaacgcacgttgcttgaattcttaagtgtactataacgtcaacatactcttggatagatgatcgacatattgtgtagaatcttaactagaagagtaatattatgtaagaatgtgacatgctttatatgaatcccttgaagatcgatgctggagcgaacggctacccttgacaaaggacctgttcataatactgagcctctagcataactccataaacatgtcccaagggacatttgcaacgggcatccaatcaccatttttg

SEQ ID NO: 105902 - DNA, 1265 bp, Glycine max
  Clone ID: PAT_MRT3847_66645C.1
attatgttgccgcggaaaaaggagattacttatctatgcaaacatgactgagcatcagaagaatttgcaggatcatttagttaataagacgttggggaactatttgaaagaaaatatgtcaagtggactttctgttcctgcaattatgattcgtaatttggctattcaacttaggaaggtgtgtaaccatcctgatctccttgagtcagcatttgatgattcatatttgtatcctcctttggaagagatagttggacaatgtggaaaattccatttgcttgatcgattgctgcaacgtttattttcaaggaatcacaaagttcttatcttcagtcagtggactaaagtgttagatataatggattattattttagtgaaaaaggctttgcagtttgcaggattgatggtagtgtgaaactggaagagaggaaacaacagatccaggacttcaatgatgtaaatagcaattgtagagtttttcttctttctactagggctggtgggttgggaatcaatctcactgtagctgatacatgcattctttatgacagtgactggaatcctcaaatggatttacaagccatggatagatgtcatagaataggccaaactaaacctgttcatgtttacaggctctcaactgcccaatctatagagggtcgcatgttgaaaagagctttcagcaaattaaagcttgagcatgtagtgattgagaagggacagtttcatcaagaacgtacaaaacctgccagtatggatgaaattgaggaagatgatgttttggcattgcttcgtgatgaagaaacagccgaagataaaaagatacatacagatattagtgatgaagacctggagaagctcttggatcgcagtgatcttatagtcaacgactcaaacgatgataacttcaaagctccagtcagtgcctttcctcttaaagggccggggtgggaggtggtgattccaactgcgactgggggcatgctctctactcttaactgctagtttcttgtcactatttatggccggagtataaaaaacttgctttttgtggtataagatggaatggctttttgaaacattcttttatgtcacggtggtaatgccctggatggcattcattttttgtagatgcttctaacggaactatgtttagaaatgaagctactctggatatgttttttgcgagttggaattgaacattctacttgtgtagtggcgaaagtgaattggtttggatacaataaaccttaatttaacagtt

SEQ ID NO: 105903 - DNA, 264 bp, Glycine max
  Clone ID: PAT_MRT3847_66646C.1
ctgctcgagtgctgtctcgcgtggggtgtcttggggcttggcaacgacgccgcgccgtggtcttcatacttctgtgctgctttatgggtatagacattgttggtttcctcatttgaccttgtgttgctcattttggctcagagttgctcgtcttttgtgttgagctcgacaacaatgaccttgtatgggctttgtgtgtggggctaccattgtctgggttgcttgtgcatcctgtgtagatttcagactcggttttccttaaaa

SEQ ID NO: 105904 - DNA, 1060 bp, Glycine max
  Clone ID: PAT_MRT3847_66647C.1
cttcccgacactaggaactccctaaaacaaaaaactccgtttaaggaaaggaaaacagcgtacgaggaagagagagatagaaaacggcatgcagtggtgggcttcatggcggaggtgttatattggatctcaacgtttgttctcattttgactcttctttgtattctcggttaccagcttatattattggtggacctggagtttgattatatcaacccatatgattccacgtctcagataaaccaggttgtcttgccagagtttatcatccatggaatcttctgcttcaccaatcttatagccgggcattggtttatattcttgatatctctccctttcctgtattacaatctgcgattgtacattaaaagagagcacttagcagatgttactgaaatctacaataagctaaattgggagaaaaagaagcggctgttcaaagttgcatatcttgttttggtatttgcattttgtatagtcagcttggtatggacccttaccgaggatgtgcattaattgatggcttgccttccatgcctgccatatgtttcgcttacatttttgttcgagaattgtgttattctttgtataaatgtaccagctaattaaattcttggtaatatcaaagaagttacaggctgatacattccctacattgagggcaaatccatcttatgagctgaattccattggcaagagccatggtgagagcaatccgtgatgagccaagctctttggagggacacgtgacaatccatattggtgctaaggctagaaagagagaggcttgagaagttgtgattctttaagttttgtattacttctgcaaggttagactgctttaggcatgaaaaaattatttgagctctcagtggtttaaccacaaacataaaaggcttttttgcctaatatgtatattttgattttgtcatatttgcctcctctgcatgtaaccccaagagtagcagcagcaacaccaccaaagaccgataatattttctgttgttttaaacccttttatagagttgcaaattctttatccaaggcattaatcccttat

SEQ ID NO: 105905 - DNA, 724 bp, Glycine max
  Clone ID: PAT_MRT3847_66648C.1
cggtggttctatgtatagattgccaggctcgggtggaatgcctgctggtggtggaggttatccggatagtggacactatggtttatcagcttcatctgggtaccagaatcagcccccccctccttctggggcttcacctgtgcctagggttccgcccatgtatcccaacgtgcccccttactactgaagagatgtgttggagcatatccgagtaattaaagtaagaaaaagtggcagaagtgagattgtggtcttggaagctttctgaaatgggtgttgacagtgatggcctttgaaaacaagatgacggacctgattccactgacttacgccaatttggtgctgcgcttgttctatgcatgtgtcgacttgtacagtgaagtcagttttgtgtcgacttaaatgttttaccccatatgaagagaatttataagagattacagccccattatgataaaattaagatgatttgatggaaaagttacgtatggtcgtgtaaattactcttgtatgctttacattaagaaggattgagcttgtgataggcctcgctactacaaatctttgcaaacttgctgaacttgcttttgtataaaaccgggttaaattttattattctcttcgaatggcagttgacacaaactaaaactcggtagcaggatagttaaaattgttctgaattgcccagtgaaactgtcacgtttaatttaaaacactacttccc

SEQ ID NO: 105906 - DNA, 279 bp, Glycine max
  unsure (1)..(279): unsure at all n locations
  Clone ID: PAT_MRT3847_66649C.1
agcatcgtgtctntgtttatggacangcngttgattntagtctgcnanaaggactgacttgcagacacttnaggggatatctgagggagacangaagttggtcatganatgaaagcggnagccttgaagactctagttggtcaaggtggtgancctacagacaatnacagtgnattgatgancatgagcnntttgacngannnggnggtantngcngtgncaaatgcngnatgtgagangttactnccccccccngtgnagatangttgaacnccaaga

SEQ ID NO: 105907 - DNA, 351 bp, Glycine max
  Clone ID: PAT_MRT3847_6664C.1
atttttagtttttgggtagatccattgaggatgaggaggagaataaggatggcacacaggaagaaagggcacccaaggcacgggtcactgggatttctccccaggaagtctgctgttcgacacatcggaaaagtgaaggcatagaacaaggatgaccgatccaaggcacccaagctgactgcattctcgggttacaaggctggtatgactcacatcgctagacaggtcgagaaggcaggatcaaagatttacaagatggaaacatggcagcctgagacaattattgagaccccagcaatggttattggaggtgtcgaggattatgtgaacactcctcttgggcttaggaca

SEQ ID NO: 105908 - DNA, 1969 bp, Glycine max
  unsure (1)..(1969): unsure at all n locations
  Clone ID: PAT_MRT3847_66650C.1
ttcccgaacctaaaacccacgcgtccgccgaacctaaaaccctcgctcgtagtctctctctttctctctgcattccattccttagttttagggcttttcattcttcagtcttctcttcgcttcaatggctacaatcgttctcagtaattgctcttccacttctcggcgcctcttccccttaacctctcaaatccactcttccttcactcgttcccctctctctcctcccgttttcaccaatgactccacatcttcttcttcttcttcttcttccagttccaacccctggttcaccagaacgaaacctcacgttaatgtcggaactattggacacgtggatcacgggaagaccacgcttactgcagcaatcaccagggtgcttgcggatgaagggaaagctaaagcttttaccttcgatgaaatcgataaggctcgtgaagataagaagagaggaatcacgattgcaacggcacatgtggagtatgagactgcaagaggacattatgctcacgtggactgattcggatcagcagatcatcttaaaacaaggataacatgtgctgcccaggaggatggaagtacacttgttgcatgtgggcctactggacctatgcgccagtgcaaggaccatgtttcacttgctcgccaacttggtttgccatcgctggtgtgtttctctgaatcaagtttattctcttgataaaccagagttggtagagcttgtagaaatggtgcaccgtgtggttctggacttctatgagttccctggagatgaaatccctatcattagaggttcagcattgtctgctttacagggtacaaatgatgagatgggaagacaggccatcctaaaattaatggatgctgttgatgaatacattcctgaccctgttcgccaacttgataagccttttctaatgcccattgaagatgtattttcaattcagggacgaggaacagtagccactggacgtgttgaacaagggatcattaaagttggtgatgaagtggaggtgttgggtctaatgcagggtggtcctctgaaaacaacagtaactggagttgagatgttcaagaagattttggatcaaggacaagctggtgataacgttggtcttcttctccgtggtctgaagcgtgaagatattcaacgtggtcaggtgattgccaaacctggttctgtaaaaacgtccaagaaatttgaggcagagatatatgtactcacaaaggatgagggtggacgacacactgccttcttctctaactacaaacctcagttttacttgaggactgctgatgtcactggaaaagtagagttgcccgaaaatgttaaaatggttatgcctggagacaatgttactgccgtgtttgaattgatttctgcagttccacttgaagcaggacaaagatttgccttgagagaaggtggtagaacagttggtgccggtgtggtgtcaaaagtactgagctagtgcgttcgctgtgattcaagttttagtctacacatttgcaaacgggggtggaaaccctgagacctgacttttatcttgagaaatacaaacatgtgccaagcaattaatattttatcggttgtgttggatgaaattgagtaaattttagagaagttaatcatcactgttcatttttgtagtgcataatttatcaacatgcacaggatcgccgccgactgtttcgcccgactgtttctgctttatgaaaataatttgtgtatcatctgtgttaacagtccgagccattcattgatattgggttttacaatttttttttgttttaaataatgctctttttatttgaagctctattgttgattgcatctatgtatttcatgtataaacaaattcttacgatatattgtgtctgagtaccacttataggaaactcgtcatattttgtaagttaatgcacaagacctcaggttgtactgcanaaaaaaaaaaaaaaaaaaaaa

SEQ ID NO: 105909 - DNA, 840 bp, Glycine max
  Clone ID: PAT_MRT3847_66651C.1
cggtccggaagttcccgggtcaccctagccgtccgtctctgcattccattccatagttagggcttttcattcttcagtcttctcttcgcttcaatggctactctcgttctcaggaattagctcttccacttctcggcgcctcttccctttaacctctcaaatccactcttccttctctcgttcccctctctcccctctcgttttcaccaacgactccgcatcttcttcttcttcttccactcccaacccctggtggagatccatggccactttcaccagaacgaaacctcacgttaatgtcggaactattggacacgtggatcatgggaagaccacgcttaccgcggcaatcaccaaggtgcttgctgatgaagggaaggctaaggctgtggcattcgatgaaatcgataaggctcctgaagagaagaagagaggaatcacgattgcaacggcacatgtggagtatgagactgcaaaacgacattatgctcatgtggactgccccggacacgcggattatgttaaaaatatgattaccggagctgcccagatggatggagggatacttgttgtatctgcacctgatggaccgatgcctcaaaccaaggagcacattcttcttgctcgccaagatggagagccatctctggagagtttatctgaataaagaagctgactctgatgttccacaactcgctatatctcgccacaaatgaaactaccaataacatcatgagactctaaaaccctcctgtccacccaaattccactacttttcacttaccctccccagccttttaaacccccccttttcccccccccgcttccccccccccccca

SEQ ID NO: 105910 - DNA, 981 bp, Glycine max
  Clone ID: PAT_MRT3847_66652C.1
gtcctctgaaaacaacagtaactggagttgagatgttcaagaagattttggatcaaggacaggctggtgataacgtgggtcttcttctccgtggtctgaagcgggaagacattcaacgtggtcaggttagttgaggagatctagcttttgctttttgttagacatcatagctgcatgcaagagaactgtatattatctgtatttgtttcgataaaatttatagaatttcgaattcaaattactaaatttgagaaagcactttcccaatgctgctttctattgaaaaggtgattgccaaacctggttctgtaaaaacatccaagaaatttgaggcagagatatatgtactcacaaaggatgagggagtgcgacacactgctttcttctctaactacaaacctcagttttacttgaggactgctgatgtcactggaaaagtagagttgcccgaaaatgttaaaatggttatgcctggagacaatgttactgccgtgtttgaattgatttcagcagttccacttgaagcaggacaaagatttgccttgagagaaggtggaagaacagttggtgccggtgtggtgtcaaaagtactgagctagtgcatttgccatgattcaagttttagtctacccatttgcaaagggggttggaaaccctgagacctgacttttatcttgagaaatacaaacatgtgccaagcaatataatatttatcggttgtgttggatgaaattgagtaaattttagaggagttaattatcactgttcatttttgtagtgcataatttatcaacatgctcatgatcgctgcagactgtttctgctttatgaaaataatttgtgtatcatctgtgttcaacagtccgagccatagatatcgggttttacattttttttttgttttaaataatgatctttttatttgaagctctattgttgattgcatctattgatttcagatataaacaaattcttacgata

SEQ ID NO: 105911 - DNA, 294 bp, Glycine max
  Clone ID: PAT_MRT3847_66653C.1
atgactctcttcttcttccctcatcacacctgcttcaactgtgtcaatctcaacacgccacagaagagtcagatagtgggaagaaaaaaacaagctttatttttagagggtgcccaagttgattgttcttttgtgtatcctgcagcactctatgtgtttgttcaatgttcctcgaagatttgtattgtccccaaaacaaaaacgataattcagcctttttagctcttccaacccgaaatttcgtgtttctttgatgagttcttcatttggggtggtataaatttgcttagtttg

SEQ ID NO: 105912 - DNA, 296 bp, Glycine max
  Clone ID: PAT_MRT3847_66654C.1
gacaaccattggcattatatgtgcatatgggctgagccctggggttgagggcattcgacagcagaccgccattcctcaaacggtttcacagcgaacagcatggaatcaagtggctaccgagcgaacaccatggcattttgatattgaccagcatagctgttgactgttatctatcgaccctggcggaggaggcacactaatgcacaaaactgcagataggatcacactgatacaaaatgcttcaaataaagactgattgatagtcactactgtgatgactggctatgcaatggtca

SEQ ID NO: 105913 - DNA, 426 bp, Glycine max
  Clone ID: PAT_MRT3847_66655C.1
acggcttcgagaagacaacagaagggggtttgattatggtttgtcattatcactggggctggttcacactgtctttgcaacaatggcttcaaaaataaaactttctaacccaattagggagataaaattgcttaaacttgttctcaatatctctatttgcgagaggtgatatcgtcttaccatagccaccaaggtgttagaacaacttagtggccaaaccccaatgttttctaaatcaaggctcactttgtcgttcccttttgattaataaaaattagaattttgtattctatatcattttcatacgtgaccatgtaatgctactttttgagagtggttcttaggttaaggtatatttacttcttatagggggtttctaaagttcttcttttcatcagctttaatctctaaggtcatttttttttt

SEQ ID NO: 105914 - DNA, 451 bp, Glycine max
  Clone ID: PAT_MRT3847_66656C.1
cccacgcgtccgattctcatgaatatgccaaacgctgtgcttcacaatgtggagatatgctgttggagatctcgtctttgacgattctaagatgacttctccctacattaaatgtacagtctctttcttcatagcatgcggaaatttgggtgatcacaccattaatccagaggcttttccccacaagctggtgcagcatggagagattcaggaaaaacctgtatcgaaattttcacaagaggaatatcttacagcttggtcaactcaggtgcggtctgcaacaactctgttggctgatgggtgaccatatctgcatgctatggggcatgataggtcagtgtctacaataccaggtgaatttgtcattggtgctaagtgggcaaccataaacaatatgagtgcatatgggctcaatccaggtattttatgtactcgaattttggccaccatt

SEQ ID NO: 105915 - DNA, 377 bp, Glycine max
  Clone ID: PAT_MRT3847_66657C.1
accaggtaccacccctcaggtttgctatatcatcattcattcagatcagaagtaggggaacaaaaagtatatatgttgtatctaatgggttttgcaaaactttcttggaacttctttgataaggactggctaatttctagaagcgtcatatattgaaagatccctggacactggtaaattagctaccaaaagtccaaaatcacacaaatttatatatatgtgtcctgtaactgttgatgattgattacagtcgtttgaattgtttctaatagcgaaacttcaactttttatttctccaaaaaaaaaaaaaaaaaaaaaaaaaaaaaaaaaaaaaaaaaaaaaaaaaaaaaaaaaaaaaaaaaaaaaaaaaaaaaaaa

SEQ ID NO: 105916 - DNA, 313 bp, Glycine max
  Clone ID: PAT_MRT3847_66658C.1
gccccaaatttaccaaattggaaataaaaaattgggcccgggcggggacccgtcccaaagggaattgttttagttcaaaaaatccttggccccaaaaggcccagactttaaaaattttcccaaaaaaccgggggggggaaatttaaggggcaaaaaaaccggggggggcttttcaaaaaaaaacgggtaaaaacaggtgggggggaataaaaaacaaccctttgttttttgagttcttggaaaaaaggcccccaaacccccctttttttttttgggggcccccccaaaatttttttgtgcgccccgggggggg

SEQ ID NO: 105917 - DNA, 670 bp, Glycine max
  Clone ID: PAT_MRT3847_66659C.1
tcgggacaacacttcttcctttcttctcttcttcttttggaatcaaatcatctcttttcacaaaacctaataatctttacgttttctttaattttgtttttgttgtgaattggaatgttccgaacttcaggcttcagagaagaaactatcgaacccaatgagggaaataaaggtgcagaaactcgtcctcaatatctccgttggtgagagtggagatcgtctcaccagagccgccaaggtgttggaacagcttagtggccaaaccccagtgttttccaaagcaaggtacactgttcggtcctttgggattagaagaaatgagaagattgcatgctatgtcactgttagaggtgataaggctatgcaacttttggagagtggtttaaaggtgaaggaatatgaacttctcagaaggaacttcagtgatactggctgcttcggcttcggtattcaggagcatattgatttgggaatcaagtatgatccttcaactggtatttacggaatggatttctttgttgttctggagcgtcctggctatcgcgtgggacgtcgccgaaggtgcaagtcccgtgttggaattcagcaccgtgtcacaaaggaggatgctatgaagtgtttccaggtgaaatatgaggcattgatccttaacaagtctcaagcgattgtg

SEQ ID NO: 105918 - DNA, 254 bp, Glycine max
  Clone ID: PAT_MRT3847_6665C.1
agcgtccgaacaacaacggcaaaccacgacaaaaacggagagactgattccgagaatcgggacggggcactatcactgttatggacccaaggtcaacttcggccggacgatccaggcggtcgacattatcatatgcgagaattcaactgttgtcggcacatctatgaaaagatcacgcatgtgtccctggacgagcttaaccacaactagaatctccgaatacaacaaaatggccaaacctagtccgattctga

SEQ ID NO: 105919 - DNA, 312 bp, Glycine max
  Clone ID: PAT_MRT3847_66660C.1
acgagctcgtgccgctcgagttttttttttttttttttacaaaagaatcattgggtatttcgatgtatttggtgctagggtttcttggcctgcagcaattacaaaattactataatagttaagagataattaaataagattatacagggaaaagaaaagaactacgggaacacacatatatatgacataccaaaaaataaactatgattaaggatcaatactttagaatttggattaaagatttatacatccagttcaatgtattggagattataatgatgtctcagaaactaatttaatgcattttaagca

SEQ ID NO: 105920 - DNA, 640 bp, Glycine max
  Clone ID: PAT_MRT3847_66661C.1
gaaaatgttagaaagagaagcaagtcttgtgagctctaaaatctggattgaaccaaagcatcaagcaactgaggttaaagttccagtaatatactacctttcccgaaatggccagcttgagcatccacatctcatggaggttccaatctcttctccacagagagtgctatgtctcaaagacgtgatagatagattgagttttctccggggacaaggaatggccaacatgtattcttggtctacaaaaaggagttacaaaaacggttttgtgtggcaagatttgtccgagaatgatttcatttacccaagtagtggccatgagtatgtcctcaaaggaacacaaatgatagaagcttctttgagttttcgatcctgcgaaacaatatcaacatcaagctccaaaagttccactgaagcaatcaattctagcacgggtgcagactcccctgccaccataaaggggagaagccaatcattgaactcgagtgattacaagttttactcggcaaagacatgcgaagagtttgcagggaaagctactaatgcgtcgactcagaccgaggagaagcatagggaaaggataaaaagggaggagcaagttgaagagtgtgaaggaaatggtgatgcaagggagttgggt

SEQ ID NO: 105921 - DNA, 396 bp, Glycine max
  Clone ID: PAT_MRT3847_66662C.1
aagaaatgagaagattgcatgctatgtcactgtcagaggtgacaaggcaatgcaacttttggagagtggtttgaaggtgaaggaatatgaacttctcagaaggaacttcagtgatactggttgcttcggctttggtattcaggagcatattgatttgggaatcaagtaagttgaagaacccttggatttttatgctgttgtttttactttgcctgaggtaaacattttaggacttaagggaagctgattatttgatatgggttgtggtgtgcacaatgcatattcaaaattttggatatgacataacatatctcttctcctttatgctgcatttcagttttgacttgaaccaaatgtttactggttcataaacctgttatatattgcttgataatt

SEQ ID NO: 105922 - DNA, 835 bp, Glycine max
  Clone ID: PAT_MRT3847_66663C.1
tttgaaaccaaaaatcaactcttttcacaaactctagttatatttacatttagttttcttaatttatggttttgttatgaattggaatgaacttgatttcaggcttcagagaagaaactttcgaacccaatgagggagataaaagtgcagaagctcgtcctcaatatctctgttggcgagagtggagatcgtctcaccagagccgccaaggtgttggaacaacttagtggccaaaccccagtgttttccaaagcaaggtacactgttcgttcctttgggattagaagaaatgagaagattgcatgctatgtcactgtcagaggtgacaaggcaatgcaacttttggagagtggtttgaaggtgaaggaatatgaacttctcagaaggaacttcagtgatactggttgctttggctttggtattcaggagcatatcgatttgggaatcaagtatgatccttcaactggtatttatggaatggatttctttgttgttctggagcgtcctggctatcgtgtcggacgccgccgaaggtgcaagtcccgtgttggaattcagcaccgtgtcacaaaggaggatgctatgaagtggttccaggtgaaatatgagggagtgatccttaacaagtcccaggcaattgtttagttagattgagttcactttagtttgaaggcaagttttgaaacattgtttgtcatttcagtttcatgatgaagcatatggattaacatgagccctgtttaaactgcacttttattgcaaagaacttgtgacctcacgttgttgcaataatataaaacgataaaagaaaataaataatattttgtggtggtcc

SEQ ID NO: 105923 - DNA, 957 bp, Glycine max
  Clone ID: PAT_MRT3847_66664C.1
ccacgcgtccgggccctttcgagtgagtcctataattctgacccaaattgacaccaaagtgagtagatctattaaaaaatattgcaacccgaattggggttttactttttatcattgatccttctcttccctctgccgccgcaccctgcaaattcaatggcttcagagaagaaactatcgaacccaatgagggaaataaaggtgcagaaactcgtcctcaatatctccgttggtgagagtggagatcgtctcaccagagccgccaaggtgttggaacagcttagtggccaaaccccagtgttttccaaagcaaggtacactgttcggtcctttgggattagaagaaatgagaagattgcatgctatgtcactgttagaggtgataaggctatgcaacttttggagagtggtttaaaggtgaaggaatatgaacttctcagaaggaacttcagtgatactggctgcttcggcttcggtattcaggagcatattgatttgggaatcaagtatgatccttcaactggtatttacggaatggatttctttgttgttctggagcgtcctggctatcgcgtgggacgtcgccgaaggtgcaagtcccgtgttggaattcagcaccgtgtcacaaaggaggatgctatgaagtggttccaggtgaaatatgagggagtgatccttaacaagtctcaggcaattgtttagttagaattgagttcactttaggagtgtgttatcagttttgtcaactatagttcgatctttctgggatggtgtcttaattttgaggcaggttttgaatcaatgtttgttatttcagtttagtgatgaagcacttcgattaacaatacccttttaaacgacacttttattgcaacgaacttgtgaacccctagatatgcagttatggttggaaaaaatttactttgttttttgtgcaaccaaagagaagccggtgct

SEQ ID NO: 105924 - DNA, 1045 bp, Glycine max
  Clone ID: PAT_MRT3847_66665C.1
cccacgcgtacgcgtttattgtcttcactctgcccgctgcatcaatggcttcagagaagaaactttcgaacccaatgagggagataaaagtgcagaagctcgtcctcaatatctctgttggcgagagtggagatcgtctcaccagagcctccaaggtgttggaacaacttagtggccaaaccccagtgttttccaaagcaaggtacactgttcgttcctttgggattagaagaaatgagaagattgcatgctatgtcactgtcagaggtgacaaggcaatgcaacttttggagagtggtttgaaggtgaaggaatatgaacttctcagaaggaacttcagtgatactggttgcttcggctttggtattcaggagcatattgatttgggaatcaagtatgatccttcaactggtatttatggaatggatttctttgttgttctggagcgacctggctatcgtgttggacgtcgccgaagatgcaagtcccgtgttggaattcagcaccgagtcacaaaggaggatgctatgaagtggttccaggtgaagtacgagggagtgatccttaacaagtcccaggctattctttagttagattgagttcactttaggagtgtgttatcagttttgtcaactatagctcgatctttctgtgatattatgttaattttaaggcaggttttgaatcaatgtttgtcatttcagtttcgtgatgaagggtatggattagccctgtttaaacggcacttttattgcaaagaactcctgaaccccgcgttatgcaatgatgttgggcaatttacttagttttctttgcaaccaaataagagaagcatgtgcaaaacattttacttgcgagggccagaactagctaaatatacctcaatacggtggaaaatactcctccccatttactgatgtagacacaatgtgttcatatctcctactggaaaattccactaaatggaggagtattttccactttttaaatgtattttctcttggttaaaatttattgaaaatatcaaattttgtgggtgttatat

SEQ ID NO: 105925 - DNA, 242 bp, Glycine max
  Clone ID: PAT_MRT3847_66666C.1
agcgctaatgtgccacaaacttaatggttaacggccaccaaaacttcctccaatgggtttggaacttcagaaacgccaattctgccaatccaagaaaattcctccttggcaaaagtaaggggtttgagaactcaactggttctgaaaaacatcaagcaattgccctgaaggttcaagccgacaaggccaacctttaaaaatgccgaatggaatggttacaggacacactttacgcccaaaac

SEQ ID NO: 105926 - DNA, 909 bp, Glycine max
  Clone ID: PAT_MRT3847_66667C.1
cccacgcgtccgcccacgcgtccgacggctgcgagaagacgacagaagggggttttgattagggtttgtcattagcacttcttcttttcacactgccgctgcaacaatggcttcagagaagaaactttcgaacccaatgagggagataaaagtgcagaagctcgttctcaatatctctgttggcgagagtggagatcgtctcaccagagccgccaaggtgttggaacaacttagtggccaaaccccagtgttttccaaagcaaggtacactgttcgttcctttgggattagaagaaatgagaagattgcatgctatgtcactgtcagaggtgacaaggcaatgcaacttttggagagtggtttgaaggttaaggaatatgaacttctcagaaggaatttcagtgatactggttgcttcggctttggtattcaggagcatatcgatttgggaatcaagtatgatccttcaactggtatttatggaatggatttctttgttgttctggagcgtcctggctatcgtgttggacgtcgccgcaggtgcaagtcccgggttggaattcagcaccgtgtcacaaaggaggatgctatgaagtggttccaggtgaaatatgagggagtgatccttaacaagtcccaggcaattgtttagttagattgagttcgctgtaggattgtgttatcagttttgtcaactatagctcaatctttctgtgatagtatgttaattttgaggcaggttttgaatcaatgtttatcatttcagtttcgtcatgaagcatatggattaacattagccctgattaaacggcacttttattacgaagaactcgtgcacccccctcgttatgcgattatgcttggcaaaaaaaaaaaaaaaaaaaaaaaaactcgagactagttcctcgt

SEQ ID NO: 105927 - DNA, 255 bp, Glycine max
  Clone ID: PAT_MRT3847_66668C.1
atcaaagtggtgtttacaccttgtagttaaatgttgagatcttacattgactagagacatggattagtagtgaagtctaagggttgtatatacccttcacttcaaacccgctgttgatatttatttgagccatgttttatattgctgctaattactttctatgtgccctttttcttaattcatttccccactatcctatttatctgctctttgaatgtctcagcatggcatgagatgaaatcgaccaaaataatc

SEQ ID NO: 105928 - DNA, 764 bp, Glycine max
  Clone ID: PAT_MRT3847_66669C.1
ggacactatcaaatttattttaaaatatagatttctggtgaactgtttttgaataacctttttcccccagattttgggtaatatattttagggtttctaatggaaggttcgttttctttttttatttatttgcaatgttaagactcaggcctgatggtagggttgtaattgtagtttgagttctgtattatttgttaactgcaataattaagtgtgaacctgttcttgtgattaaaatcacaatatggcgggcttaatgaaagcattaaaatgtcaaattttcttcagaaacttgattcagaggttcaaaagatggaaagtgtatggcttttttctgcttaatataatttaaaccttgttttcaaatccaaaagatggaaagaataatctattgctccgattttagtatttgtttagtgtttaaatactggatatttgtagctgtttttcagtgttaattatttgttaagaaatgttttcctccacttggttttgacagcaaggtacactgttcggtcctttgggattagaagaaatgagaagattgcatgctatgtcactgttagaggtgataaggctatgcaacttttggagagtggtttaaaggtgaaggaatatgaacttctcagaaggaacttcagtgatactggctgcttcggcttcggtattcaggagcatattgatttgggaatcaagtatgatccttcaactggtatttacggaatggatttctttgttgttctggagcgtcctggctatcgcgt

SEQ ID NO: 105929 - DNA, 424 bp, Glycine max
  unsure (1)..(424): unsure at all n locations
  Clone ID: PAT_MRT3847_6666C.1
cacacatccaggcnngccgcgncnccacngncggagccgncaacagagcccnnnngaacccngaaggnccnggagccggagccncagcccccagnncacccttctttgggaccagctngaagaggggggggccgctgggtccccacngcnnggtttccggtggaagcttcnngaagggggctggggaagagaagaaagagattgangagacccagcagaccgaccnggacagatggaagggtcttgcctatgatatctcagacgaccancnngacntcacangaggaaagggtttggttgactcccctttccaagctccaccggatgctggaacctcctatgccggcctgagctcctacgagtgccccaggcctggacttcgcccaggcttggaccccnnntggatgggtgctaccttgctcca

SEQ ID NO: 105930 - DNA, 1224 bp, Glycine max
  Clone ID: PAT_MRT3847_66670C.1
gtgttggaacaacttagtggccaaccccagtgttttcaaaggttagttctcgataagtttctaaatgggtagttcagtgatgctggtaatgggcatagatctcaaatctgtgttcattggaactttttgttgatcatttttgtgcttgtatcattttcttaaaatatagatttccggtgaagtaactttgaagaattcccaaggtttgggtagtttattttagggtttttaatggaaagtttgttttgcttttttaattgcgttgtcaagactcaaaggtctgataatagggtggaagttgtagtttgagttttgaaatttctgttaattataattattaagtgtggaccttttctgtggttataatcacagtagtggtgggcttgatgaaagttcatttaaatgccaatttttcttcagaaactcgattcagaggttcatggaagacctgaaaatgaggattctgatatgtcttgattgtatagcttttttcctgcttaatttaatttaaaccttgtgtgcaagtccagaagacagaaagcatagtctattgctctgtttgaagaattttaaatagtactacttgctttaccagtagtttatattaatgtttattgtatgttggatatatttggctgtttttcactgttgcttggtaagaaatgttttttctccgcctggttttgacagcaaggtacactgttcgttcctttgggattagaagaaatgagaagattgcatgctatgtcactgtcagaggtgacaaggcaatgcaacttttggagagtggtttgaaggtgaaggaatatgaacttctcagaaggaacttcagtgatactggttgctttggctttggtattcaggagcatatcgatttgggaatcaagtatgatccttcaactggtatttatggaatggatttctttgttgttctggagcgtcctggctatcgtgtcggacgccgccgaaggtgcaagtcccgtgttggaattcagccccgtgtcacaaaggaggatgctatgaagtggttccaggtgaaatatgagggagtgatccttaacaagtcccaggcaattgtttagttagattgagttccctttagtttgaaggcaagttttgaaacattgtttgtcatttcagtttcatgatgaagcatatggattaacatgagccctgtttaaactgcacttttattgcaaagaacttgtgaaccccccgttatgc

SEQ ID NO: 105931 - DNA, 309 bp, Glycine max
  Clone ID: PAT_MRT3847_66671C.1
aaaataacacacactttacacatcatttcgatcattaaaagaggtgtggtaattttcaaataggcatatcatacttatcaagagggtcttgcctaatttcctttcttgaattaaacaaacttacaatcgactgataactcattttccatatcatgcagtggattttgcattttcaaattatttggcacgtacctgcggaacaaaaaaagcttgtattagatttttaccaggatttttaaaatcttgcgaattccctttacgaatatcaaaaactgggtactgtttgttgttgtcaataatgtaactcaa

SEQ ID NO: 105932 - DNA, 1361 bp, Glycine max
  Clone ID: PAT_MRT3847_66672C.1
agcacagccgatcccacgcgtctgtattcggctctgcgaagacgacagagggttctcctacagattcttcagcaactgcgattttggatcggaacctcttctgcggcgtagcaatgggacactccaacgtttggaattctcacccaaaaaactacggtcctggttctcgcacttgccgagtgtgtgggaatccacatggattgatcaggaagtatggccttatgtgctgcaggcagtgcttccgtagcaatgccaaggaaattggcttcatcaagtatcgctaaaagagctgttgtcacctacggaccaatattatgttctggcactaggatgttttgaagatgttatgtttgaagaaacttgagacttgtttttttcatctattttattatcagacataatgtgtggaacgaagaatacttttatataaattgttttgcactaaaaaaaaaaaaaaaaaaaaaaaaaaaaaaaaaaatagaaaaaaaaaaaaaaaaaaaaaaaaaaaaaaaaaaaaaaaaagttttctccttcttctcctccctctgcctgcagcggtgcaacctatcagcctccaaatccaatggcttcagagaagaaactgtcgaacccaatgagggagatgaaggtgcagaagctcgttctcaatatctctgttggagagagtggagatcgtctcaccagagccgccaaggtgttggaacagcttagtggccaaaccccagtgttttccaaagcaaggtacactgttcgttcctttgggattagaagaaatgagaagattgcatgctatgtcactgtcagaggtgacaaggcgatgcaacttttggagagtggtttgaaggtgaaggaatatgaacttctcagaaggaacttcagtgatactggttgcttcggctttggtattcaggagcatatcgatttgggaatcaagtatgatccttcaactggtatttatggaatggatttctttgttgttctggagcgtcctggctatcgtgtgggacgtcgccgaaggtgcaagtcccgtgttggaattcagcaccgggtcacaaaggaggatgctatgaagtggttccaggtgaaatatgagggagtgatccttaacaagtctcaggcaattgtttagttagattgagttcactttaggagtgtgtgatcagttttgttaactataacttgatctttctgtgatagtatcttaattttaaggcaggttttgaatcaatgtcatttcagtttcatgatgaagcatttggattaacaatagccctttttaaacgacatttttactgcaaagaacttgtgaacccctcgttatgcaattatgcttggcaatttactttggttttctttctacc

SEQ ID NO: 105933 - DNA, 431 bp, Glycine max
  unsure (1)..(431): unsure at all n locations
  Clone ID: PAT_MRT3847_66673C.1
gacaacaaaatttgccaattgccatttcaatcctcagcttctttcttcaacgtttccatcatacacagatcccaatcctctctcaagccctaatttcccctcatttccatggccacagaagagcccactgtcgcggtggaacccgctcccgaacctgcctccgccgatcctcccccggaggagaaggaggagaccaaacctgaagccaaggctaagaaaaccaaggagcccaaacctaaaaaggtttccagacctagcaaccctgccactcatccttcctacgaagaggttcgatccgaaaccataattctaattctagttctaataataactctgattctaattctcttacaatntttgtgatctgaacttggatctaattattctgattgtttttttctgcacatggttaaagatgcaattacctcgct

SEQ ID NO: 105934 - DNA, 1147 bp, Glycine max
  Clone ID: PAT_MRT3847_66674C.1
tacggctgcgtgaagggaccagagggcgactgacaccaaaatttgccaattgccatttcaatccccagtttcttcttcaacgtcctcttacgagcagatcccaattctccttcccagtttcaaaccctaattccctcattcccatggcctcagaagagcccactgtcgcggtggaacccgctcccgaacctgccaccgccgagcctcccccggaggagaaggaggagcccaaacctgaagccaaggctaagaaaaccaaggaacccaaacctaaaaaggtttccagaccacgcaaccctcccactcatccttcctacgaggagatgattaaagacgcaattacctcgctgaaggagaaaaccggttcgagccaacacgcgattgcgaagttcatcgaggagaagcacaagcagcttccaccgaacttcaggaagcttcttctctaccatttgaagaaacttgtagccgctggaaaactcgtcaaagtcaaaggctccttcaagctcccacctacccgaccttctgcatcttcttcttcttcgccggcgaagaagaagaagcccgcacctgctaagccccaacccaagcccaagcctaagcctaagcccaagcccgctgctaaagccaaggacactaaggcaactaagtcaaaggcaccagctaagcccaaggcagctgctaagcctaaagccaaagttccagccaagcccaagcccgcccctaaaccaaaggctgctgctgctgctgcttccaagcccaagcctgctgccgccaagcccaaagggactaagccagctgccaagcccaagcccaagcccgctgctaaaacaaaggctgctgctgccaagcccgcggcaaagcccaaagcgaagcccgccaaggcttcaaggacgtcgacacggacttcaccagggaagaaagcagctcctgctgcgaagccggcagcgaagaaagtagcgcctgctaagaaagcgccagtgaagagtgtgaaaccaaagagtgtaaagtctccagcgaaaaaggctacggctaagagagggggtaggaagtgagaatgtggtgggtagagtggttttagggttagttttgtgaagttctttaagctttcagcgaagtaggctacgtctcagatagggctatggaagat

SEQ ID NO: 105935 - DNA, 1015 bp, Glycine max
  Clone ID: PAT_MRT3847_66675C.1
acgacccacgcgtccgcggacgcgtgggcggacgcgtgggcggacgcgtgggctaagcccaagcccgctgcgaaagccaaggatactaaggcaactaaatcgaaggcaccagctaagcccaagccagctgctaagcctaaagccaaagctccagccaaggccaaacccgctgctaaaccaaaggcttctgctgctgccaagcccaagcctgctgccgccaagcccaaagccgctaaaccagctgccaagtccaagcctgctgctaaaacaaaggctgttcctgccaagcccgcggcaaagcccaaagccaagcccgtcaaggcttcaaggacgtcgacgaggacttcaccagggaagaaagcagctcctgctgctaagcccgcggcgaagaaagtagcggtggcagcgaagaaagcgccagtgaagagtgtgaaaccgaagagtgtaaagtctccagcgaaaaaggctacggctaagagagggggtaggaagtgagaaagagtggtgggtagagtggttttagggttagttttgtgaagttctttgtcctcttggtggtgtagttggggttacagatgatcctataatatatgaaatctgattttatgaaacctttgttttttttttcttttatttagtttgaattttttctttggttcgaccttagggagtagattaaaaaaagcttctagctctgcttttcagctaaatgagttaatcataaaatgtatcttatagagtatgaggtttctctgcgttatagtacctttgatggatcaatgtagtataagcacctttttcacatgaatggatttgtagtatatgctttctgtgtatgaagtatgaaatttgcctttaagatgccattggtgtctctatgatatgagttgatatgcctgcatttgcttgattgaccttcttgtatgaattgattagcaattgattgtttgcatctcaacttcttccttggctttagttgatttttttttttcagtgcaatttctgtaatttcaat

SEQ ID NO: 105936 - DNA, 974 bp, Glycine max
  Clone ID: PAT_MRT3847_66676C.1
gtgcggacagcaacagcaacagaagcatcgttcaagtatgacagtgtgactaggattccttctagcttggactggaggaaaagaggtgctgttactccaatcaaggaccaaggaacatgtcgaagttgttgggcattttcaactgtggctacaattgagggtctccatcaaataactaaaggtgaattagtgtctctatcagagcaagaactagttgattgtgttaaaggtgacagcgaaggatgctatggtggatatgtggaagatgcctttgaattcattgccaagaaaggtggagtagcaagtgaaacacactacccctacaaaggagttaacaagacttgcaaggttaagaaggaaactcatggtgtagtccagattaaagggtatgagcaagttccttcaaatagtgaaaaggctctcctaaaagctgtggcacatcaaccagtgtcagcttatgttgaagctggaggatatgctttccaattttactcaagtgggatttttacaggaaagtgtggaactgatatagatcattctgttaccgtagttggttatggaaaagctcgtggtggcaataaatattggctggtaaagaattcatggggcactgaatggggtgagaaagggtatataaggatgaagagagatatacgtgccaaggaaggtttatgtggaattgctacgggtgccttatatccaactgcttgattgctgctattaattcatatataaatcttaaagagtttaatttggtgtatgcacgttgtatctctaatcatcattttccttatattttcgggctagtatatatgcaacctattagtgttccaacaagagactcgacccttccagaccactggttctcggtcagattagtccggcttttaaaattatgtcttccattgcaagctaaccttataactcaaaatatattccatgctttctttttttgttgttgtttagtataaaaa

SEQ ID NO: 105937 - DNA, 1904 bp, Glycine max
  Clone ID: PAT_MRT3847_66677C.1
ggctgctgctgcctaacaggccgcgctacatcctacagcgaacccgccaaggcttaaaggacgtctcacacggacgttcaccagggcaagaagcagctcctgctgcgaagccggctagcgaagaagtagcgcctgctaagaaagcgccagtgaagagtgtgaaaccaaagagtgtaaagtctccagcgagaaaaggctacggctaagagagggggtaggaagtgagaatgtggtgggtagagtggttttagggttagttccacgcgtccgtacggctgcgagaagacgacagacagggactgacaacaaaatttgccaattgccatttcaatcctcagtttctttcttcaacgtttccatcatacacagatcccaatcctctctcaagccctaatttcccctcatttccatggccacagaagagcccactgtcgcggtggaacccgctcccgaacctgcctccgccgatcctcccccggaggagaaggaggagaccaaacctgaagccaaggctaagaaaaccaaggagcccaaacctaaaaaggtttccagacctcgcaaccctcccactcatccttcctacgaagagatggttaaagatgcaattacctcgctgaaggagaaaaccggttcgagccaatacgcgattgcgaagttcatcgaggagaagcacaagcagcttccaccgaacttcaagaagcttcttctctaccatttgaagaagctcgtcgccgccggaaaactcgtcaaagtcaaaggctcgttcaagctcccacctaccagacctgctgcatcttcttcttcttcttcttcgccggcaaagaagaaaaagcccgcagctgccaagtccaagcctaagcctaagcccaagcccgctgcgaaagccaaggatactaaggcaactaaatcgaaggcaccagctaagcccaagccagctgctaagcctaaagccaaagctccagccaaggccaaacccgctgctaaaccaaaggctgctgctgctgccaagcccaagcctgctgccgccaagcccaaagccgctaaaccagctgccaagcccaagcccgctgctaaaacaaaggctgttcctgccaagcccgcggcaaagcccaaagccaagcccgtcaaggcttcaaggacgtcgacgaggacttcaccagggaagaaagcagctcctgctgctaagccggcggcgaagaaagtagcggtggcagcgaagaaaacgccagtgaagagtgtgaaaccaaagagtgtaaagtctccggccaaaaaggctacggccaagagagggggtaggaagtgagaaagagtggtcggtggggtagggttgttttggggttggttttgtgaagttctttgtcctcttggtgtagttgggggttacagatgatgttcctataatatatgaaatctgattttatgaaacctttgttatttccctttttagttttgatttttttttggttcgacctaggaagtagataaaaacaatgtttctagctatgcctttcagctaaatgagttaatcataaaatgtatcttagagtgtgaggtttctttgcgttatagtacctttgatggatcaatgtagtataagcacctttttcacatgaatggatttgtagtatatgctttctgtgtatttaaatttatgaagtttctctttataattaaatgaggatactaattattgtagctgatatgcctgcatttgcttgattgaccttcttgtatgaattgattagctattggtcgtttgcatctccacttcttccctgccttcagttgattttttttttttcagtgcaatttctggttcgatccgaaaccataattctaattctagttctaataataactctaattctaattctcttacaatttttgtgatctgaacttggatc

SEQ ID NO: 105938 - DNA, 544 bp, Glycine max
  Clone ID: PAT_MRT3847_66678C.1
tacatcgttgcactaccacctgcttgggggggggggggggggggggaatttgtaaggaaaaaagaaaaaagggaagacgcacaaaggtgtgttggggtagttatttgttgcagaaactatatagagagttgtgggtgaaggaattaacacggcgccaacgaaagtatagaacaaaaaacgtatggctagagacaatcgggaaggcgttatacggggttatatcacgaagacacaaaacgatacatatagagggggggggcaaacaaaacgaggcaggcctggggaaagctaggactaccgcttatgtaagcagcattacgtagtatgagacccgcgctacaacaactaatccgccgttatcaggagcagcagtacaaagtatggcagttcatcctacagacgcaggttagtattaattcccactagctaaagtgtcagttgccccgttatactcaccctgggcggcactgttactatcaacgtttgcgacgattgaatagatggttgaacaccactagtacccccgcttattatacagttcggt

SEQ ID NO: 105939 - DNA, 593 bp, Glycine max
  Clone ID: PAT_MRT3847_66679C.1
ccatccaaataaaatttcatttacctatgcaaaccatgaattttggttccaaaaaaaaaaaaaaataccgtggagggggggttttctttccctttaaatcttttaccccctctaaacctaaaaggaaaaaattccctgtccccggggtttcttttttaaccctcaaccgggcggggcaccacccccagttagagtcattgttgaaacccgagtgaaccttgggttacaacattaaatacagggggggtattggttccctccccacccttgggtccgccattgctaaggctctgattctgccaaaaaacccttcttccatccatttaatttaacccacgtcaccttggttaaaacttcgggggacaacctaaaaaaaaattggaaataaatctaacctattactaaagctaaactgcataaaaaatattaaatcctacctgggggttactagtataatggaaaacctcggccaactaaaacctatggctaggggacctcattctttgcaatattttgcccaaaaccctttcttcctggcaaaatctttctccaatagggcccggctccacttaaaccccaacaaaaaagggccc

SEQ ID NO: 105940 - DNA, 665 bp, Glycine max
  unsure (1)..(665): unsure at all n locations
  Clone ID: PAT_MRT3847_6667C.1
ccaaaaagctctgttctgaaaatagagaaaacacaaaaagttctgttctttttcccacccaattcagttttctcaaatggctcgtacgaagcaaacggctcgcaagtccaccggcggcaaggcgccacgtaagcagctggccaccaaggcggctcgtaagtctgctccggctaccggcggcgtgaagaagccgcacagattccgtccgggaaccgtagcgctccgcgagatccggaagtaccagaagagcacggaacttctgatccggaagctcccgttccagcgattggtccgtgagatcgcgcaggacttcaagaccgaccttcgatttcagagctccgccgtctccgccctccaggaagccgccgaggcctacttggttggtctcttcgaagacaccaatctctgcgctattcacgccaagcgtgtcactatcatgcccaaggatattcaactcgctaggcgtattaggggcgagcgcgcttaaatctaattattgattctctgtatagacgatttcaatttcaagcgttcttagttagaacttttgatttggttttcttgttgttgaggattctgtaatgctgctgtgatgttaacgctttattaatgaaattatcactttttgtcttcagaaaaaaaaaaatttatnaaannnccccnna

SEQ ID NO: 105941 - DNA, 254 bp, Glycine max
  Clone ID: PAT_MRT3847_66680C.1
cgatctggtacgagttaagacaggacaattgtacagattgcgaaatcatagcgcaaccaatgtggcttcattatcaacttatgattcttccaatccaacagaacattgggattttccccagttatcacctaatagaaaaatcaaacgtcactctaagtccagtgaaagctctgcttcagctttggatgaaacccctattgagaaggcattgtctgcattgccaagtcagctctctgcctctaagaaaataaaac

SEQ ID NO: 105942 - DNA, 212 bp, Glycine max
  Clone ID: PAT_MRT3847_66681C.1
cccacacgttcggaaaaattgaggactgctttttattttatggtggccattataatctatgggttctgtcatttttcagatgaggaatatttaactggtttgcaagctatagatcaacaacttttgagtgttttaactatgaaacaaaatattttgttttggtgtatatgtgcttaataatattatgtattatagtataatcgatatcgtat

SEQ ID NO: 105943 - DNA, 291 bp, Glycine max
  unsure (1)..(291): unsure at all n locations
  Clone ID: PAT_MRT3847_66682C.1
aaacatttgattaaaaaataacatgaagtgtaaatagagtaaagaataaaataaataatgtaatattaatggaattttataaaattataagatcagtactgtctganaaaatgctagaaaatagtgagataagcttagttatcaaacatctctatttcagtcaaacaaatttataagcttgtcaaatattctagctgaaataactagtcaaacacagtctttgggaaaaaaactgaaaatcaactgttgctctgtttcttcttagccacttaaatgaagtcagggaaatca

SEQ ID NO: 105944 - DNA, 435 bp, Glycine max
  Clone ID: PAT_MRT3847_66683C.1
gctctcttacgtaatgctattaattctgctcaaggctcttaagactgtgacttatggaatcctgcttgctcaaatgcaatgactatgtcatttaatccagacccatgttcagatgcatggaggaagcaatttctgaagcgctctcggatgccatagagatatcatcagcctcagtggatggactgccaccccaatgcaggatgttcaagttacaattgatgagctttatttgctctcatgaatgtgtgcccaggacctattgcgttataaatccacaaaatcctttagcgcaaataagtggatgggaaaactgactttccctcagggcactttccaaagctgataagagaatgcctctatctatagggggaggactctggagcaaagaatgcaattcctatgaatatgccaaatggctggtctttcaatgtagag

SEQ ID NO: 105945 - DNA, 157 bp, Glycine max
  Clone ID: PAT_MRT3847_66684C.1
gaggaaggtggtgagggaggtcggggagttgcttgcggcgtttaacttgtgggatgttattgagttcatgatgcctctcgatctccaacgctttagaactaataacttccccactctccacaaattcgatacgatgattgagaaagttttgagtgac

SEQ ID NO: 105946 - DNA, 406 bp, Glycine max
  Clone ID: PAT_MRT3847_66685C.1
ggtaagccttttttttttttttttttttttttttttttttttttttttttttttttttggcccaaggccataaaggagcaaattaccctttccctttgacatgggaaaaaaaatggcaaaccttacaaggagtttaaaaaggaacctccccccaaggggtgcctgggcataacaaaaatggataatctatatagggctgggaccagaggtaaacattagttttttttttaaaaaatcagggaaaaaaattttccatatgagggccaagaggcatgcaactcatcatttttggggacactgaggagccattggacaggttaaggcccccatgttcaggaatagcctccaaattgggctctcccttgggcaacatgaaacccaaatcttttgcaccccattgttgttg

SEQ ID NO: 105947 - DNA, 356 bp, Glycine max
  Clone ID: PAT_MRT3847_66686C.1
tggtcgcgcgggaaacatgccaagcattggacaacaaggaagatacatacacatgagcttcttattttagtaaaatcttaccgtatagacaatggtggcagttgattaccgctggagatctacatactttgatcatcattaactggggaattaacacacgtgcgctagatgtgaccgatttatatggcgggatcattcgacgacgggaggtcccgatcgtggtctatagacgggagaacttatgctgtggcagaagaggaaccgacgggggcgacgggacctagcggctttcgtggtgcgggaagtgcctagcgagcatgcgcatgcgtgcaaggtgcagatcatgagaggcgcaa

SEQ ID NO: 105948 - DNA, 156 bp, Glycine max
  Clone ID: PAT_MRT3847_66687C.1
cgagggcactcaacattttacactctattcttcttctcgttgtggcttcggtgtcgaatcatggatcaaaaagtcgatttcagctctccgcattccatgggatccactatcatcggcgatacttacaacagctgtgtctatctctgagcctacttt

SEQ ID NO: 105949 - DNA, 277 bp, Glycine max
  Clone ID: PAT_MRT3847_66688C.1
ccttttcgtccgcttttttttaaggattttccctaacgccggggcgacattttctgttgatgcttaaagtttaccaaggatttgctatgggaccagctgaatggcttagctctggacctatatcatgttatgatgattgtgttgagtgccctctgtctgactgggcctagagactgaacttgataataaaaaaaaacaagcacaattggtagaaaaaaaaaaaaaagtcccccaaaatatggggggcgaacaaatgaattataagctcacctaagag

SEQ ID NO: 105950 - DNA, 354 bp, Glycine max
  unsure (1)..(354): unsure at all n locations
  Clone ID: PAT_MRT3847_66689C.1
ntatttttttttttttgtttttttttttttctttttttcttttttttttttttgcgtttttatccccatatcgggggtgcttttttttcgtgggggggagaaacccaaaaggcccccccctttaaaggggcaatggcccccccaggttctatttgccacacttggggaaaaaaaaagctaaaaggggggccctaaaagggggtgccccacccatttagcccgtattagccaccccctttattcctgttgcccaagaaagattttattccccttattcaagaccccggacccttagggggggcctttaacggacttttctttctttgaacaaaggggttttaacccctttcccta

SEQ ID NO: 105951 - DNA, 1495 bp, Glycine max
  Clone ID: PAT_MRT3847_66690C.1
gcagcgtccggaagcgaagggtgggacgacaaaaagcgaagaaaaacgcggtttttgttcccctgctctatctgactctgtctctctttctctctgcaaaaaccttcgttcatcgtcaacccacgaactcaaacaacaaatcattcattctttcaattgtaacatataaaaaaaaatgggttgtttcgccagcaaaaacgctgacaccaaggccagtagggccgcgcgctggcgatccacgggcatcgttgctttgcgcgattccaaattaaagacgtttccggatgaaattcttgagttagacagatctgttcgcactcttgacttgacgcataatcgaatagttgacattccggtggaaattagcaaagttaattaatgtacagcgcctgatattagcggagaacctcattgagagactgccagtaaatttggggaaactccaatctctgaaactgatgaacctggatggaaatcgaattacttccttgcctgatgaattgggccagttagtaaggcttgaacgcatatccatctcagggaatttgttaacatccttgccagcaactattggaagtttgagaaatctggtgcttttaaatgtgtcaaataacaagttacagtctcttccagaatctgttgggagttgcttctctttggaagaattacaagctaatgataatcttattgaagatcttccctcttctgtgtgcaatctctctcacttgaagtcactttgcttggataacaataatgtgaagcagatacccctgaatttattgaaagactgcaaagctcttcagaacatatcactgcatgctaatcctatatcaatggatcaatttcagctgatggaggggtttcaagagtttgaagcaaggaggaaaaagaagtttgacaaacaaattgattcaaatgtgatgatcggttccaaaggtcttgatgagggtgttgatctatgaggtggtcttaggcttgttgatggggttctttcagttgtacatttggatgagcttctggatgtagcgtggaatactgggtgttttgtccatgccttttatttcacaaatgaaataagtgtatggagatccttttgtcacgttgtatattattcttatttttattttttgttaccctatccagatttgcctataaatgtgctggcttgtagatgcaggcaatatccagcactagactaaatttcagaatatggtatttggggccattttgttgataatgaaatatgtatctcagcagctgtaaattacgaactttaaatatgatttgaaaggcagtgcattctatcccattaattatgtcaagtgaaaatgtgtgtagaatgggaagaatcttttgtattgctttgtgtcgttctcctactctggtaccttgtttgcctgaaaattatgctggcttcaaccctgctatataagcaaggttcctactgtaatcaattgagaagtgaataagcaattaaattcattttttctgtaaa

SEQ ID NO: 105952 - DNA, 291 bp, Glycine max
  Clone ID: PAT_MRT3847_66691C.1
aagaaattaaaatctatattgatgtgtggtgacacacataaatgaggacattacccgggtgtgatgggcagggggacttaagagcggagtgagggcctactgtggggggaggcagaagaaaacgtggagtgtgtgggctttaggaccactgtagagatgaatagcgcgttcatagacacttatgatctgtgggagcttaagcaattgctggagtgggatggtgtaaactgattgagacccaacgtgtgagattgaggagaaccaggagtgatgctaaaccaatcatataaa

SEQ ID NO: 105953 - DNA, 379 bp, Glycine max
  Clone ID: PAT_MRT3847_66692C.1
tttccgcggtctacccaatctaccggagccagctgatcacgtacctaaccgacataccttcgacctaccagggccacaaggagatcaatgttaggactacgtctgtttatggtaccaacatccctgtcgcgccgttcaatttgctccgcctaagccagtaccagagtgactgtaatgtgctgaaaaccatccaagcctacagaaggattcgtgggaaggacatcgcctgcatatccgggcggtaccacttctacggccgctggcctgccatcatctcctttggtccacgcaccaatggattcataatgggagaaaaccccaagcaggcacagatattccagtggtgctcagctaagtggtaaacttaaatttcacaaga

SEQ ID NO: 105954 - DNA, 223 bp, Glycine max
  Clone ID: PAT_MRT3847_66693C.1
gaaaccatgggaccaggggccctaatggtttgcaagataggcgactaaaccaaggtgccaaagcaacatgaaaaacattcagggggggacggtgacccccttaacgacggaatcacactccagcataaaggagaaaatccaaccaaatcatgtccagaacagcattatcgggagtcccccgtcaaaactgggagggttgaatcacggacgaactatgggctgc

SEQ ID NO: 105955 - DNA, 629 bp, Glycine max
  unsure (1)..(629): unsure at all n locations
  Clone ID: PAT_MRT3847_66694C.1
gaaaggcaaagggttgggaaagcncggtgagggaactacgcaaggcgattttgaaattcggcgaggcgtatgaacaagcggagagttcgaagctgcagcagggctcgaggatggagaagcagaggatgaaattcgcaaaggatttggagttgcagagaatgcagtttttcatgaagacccaggtagagatttcgcagctcaaacttggaagaaaaggtggtaaccctagcaacaaccaccatggcaccaccaacaataacaacagcaatcataacaataatagtggcagtgaatgaccgagggagggataactaggttaaggtagattcgaattgcattagctttgtggtgtatgagtttagttgtttattattattattattatcccttaattgttgcagttaacttaagagggattgctatgctgaaccctcaacaaaaatgaagtgtgctgaatagtgaataatctaatctctttgcagcaaatgtatcagttgtcatgtgtgacaccattctaagttatatcagtatgagggggatcatattgtcattcatagctctagttggatttagataaattgtacatagcttggagatgaattcctgacctgtttctattcttctttgct

SEQ ID NO: 105956 - DNA, 425 bp, Glycine max
  Clone ID: PAT_MRT3847_66695C.1
ctaaaaccaattgtcaaatgtcaatattgaaaaacaagttgtgcagattcaaaaacctataaaggaaatgtttcattcagttgctatattcggtttgatgttcagttattggagcaaatgttctgtgacaccattttatttgtctagcagccaatcaagtaatcttttattaccctcaatggtcatctttgcctaaattggtttttcaggaaaagagaacagagcatgtatggttaagatcagaagttaaagtcatgcgacgttttctagtgatcatttgtcctttaagttctaattttaagcattcatataatctccaacggtcaatatttgatcctttcacttatcatgaaaacgcattgctataacttgctatattcgccacatgtttgtgtatgtgatattatgctattatgactgcttca

SEQ ID NO: 105957 - DNA, 1087 bp, Glycine max
  Clone ID: PAT_MRT3847_66696C.1
cctgcgtgtacctagtaattagcaacgttggagaatgtggacattgacattcgtcctgtttctgctccataggctgaataaaaaatgtggttaagcatgtgtgaatgcttctaggacgttgaaagcatcttgagattgaagacataaaaaatgttattcgagttgaacaatggttcccggttgcaaatagtggagcatgaaggagaagctgtgcgggcaaagtgcatacctcggaagtctaagacactaccaacaaaaaaagaagagggtgcttccatgcatattgttgtcagtagccaacatgggagcaaaagattcgacacacaacaataaactgatgatactttgaatgaatataaagcgaaaggaaaccttgtgaatggaggtttgtaggctgatagtggagaagagggcaaaagcttagagatgtgaggttagaacgagaagtgtggaagaatgtataaatatagggaagcagataggatctgtactaatcaagtaagtacagtatagtgatctagagctttgcaatttgcatgtcacggcatagtgggcagatacgtcgagggaacgttacctatggaaagaaagtaactactagtttgtagcccttgtccattttgatgtttaggttttggcctaaagtcagtacatgtaagggtgatctgatatctgtttccattatgcatattgttgtcagtagccaacatgggagcaaaagattcggcccccaacaataagctgatcctttgaatgaatataaagcaaaaggaacccttgtgaatggaggtttgtaggctcatagtggagaagagggcaaaagcttagaaatgtgaggttttaccgagaagtgtggaagaatgtattaatatagggaagcaaataggttttgttttaatcaagtaagtccagtatagtgttctacacctttgcaatttgcatgtcccggcatagtgggcaaatacgtcgagggaacgttccctatggaaagaaagtaatttttagtttgtagcccttgtccattttaatgtttagggtttggcctaaagtcagtacatgtaagggtgatatgatatctgtttccctt

SEQ ID NO: 105958 - DNA, 1766 bp, Glycine max
  Clone ID: PAT_MRT3847_66697C.1
aaggttcgaagccaattttctccgaaatttgtttaaaataaaaaccaaaaaaagctacgtttctcgataatgcttctatatattctcgccggccaaaattaaaattaaaattaaattaaataaaaaccctagcttcgtttttctctttctctctctctctctaactactctgtttctctctctacggtagatcggcggcgaggaggatatggacgacgacgacgagatccagtcgcatccttcgccggcgagcggatcccctccgtcgtcgccgagggcgaacggtcggataacggtgacggtcgcggctccggcgccgcaggcgcagccaccaccgccgaacagtctggcattagcgcttccgattcagcagccggcgaagggaaacggcggaggaggaggcggcggcggcggaagggaggattgctggagcgaaggtgcgacggcggtgctgatcgacgcgtggggagagaggtatctggaactgagcagaggaaatctgaagcagaagcactggaaggaggtggcggatatcgtgagcgtcagagaggattacacgaaggcgccgaagaccgatatccagtgcaaaaaccggatcgacaccgttaagaagaagtacaaatcggagaaggcgaagatcgccgccggcgccaccagcaagtggccgttctatgaccgactggaacaattaatcggtccaagcgccaagatccccggcgtcggcggtgcctccggcaccagcgctgccggaaacagtaatttacaaccgcagaaagttccgttaggaattccggtcggcgttcgcggcggcgcgaatcagtttaaccatcctcataaacagccacaaccggttccgttgaagaaccagaagattcagttccggcgccgcggtcctccggtggagtccgattcggaggagcgagacgcgtcgtcgccggcgtcgagcgacagttttccgccggagagtttcgagaggaagaggccgcggttgatgagttcaaacaccacgaaaggaagcggagaaagacggaaggcgaagggttggggaagcgcggtgagggaactgactcaggcgattctgaaattcggtgaggcttatgaacaagcagagagttcgaagctgcagcaggtggtggagatggagaagcagaggatgaagttcgcgaaggatttggagttgcagagaatgcagtttttcttgaagacgcagctggagatttcgcagctcaagcttggaaggaaaggtggtaaccctagcaacaatctcaatggcaccaccaacaataacaacaacaatcataacaataatagtgacagtgaatgaatgtgtgagagtcaggaagggataactaggttgaggtaaagtttagattggaattgcatcagcctaatagccttgtggtgtatgtgtttagttattattattattattattattatcccttaattgttacagttaacttaagagggattgctatgctgaaccctaaaaaaaaatgaagtgtgctgaatagtgaataatctaatctctttgcagcaaatgtatcagttgtcatgtgtgacaccattctaagttatatcagtatgagggggatcatattgtcattcatagctctagttggatttagataaattgtacatagcttggagatgaattcctgacctgtttctattcttctttgctacacccaattagagatactgttgattgaccaaaaaaaaaaaaaagcaaaaaatggatggtaccatgtaggtgcaccaaccct

SEQ ID NO: 105959 - DNA, 851 bp, Glycine max
  Clone ID: PAT_MRT3847_66698C.1
tagatgagcttggtgaaatatctagatactataaaaggatccatcatacaaaacattttgatgatagagaggctgattgcagattcagctacaatatgtcaaggaatgccaaccaacattgctgtagatcaagttttgcaaatattggatttaattttgatgttgcgggtgattgtggtgaaatattcaacagactagttgacaggcctgatttcggtgatatacattcttcaaaaaggtcagatattttaaacgaggagcctgactggctgttgtccaagtcatgtattaaaagctgcaagagacctaacaagaacaaaggcaaaagggatcgatttagaaattcaactttggaggagaatcttgaaagatctagaagaagcttttccgctcctccttttcatagaagcaaaaggaggtttttctctttaaatcatccttcagaaatgatagccaaaagacagattggccgagtgtccaaccctgctttcaatcatcaagaagctagtaattttaaatatccgcaacagtctcctgttgctcttcaccagagcactgaagatttcttattgcaagaattcaaaattaatgtgaaacaaactacagaggttctgggagatatgcaggataatgacattgcagatattgatgaatttgaaagtttcaacattcaaaagagtgctccatttggggaattgatctcaagggatgtgcaagattccatagattatgggactaaatggaggaactgctcacccaaaattacaaagaatgataaactggctaacattcaaagtcaaaacaatatacttgacatttcttctggattcttgcatcttgctggagactca

SEQ ID NO: 105960 - DNA, 414 bp, Glycine max
  Clone ID: PAT_MRT3847_66699C.1
aattcggctcgagatgaaatccttgtgcgttccgcatcttcctttcttcttcctttatctcttcttattacactgctatttcttgggtctttccttcttaaggctaggggttacacttactctccttcaacaacaatattaaaatctcattcatccttagttattcttgatcctcaattttcacaacttattcatacaacaagtcttaatcaagaaagtcttttacctcgggttatttcattttctagatattgttataaagcttcccaaggtaaaaatttttttaagcaaatactatttggataactaccttttgcaatgaaatagtattcctttaaaggggttattaatcgtccaaaaattgctggggacaccctgtctttctaggaatggatggctttacacacgaaataa

SEQ ID NO: 105961 - DNA, 293 bp, Glycine max
  unsure (1)..(293): unsure at all n locations
  Clone ID: PAT_MRT3847_6669C.1
ataaacttcagatggaagcagtttatgtggaccaataccagttttattgggaactggaccaatcntatgacanagtgagtntacatttagacnccatgcattacttctaacttataagtgcaggttgagggaagattctttgctctctgtcaccttccctccagtgttgaatgaagctattgaagttatgaagagggctgcacctctggtgatcttttaattaanatatttggnattgangtaatcactatnttgnnatttgtttttngaccagcccnnttttactctgtgtc

SEQ ID NO: 105962 - DNA, 267 bp, Glycine max
  Clone ID: PAT_MRT3847_666C.1
tggatggctatggtacactctaggctaatctgacctgtaccgtccgtaagatctgccattaaaatgaatgaaaggataggattctcggatggaccataaattgaataatgataataaggagtaatgtctaaacagtagattttttttatacatagtatgatgatatgtgaataatagagaattgaagagagagaacaagaacgtggcggaacaatagccatgcccaagaatgtgctgggtaatgctctttcttgtacggacgtataa

SEQ ID NO: 105963 - DNA, 298 bp, Glycine max
  Clone ID: PAT_MRT3847_66700C.1
ccgccgggagctcaaatatactggtttagtaataggaacatctctcagttgaaggctggtggttcctctttctttagtctggaatcttgcagtcatcaggtgcaggattaggcttgacctgtccttttgtgttccttgatagtgatcttattgtgagcttggatccctttcttatctaatagaggcagtaagtgtgaagggatctaggcttccattgcaagcgttgctctctctgccgtcaaggagtattacaggctcgacatgcctttcacttatgaccacattggctacttccctt

SEQ ID NO: 105964 - DNA, 169 bp, Glycine max
  Clone ID: PAT_MRT3847_66701C.1
cccactcgtccggttatgacttgtagttgttctataccgctacatgacgggctatttgatacatgactacatacacattcatgcaaattaaattgtcctttattatgacacgctaaatgaaccacattacatcgtaggattacatcgaattaaacaagatgaatgaatt

SEQ ID NO: 105965 - DNA, 1287 bp, Glycine max
  Clone ID: PAT_MRT3847_66702C.1
gacaacacaaaattgtaaaatccaatctcaaacagttaacaaaaaagcaacccaaactaaacaatcaaggtgcttgttgttttcaacatctactcttccaggattggacccttctcactaacataaatgccatctagaaattagcctgatatccttctttttaacatggcatttctgtaacaaacaaatattttaacacttaattaaaccctaaaccaataccaaatttgaaaaaaaattgtatggaaacatgtgcatggagaaagattaaacctggttaatgagagcacaggacctagaaacaagttcaatgtggttcccatccaaaatcaattcatctttaactttttcagatcgaacaacggaaacaccgttaagaaggtccacttttctcaccttcttttggccaaggaaatttctgatctcaatagacttgttgtcgttgccgatgcttgcgttgatgggaaaatgggcataaacgaacctcattttgtagcggtagcccttggtgacgccggtgatcagattctccacgtggctcagggcggtgcgaatggcggtggatgttttccgagaaccgaaccaggcctccaccttcagcttccttttaccgttttcgtcagtgatgagctgaaaatcgagattcaagtgcttgaagtctcgcaccaattttccgcgggggccctcaacttcgatgaccttggcattaaccttgacgctcacgccgtccgggatgttcatggtctctgcagaaagaattgttttcatttttgcaactcacggaatctctgctaccgtccctctcacgatcctctcaaatcaccaagggctaccgctacaaaatgaggttcgtttatgcccattttcccatcaacgcaagcatcggcaacgacaacaagtctattgagatcagaaatttccttggcgaaaagaaggtgagaaaagtggaccttcttaacggtgtttccgttgttcgatctgaaaaagttaaagatgaattgattttggatgggaacgacattgaacttgtttctaggtcctgtgctctcattaaccagaaatgccatgttaaaaagaaggatatcaggaaatttctcgatggcatttatgttagtgagaagggaacaatactggaagagtagatgttgaaaacaacaagcaccttgattgttaagtttgggttgcttttttgttaactgtttgagattggattttacaattttgtgttgtcaaacttttccttttgcgaatattttttattagtatagtctgtgtttgttttctctg

SEQ ID NO: 105966 - DNA, 943 bp, Glycine max
  Clone ID: PAT_MRT3847_66703C.1
caatcaccaactgagtatccactcatcacaagacatatcacacaagctgaaaaccaattgacaaagaggtcaagaagagacagaaatgcaagatagattactaattccagagaatagtcaacaccaaagcatatagaagtaacgatttcaaaaaaaaaatattcccataagaaaaagtttgacaacacaaaattgtaaaatccaatctgaacgagttaacaaaaaaaggtccccaaactaaaccatcaaggtactcgttgttttcaacatctactcttccagtattgttcccttctcactaacataaataccatccagaaatttcctgatatccttgtttttaacatggcatttctggttaatgagagcacaggacctagaaacaagttcaatgtcgtttccatccaaaatcaactcatcttttaactttttcagatcgaacaacggacacgccatcaagcatgtcgactttcctcaccttctttttgccaaggaaatttcggatctcaatagacttgttgctgttgcccatgcttgcgttgatgggaaaacgggcataaacgaacctcattttgtagcggtagcccttggtgacgccggtgataagattctccacgtggctcaaggcggtgcgaatggcggcggatgttttccgagaaccaaaccacgcgtcgattttcagctttcttttaccgttttcgtcagtaatgagctgaaaatcgagattcaaatgcttgaagtctcgcaccaattttccgcgggggccctcaacttcgatgaccttggcatgaactttgatgctcacgccgtccgggatgttcatggtctcggtggaaagaatcgtcttcatttttgcaactcacggaatctcggctactgcccctctcacgatcctctcaactcccccttctgtcgtcttctcgcagccgtacggacgcgtggg

SEQ ID NO: 105967 - DNA, 597 bp, Glycine max
  unsure (1)..(597): unsure at all n locations
  Clone ID: PAT_MRT3847_66704C.1
gtcgcatgcacgcgtacgtnagctcggaattcggctcgagggccaccagagctgagagacaccatcaggcaggaacacacagagacagtactcttgaagatgctctccggctctagaaaggagaccatcaagctgccctgagcttcccgaaggactcctgatgcgactgacagctatgaaggagactgcacagcaggctctgagatcccctggctgatgaagatgtagaactcagctcctccagccccttgcctgcctgaatgctgagatgctgccatgatcccgccttgatgatgatggactgaacctctgaacttccccaacatgagccctgggaatataagatgaatgtcatgtcgtcccttcctgaagaggctgaagggagcaaggtgaacccaatgtgcacagaacaaatgcactttgcccaggtcttcaggctgtcactgcactctggcgtgcactttctgttttgatgagtcactgcaggtttccttttccccctatatttctttgaggaggcaggtgcaatttaatatttgtccatttaaaatgtttcattgtttataacaaataaaaatcacacacatttacaatgtc

SEQ ID NO: 105968 - DNA, 3169 bp, Glycine max
  unsure (1)..(3169): unsure at all n locations
  Clone ID: PAT_MRT3847_66705C.1
ctctttaaataaataattttttggttctttcctttttcncctggcaatgttgaaattggangagttctgatggtgaaatacgagtaaattctaggctcgagctcgagccgaatcggctcgagtcgagatagaggtgcactgatgtcgatatctagcctggtctatgctacctctaatctacctggttatggaacttctgctattgttgcgatgtatagaagtgcaagtatatcctcaggaacaaatatctcttctggcatacctctttcaaaagctaagtcatttggctagggaacagaacgtagataggtaagcagctgatcttaatgggaacagccttcgtctgatatctaaggcattggtctaggctgtcaatccaatgggtcaaaactttggctctcaaactagccaacatggacacatggacagtagcgtgagcttagagggtctttcaactcctagtctacatgtaaacggtttgatcttctcataatatgtcaatggtgctgaaggctatgcctatttcaagcagcagcactgctattcagcacataggtggtcttggtttgtctaacaaaaactctctgattcaaccttcgaaagatccggctttgttatcctttcttaggaatgttggtgtttgagcctttataatcatagtgcttgtattcgagcagaaggtcaacagacagacaaaacagaaatactctaggtgaaatccatttgatgagggagactacaagctgttttaaccccaacagtgttaggttctagatggttcacatttatcaggatagaaactttacgttattttatcatagtatgatccgtaaagacgctagagtattattgaccaacaatgtggtgataaggatgagaaagctcttatcagtttcaaaagataattaacaatctttttgggatgtgtccaacaataggaatggatcggtatctcttcatgatgctttgattcaaggatttaagtctggttccaattggtctgctagggtagctggatttaattatcttctttcttggataaatcaatgatcaaagggaattcttgggagttgtccggaatatttaatagctaatgtagcttcttttttcaccacttttatggatccctttcataacgttgctcaagctgctctttaaacacttgcatattttattgtagttttccgtatactgcttgagggagatttggaaacattttttcctcgtcttaattgctcgcaaatgaagtttgtcacactttatgcggagcgattttcaccagccttgacaggttacccgcttgatttcgtttaaggattctctcttacctgcattattacgctcactagatgaacaaaggtctccaaaggctaaattggctgttattgaatttgctatcaattcctttaacaaacatgctatgaatccagaaggtgctgcgaatattggcatcctaaaattatggcttgctaagttaacccctttggtcaatgacaaaaatacaaagcttaaagaagcagctattacctgcattatatcagtatactctcactatgattcgactgctgttctgaatttcattctgatgttgtcagttgaagaacaaaattccttgagacgagcattgaaacaatacacccctcgcattgaagtagacctaataaactatctgcaaaacaagaaagagaaacaacgttctaagtcttcctatgatccatctgatgttgtgggaacatcctctgaagatggatatgttggttactctaggaaagctcattaccttggtaagtattctgctggttcccttgatggtgatggtggcaggaaatggagttcccaagattcaacactgataaaagccagtcttggtcaagcatcttctggtgaaactcgggaacatctgtatcataattttgagactgatcctaatagtggcagccttggttcaaaaactaaggatcttgcttatgccgtcaatccgatgggtcaaaactttggctctcaaactagccaacatggacatatggacagtagcgtgagcttagagggtctttccattcctcgtctagatgtaaacggtttgatgccatcagagcatttaaatggtactgaaggctatgtaaatgacaaagagcatccttctgaattggaacgtaatcatcactcagctgaagatgtaaaaattaactccatgacacacacaggacccagcattcctcaaattcttcatatgatatgcagtgggggtgatggaagccctatttcaagtaaacggactgctcttcaacaattggttgaagcttctataacaaatgatcattctgtttggaccaagtacttcaatcagattttgacagttgtgcttgaggtgctggatgattcagattcctcagtcagagagcatgctctatctctgatagttgaaatgcttaaaaatcagaaagatgccatggaaaattcagttgagattgttgttgaaaagctgcttaatgttacaaaggatattgttcccaaggtctcaaatgaagcagagcactgcctcaccattgttttatctcagaatgatccattcagatgtttaagtgttattgtccctctactggttaccgaggatgagaaaactcttgttacttgcataaattgcttgacaaagcttgtggggaggctctctcaggaggaagtgatggctcagttaccctcgtttctgcctgctcttttcgaagcttttggaaaccagagtgcagatgttcggaaggtgcttaagatcttttttatctggagtaatttatgttccatagtgtcgttcatcttaagaaatgtctgatggtaaaaaacactgtaaagtggcatatgtagttataaacactgaagctcggacatcgtgcaaaatattggactccccgacattcatatatataaggttctatataattcagcaaaattgtggcttttgggtgttgtctattcattgctgtgtattttgtatatgtgcgtgcatgaacttagatgcgggttccattgtctttagccttgggtctctttaaatatatagtttttttcgtctttccttttttcctggcaatgttggaatttggatagttctgatggtaatccacgcaaattgtaatttacattgagtaaacattattgattgtagttaatggatatc

SEQ ID NO: 105969 - DNA, 563 bp, Glycine max
  Clone ID: PAT_MRT3847_66706C.1
tttttaattagacaaaaaatctctataatcaacataattctacacccttctgtattaataccctgtaaagactaaagaatcatacaaaatggatatacaacgcatgatgtttaatgatgtggctacataaatcctgtgtctcagaacaacacaatcaaacaaaatgtcactattgccgcatgaagagaatccacaaaaacagaaccaagaacatcatagtagccaatgaaacctccattctagtaccactgcttggaaccactgaaggaagagaacattcctccccattgaagaaaaccttactaggaaaaccatcaccaccaaccacatcgattccaggagtattcttctttgtaaaagagatcaccgattgctgtttcccgggcaccctgggatctctccgagggttagatccatccgtctccgccacaagaaagttcaaccctttcttcccttgcatgaatatcgtgccatccacaccatccaaaaggcttccattaaaaaatacacttcctcaaaaccctttgcagccttcttccttcgcaccgggggaaaccaatcag

SEQ ID NO: 105970 - DNA, 261 bp, Glycine max
  Clone ID: PAT_MRT3847_66707C.1
tcactagtactcggcctcccgctatttttaccttttacaaattttcgtatagtctgcacgagacaaaaaaacttgggatgggggcacttcccgttaccgaaaacaaaaaagttcttcaacctttccctgtgccgatttctatacaccatctggaaaaactctagatcccaacctctcgaaaaattataaaaaaagtcttccatcagaacagcaacctgcacctaatacaaaatttttcaaggattttcaagttttatatcc

SEQ ID NO: 105971 - DNA, 1065 bp, Glycine max
  Clone ID: PAT_MRT3847_66708C.1
ccttctcgtcctgttaaaactttggctgtcaaactagccaacatggacacatggacagtagcgtgagcttatagggtctttcaactcctcgtctagatgtaaacggattgatgttctcagagcatttaaatggtgctgaaggctatgtaaatgacaaagagcatccttctgaattggaacttaatcataactcagctgaagatgtaaaaattaacaccatgacacacacaggacccagcattcctcaaattcttcatatggtgagttatgcaactagcataggataagttggttttttaattttattattcggaaaaccaaaagatcctgtagaaagagaaattttgtgagaaaaaataggatggtgaaaaaccattctccaaggatggaaaattgcagcagagaataataggtcctcaatcatcacgcatgctctatctctgatagttgaaatgcttaaaaatcagaaagatgccattgaaaattcagttgagattgttgttgaaaagctgcttaatgttacaaaggatattgttcccaaggtctcaaatgaagcagagcactgcctcaccattgttttatctcagaatgatccattcagatgtttaagtgttattgtccctctactggttaccgaggatgagaaaactcttgttacttgcataaattgcttgacaaagcttgtggggaggctctctcatgaggaagtgatggctcagttaccttctttcctgcctgctttgtttgaagcttttggaaaccagagtgctgatgttcgcaaggggggcgggtggctttccttcctcactgcataaaagatcagccactgggcatggccacactatttgcccaccttcagaccgttgttttctgtctagtggatatttatatcatgcttgggaaagcatttttgccatatttggaagggcttaacagcacacagttgaagttggtcaccatttacgcaaatcgtatctcacaggcaaggacaagaaaatcaattgataccacacacgattaggcgttcattcagatgaaaattcgtcggctttagctgctttctta

SEQ ID NO: 105972 - DNA, 593 bp, Glycine max
  unsure (1)..(593): unsure at all n locations
  Clone ID: PAT_MRT3847_66709C.1
aaaccaaaaaggaagggcccacttttttgaatggggaaaaaaaacccaaataccacccatgggaatcaacccaaagggcccacaaccgggggaagaacatacttattggaaacccccgggagcttaaaaaaaactttttttcgaaaaaatcccttcctggggaatatgggggaaccccaaaaataagggacccaaaccgatttttaaattggaccaaaaaaaaaccttcttttgaaaacagctttaactggtttcggagcgggataatcaaaatcttcagccggtattaaggccaaaccactttccttaaaaattcttttccctggaaaaaaatgggggccttccaaaaaaacaaaaaggggtactttaagggcaacctctttgggagcattcacttttccactgggtataaaatcacacttttttatccccccaaaaaggggaaccaaaagggccttcactttggnatgaggaggcaatatttaaaaggcccaaacaaccgggttttcaaaggctttgccccctacctccagaaaattgggaggagcccccccaggcaatttaattatttccatgggggccatgggaaaccc

SEQ ID NO: 105973 - DNA, 461 bp, Glycine max
  Clone ID: PAT_MRT3847_6670C.1
aacggcacgcacctgtttgttgtttttgtttgtttttatttatttttattttatttatttttgtgtttttattttttttatttttttttttttttttttttttttttttttttttttttttttttttttggggaaaacaacccccccatttattcaaacaaaaaaaacattattgggaaattgggggggggaaaaaaaggggattttttttttaaaacaaattccttaaaggccaaaggggccgcccgggcaagggcaagtagggccaaacttggccttcccaaaagggggaggggggggaaaaaccaagaaaaaaggcgggaaggaacccttctaaagcgtaaaaaaaaaaccaaaatgggttcccttggggcaaataattttggaaacccaaacccaagggccccaaggggtcaaaaaggtggggttggaggaaaaaagaaaaaaaaaagggggcccgg

SEQ ID NO: 105974 - DNA, 571 bp, Glycine max
  Clone ID: PAT_MRT3847_66710C.1
aaaacaggaaagggcgaagaaaccgaaacgggcccaagggaaaaaccctaccttacaaaccaaaccttaggaattcaaaaatgggtcccccccggggcccaaaaaaaaacccccccccccaagggggcccgaaccccccaaaaagccttcaaaacccgggacaaggttttgtttggccccaacccccaaaaaacaggggggcttctaaccaggggaaaccccccggggggggcctattaaaaaaaacccccgcccccaaaaaaaaaaatggaaccgccccccctttgccccccaagggaggaagttttggcccccatagatctttttcgggggggggaggagcccccaccgaaacccccccacatggggaggaccccccgtaattttttttgtaaaaagaaaaaatcccctcccacccccaaaccacggagtaagagaaaggggggacccccccccccataaacacaactcccccagggaacaccccccctgggccacggcctttggggaaaaaaacccccccccgacaccccggggccccccccccggaaatttccgggcccggggcccc

SEQ ID NO: 105975 - DNA, 416 bp, Glycine max
  unsure (1)..(416): unsure at all n locations
  Clone ID: PAT_MRT3847_66711C.1
nnncatgttttttttttttagaatgaattaatgatatattcatctctactgttgaggagccttatttgttattatgtgaccctactacctgattatatttccagaattctaactgcttcgaaggcttaaagattggattttaactaacagaaatttgatgtaactagaattgcaattataccatacattcaatcaataaatatactcataaaattcatacatgtatcaccgggaatgagaccttgaaggactgcaatcattggccctaggactctcggatctgcggggtgtctgatccttcttgtcattaggactccgaccaatcttcctgagacgaggggactttttagtagtcctttccaccactgggagagagggacccagaataagttcttgagcgctcaggagaataaaat

SEQ ID NO: 105976 - DNA, 384 bp, Glycine max
  Clone ID: PAT_MRT3847_66712C.1
cgctcgagacagctcaaaataaatactcttcagacttttttacgccacagacagcaccaagcggacgtgttttatacatatcgacctcacacaattaagatgaaaggcacaccatgagaattttatcctccatcacgatgcccaaactaacttctccagccttaatctgttcctcactcattcttaccacacctcaaaccctctcaattccctcgcctaaccccttattcgctctcaggccaaaactcaaaataacctcaaacaaacaattacatccactactactgaccatgcttaccaattttactacacaaatctcccctcctctcacataaccggctcacactaccataagcctctatagaacttaaactcccattcttc

SEQ ID NO: 105977 - DNA, 528 bp, Glycine max
  Clone ID: PAT_MRT3847_66713C.1
cacgcaacattttccttcctttcttgttttgctctgcactgtcacgtcaatatgaacgggaaagcctccatctccaaggagctcaatgccaagcacgccaaggtggaagatggtcacaggaaaaccattctcatgctgccactctcacagctgatgcttgggcacttgtctagtcaatctattagtaagagttcaagtgtgcagcccatacgcacaatttcccagttatcttctctttcccagtcatgtcgactaaaaatattagaaggacttcttaagctgcctgagaacagggaatgcgcagactgccggaacaaggcaccacgatgggcaagtgtgaacctagggattttcatttgcatgcaatgttcaggaattcaccgaagtcttggagttcatatatcaaaggtgcggtctacaactttagatacatggttgccagatcaagtttctttcatgcaattaatgggtaatgagaagtcaaataagcactgggaggaaaaaattccaccaaattttgatagaagt

SEQ ID NO: 105978 - DNA, 206 bp, Glycine max
  unsure (1)..(206): unsure at all n locations
  Clone ID: PAT_MRT3847_66714C.1
ttattatttttacaaattttttctttttttgcaccataaaatgnaccttatcaaagggcaagcttactcaatgttaatgcgtaaacaatctcattgtgaaaaccatcacacaaagtgaaccatatcgaacatttccaactatctaaaataatctacacggtgaactcaacaacccttttaccaaaacacctatttcaatttcaaaa

SEQ ID NO: 105979 - DNA, 381 bp, Glycine max
  Clone ID: PAT_MRT3847_66715C.1
ctctttctgtctttaactgtatgactctctttgtctaaaaggcctctattttcctctagcgttctcacatagatagatggataatatataatagagagcggggataggcgccaatagcgtgtgtgtgtttatgttaaagaaagtgactgagataatacacataacagaaagtcgcgtttgcgtctttctacttttccatttctcgtgggagagaagatcttattcttcaccataattgtcatggctttgcctcgcttctaactcatcattttttatacatcataggcattgcatttttattgccatttcaatctcattcaaaaagccgccccaaatcacttattcaccccatagtttctaatacgttactcttttctcttg

SEQ ID NO: 105980 - DNA, 387 bp, Glycine max
  Clone ID: PAT_MRT3847_66716C.1
acactacgcagatttatattttttcttgctctggaatgaagatcataatttgaatcacaacgctagtgcggaacaatgtttgaatataaaccttcccaaggaataagatctcagaagtaatctcttcggtgagaattgattcctgcacttttatataccattgaatgttgtaactgaaaaagaagaagggtgaagatatcaatttgcttggaacacacgataccggccagcgctaattatggagttggagcagtagatttctccttggatctattttctttcgaagatggccggttttccgagccggatagccggatacttaaaatcatactaactacttcctccatgctaggccgcatatgtggaacctttgccacacaggccatg

SEQ ID NO: 105981 - DNA, 541 bp, Glycine max
  Clone ID: PAT_MRT3847_66717C.1
aaaataaaggaggggctaaccaaaaatatcccccaaaccacgaaaaaaggaaaagggggaccccccccccccaaaaaaatgggggggaaaaaaaaaaaaattggtggtgggcaaaaccaaaccgggggaaaaaaaaagggggggggggaaagggaacaaaaaaccaacgggagggggaaaaacaaaaagccaaaaaaaaattatattttaaaaaggaaaaaaaaaccaagagacaaacgggaatcattttagccaagcccaaggcgacaaaagggaatcttttttaaaaccccaaaaaccaccgggggcccaaagaaaccccgaagggtttcttccccggaaagaaaaaccgggggcctttcaggggaaaggccccacgcaaaacccgggacaaagaaaggaagccccacggggggcaacatttgggggcggaaccggccaaaattccccacccccccccctttttaaaaggccccaggaaaacaaaaaacccccgggcaaggttcgggggagggaaagaaacccggtttcaacccccccg

SEQ ID NO: 105982 - DNA, 267 bp, Glycine max
  Clone ID: PAT_MRT3847_66718C.1
gggatatcgaagcgcaagcttcaccggtcgatcctcagacgcaccagctagagatttgtgactttgggagtgcagctctcgtggccggccgggaagcacgcatatcttacatctgctctaagtactatacagcacctgaacttacatctggtgcacctgattacaccagtgtcattgatatttggtcacctggttgtgtacatggtgcactaatgcgtggccaggctctattcccgggtgagattggagtacatcagcttgttgcaa

SEQ ID NO: 105983 - DNA, 959 bp, Glycine max
  unsure (1)..(959): unsure at all n locations
  Clone ID: PAT_MRT3847_66719C.1
gggtttctcccacgcgtcttcttctttctccgctcttctgttcttctctccagtcttcacagaatgcatgtgtgactcacgcaacaatcacagttcaaaaaactcaaaacttgaacattcaaacgaattgggagtcatcatcttcctctaatggatccctcctcttcgctccctccctctctgcacctcgccatggccgcgctgctcggcgcctccttcatggccctctccgccttcttcatccaccgccgcaccgtcgaccacgtcctccaccgcctcgtcgaactccgccgcaaacctctcgccacctcctccgacgactccgacgacgatgacgatgatcggaccggattcggagacgacaacggagataccgaaacggacgccgatctgagaagctaccgtggagccttgtcgatgtccgtcgacgacagctcgaacgtgcttcggagctatcggatttcgtcctcgatgccgaacgtggtttccgcaacggattggatccgagaggacgctaagaatcgcgcttcgtcgctggaaaatctccaattcgttccatcggggcttccgtctcttcgaactggttccaataatggagagagtgttcaggttttgtgttcatataagaggataggttctgttggtagaattatgaccccgcggtcaccgggacgtaccacatttgaaagtgctgaggattctgatgaggaggaaatacagcttgctgatgacaatcgcattcctttctcaaatacttacggactagattcaaatgtgtgcaatttgcccgctgttccattcagagttgaggatgcaaacaatcagatgtatggagaggcttcaaaggaagtgaaagctggtgcagatatgaatggtcatggaataacagattcaactccagtacatgtagctggngatgacattgngtttgccataatgtctngcctacaagaaatact

SEQ ID NO: 105984 - DNA, 679 bp, Glycine max
  Clone ID: PAT_MRT3847_6671C.1
tcgcgatctagagcctaggtaacactggagatgttaatgtgtacgcacaaatgatagatgaagctgagggattggagaagattgaaaacctacagagtcatgacaacaatgaaatatatgaaaaggttgttaaaattcttgaaacatattggttggaagaagaagatgagacactaccttcaggaaatggtgctcaacctggtttcaatttcggaaacaatgagcttcccgtcccatctggtggattcaacttcagctgaagaccttttcctgagaagggacttgttggacgaagtaggggtttgtgccgggtgggcgtgtgtgttgggataaacgtctggagagtcaaccattgcaccttgtgtctgcttacagtctggcatagggtccttcgtgttaatgaggtgcctgggagggtcagtttacgcttccaaatccaagaagggactggtggatttaacagcagcataatgaccttttcagctgtgtttggttgtactaaaaatatataatgctggtggaaggttgcagtggcgatggtttttctttaatgcggcttttagtgctgttttttattgatttgggtcagtgtttgatttgggtaaatatatcatttccaaaccaattttatggtctattccaaattccaatcgaaggattagttctatttttgtgcgtc

SEQ ID NO: 105985 - DNA, 396 bp, Glycine max
  Clone ID: PAT_MRT3847_66720C.1
cgaagagtatgggttcctcccatagggaatggcggtgaatgaaaaccttgcctcccgtacgtcttccgctaaactctgccgggaccgcgggagagggccctacagccatggccctccctttaccttcgtcccttatgctttgtcacaatacgaggctggcacagccagtgattcggatgagatattaccaactatggatcctacagctaacgcgaccagcaaaccgaaaatctttgtcagatgactcgtggaagcagctacaccatcgtgtgaatgctgtctatgaccctagcctgattcgggtggatggatgctggcactcagctctataatcatgctgactcagcctctcctgtggctcgggatgttgatcactgatgagctaggtcaagggga

SEQ ID NO: 105986 - DNA, 241 bp, Glycine max
  Clone ID: PAT_MRT3847_66721C.1
ctttcatctcgacccaagcagcaactctctcaacaatgaaaaaccaacacgaaccaacaacagagggagaaagcgaagaaaaaaacaatggaggcgtaagagaaaaaataacactgcaaccaacttcaaaaggaagaagacaccaggggcatttagcgaattaaaaacaattgctgggtgcacaagcaataatgctggtgcacctagcatcacccttgatgcatttggacctgacatggta

SEQ ID NO: 105987 - DNA, 776 bp, Glycine max
  Clone ID: PAT_MRT3847_66722C.1
aagacactatagactacagaaagattgctgtatttgtagaaacttcttcagctataaagccaggacatttgctctcaaaattgagagcagtgaccccagatagagtcttggaatatcagaaaaaactaaaggaggttaagcgatattttgaatacgaagaacccgatggaacgataaatgagatttggcgccaagtttcgaaaaaactaccccttattaaattgatgattaaccgtgagaaaaggctgtttggaaaggaagtggagtgctcttgcgtatgtacaaaccagactgcagttattagaaccctatagcacttatccctctatcaagtttggcattccatgaaatctgtggctcactcagttttgtgaggacatttcaaggtgatgagtacatttaaatcagggataatgatagttgtgaatatggtttctctcatatttcacatatgggtgacttgacgataatctcattctactcagcaactaattccccaacaaaatgcgtattgagatatgcaaaagaagttattaccttagaaatctttccatgttctgcgaggcttgactcaaatcaggtatatctcgaggctgtgcaatgcatagcttgtcacctgtcatgccctacgagtataatacccaatacgttctgttgtagattccaatatgccccatataagtttacgcattgagacctagactaggagggagaaattacattataccgtgattgaattgtacagggtgagaataaaagttattattgttattctt

SEQ ID NO: 105988 - DNA, 276 bp, Glycine max
  Clone ID: PAT_MRT3847_66723C.1
ctcaaaaaaaaaattccatgaacttaattgcaaaagcaatggtcaggggacaaaccgctctactaaaaaaacccagcaaagtttaattttaacaatggccacacggggaaaaattttccttgggggggttatcttacaataaaaagaacacttgcccccgaaagaactgacaccgggggggggactttaactaaacataaaccttttttctcctgaacaaaacaaccccggggctggtaccccttgggttgacagaaaacttttttttgggagcca

SEQ ID NO: 105989 - DNA, 2111 bp, Glycine max
  Clone ID: PAT_MRT3847_66724C.1
aggatcggtccggaattcccggcgtcgacccacgcgtccggacggaccaatttaatcgaattaatgcaaggtggagagagatctaatggtataattggataatcttcacagagccgcatatattagttattatgcatacatttagtaagttgaagaaagtggcgatgatgccgtaccccaaaaacacgaacgaggaagccaaagccaaagccagaaaacccaaaccaccgacttttgtttcccgtttcagcaccactttctccgcaatggctcgaaaaccccttctcaagcaaaccctagccacactcttccttctcttcgtcctctacgcaatcttcaacgccttcttccagcccaccgattcctccgccttcgacgccgccgccaccttctcctccgcctcctccgttctcctctccggcgcaaccaccaaatcccccgccatcaatgtcttcctctacgatcttccccgcaggttcacctccgacgtcatccatcaccacgcgctggcgcgtggtggcgcctcacgcgtcacccctgatgacgacgcggcggcgcccaagtaccccggccaccagcacatggcggagtggtacctcttcgcggatctctcccgagccgagtccgaacgcgcaggctcgggctcgcccgtggttctggtcgcggatcccgaggaggcggatttgttcttcgtgccgttcttctcgtcgctgagtttgattgtgaacccggttcgaccgcccgggtcaaattccggttcggagaaaccggtttacagcgacgaggagaaccaggaggcgctggtggagtggctggagaagcaggagtattggaagaggaacagtgggagggatcacgtgattgtggcttcggatccgaatgcgatgtaccgggtcatcgatcgggtaaggaacgctgtcttgctggtgtcggattttgggaggctgagacccgaccagggatcgctggtgaaggatgtggttgtgccctactcccaccgtatcagaacttaccagggtgatgccggtgttgaagatcgtaacaccttgttattttttatgggaaaccggtatcgcaaagagggagggaaaattcgtgatatactctttaaaattctagaaaatgaaaaggatgtcataataaagcatggagcacaatccagagagagtcggcgggcagcttcacaaggaatgcatacatctaaattctgtttacatcctgcaggagatactccatcagcctgccgactgtttgatgctatagttagcttgtgcattccagtgattgtcagtgataatattgagttgccttttgaagatactatagactacagaaagcttgctgtatttatagaaacttcttctgctataaagccaggatatttggtctcaaaattgagagcactgaccccagatagagtcttggcatatcagaaagagctaaaggaggttaagcgatattttgaatacgaagaacctgatggaacggttaatgagatttggcgccaagtttcgaaaaaactacccctgattaaattgatgattaaccgtgagaaaaggttgtttggaaaacaagtggagtgctcttgcgtatgtacaaaccagactgctgttagaaccctatagcacttatccctctatccagtttggcattccatgaaatctgtggctcagttttgtcaggatacatttcaaggtgatgagtacatttaaatcagggatcagggataatgatagttgcgaatatgttttgtctcatatttcgcatatgggtgacttgatgataaatctcaatctactaaacaactcattcccccaacaaaatgcgcattgagatatgcaagagaagttatttgtgtaaccatcagtatccattacattagaaatccttccatgtactgtggggcttgactcaaatctggtatatctcgaggctgtgcataggttgtcacctgccatgtactacgactataccgaacacgttctgttgtagattccaatatgccccaataagttttacgcattgagatctagactaggaggggaaaattacattataccgtgattgaattgtacaggatgagaataaagttattattgttattcttttac

SEQ ID NO: 105990 - DNA, 774 bp, Glycine max
  unsure (1)..(774): unsure at all n locations
  Clone ID: PAT_MRT3847_66725C.1
attcccggnngtcgacccacgcgtccgaatcaaccaactaccgcaccctcttacacaaaaaaaaaaaaaaaacaaacgaactcagatttcttcattccttccatccaattccaatccccagattcatccaaaatggatcaacaccacttcctccaccaccaccactaccatccccaagaacaccgtaatcgatacacctccctcacacctcaatcccaccaccaccataacaatctccctccgccgcccccaaatcctcctccgcctctttcctaccaccgcacaccccaacactacacccctcctacaccccaaccccaaccccaacaacagcaattcccttatacacccctcccacatcgccctctcgaagaagaaccccaaccccaaccccaacgccatatcccctacgaccttctccctcgccgcaccaccaccctcccctggaaccctaaccctagaattcctgatgatttcgatcgcgatttccacctccaccgccctctcccgccgccacccctgatcgaatcccaccgctacgaccccgaccggcaccaccaccaccgcgtcgtcgtcgatccatatgagcagaaccctagggagccccttgcgtgggggggcggcggctaccacgcgccgggccagggcgacgtggaccccacgccctacgtccgcgtgtacaccatggaatccgatgccgatgcggcggggagaacaacctccaagagatgggtaatgagtgatagagatagaggaagagagatgctcgagtct

SEQ ID NO: 105991 - DNA, 229 bp, Glycine max
  Clone ID: PAT_MRT3847_66726C.1
cccaaaaccgggtaaagggaaaaagttcccttccctgattactcatttactcagggaactcacccataataaagatgacacctccatacgatttcagagttttttatatttttaacaaaaaaattcaggcttcgataaaacacttgcaaaatgggacacccggaaactaaatgtttacaaaagtccaaaacaagaaatccccttttagcatgacgggcccaattacaac

SEQ ID NO: 105992 - DNA, 426 bp, Glycine max
  Clone ID: PAT_MRT3847_66727C.1
aagacgacagaagggtgcaatggcgtgtttatatggctgaatttggccttccaccatgttctgccattgataacactggtgttaataacgattagctgatccccttttttgattattttgtaccaaccctggctaatgttcttttgattattttatattggctaatattctttttattaattgtactatgcttggctagtattcttctcatctatgctccagtttacatgaaagtatttttgcattggcattgcttttacaacgttgccatggctgggttctactgtatgctggggcagtacgccagtacccagtcctttgcattaatttgtacctagtttgtgtattatcttgtcatttgtgctttatagtctttttactagtcatgtctttgaatagtacagcctatatgccatcactacattc

SEQ ID NO: 105993 - DNA, 333 bp, Glycine max
  Clone ID: PAT_MRT3847_66728C.1
tcggccacgcgttcgaatagaatattctaaggctttgggaatagtgctgcaacggcttcaagtcaggaggaggggacccttttgggagctacttgaagcccaattgtgtgcaggggttatattggcctcaagttgaagggaggtcaataccaatatttcgaagaaaatttgaggaacaagagtgaactgcttcttaaattcaacccaattcacaagaaaggtccagtgtttatttacaatgagaagcccataaccgaatctattgtggttggtggatacattgatgagacattgaagaaccaccccaaattggcttttgaatcttaacaaaaa

SEQ ID NO: 105994 - DNA, 800 bp, Glycine max
  Clone ID: PAT_MRT3847_66729C.1
cggccgctcgaggcggcgggcgaaccctgcttgcgttttaattttctctctttttcttcatcttttctgaaccctagcctcagcctcccacttgttcgcgctccctctctctctttttttgtgaaccctctcgacccctgtgtgttgtgttgggaatcgagattcaacacttcaactcggcccattgggattttcagggtacaatggcttccaacatctcgccctctgcctttgataaagaacagatatttggaatggctgaaaaggagatggaatatagggtcgaattattcaacaagatgacccagacctgtttcaataagtgtgttgacaataggtacaaggagtctgagctaaatatgggtgaaaatagttgcattgaccgctgtgtttcaaaatattggcatgtgactaatctaattggtcagctgcttggttctgggaggcctccaatgtaatccaagtgttttgtattttcttttgcggttagcaaccagttagctacgtctacgatattattagttgcttcccaaggaagagtaattttaatgctttgcagcgtctttattttttaccatgactattttgatttttttgttcaacatgctgtttttagaaaggaactgatgagttttgaggtagccaatggtgaacaataaaagtaattttagttaattaagtttattcttctttttcagaggagttcatcttgtaatcagaggagtttatcttatagtgacaaatctatgtcttactccattttaaggaaccaatggaacaaaacatgactttttggctct

SEQ ID NO: 105995 - DNA, 783 bp, Glycine max
  Clone ID: PAT_MRT3847_6672C.1
ggctcgagcaacatcggagctcgaaggagacgggaagggagagagagagagagagaggttgctttcgtttcctaccatctcgaccagcacgcacacttcattttcgcgacctcaagcacctctctaatccttccgcattcccttgtctattttttttttctttctttctggggtaattatgggccctacagaagttgtgtatttatctagtgatgatgaaagtgaaaaggaagttgctttcaaagctgttaagttggaggaagattttgttttggatgcaaaacaatataatgagactaacaaaggtcaactagccaagcacaagagatctcaaagtcatactactggacaagattctgaagaaaatttaagttctaatggtccaagtacaggtcatagtaactccagtgtgttggagcagggaccgtcgcctgttgatgacacaggcatttcttatgcatcatccattggtgtagcacccctgtgtaggcagttttggaaagctggtaactatgatgatggacttggttctaaagtcaccgtccaaaatgccaaaaattatctacatgtgcaccccatgttccttcactcaaatgcaacttcgcataagtgggcatttggtgccatggccgtgcctcccccttctgccgtcgatgagatccaaaatggggctacctttgtcattgtagataaaacttcaaatccaagggatggaaatccagcattgttgattcaagatgatggtggtggaatggatccggatgcaatgcgtcgttgcatgag

SEQ ID NO: 105996 - DNA, 524 bp, Glycine max
  Clone ID: PAT_MRT3847_66730C.1
tccaggtcctgtccggcgcgcggcggggtggcgcagaaacggggcggggaggcccgcagtgttgtgctgcgttcagatagacagcataaggggaagggcaggccgcggggcaaggcgggcagttatatttatgggggtagggttcggcaggtaggaggggcaggcggtagtcaagggtaagagtgcgactgcccaacaccccggaacagacccagtcagagcaagagcagccggcccagggcaaaggcaaagccgtgaacgcggggtcaggagcgatatgtgccaaggtagaaggatgctcttaggggataggggtaggccggaataagtttgggggggggggccctgatgcgagaggaataccaccaaggcttaattaaaagattttggggagctatcggcagggcagtgtggaaaacagggagcagaacacagaaaggaatgagaaaatcctcagaagagacgtgcggaggcgaggcgtgggcggtgataagggtggctacagcgcggtagtgtatcgctaa

SEQ ID NO: 105997 - DNA, 724 bp, Glycine max
  Clone ID: PAT_MRT3847_66731C.1
agttttgtttgtcatcctattgttcagtgagagttctcttgggtatggtggtgttgagggatgcggtcgtttccggggatggtgagagcatacaaactgactctcaatttcagcattaatcatacaagctggctcagtatgcgtgcattgattggttcaggtatatgcgagttgaatccattgccacaatgtatactgtgcgctttcagaggttaattggcacctgcagattgcggctttcctgccactgatagattgtgtttgagtaatgatgacttggacatgtttccagcctgcggacagaatggttgaatgctctggagccatattggtttttactccctgttgcattctccctcccatctccacttctaatgctggattcatcgaaaaatgctccgatcaatggtgataggcagtttttttatgttgcttatctgactcaattatttgtatatattagatcccattcttttggaggtcaatcaaaattgaaaccttcccctcggatcttagatcaagctgagatgcctagtgagcccccctttcctccttggccccaccaaaagttattctttatacgcttacaagcgctttctttcggcttaatattcactccctaggtgcttcaggattacatacaccgttctcatggttctgcttgaatactaaagaatataggcatttgtgaatgaagtgtttatcatgagtttattgattccat

SEQ ID NO: 105998 - DNA, 506 bp, Glycine max
  Clone ID: PAT_MRT3847_66732C.1
tgctgacatgctgtatattaaagcagggggtgcctagctagcgaactgtgatggggttctacctgaaggtaccttggatctgtagaaccttctaattcagggagtagacttgtttggaaagcgcattgggtattcttaagcttcaaagctgacattgtggactaggaaccgaggcacttggttcctggtttagagttatgctaacagaccatctgtcgctgagttgatgctactgatatcatagaagagacttatgctgatccttactgaaacagagcaaggagttccgtgatggcactaattattatggaattgcctgctggaatgttggatgatgacgaacgtgatactggtgacactgcatgccttgaggttgaagaagataacggcctgaagttaagtgcaggacacatggtacacctcactggtctccttgactctacatccgaatgcaaaggtttccgttactgcggaggatgtgatgacgacatcagcatgtttctgta

SEQ ID NO: 105999 - DNA, 1693 bp, Glycine max
  Clone ID: PAT_MRT3847_66733C.1
ctcttgcgtccgcgacgagagaagaatgctgcattgctgcataaaataaaaatccatgacagagtcattcttgaatttcatcagttttctactcgcccgtcaaataccagtactcaaggacaggcggtagaaaccaccaccaagctggagtacgatagagacataggtaatttcaggtggagcagtgatatgcttaaagatcagaaagaacaccaagaaagaacaccaatcggattagcaatccacgctttaatgcactcagtcatttctccccaaaaactctaaaccagttgcatgcgagagatggcaacagctaacaggcacagctatgagcttctcctactccaccgacttctgctttactttgtcgtctcatgctcattatcgttatcttgggcagtgcaagatggtgaacgggttatggtgcgcaacaccccacagaagaactggtggaaaccaagtttaacaaatgcagaagatgatgatcctcctccaaggcccttgaaggttacttttgctgaacctgcaactcactggaccgatgccatccccattggtaatggccgtctcggtgccatggtttggggtgccgtaccctcagaagctctccagctcaatgaggacacactttggactgggattcctggagactacaccaacaaaagtgctccgcaagcactggctgaagtcagaaagctggttaatgatagaaaattcgctgaagctacggcagcagctgtcaagttgtctggagaaccttctgatgtataccaacttctcggagatatcaagttagagtttcatgattcccatcttaattattcaaaagagtcatattatagggagctggatttggatactgcaacagcaaaaataaaatactctgtgggcgatgtagagtttaccagagaacattttgcttctaatccggaccaagtgatagtgacaaggttatctacaagcaaacctgggtcattatcatttacagtgtattttgatagcaaaatgcatcacgattcaagggtaagtggccaaaatcagataataatggaagggagatgtcctggcagtaggatcccaccaagagtgaattcaattgacaatccacagggaattcagttttctgcagttcttgatatgcagattagtaaagataaagggtttatacatgttttggatgacaagaagctaagagttgaaggttcagattcggctattttgcttttgacagcttcttcttcctttgatggcccatttactaagcctgaagactctaagaaggatcctgcttctgagtccctcagtagaatggtgtctgtgaaaaaattttcatatgatgatctttatgcacgccacttggctgactatcaaaatctatttcaccgtgtctcattgcaactctctaaaagctccaagactggttcaggaaaatctgttttggagggaagaaaattggtttcctcccaaactaacatctctcagaagagaggggatgataccattccaacttcagcaagagtcaaatcttttcaaactgatgaagatccttcctttgtggagcttttgtttcaatatggtcgatatcttctaatctcttgttcgcgtcctggaacccaggtggcaaacctacaaggtatctggaacaaagatgttgagcctgcatgggatggtgctcctcacttgaacattaatc

SEQ ID NO: 106000 - DNA, 505 bp, Glycine max
  Clone ID: PAT_MRT3847_66734C.1
ggctcgaggagagaggtaggacacatgaggaggtagtggggtgcaatgaaaaagggaagggaaggggggtgggattggaatgagtatactatacatgttgttgtggtgtggatgaagaagacacctcactgaattaaattaaccagggaaaacccactcttgctcatttgccttctctttctctaaaacaccaaacccctctatacttctttctatcaaacacagtgcgtgcttttttgttcgtgttcttgttctttcgttctcctaattgtttcagtttatgagtgaatgaaatgggggacaagcaccagcagcaccaggaagactgcagcgatttcaccttcgaggacgaatgcaccgaagattaccggcgctgcggctaccacgccgtccgaatcggcgacaccttcaacgccggtcgctacgtcgttcagagtaaactcggttgaggccatttctccactgtctggctcgcttgggacaccagacattctagatacgtggc

SEQ ID NO: 106001 - DNA, 396 bp, Glycine max
  Clone ID: PAT_MRT3847_66735C.1
cttgagcatatttgcaaacatggccactgccaacgggaacgggacacgagatgctggaattacagactcggagcatttttcgccgtatagagcagatggaaaattgtatggtttcgtatgcgtagttacaggagcaacccagcccgttggaaaagcaatcgtcgctgagcttgcagcacacggcgcagcatgcatatatgcatgctctagcctcccctcagaaacctacaccgaactcgccgactcaataaatgcgcaatacccaaacacaaaagtcatcggctacccttacaaaatcaactcggaagaagacactctcgccctgattgatgacgtgctgaactcctgtggccgactcgatgtttgacatcttctaccggtttgctaggacccccg

SEQ ID NO: 106002 - DNA, 264 bp, Glycine max
  unsure (1)..(264): unsure at all n locations
  Clone ID: PAT_MRT3847_66736C.1
cccacgcgttcgcccacgcgtgcgtgtttatttatttttcgatatacactaacaaaccacatgaataggtagnctgactgtctcgattaacccctttaccttctaccctcaaaaattcactctctgctcaaagaccaaaaccatccctacataggagcataaatatggcgggagcccattttggtttcaatagaaagactgtggaatgccatgaatcacgacctgggaatcatcctatttctgtgccattcaacgtgacccata

SEQ ID NO: 106003 - DNA, 395 bp, Glycine max
  Clone ID: PAT_MRT3847_66737C.1
aattcggctcgagcttctcttcgtcgtctattgcatatcttataattttcccaaactcccctttcttacgtatgcttttctttcctcgtgacaacccaccatattcaccaaatccttcaatattaacatattcagctccaacttctatacttgtagtttttatttcatttccctttcactctttttgcttatttgtttccagagagaggaacattaatatatacaaactaaacatggtgttggcttccccaaactcaataaggagcgaagggattctacccagcaacgagcttattcccgttgtggacctaacagcagaaaggtcacaagtgacaaagctcatagtgaaagcgtgcgaagagtacggtttcttcaaggtgataaaccacggtata

SEQ ID NO: 106004 - DNA, 291 bp, Glycine max
  unsure (1)..(291): unsure at all n locations
  Clone ID: PAT_MRT3847_66738C.1
ccgcgtccgtccgctcggnttcggctcgggcggcccctccgccgcgtcttcncncttgtccctggttctccttggctcccgggcgcgcctcgccccttcttccgccctcaggatggctgtgcggtctggggcctcttctggggccctccnnccctggtcctctgctctcccgtcggcccctgctttccgcgcggctccgttctggccncctccctctctctcctnngttgggctgtctctccggggtcgggttgcccgcgctttcctctctgctgtctgccctgctggccc

SEQ ID NO: 106005 - DNA, 926 bp, Glycine max
  Clone ID: PAT_MRT3847_66739C.1
atttttggagtttctgtttttatctggctccgcatgcatgccaccatgtcaatgttccatttgatatgtggcatctgggggctcttgtctgtgagcttttgtactgttgtggattgtgcttcatgctgtcatccatatcagttttttcagcaaagcaatagaaggtttgagcagaaaactgatacgttttggaagttcagtgaagaagctgatagatgggttgaagtgcaactgccttgtggtgatctgatatctggtggtgatagtgagtgtggtaaagtgaagaacagaagggaagaaagtttggatcaagaacatggatttgatgacaaaaagaagaggctggacagaaaggatggtaaaataggagtattggggcccttcgatgtggttctgatgcctctgagaaagagaatttcattgaccaaaatgtctgagacatctgtgtgggtcactggtgaaagtggctctatctatgagaggttttggaatggattagaatgggtgtttgcccctcatgacttgccaatatcagcaggacgtgcagttgcagtttttatcatcaatcagatgattcttgctctatctgaatcagggaatctgtatcagatgcatctgcaacttggtgaaacttcacagccagtttgggttgaattctcggctacactcaatcaaatcaaagataatgatcaggagaaaaattctttgatattgatgaagtctggtgtggtgtcagatgatgggcaaagaggttatttctgtacaaagaatggaacactggtagaaattgatgtggctgagtccccaagatggacaaatcatggccaaccagctggagcaaatgttgcagctatagctgctgttgcttctaaacgaaagtagtatacaccataagttctgccggagatctttatgaatatgataga

SEQ ID NO: 106006 - DNA, 368 bp, Glycine max
  Clone ID: PAT_MRT3847_6673C.1
gttggttggggaaaaacatatgaagagggttaaaaaaaaatctggcctttaccattaccgcaaacacaaagttaacttacctcacagggggcccacatgttttaaaccgctgattgttgtttttccacaaactaaattactggagaaaaacccgggctcgaggcgggcggtcagcctactaaaacccccttttcttctttttctcacttccctcagaggaatttttcaccatttttattagaattcttccaaagattgccgcccaattagggaacaaaggcaatgggtgtttcacaaaattccgggcaccaaagggggcccttccaagatattcttgggggggtactttaacgtgggccacaaacccc

SEQ ID NO: 106007 - DNA, 1257 bp, Glycine max
  Clone ID: PAT_MRT3847_66740C.1
actgacacttggaccgacccgtaaactccataccgatccccccacccttaccatctttccctatagttaaacgtaaaatacctatacgtaaccatgcacataactatcaccacaaaatccacacacaactttaaataagataaaacaagtttggctgcatacctctcctccctcccaatccgactcacaaaaggtgtattgtggaataaaataattcctctttttttggcaaggaccacaaaattaaacccactcacatcaatatttttcctttttgaatgtgtatataacaacgaagtatgaggttcataatcaccccttaatccttttctttctctcccaaaaggccataataccaaatagagcaaggaagcctaaaggatttatgctattagtaaatatgtagatatgttaattaacattttataggacgtgtcccgattcaagcttggtcatcccatttccatcttcgccctacctcttcaagaacagctgcccgagcttggcttctccttgcctcgtcctctacccaagacctaagaatctgaagagcttctttttcagcttccagcgtggatttggtgttgagcaattcttcatgctttaattctaaatctccaagcaacttttgaacaacatgcctttcatctacatatgtgactctctccaatgcaactttttccgatatctcatcaacttctttctttaagttaagcagaagctgcttctgacaatccattgctgccttttcttttaaatactcagcagatatcttatcttgattgatctcctcttcttccaaattctttacttccacgtgataaagcctctcaacatcaaaaccacgatttttctcttcaataagcttttcatcccaaaatctctgtatctctcctcggctaagcaactcagaccagatctctcctgcctcagccagcctggcagaattctcagcttctattcttgacaattcagctgatattgcttccttcatcctgccacctgtcagagccaccgctgcttgtgcttttgttgaaggtttgtttggctgaaatcgcttgctctgtccaaaaacttttctaagtatactcttatcccctgccaacatgtccacataaactgcggaagaaatgatctccttcacatccatataacctgcttttttaattgatatctggtcaaccaccccagagaagaagtcatactccaactgagctctccagtctattagatcttgtcgtgagatcggacgcgtgg

SEQ ID NO: 106008 - DNA, 270 bp, Glycine max
  unsure (1)..(270): unsure at all n locations
  Clone ID: PAT_MRT3847_66741C.1
cttgttacggggacatggaaatcgggggaggcgggagcaacccgaaatggattaccacaaatgttcgggaataataatagtaacaaatttatataacaacaacaacaaaacacattccaattcgcatccgggaaaaagtaaattaaattaaaaaattcagcttctgcacctcgtaatggcgctncaaccgggggtggaggggttggcctgggccaggggtatncaattgtaataggaaacgccgcggcgaaagcaggggaccggctcgag

SEQ ID NO: 106009 - DNA, 1046 bp, Glycine max
  Clone ID: PAT_MRT3847_66742C.1
agtttccttgcactgctctcactgttgccactgcttctttctcttcaattttcaagtgctcagcttccagctgacactgacaacatctcatcacgcacccttgatgccattctccaagattgcgcctttaaggcatttttgaggccaaaaactggggtaccgcgtccgggcaaagtgcccagaagcctaaatgggattagagtttcagcaatgaggctcaggagtggtagtttgaggacaagaggtgttgaaagctataaagagtttcagatcccaattggggtttttgaacagccttatgtagagaggctggtttttgtgtaccataacttaggcaattggtctgagaagttttatcctttgcctggttacatatatttggctcctgttttaggtctaatgtgcatatagtggtgccaatttgtctgattctgagttgcctgaattggacataagagcttctgataagccaattttgatcaagttccctcatgtggaatcagcaccattagggtcagtgccaacgtgtgtgtactttgatctacatggttcagtgcaatttgacatcctattacatgggaatgtttgttcaactttccaacaagggcacttctctattgttgtggagtctaatgccccttccccagcacctgctgctgttgctgttgctgctgatgttgggagaagtggtagtgggaggaacaagtccaaggtgtgggtaattgttgcatctttggttggtggaagcctcttgttgatcatgttgagtcttttggttgctaaagtgaggagaaccaaaaaagggatgaagattcagcaattggaatgggcagctgagagcaatgaaactttgcagatagcatctattgggggcaccaaagcaccattggcagtagggactcgcacaagaccaacaattgaaaatgattacataccttagatttgagggattcttgtaggaccaatttttttcacttttttgttttcttgtttggtgttgtaatttttgtgttcataatgagttaaaaaaaatgctttccttgtct

SEQ ID NO: 106010 - DNA, 555 bp, Glycine max
  Clone ID: PAT_MRT3847_66743C.1
aaaaaaaaaaaaattataaataaaaaaaaaaaaaaaaaaaaaaaaaaaaaaaaaaaagaaaaaaaaaagggaggaagataataaaggtttcgaggttacgaacacgtgcaatgcaaagcattagggtctcctttatttaaaggggggggcccttttatggggccccgggttactggcccggggcctgggggaaccctgccttttctggggggccccaaatttgattcccggggcccggttttaccccgggggggcggggaaaaccccgggtgcccccccctttaccaccttgggggcagtcccctttgcgccgggtgggggcactttagaaggggcccaagcggtgcccctttgcaggttttcgcgaccccgactgggggacgggccccccccctggggcgctcttttacccgcgggggggggggggttccccccctgtggcccggtttccctggccgggcccttggccccgggctcttgggttggttcccgtcttttgctccccgggtccgcggttttcccgggtggggtttggggggggggcccccttttggg

SEQ ID NO: 106011 - DNA, 372 bp, Glycine max
  Clone ID: PAT_MRT3847_66744C.1
cggacgcgtgggctttctctttttgactcatcaatctttgcttcttactcttgggttccctcctcacaggtatgggaagattctttcccgcgatcgcactctgcaatgcaacgcagcactttccaggccctgttgtaaattctccacaagctcccctctgaccgggtggcttctaaggccggtcttattatatagatcaaggacactctggtagtccaaatcaggctgagtgctgctaactctccaaagccaacgcaaccagtggtaggagacattgacaccattccaccttttcaatctggtaaagatgctgctgctctattaggagagggtgatttatatggtgaaacacctgccagtgcttgcatttaa

SEQ ID NO: 106012 - DNA, 333 bp, Glycine max
  unsure (1)..(333): unsure at all n locations
  Clone ID: PAT_MRT3847_66745C.1
gtcgcnngcacgcntacgtnanctcggnattcggctcnngnnggttttggtncntctacagtnagattcnagnnnngngtcttttctgngcgtttgatcanatggtcgaaacaggtncaaattnccctacnatgnngattcacgctcgcangtctacnaggagaagtngganagcctnttgntttgggtccgnnaaganaagggcaagtatcgggngaagtnntngattccatggggacttgcacctgttcattggttctcacgattccggcattggggttagagngcngattttgattgtganagggcnggagttngtgcagaagcnnnacg

SEQ ID NO: 106013 - DNA, 574 bp, Glycine max
  Clone ID: PAT_MRT3847_66746C.1
acgcacagaagtaggaccatttttacatgggaagttggagcaaggcgagggggacgaggaacagtaacaaaaaaccatatgttgctgaagctagaccaggcagacgtgcgcgagtggctaggcataacaaagaaacctgaccagtacttggggggaggatccaaacggcccggcattgggtccaccctcgggagaggcacaaacactctgtctcggaaggtaccaagaacgtgacgaagcccgccagaccacgcagggaacggtataacgagagacaaccacagactatgggacaccccaaaacgaaccgattcacaaagagggcttgaatagacgctctgacggtcgcgatggtgcaaaagtaaaaaaggcggtgtggcattagataatatcaatgcagatgcctattaaactaaacgcgcgaagggcaggcgctctataagagcaaagctcacggccccgtgcgagggacggcgcatatcgtgcactgtgccacctaaatggacaatgacgggcggcgctcggaaaagcggtaactgggagcgccctcaggtgactcaaaggaagggattcg

SEQ ID NO: 106014 - DNA, 408 bp, Glycine max
  Clone ID: PAT_MRT3847_66747C.1
gggtcgggtgggaatagcatctagctggatagaggccttctgatctgatattacagagatcttggagggatatggacaatcccgaggaaatacccttaacacccgcaacaccaagtactcctggtgcacctctatatggtggcttcacgtatggaaggaacaataatagcaagaagatccctcctgaagaagggtaggtgctccagtgtggaggaatggagcattataagattgggggctaccggcagagtgatgctcattgacactgccatcgcctccaccgggaggccctctcgcaagagagacagcagcggagttcatagggaccttgatactcatgtaacgatgcactgccgatgtcattggcaaccataagacacatgaatgtgagaccctcattggatgtgc

SEQ ID NO: 106015 - DNA, 431 bp, Glycine max
  Clone ID: PAT_MRT3847_66748C.1
gggccgtcgacccacgcgtccggcggaccccagcctctgccaggttcggtccgccatcctcgtcccgtcctccgccggcccctgccccgcgcccagggatcctccagctcctttcgcccgcgccctccgttcgctccggacaccatggacaagttttggtggcacgcagcctggggactctgcctcgtgccgctgagcctggcgcagatcgatttgaatataacctgccgctttgcaggtgtattccacgtggagaaaaatggtcgctacagcatctctcggacggaggccgctgacctctgcaaggctttcaatagcaccttgcccacaatggcccagatggagaaagctctgagcatcggatttgagacctgcaggtatgggttcatagaagggcacgtggtgattccccggatccaccccaactccat

SEQ ID NO: 106016 - DNA, 355 bp, Glycine max
  Clone ID: PAT_MRT3847_66749C.1
ctcaccttacctcttattccaaatcttaattcaaatggcatcggaaactgagacgtggggctttcatgctctatatcaaccagctcctcagtctaatcatcaacaacttgtacagcaacatggacatctttcttagtgagctcatcatcaatgcatctgatgcttagtacaagacccgatttgagagttttacatactaaatcatgcttgatgctcatccagagtcgttcattcccattttttctgactagaccagctccacattgtctatcattgacaggagcattgccatgactaatgcctaatggatgaatatcactaggtactattgcaaggactggtaccaaggaattta

SEQ ID NO: 106017 - DNA, 420 bp, Glycine max
  Clone ID: PAT_MRT3847_6674C.1
gttttagttaattttctctcgtttgtaatttacccctttgattttttttatagttatttttatttattgtttttttttattcccaattgtaatggtaccatcaggggaactaatcactggattgcatttgcattagatattgttttgaaaattttcgtattgtttatactgatgagtttagaattgggctagtagaaagtagaaacatttctagaaaggtggcaagattgacatgttatggaaggggctgttgaattattaacatgataaatagggttgtgtttcgctctcacttgagctaggttaacaaattgggttatagcgagtgacctttgaattgattatgtacttgtttgtattcacattgggctatgaagaagcaggttgaattatcagctaaatgtccacatgtttggttcc

SEQ ID NO: 106018 - DNA, 420 bp, Glycine max
  unsure (1)..(420): unsure at all n locations
  Clone ID: PAT_MRT3847_66750C.1
ggagcatccctccagtttttcacgccctctctactgtttttgcctcttccgtcaccgtgcaagcatgctccccagttgtaccatttaccgttgtagatatgtcttgggtcccctattttgtttctctctctacctcttctgtttctctctctatctctccattctctccctctcattctctctaattaagaataagcatggaagtggcaattgtctaacttgaccccttggttgaaggggctataattccttgtcaagaaccaactctnttatgctgttatgttgaagaccagccgactttattctaacagtttttaacctgtgcatgaaatgaatatgtagtatttagaaaaaactgacatgaaagctgactatattcttcttgcaagatgactatacactgattttcaaacctaaagt

SEQ ID NO: 106019 - DNA, 121 bp, Glycine max
  Clone ID: PAT_MRT3847_66751C.1
gattcacattagattcattgctgctgatcttatggcttagtgagctgacgcatcagcaaaacagggagcacatgatagcctaacaggtcagctctctgccgagacactctgcaatctacta

SEQ ID NO: 106020 - DNA, 391 bp, Glycine max
  unsure (1)..(391): unsure at all n locations
  Clone ID: PAT_MRT3847_66752C.1
antaatgangnaaaatgannnnnnnttgaaataaaatggaatcatgttaatgtttctgcaaaatgaaataaaatgaatacatttgaaacaaaaatgaatctcgtttctgcaagatacatcaatcagcagtgcataacagggtttatttcaatggaaaaccaagtccaacataatgatcccctaaagcttcattagttgttcatccctgttgcattcttcacagcatcagctgctccttgtgctttagcctgcatttgctgccctgcctgttgcatggagttttgagcagattgagcagcactgctagccttgtccatcatgttgccagccttttcttgagcttggcccttggcttgtcctgcattgtagctcatgttttggctcgtgccga

SEQ ID NO: 106021 - DNA, 1373 bp, Glycine max
  Clone ID: PAT_MRT3847_66753C.1
cggacgcgtgggtatcgaaaaccactcactcaactatttagttcaaaagaaaaaacaagagaaaaaaaaaatggttttctgtggcaacagcactgaagagagtgaactgcatcatgctcaaattcatttgtacaaacacgtatacaactttgtgagttccatggctcttaagtctgctatggaattaggcatagcagacgtaatccatagccacggaaaacccatgactatttccgagttatcctcagctctcaaattgcacccttcaaaagtgagtgtcctccaacgctttctccgccttttaacgcacaatgggttctttgcaaaaacaatattgccgtcaaagaacggtgtagaaggaggagaagaaatagcgtatgctcttactcctccttcgaagcttctaataagacacaagtcaatatgtttggcgcctattgtgaagggagctcttcattcgagctcccttgacatgtggcattcctccaagaaatggttcagtgaggataaggaactgacactgtatgagagtgcaactggggagagtttctgggactttctcaacaaaaccactgaatctgacacgctgggtatgtttcaagatgccatggctgcagattctaaggtgttcaaacttgcactcgaggaatgcaagcatgtgttcgagggattgggttccctcgtcgatgtgggtggtggaactggtgttgtcacaagactcatcagtgaaaccttccctcacttgaaatgcactgtgtttgaccaaccacaggttgtggctaatttaactggaaacgaaaatttgaactttgttggtggagatatgttcaagtccatcccctctgccgatgcagttttactcaagtgggttctgcatgattggaacgatgaactctctgtgaagatattgaagaactgcaaagaagctatttcagggaaagggaaagaaggaaaggttataattatagacatagcaattgatgaagtaggtgatgatcgcgaaatgactgaattgaagctagactatgatttagtgatgttgactatgtttaatggaaaagaaagagaaaagaaagagtgggagaaactaatttacgaggcaggattcagcaactacaaaattattcccatatgtggattcaaatctctcattgaagtttatccttaatttattattagaagctgttgtaatcgttgtgtactacggtttcatcttgttaaagcattttcctaatctgttcttttatgtttaaagcttcgatacaatataaataaaaataattagactttatattaaaaaatattatatgatattttcaatatttcttttgtcttttatattgattcaattatctcaaactcatacctttttt

SEQ ID NO: 106022 - DNA, 334 bp, Glycine max
  unsure (1)..(334): unsure at all n locations
  Clone ID: PAT_MRT3847_66754C.1
cggactcgtgggctgacttttgggctgaaaatgatatgtttttacngacaangacaganacagganaatgtaaatttttgtaaagcacatagaacaaaaacaanaanaattatatcanagagatacttgagaagggtattctgttacatttttgcacctcaccttacctcatattctttcatggctgttcagatcagaaatgcatttcttcctgtttcacacgactgttattttgtacaatcaaaacttaaaatgctgccctattaatttttgtttataattttctaagtatacttctcatcttaaaatttcaatgactcaatttttttctttt

SEQ ID NO: 106023 - DNA, 1237 bp, Glycine max
  Clone ID: PAT_MRT3847_66755C.1
ggcgagtacggctgcgagaagacgacagaagggggatgcataaaccacgatggatgaaaggtggtttttccactttataaatacccaattcttcagccactttgcttttattttctgatatatctccttcctgttctgctaagtggcaaagaaagaaagaaagaaaatttcaagggctgaaacatctatctttaactgtattctccctttgtttcctcaccagttgattcaggttgcaaacatggcttttccagacccatccatgtcagtttctccacagaggaagatgggaagggggaagattgagatcaagaggattgagaacactaccaatcgccaagtcacattctgcaagcgcaggaacggcttgctcaagaaagcatatgaattatctgtgctttgtgatgcagaggttgctctaattgtcttctctagccgtggacgcctctatgaatatgctaataacagtgtcaaagcaaccatcgagaggtacaaaaaagcaagttcagattcgtctggcgctggatctgcttctgaggctaatgctcagttttaccagcaagaagcagataaacttcgtcaacaaattagtaacctgcagaataacaacaggcaaatgatgggtgattctttgggctctctgactgccaaggatctcaaaaatctggagactaaattagaaaaaggaattagtagggattcggttcaaaaaagaacgagctgctatttgctgaaattgagtacatgcaaaagagggagatagacttgcacaacaacaaccagcttcttcgagcaaagatagctgaaagtgagaggaaccaccataacatggctgtgttgcctggaggctcaaactatgactctatgcagtcttctcagcaacaatttgactctcgtggctacttccaagtcactggattacaacccaataatcagtatgcacggcaagatcagatgtcccttcaattagtatgatgtgtttagtattgagatttgagatgttctgctacttgtagtttgccttctagtatgatagcagatgaatgctaagggtaatgtaagtagaaccatttgtaggggatttaagcatatatcccctcagtactatatatatgtaatggctttgtagactttcttaagactatcctgtatctattgtgaaacgctctgagatgttagtatttgtgtcctaattaatagtatgaagaagaaacctagcttggcatgtttttccccc

SEQ ID NO: 106024 - DNA, 479 bp, Glycine max
  Clone ID: PAT_MRT3847_66756C.1
agacgcacagcgcgaaggcaccaacccggaagtccgggaccgaatcatgcgtgcgacaaacaccaacacggcccgtgagcttagcaacacatcattcaaaggctatgatgcttatatatcctcaaggagtgagagtcattgtgcatacagcgaacttaatttatgtagattggaacaataaaagccaaggtttgtggatgcaagattttccatggaaagatcaaaatagtctgagcaagggatctggatttgaaaatgacctggttgaatatctcagtgtgttgaagtggccagaattctcagttaaccttccattccttggaagcgtcagtatatgtccatctttcttcaggaagtttgattatagtgatgcaagggtattttcccattaattgttcttaaattatttcctttgttattaattattatgattatttgttatgttgtaaaattgtaacattgatagataagctgtacat

SEQ ID NO: 106025 - DNA, 521 bp, Glycine max
  Clone ID: PAT_MRT3847_66757C.1
tctcgcgtccgataaatattattactcgtaaaaaaattaaaaaaataaaataaaatttagaataatgtactactaatcaattcaaattggcatatgttagatatatgaattacgatcatgtatgtggaaacaaaataaaggatcttggatttaattctcttcttattaatgaatctataagtctattttgattagaaaaatcataataaatccttgattgttgtagtgaattactaagaaatgtttgtaaatagttcacatggccaacaacactaacatggctgcaatgcaatggcagatcttttgtttggaacacagatcctacaagtcccacgcgtgcctgaaatccgaccacaacagcagaaaggttgttgtttgcgaagcatgttccatgtccatcgagaccaccggccatgtgggacaagacgaggaggcaatcttgcagaagcaccttaagtctggtaattgtgaccctaccaagaagaagaaaccaatttgtcccgtcaagcgttgcagggagg

SEQ ID NO: 106026 - DNA, 491 bp, Glycine max
  Clone ID: PAT_MRT3847_66758C.1
ggctcgaggaaagcaccaacaagcatgagttcctatcaagtaagagtttcagcagcttcttggatgaaccatgcgtttgttcagaatatttccctttggaaaatgattctgttgatgaatcagagagaaattttgaacctgaaagttgtgaaagaaggtgtgttgatgcagcagtggagctcaagactgtgccatctgtagaacaagctgatgaacatctagtggagaatctgaataacaatgtgttatttgaaaaattttcagctgataacaatttcctttctgaagatgatttcatttgtgaaagcacggagtcaaattctatgatcagttctataggagatgaatttttgtcagacacagattttggaaccactactaatgttcacactttgggaaaccatgatgaagaaaatgcagtgttaacaaaagaagatttgaactctgagggtgagagaagatcagagagttctgatgctgaagatagagat

SEQ ID NO: 106027 - DNA, 389 bp, Glycine max
  Clone ID: PAT_MRT3847_6675C.1
gcccgggcttggaattcagctcgagaaaaaactctgctttaccatttttctttttttctctctctctcaacaaaaggaaggggtgagggtgggtactgctctacacagccacttctcacgggcagggcccacgaaccccatcaaatacacccttacccagcagaaacaaccgcagtttttaacgccggcacccctgacatattcttctagcaccggcggcggcgacttttatagggaattcatggtggagtgaaagaatctttggtacctcaccggaccctacatattttccttcatctaaaaatacctccctctgcgccttcacttaaatctttgccggccacgttagtaccatttacctctccgccgtctccattgaaaaccccctc

SEQ ID NO: 106028 - DNA, 257 bp, Glycine max
  Clone ID: PAT_MRT3847_66760C.1
gacgctgagcgacctttctcctcagtccacataaaccaaatgtcagacaagtgccaccagttcatcacgagagaaacgactacctgagccgaaatcattatataacaagaatttaatactaatacatcatactaacacaatataggtagaactgtcgtatcatatagacatctcttcagcatagcatcggtcatcgagaagatcacgaccacacaccgacacatgaaatccgggatccttcataatatggacaccga

SEQ ID NO: 106029 - DNA, 300 bp, Glycine max
  Clone ID: PAT_MRT3847_66761C.1
ggcctatcaaacaaacaaacacaaaaaatgcgatagcagcttctattacacacctttgaaaacatatatacccgagcctttatgtgataagcttgtccgatgctcaggacacacagagataactcttatgtgggacattactggaggaagagaatatgactgctgcattcctgattttagaatagcgcgaaatacagacctaactgaatcgaatgatttatatagatattgcccattaacactcacaaagaagtggactatggatatagctttatactataacattatgcagtgttgcac

SEQ ID NO: 106030 - DNA, 250 bp, Glycine max
  Clone ID: PAT_MRT3847_66762C.1
cacaagactacaattagtagctaattgaaagtgacggattggaagaagggcggtcaaatgatgaacattgtgatgcatctgaatgcactgatcaaaacgcatgattgggcctcatggggccaggtgtttttaacaatccactaccatgcaaagcattcagatgcatgtaagtggacacaatcagaaccacatgcgcgggaagtgatcatcccaatataggaatgtcgtcctaataaggcaccagaaatga

SEQ ID NO: 106031 - DNA, 255 bp, Glycine max
  Clone ID: PAT_MRT3847_66763C.1
gatgacattacatgttgccatttcttatgaaaacttttcagttttgattctttaattagtgttgttaagtgtccttagggaactacttatcattctccttagtaataaagcacttttaaagatagaaaatatgctccaaaatcgttcccatttcaactcttgtagtgttattcacaactcactaaatctctttttccatcttcaggactggacttagaatggaattatggaaatgaatccttaccagaggcttca

SEQ ID NO: 106032 - DNA, 843 bp, Glycine max
  Clone ID: PAT_MRT3847_66764C.1
ggtgggagagagagatgggaaggtccccttgctgtgagaaagcacacacaaacaaaggtgcatggaccaaagaagaagatcatcgcctcatttcttacattagagctcacggtgaaggctgctggcgctctctccccaaagccgccggccttctccgttgcggcaagagctgtcgtctccgctggatcaactatctccgccctgacctcaagcgcggcaatttcaccctcgaagaagaccaactcatcatcaaactccatagcctccttggcaacaagtggtctctaattgctggaagattgccgggtagaacggacaatgagataaagaattactggaatactcacataagaaggaagcttctgagcagaggtattgaccctgccactcacaggcctctcaacgatgacaaggtattggaacgctgccctgacttgaaccttgagctaaccattagtcctccccgtcaacctcaatctgatcagcatcacttgaagcccgttgggagaaactcaaacctttgctttgcctgcagtttgggtttgcaaaatagcaaagatcattgtagctgtgcgctcaacactgccaacgctgcttctggccatgatttcttggccttgaaaaccagcgttttggaaatgaaatgagtcaaattcattttggaatctttcttccctaattaattagttgttaatggatgcaaatgattgcctgcccaatttcctcgtggagccctttctattattcctatgttcatgtacatgtgcgtaagactacaaactttcttgtttatacgattggttctttccaaatagaatacaactatatatttttgctatttct

SEQ ID NO: 106033 - DNA, 512 bp, Glycine max
  Clone ID: PAT_MRT3847_66765C.1
ttttgggttttttttttttttttttttttaatatcaaaccaacgttattgatacaataagttaaagacttcttttatcgatttatgtgcaagtaatatcaaggacaggcttttgccataatattgaaatacaagtaaacatgctaatcataacttaatcatacacacatcactcggtgatatgttatctcgacttcttcctctgccttgcaccagaagcaaaatatgaaacttttaatcttttcagaagtaaattacaccaataagacattattaataatcaggaaaagctgaattgaatccactggttttactgagacgaactaaaagttgccattgcatccatttcttcttgcaatagaagagcatcaatgaagacatcaagattttcaccttgcatcacatcatctaccgagtgataagtgataccaactctatgatcagttacacggccctgaggaaaattgtatgttctgatgcgttcagatctatccgcactaccaatctgctcta

SEQ ID NO: 106034 - DNA, 128 bp, Glycine max
  unsure (1)..(128): unsure at all n locations
  Clone ID: PAT_MRT3847_66766C.1
agggagaggaggttggtccgctgccagaggagggtctgnacatgnatatntgtgttgataatataccaaacnctggacnactagangganatnagcatgngtggtaggtacttaanggggttgntgaa

SEQ ID NO: 106035 - DNA, 457 bp, Glycine max
  Clone ID: PAT_MRT3847_66767C.1
tggtgatgtctgcattttgttatagaatttgaagaatttaaaagaagttaaagtctctggttctaaaaacttgaaggagcttccaaacctttcagaagccacaaatcttgaagtattggatatcagcgcttgtcctcagttggctagtgtgattccttctattttctctctcaacaagctcaagataatgaagctaaattatcagtcctttacacaaatgataatcgataaccatacaagctccattagttttttcacccttcaagggtctacaaaacggaagaaattaatttcagtgacatcagaggaattaatttcatgcgtttgttacaaagaaaaaccctcgtcttttgtatgtcaaagcaagctcgaaatgtttaggaataaccaaagtgacatggggcgcttgccttcaagctttatgaatcttagaagacagcgatatcttagagttcta

SEQ ID NO: 106036 - DNA, 435 bp, Glycine max
  unsure (1)..(435): unsure at all n locations
  Clone ID: PAT_MRT3847_66768C.1
agcccggaagggggggcgaggacaaanaagggcacccagcagccattttagttgnatgctatggggcatgatagtgcagggtctacaataccaggggagggggacataggttgacaacttgacaccaatgacaatatgtgggcatatgggctcaatcctgggatgtgagggtctcggctttggggcaccattcctcaggccattgcacaggaaactggggggaatcaaatggcaacagggagaacaccatcgaattatgattctagcaagcagagcttttggcaatgttctattgaccttctcggtggaggaattggaggggacaaaactggagagtggatcacacttatacaaaatgctccaattagtaacttgttgagagttgctgcttggaagaaaggctgggtaatgggcaagagggggatggctgggaat

SEQ ID NO: 106037 - DNA, 485 bp, Glycine max
  unsure (1)..(485): unsure at all n locations
  Clone ID: PAT_MRT3847_66769C.1
aatttttcttatattaatgtatttagaataaagaggaggttggttttcctctcatccttacaaatatatacatcattcggatacacacaaacaaagttatagacaagctatanttaaagacacactactaccgcatccaccatcccctttttcatcacctccttaattcacagacaatttcatcctcattttataccacaccacttacttaactctacttatccataactttttatacatccacatttaccctattacttggtcttacccattttaattcaatccacatacgttccttaccactcacaaatatgttcatctatatgatcacaattttgagttaatacccttttcatacctaataacagtttttcctttaatttcccttgacttatacatagttcatttcacttcagctaatttatttcattccttttacatcttaatatcctctccttaacctgtacaccttactcatattctta

SEQ ID NO: 106038 - DNA, 824 bp, Glycine max
  unsure (1)..(824): unsure at all n locations
  Clone ID: PAT_MRT3847_6676C.1
accagagaaattctaggagttgtgtattgaagtgagcaagctgctgctggtgctggagtttagggatgaggatttattcaaacctaaagaaacacaataacacatcatcacaaactcatgtaaccctgccaataaaataaacctcgtgccgaattcggcaccaggaaaaacaaaagcgccgaaagagaaagtgagagagatggagttgaagaaggtgggattggtgcttttcttgttaggattcacagcaactactgtggatgctactggcttcaaccctaattccctcatcactcagctgctcccacaaatcgagggtgattctgatgataactatgtcaaatccaacaccgaaccgtgctgtgataactgtctttgcacaaactcaattcctcccaaatgccaatgtacggattgggcagaagactgccactcagcttgcaaagggtgtatttgtcagaggatatggcctcctcggtgtcgatgtttcgatgaaactgacacatgctatgacaaatgtaccagcacctcccaagaaactgccaaagctcatgatcgctacaactaagcaagcatttctcttgtgtgtgtatgcatgcatgcatgccaatataactatagtatatatttaaataagacaatacttggccaagcaatttgtttttctgcaaattgcttgtcatagtgtttgttgttttagttttattttgtttttcttttatctttctatgaaatatagggagatgttgggaggtttttttcttttatttttacctttaaatgacttctgtgatctgacctagttgaccactctcaanngtcat

SEQ ID NO: 106039 - DNA, 411 bp, Glycine max
  Clone ID: PAT_MRT3847_66770C.1
gcgcccttttttttttttttttttttttaaccaaaatcatatatacgattaaaaaacttgacctgggttaagggttattacatttggatcggtaagcaatcatgaaaatattttctgtccacatccacacgtaattgaaagacgatatacaatagtgtttttagccagagtaagcaacgagcttttgaacgagtcctccactccacttctcggactcttgttaatgatgcgccacagcacacaaagtccacttctgtcgcatacggataaaaaggcgtttgatgggaaaattctagcatataatattagtgaaattaggtgtttgtttcctaaaaaaatggtaaaattggtggtagtttaaactaatagtattaggggggagatttcataggtgattggttgggggggggg

SEQ ID NO: 106040 - DNA, 1249 bp, Glycine max
  unsure (1)..(1249): unsure at all n locations
  Clone ID: PAT_MRT3847_66771C.1
ccacgcgtccggtaaagtgaacagcagcccgtccgcaaagaaacaccaaaaaagtgaagcgatcaccgagcgagcgtgagggaacaaaactgcatcaaccaaccataaccatagctgcaaccactctcactcactctccacagcgagaagaagatgaggaacgaaacgctgcgtttgatccttctcctcctcctctgttcccaccttcactccgtcctctcatggaagaaagaggagttccgaacctgccaccaaacaccattctgcaagcgcgcccgatcccgcgcccccggctcctcctccctcatcgccaccgacgttaccatctcccacggcgacctcaccgccaaactcaccccaaaacatgattctcaatccgaaacgtaacccttactcctcaccctctccgtctaccaacgcggcatcctccgcctcaagatcgatgaggacccttccctctcccctcccaagaaacgcttcgaggtccccgacgtcatcgtttccgaattcccctccaccaagctctggctccccaaaatctcctccgtagaaaacggcctctcctcctccgtttacctctccgacggtcattccgccgtcctccgccacgaccccttcgaactcttcatccgcgacgactcgtccggcgaccgcgtcatctccctcaactcccatgacctcttcgacttcgagcagctcaaacacaaatccgaagacgataactgggaagaacaattccgatcccacaccgaccgtagaccctacggcccccaatccatctctttcgacgtttccttctacggcgccgatttcgtttacggcatccccgaacgtgccgcaagtcttgccctaaagcccaccagaggcccaaacgtcgacgaatctgagccctaccgcctcttaaccttcgacgtcttcgagtacatccacgattcccctttcggcctctacggttccattcccttcatggtctctcacgggaaagccaggggaagttccgggttttttctggctcaacgccgccgagatgcagattgacgttcttgcccctggctgggacgccgagtccggcatagcgctcccttcgcaccgacattcgacaccgttttggatgagncgaggctggtgtngtggacgctcttcctttttncatccggtaccgaacccctaaaggatgtgctgancatcagtaacacggtcggnggacngcgtaacttccggtttatgcccgccangctgtttcttcgnc

SEQ ID NO: 106041 - DNA, 195 bp, Glycine max
  Clone ID: PAT_MRT3847_66772C.1
caacgaatgggaccataatgtacctgctgatcatcctataacggccgacttccatgtgtatatcgaactcaacaccatgaacctagccgctccatggtgctactactataacgcgcacatctttaatacttttatgttagaaacagcataccaaagcatatcaacttgcaagctcacactattgattgctcttat

SEQ ID NO: 106042 - DNA, 439 bp, Glycine max
  Clone ID: PAT_MRT3847_66773C.1
catacgcgtgtttaactgatttgttcaaactagtactgatatagggcacagacattctgtgttgcgacaatggctactggtgatggttgatgtcccaacgaggtatgagcaggaggagggactatgatctacatcactaagaggaggagagagcaaaatctgaggcgacaaaacgacagagcctgatgttgtcctggtgtacaaagatggaaccacccgagatagacgaatgaagaggagtgagtaggatcccttatggagctcccttaactgatattggctggagaatcgaagaatgacaacgctctacagatatagttgctgaaaaagtactgggcgaagataatactgctactatgactaacaatgagataatgcataagtttgtctacccaatatggtgacgatagcaccaaaagagttaggaagacaaaagcct

SEQ ID NO: 106043 - DNA, 246 bp, Glycine max
  unsure (1)..(246): unsure at all n locations
  Clone ID: PAT_MRT3847_66774C.1
gggattttcgcccagaacatggtacagagcggcggagcatgcacgcnctgtgatccccacngccntccacggtgtccangcatttctccganctcancgaagacgantttganaagctctacacnggcgtcaatggcggcttcccgtcaancgnataatggncnccggnggtattgcgcngncgttngangtngacngnctgccgnannattntagattgganagagaaagnactgttcacgaatt

SEQ ID NO: 106044 - DNA, 466 bp, Glycine max
  Clone ID: PAT_MRT3847_66775C.1
acgtttgttctctggcaggcttatgctatgccacgatggatctgagacccaagccatgacatgagcaaaatggacgaaatgatacacagtctcagacccgggcatgaatccccaatgcgtgacaggacacaccttctgtgtcttgagatgcaggatgcacgatttgtaaaaaagatgttgggagtgctggatgtcagaatccctttttgatttccgatgacacatgtttgcaatacaatcattaacgagacgcttatttgatatatgctatcagaaattactggcccaggctaaagcttgaggagtgttactacaatactacaagaccggtgcctatatgggtgtggatacctactattacttgatcagaggtcatgcttctcggccgcctaactttattacctacaaattcaacagctacctcccttgtgatgatcttaccatgactgctggtattgacaaaact

SEQ ID NO: 106045 - DNA, 614 bp, Glycine max
  Clone ID: PAT_MRT3847_66776C.1
cccacgcgttcgcccacgcgtagacaaatcttgattgatagaaaaaaggaaaaggactcgtccttgaaatatgctcacaactgctatacttaacaattaacaacatactagagcatcctggattaataaataatacgatttttttgtgatgagcaaaaattgcaaaaggatataggatgggcccacttctatcatcttgaaaaaagcaccaagatgccctggttgtctaataaccattcagcagacgatgcccttcttcttgctatttttccagatagttgcagagaaacacttgctcactcagccccagcaaggatgaagacacgccacttacttaatgatctgtgtctagtagtgctagtgttagccctaggttgtgcagcggaggaggattccacttccaccgccagcatcatcttcaccacactcggcagagcctcctacgccttcgacatctattccctcccagtcccagttcagcaacaacaacaacaacctctctccccaagccaagaacttctactcaccgatggccactccgttaatttcaacggcgacttctttccaatagttccgctattcaactacccaaacactgcccttctctcaactcg

SEQ ID NO: 106046 - DNA, 373 bp, Glycine max
  unsure (1)..(373): unsure at all n locations
  Clone ID: PAT_MRT3847_66777C.1
tacaggcgtgcgaacacgagtgcaggcactcgttcatgcacagcgttctgacggatgtgatgagacctcatatgggaaacatgcntttactgaagacctcaatcctaatatgccccaatagcttctacattttgacttaagataaaagagattttaaagaactattggatgatgaatcaactaaataaggatccgtcacatggtcgtccttatgaaattgaaggaccgttggaaccattattatatgaaaaaaatcagtgttcacctaaaaatgttataagtatgataagaaaacgtacctcacaataagcttttggttattgataaaattccaatttaccgacgctagttttacttttcttatctcttacca

SEQ ID NO: 106047 - DNA, 114 bp, Glycine max
  Clone ID: PAT_MRT3847_66778C.1
gggacaaaaattctataatagattctattgtaaatgctactgataggtccatgttatggcattctaggctaggccatacctcaaataaagttttgcaacagctatgttctcaat

SEQ ID NO: 106048 - DNA, 719 bp, Glycine max
  Clone ID: PAT_MRT3847_66779C.1
ggctcgaggcaaaatcatgagccgcgtcaaatcacatcactgccaattcgaaatttccaatttcacagaacttttgttgcattgatctccgattttgttttccaacgcttcttcgtattctcaccaatctcaaatggtatctatctccttccttcccgccctgttcttgttcttcctaattgccacttctcttaccgaaagtaggaaggaattaaggaacaagcaggaaactgcattacagatgttagagcgctcaattcatttttccaacagaattaatccatcacgtgttgtccaaatctcttggcaaccaagggtttttttatgcaaagggtttttgtcggacaaagagtgtgactaccttgtttctttggcatatgctgtgaaagaaaaatcctcagggaacggtggcctttcagagggggttgaaacttccttggatatggaagatgatattcttgcaaggattgaagaaagactttcagtttgggctttccttcctaaagagtacagcaagcctttgcaggtcatgcattatgggcctgagcagaatggtcggaacttagattattttaccaacaaaacccaattagaattaactggacctttaatggcaacaattattttatatctctcaaatgatgttactcaagggggtcaaattctttttcctgaatcagtgcctgggagtagcagctggtcaagttgtagttatagca

SEQ ID NO: 106049 - DNA, 358 bp, Glycine max
  Clone ID: PAT_MRT3847_6677C.1
ctttagatgctttgatgatggacaaatcacatcaaatcgcatcttctacacgctcagactaatgtctgcatcatggacttgttgacactgatacttccatggtcttggcagcttatgagtactacaggcatgacggtgttgtacggaatgtgattgacatgtatgttggagaactataaatgattagattcaagcacgttctcaaagttgatcaagcctagcttgacactgtgactccagatattatagggcgtgtcaaaatagtcatttcagcatatccatgatcatttgctacactgttgcgggtggatacattcactttttgtgctaatgtgcagattgacaatcgagcttatga

SEQ ID NO: 106050 - DNA, 319 bp, Glycine max
  Clone ID: PAT_MRT3847_66780C.1
ccaagaggagcgtgccttcttcgggattgagggcacaaagctatatctagtttttcgaatcataaaagacctcacggcggttaatgaagccaccttagtggacaacgtggttgtcctgtggactgacatctctgaaacgtgtagcaatttcgttgctagccttaatgacgccatgggcaattttttggctgctgtggacggaattgacggtgagatttttgcttgcaccttgaatgccattgcctgtgtgatggaacatgatcctttcattgatggaatctctcatatcactttaggaccatggctgattgatcttagc

SEQ ID NO: 106051 - DNA, 1410 bp, Glycine max
  Clone ID: PAT_MRT3847_66781C.1
gttcaacatagatgagtaatattttttaatgcttgatgaatagagtgtatgaatgaaccaaagcaatttattattaaatcatttttcaggaaactgctttaaatcatgtcaccagctctgggattggtggagaaggatttggagcaacccgcgagatgagccttagaaaactcatttgggtggttactcgtattcaagttcaagtgcaaagatataacaaatggggagacgaaattgaagttgatacttgggtcgatgcagcaggaaagaatggaatgcgaagagattggataatcagggatcattacaccaaagagatcataacaagagcaacaagcacatgggtaatcatgaatagacaaacaagaagactatccaagatccctgaagaggttaagcaagagctgcttcctttttatcttaacaggcttgccgttcctaccgaagaaacagattgtgaaaagatagacaaactcactgatgagactgctcagatcagaatcctatctggactggctccaaggtggaatgacatggatgctaaccagcatgtcaacaatgtgaaatacattggatggattttagaggtacgaattagaaatggcaaaacaaattacctatgtggcaaagattgcaatactctatttcttatagacgttacaaggttttaaatatcggtcgcggttgtgttaggattttgttgcgtttgctgatatcacggcacatcgaatacaaatacgatcccaattgagatcactgaaagttaaaaaatcttgatgttgcaatgcaaattacagtcgccaacctttttaaaaccttttaacgttagagatgataaaatgtagtactgtaaaatgtagtaccaaaatgttgatttggcctattaatttggttgcagagtgtgccaattgaagtgctagaacattataacatgacaagcatgactttggagtttcggcgtgaatgtacacaatcaaatttgttggaatccatgacatgtccaacagcaagagttatggaatccaataataattccaagaatagaaaacccgacatgcaatacacacacttgcttcgtctgcaacaagataaagcagatgttgtccgagccagaactgaatggaattttaagcaaaagcatcagtgatacacaacattgacaaaaaccacagtatctgtggaccctgtacccttcttcttcgatgttcctgtttgctttttgctcttatggttttgctttctaggatcctttaagttctacattcattacaacacatttgtcaatttatcctctttgtgaattctttctgtgaggagaattgtagattgctagttattgagaaatttgttataaataaaagcatttgataataactgattaaaatatatcaacatatatcgcatagtttg

SEQ ID NO: 106052 - DNA, 648 bp, Glycine max
  Clone ID: PAT_MRT3847_66782C.1
agaaatttctttctcacttcactctaagctgactaattcccattccatcctggtgtcatatgtttcagagcgtagtgagatgtagcctcctcctccgtgtacaggcatgttcgagctatgcttcccgagtctgctctggctcattcactgacctctggctcgtatattggtggggggttccttcacactctacaccttatctcatactggaacctgtctactacagagcagtgtcacacttagctctaactctcacaccacctcgacatactatcaacttctctgaatactgacggggacacgagtatatgctaaacgaagctatggaatccacacctgtttgaaattcgcaagcataagtaatatagccacgacaaagttacacatatgctcgcgtattacgacctcgatggtttcatttaccatgcaccgcaactgtgcaatgttagtctacgtcagaataggaagggaccctttattacatacaaaaggcttgtactacacttgcctcaaagttggagaagattggatatgctgggccagctgattctgaaaataaaactgcttgatggaataaagaatgctaacgagacaattgacataaaggaagttaagcgaggtgaacatattcttacatccttgcaacgc

SEQ ID NO: 106053 - DNA, 326 bp, Glycine max
  Clone ID: PAT_MRT3847_66783C.1
gcacctactaactcgaattcgctcagcctaccaacttatcattctcacacaaaaacaatggaaggatcttcaagctcttttcctttactgctcaacaaatttcagtgcaaaagatccattaaagcataatcccatctgtgcattctcattccaacacccttacaaacaatcacctttaatatcatttcaaaattatatccttgacgaccataaaacctacatttaaatctcctttaccagaactgttgtcacacactagccctgctcattcatcttcattctcatttcaactaatgccttgacccttgtccatcttcaatcagata

SEQ ID NO: 106054 - DNA, 357 bp, Glycine max
  Clone ID: PAT_MRT3847_66784C.1
tgaagggatattatactggcaaccctactttagcacaagtcaaggattctatcaagtgctttctggcttgtggagagaaatcccatatttacagctgagaaaacgaactcaacatcgtggcatgcatcatactcggtttgctggaacctttatcacttggagtttgagggtttatcaaattacacaatacacatctgatacgaataggagttgatgattccaccctctaccaatctttattaaggaagttatcaaaccattatgatagacgctgcaaagagcctgatcataggtacactacctattagcaaactgagccattgacttctcacatatgagggggaaactccaacttga

SEQ ID NO: 106055 - DNA, 214 bp, Glycine max
  Clone ID: PAT_MRT3847_66785C.1
gctgggattggggttcagaggcctttgcttagttccttccccacttctttttgagcctgccttgccttttatggagcggccctggcaatgttcgggtccttttcccctctcaacttttccaatgtttcaatttccaatttctctgaaaaaatctttcaaagattctccgggtgcgaatcattgtgggtcgtcaaaggcagagtttgcaaaccag

SEQ ID NO: 106056 - DNA, 890 bp, Glycine max
  Clone ID: PAT_MRT3847_66786C.1
acgacccacgcgtccgcggacgcgtgggggttgatggtgtacaattcaaaggagatggttatacaacttgtgaagcaagtggacttgggcgttgcaagataaataatggaggctgttggcatgatgctcaaaatggacatgcattttctgcttgtttggataatggaggggtcaaatgccagtgtcccacagggtttagaggtgatggtgtaaaaaattgtcaagatatagatgaatgcaaagagaagaaggcttgtcagtgccctgactgtagctgcaagaatacttggggaagctatgactgcagttgtagtggagatcttctgtatatgagggaccacgatacctgcataagtaaaactggcagtcagggaagatctacctgggctgctttttggttgattttacttggcgtagttatgattgctggtggggcattccttgtgtacaagtacagaataaggcaatacatggattcagaaatcagagcaatcatggcgcaatatatgcccttggacagccaagcagaagttccaaatcatgtcaatgatcaaagagcatgaaggcaaaaatgggccaatcccttggaatttcacggcaggcagcatgggtgtgacttttcctgtgccattttgaactctggtcattgaacttaatagactgtatcctatggacagtggaaaagatcgacatttagaatgttgtcctgcatgtttctttttggggattggaaatgtagcattttgtatacttggaagggcagactatgtctgtgtctgtggtactatttcactagattctgccagacatcttgttccacgcacaagatcgtaacttatcgtgctgtaatacatgcaagttaacgtcctaatgttgttccattgctctgt

SEQ ID NO: 106057 - DNA, 179 bp, Glycine max
  unsure (1)..(179): unsure at all n locations
  Clone ID: PAT_MRT3847_66787C.1
cgtaagctcggaattcggctcgagctacagccctagatatattccatataaccacggatggtcttggaattcattgctggtttcgacattcgcgtctcatgcttccaagtcctagttcagatctctgctccatccctangtccggcttcctatctgacaatacgctagcagcatgcaca

SEQ ID NO: 106058 - DNA, 842 bp, Glycine max
  Clone ID: PAT_MRT3847_66788C.1
cccaggcttggatttcggcttttcctgtcctagtattcccttccgtccgaggtccgagtttcaactcggtgtagcaatggcgatgatgcaaggtgtgcagaagaacacactgtacgtgggagggttagcggaggaagtgaacgagtcgatcctccacgcggcgttcattcccttcggcgacatcaaggacgtgaagacgccgctggaccaggccacgcagaagcaccgctccttcggcttcgtcaccttcctcgaacgcgaagacgcctccgccgccatggacaacatggacggcgccgagctctacggtcgcgtcctcaccgttaattacgccctccccgaacgcatcaagggaggggagcagggctgggcggcccagcccgtttgggcggatgcggatacctggtttgagaggcagcagcaggaggaggagatgaaacggattgaggcagagaatcgtgcagcgatgcaggcggcggaagacttgcaccggaagcaagtagcagagcaacgggagggagagaaggaggaggagattgagatcaaggatgatcctatggccaaggctgaagcggaggttcttcaaaatcaatgacttgtcaaaatgacgcaacttggtgagggaaacgctgggttttgctatttgtttgcctcattgtaatgtctgatgaatcttgtgtatggtatgacatggaactgtagaatctgaaacaggatagctagtgaaatgaaatcaccattagtttggaaatgaaattacactactttgaactttagattcatatatacatataatgaccttacaacaaaaaaaaaaccccaaaaaaaaaaaaagggcggcc

SEQ ID NO: 106059 - DNA, 454 bp, Glycine max
  Clone ID: PAT_MRT3847_66789C.1
cgacccactcctgcttacggatgacaacagacgacagattgagttatctgataacaacacatcttcgggagagagatcattacaatggggtacttggctctccattccgtttacaccttcgtttcgtcgtcatcgccatcgacttctatcacaacgcgtaacctttatccctccatatctgaccaaaacgacgtcgtgctacatcggcagcggacccgtcgatatacatcatggccattaaagcggctcacctgggtctgaacaccacttacttcctataacctgacactctataagcgacctgtctcaacgactgatgcattcattacaaggcactttagcatacataccacatgtaatacgaggctaaacatgcattttccaaccatgacctcaagttttcatttgtcaaaattattttcatacattacttcccaaaagataattcatttct

SEQ ID NO: 106060 - DNA, 307 bp, Glycine max
  unsure (1)..(307): unsure at all n locations
  Clone ID: PAT_MRT3847_6678C.1
ggnggggccggggcccccctcccaccgaaattttttttccctaagggccgggttttgggggggggggggccttaaaccaacggggccggggccgaaacccctttgagttcctttggtggcaaggaaattttttggcccttttcctttgggtggcggggggccccctaacaaattagggtggttggaccaaaacttctggctaaaaccctaaagggggtgggggacatcctttggaggtttttgggggttaaagggggccccccgtttttggccaactgcttgctcgaaattggggacatttttttgg

SEQ ID NO: 106061 - DNA, 262 bp, Glycine max
  Clone ID: PAT_MRT3847_66790C.1
tcgcgccgccgccgctgctgcaagcgccagcatcgccgtcgtccgaatagtacactctaacgccgccatggggcgtatgcacagccgcgggaagggtatctcgtcgtcggcgatgccgtacaagaggacgcctacctacctggctgaagaccgctgcctccgacgtggaggcgatgatcacaaaggcagcgaagaagggacagatgccgtcgcagatcggcgtcctgctccgtgacgagcacggtatcacccttgtcaagag

SEQ ID NO: 106062 - DNA, 277 bp, Glycine max
  Clone ID: PAT_MRT3847_66791C.1
atgtaagtggacagaatgggaaccacattcctgggaatcgatcttgccaatttaggtatgcggccctaataatggttttgaaatgtgaagccctgagggggccaatcaaacttcatggcatttgaggtggcatattgacaatgtcaggcagactacataggttgacattctcttgggaattgatcaggattgggacattgctggtgatgctctcatgccgtgtttttctgtggcagacgctactgccgtatcttctgaaaatgcggaatcctctgca

SEQ ID NO: 106063 - DNA, 265 bp, Glycine max
  Clone ID: PAT_MRT3847_66792C.1
tgaaggactaaattaaaataaactaagtattgaaatacaattgaaaataaaggctgaaactaaaatataaataatctgaaactaaaactatgttgtgttattagatgaccatggccgttattgatgccgatgaaaatgggttgggtcgtggccagttgagcacaactatagtactagcaggcatatggtctaattaatgaaaaggaaaccttgcaatatcgctccttggaagcttgggtctataggattgtgccaggttttaatg

SEQ ID NO: 106064 - DNA, 224 bp, Glycine max
  unsure (1)..(224): unsure at all n locations
  Clone ID: PAT_MRT3847_66793C.1
gnaaaaactcaatttgattttgatgatagtgaaatgggtcaagatggatcagagagtgagaactcaagcacaaggacctctacaaagagcaaaaggagaccagagaaaaaatcaagaaggagatcatcctccatggaaaacctggccttatggatattggatacgtgatatattatcacaagccatgcaaaagtccgttagctcagaagccatctagcagaaag

SEQ ID NO: 106065 - DNA, 468 bp, Glycine max
  Clone ID: PAT_MRT3847_66794C.1
tggtgatattgtggatttggagatcacaaaggaggtggttacagagaataaagaggactacaatggcaatgctagtggcaaaactcctgagaaagatgttgttgtgtcaaagaaggatgaaaaagtcattgaaggatcatccaaggcaactcctaagaggagcgaaaagggtgtcaaaaaagcgaacagtgctaattaccggacagggaagcataggaggcaccttggtttgaaggcgatcgaggagcgtattgctgcagggttagataatcctgacttgggaccatttttgctgaagcaaacaagagatatgatctcctcaggtgagaatccccgaaaaacgcttgatttcgctcttagagctttgaaatcatttgagatttgtgcagatgggaaaccaagtttagatatggtaatgtgcctgcatgtcttggctacaatatactgtaatttaggacagtacaatga

SEQ ID NO: 106066 - DNA, 1373 bp, Glycine max
  Clone ID: PAT_MRT3847_66795C.1
aattcggctcgagctttctttcaagtttcatctcttttcctcatttcattcttctaactttctctccgtttacttcacttcatgacggattcttctcctcttatccctccctcaccggtcacagtcaccgagatcgacctcgaagagggaccctccgaacaaattcaatgccggatttgtcttgaaactgatggtagaaatttcatagttccttgtaagtgcaaaggtacgtcaaagtacgtacatagagagtgtttagatcattggcgagccgtgaaggaagggtttgcatttgcccattgcactacttgcaaggctccataccatttgcgtgttcatggtgcttatagacaatggcgtactttcaaatttcggttttttgtaacccgagacattttgcttatatttctggctgttcagcttgtcattgcttcacttgcttatttggtttaccaaatagatggttacgagaagtattggcttcgtcttgtttggggttttggtagtgagctgagcttttactatatatgtggagcactggtgttttttgtgttgcttggcctgtctgggtgctttattacttgttctgatccaagaattcgcagtgatttgggtcagccttgtcgagaaatatgtctttgttgctgtcaacctggagtttgtgctgatcgtcatttgcatggtactccttatatgtacggtactccttatatgtcgactgattgcaatgcatgctgtgagaattgtggaactgaatgctgtggttgcacttgcatgagaggttctgaggacgaagcagggctaccattattattcataatggttttgttttttctggtactctttgctgtacttgggatattttacagtgtattagtggctacaatgataggacaacggatatggcagcgtcattatcacatacttgcgaaaaggatgctaacaaaggagtatgtcgttgagaacattgatggagagatagcagggcctaattggactcctccacccctcccccaggagcatgtacggcagctgaaaacattgggcctcctatgagtttgaaggagtcatctacctgctgaggagaatgacagtggcggtaaactgacaccttgcttcgtagtttggcccttgtcagggagatatgcagttaactgataaaattatgagtcacttaagtgactcagatcacttaggtttgacttggataattgttctagattgtggaaatttatgaatttctgttttgtctgcaaatgtaaagaaatggaagggaattctaagaatatatctaattacaaatgtacagttcaggatcttgatatgttttatattagcattaaatcaaccttgctatgtacggattttctctc

SEQ ID NO: 106067 - DNA, 499 bp, Glycine max
  Clone ID: PAT_MRT3847_66796C.1
gcacgagaaatatcgggagcagaagaggctacaagaacaacacgctgtagagcaagaggcactttttggttcaaggtctgcaacaaaaaagcctctgggtcagagcactcatgctaacaccatacttgggacaccaactgggcgtcgaatgctttcgacgccttctggccgccatggaaactcaggaggaaaggaccgtagagaaagtggcagagtgaacagcataattccagtgaactatgttgctcttccaaaagatgactctgtttctagggggaattaagggctgccctctaatttgactcgtgaatcagtcagctttgaaaatgcgcttattctacaagctctattatgtttccttctgaaacgttatgcattgtaaatttggtaaatgacaaatgaatgacccattctaggcttgatatagaagattgtacaagtcacgggctaaatagattacaaatataaaaagaagtcattcttgttcaaaaaaaaaaaa

SEQ ID NO: 106068 - DNA, 242 bp, Glycine max
  Clone ID: PAT_MRT3847_66797C.1
tccattcgtacgaacgggtgagaaaggtccacagatagggagggttttgctctggggtggtgggaaatacagcacagtgcgacctctctacactcatgatcgactcctttgagaagacacaaggaatgtctagctcattggaagttcatgttttactatctttaacagatgttggcttacaagacatacatgaaacatccttctcttgtatgaatggatgaatcttttcatacttttttagc

SEQ ID NO: 106069 - DNA, 429 bp, Glycine max
  Clone ID: PAT_MRT3847_66798C.1
agaaaatatagatggtagctatatgttgcagttcttaaattcatgttatattgttgggttaagctttgaaattgaaatagtacatagtttgattattctacatttagcttcagatccaaatattaacaaaaacaaaacgataccctgttatttctgttaacttgtaggttagttgcatatgctctccaatctctgggtctggagaaaggatctgcaattgcaattgatatgccaatgaatgtcaagtctgtcgttatctacctagctatcggtcttgcaagttatgttgttgtatcaattgctgatagttttgcagctagtgaaatatcaaccaggcttaaaatatcaaaagcaaaagtaatatttactcaggttgactccctaatttcctttgatgatttatcactcttttttttcatgtttttaatg

SEQ ID NO: 106070 - DNA, 251 bp, Glycine max
  Clone ID: PAT_MRT3847_66799C.1
aactcacgaacatttgatcaaatggctgactcaggaccggccgatcgtggaggtgctggaagaggttttggaagaggacgagagagaggaagaggaggacgcggaggtcgtggcggcgacagaggaggacgcggacgcggaggagctggcggaggccgtggtggcagacgcggagacaaggaagagggaggagcctgggtgcccgtcaccagactcggccgtctcgttgccgccggtcacatcaacaagtt

SEQ ID NO: 106071 - DNA, 105 bp, Glycine max
  Clone ID: PAT_MRT3847_6679C.1
gtgattgatgttaacacgaccaacacacctcccctgccaccagcatgttgtacttacgggagcggatgcgtcatgggtggcggaggctgttgaagacatggacaa

SEQ ID NO: 106072 - DNA, 507 bp, Glycine max
  Clone ID: PAT_MRT3847_667C.1
ctacgattccgttccaaggaaggtttcccgtcatcactgtatgacgtcctccgttctttgggggggggggggggatagtttataatggctcatacagtgtgtaattttcggtagtggatctctaacactctgacagtacgcagtgaggatatatgtgggtacccgccatgctgatgacgtgaattgatgccagcgtgtgctattttgattgttggcaaaattgctggaagtgccgcagttccatgcggctttgtgtcatgagtaactggagtttttagtccagtatgccttcattgcgatttgccggaggccaaccgtagagtgaagaggtacacgggcatgtaagggcccattcagatgcatcattcgattcaaatacgctgggattttgacagcgtgaagtaatgctgcatcttggaatatagggatccccacagattagtgcatgtcccagttcacgccgtagagtattttgaattatactgtaggtctgcaggtggtaatagt

SEQ ID NO: 106073 - DNA, 585 bp, Glycine max
  Clone ID: PAT_MRT3847_66800C.1
tttgattacctcttgcctttgtaaaagatgctatttattgtcttaactttctacaattcttgttgagtataagctcctcatgtgagtattgaatcttttagcatgcaggtcatgcttcttggtttcgtgcttctgggacgttctctggaggaaaaggcaaggattcaggcatctagcgatatgaatgaactgcttgtaagttgcaatgtcgtgcacctctgtcatctgataatattccagctaaataagatttgtataacctgattatttgctatctggagtcaaatataagatttcatctgataatgtttacaagaacaaattattacacattttgtagggttctgttaataatacatcattaacagggtttgatgagactttagcattttgaagcctaactgctccaacatcattgaaacagacttttgatttaagaatatgttccttttgatgattaaaaatttaaatggcctttgcaggttacagcacaaatgagactatacattggttttacattttaaaatccaaaatcttatttcaacttccgcttccttccattttctgatcaattattatctctta

SEQ ID NO: 106074 - DNA, 386 bp, Glycine max
  Clone ID: PAT_MRT3847_66801C.1
ggacaaaaagggtttttttgggggcaaaaacccccgcaaaaaggaggaaccaaaaaatttgggggaaagcccgttctaaaaaaaaagatttaaaaaacccaaaagttttttttttttccccccaaagtaataaccccagacacaatgagggtgggaaaaatcccctccacacccttggggaagcgcttaagaaatatatatatatttttagggccacttggggaggggatttttccgcccctttgttttgggggggggtgcaaattatgtgggggaattttctgggggccctggggacagccctgtgtggggagaggggcctaaaaaaaaacaggggcaaggagggtctctaaaaaaaaaaaatcgggggtgttggggtaatgggg

SEQ ID NO: 106075 - DNA, 302 bp, Glycine max
  Clone ID: PAT_MRT3847_66802C.1
tactgatcatcttacttcgctcattctcttccaatctcattccattctgcccatttaattcctcttcaagttgcatactttatttctcatcgcatattcttataaaatgtggaacattgtgcgaccttgtccaactcactctgtgcattaatcttcaccttatttgcatggttatcgattctgtcgttgtcttaccccgtttcggtcactatttctaactaaattacacacataacacaccatcctattttaacaaatataatttctttgtcatgaatcaatacacacctatctttttttat

SEQ ID NO: 106076 - DNA, 315 bp, Glycine max
  Clone ID: PAT_MRT3847_66803C.1
atatcaaaaataacactcgacctaattcagtttatttattaaataggtggagggatccctctgtacacaaaaaactttattatgcacacccttagggaattgactaacatgtctaacaccgaccctctatctcaatctaagtccctctacctaaaaggaaaggactagagccccgattaaatcaaaaagcctcttctacaagggtaaaagaggaaagataccaaatggccttcttccgctccatacattagcgccttctaccttgacagctccttggcgactctgttgtgtggacacttcaatttataaaagacc

SEQ ID NO: 106077 - DNA, 204 bp, Glycine max
  Clone ID: PAT_MRT3847_66804C.1
ataaccaaaaaggcactctggcttttttaatcccacgggtaatgttaaaggggaaatggattacttgtttttaacataaagagcctcgacgaaaaaaaaactgaatcctcccccccaaaatgggggtcgccaccatggcacaaaataaaaaggccccaaaacaaaaaaacgttttactttttattggaaaaaaaaatcccaaaa

SEQ ID NO: 106078 - DNA, 241 bp, Glycine max
  Clone ID: PAT_MRT3847_66805C.1
ttaaacccttttctcatctcctcaaaagttcctacctatattgctggaccgaggtacaattagaatcagtcaccatgaatcttctgctttacctaaacgataccggtgacatcgcttacacctctaaaaaagattcgcccctaaggctacctacacaatgtgctcatccaacctgtttttcacctgatgataaacattctaggcatgagtgttcttctgaccaagcgcttatgtattgtta

SEQ ID NO: 106079 - DNA, 225 bp, Glycine max
  Clone ID: PAT_MRT3847_66806C.1
cagaaattatggaaattcagaaaaatcaagtaagttgggcctttgttttgtttctttcttatacagcattccttttgctcctttttatttttcatcagtcattgctaagtatttgcgttgatcttaattacatacaagtgcctacttttcctaggatcaagaactgtaaccttatgcacaatatcatgacaaaattggttaatatatcatgaatcaaggtttagt

SEQ ID NO: 106080 - DNA, 351 bp, Glycine max
  Clone ID: PAT_MRT3847_66807C.1
acaaaatagatttgcctacatgcggctctttacttcaaggcagaccggcgaggtgaccttgggcttcgcttctcttcatatgaatcctgactgcattttcgatgctgaaaaattgatcccgagatgagctatagaggctacatgcacgcataacgctgacctcaatgacttggaacacatggtggaatatgctacaagatctcttgatggtggcgggacaccaaagccctctttagatatgcgtgagatgacgtgcgatatacagtgaggctgaccgatttttatatccatggcaggacccacttgggagagaaggtgacagatacagcacaccagggcccaacaacagat

SEQ ID NO: 106081 - DNA, 1800 bp, Glycine max
  Clone ID: PAT_MRT3847_66808C.1
cggccgctcgagccggcctggctcgagcagaatcgtcatcctcaaaatttatgattatattttctttctctacttcgtcactacctctttctcatgagagagtatgttactgcgcaaagaacaacaaactaattaggtactgaccatttccgtctatatataaggccaataacccaacacgttctataaacatatagtgactaacctcccactgaagagtaattggtggattccagcaatggccgtggttcatggcagttgggtcaagcttgatcaaagaggagaagggcaaggagcgagaagctcacatgctatagccatagtagcacagaaggtgtatgcatttggtggcgaattcgtgccacgtgtccccgttgataacaaacttcacgtgttcgacctagagactttgacttggtccgtggctgatgcatcaggggatgccccaccgccacgtgtcggtgtcacaatggccgtagtgggagaaaccatatatgtctttggtggaagagatggtgaacacaaagagctcaatgagctctattcttttgacacaagggccaacaaatgggccttgatttcaagtggcgatattgggcctcctcaccggagctaccactccatgaccgcagatgaccaacacgtgtatgttttcggtggttgtggggtccacgggaggcttaatgacttgtgggcttttgatgttgttgagaacaagtgggtggagtttccttctcccggtgagaattgcaaggggagaggtgggccgggcttggttgtggctcgagggaaaatatgggttgtgtatggcttcgctggaatggagatggatgatgtgcattgctttgatccagcccagaaaacttgggcccaagttgagactagtgggcaaaagcccaccgcccgcagtgtgttttgcagtttcagtgatgggaaacatataattgtgtatggtggggaaattgatcctagcgaccaaggtcacatgggtgctggtcaattttctggtgaggtttatgcattggacatggagacactagcatggaagaggttggaggataaggtggatttcggtggccatcctgggccccgagggtggtgtgcttttgccagagcttggcggggcggccacgaggggttgttggtgtatggtggcaactctcctagtaatgataggcttgatgacatcttcttccttgctctttctcaagggttggtgaaatagtatgatatggtcgcataatctatgatggattctaaatgtgtttatgatgtcaatgagtggacaatgacatgagaacttatgaatcgttgatggtcaatttagtagcttgtgaatgttcttgcgtagtgaaacaaattaggaagtgtgtgcttaattctcaattagatgatatgatgaattaaaaatatatttatcaccctgtgagaggacaatggcatgggaattagggaatcttttatacttattgtatgtagcttgtgaatgtacttgtgcttttgtactggaataaattattaagtgtgtgatcaattctcaaaaaaatgatttcgtggctcccaccgattcgaccacgaccgccattaaaaataattccatttccaggaactaacatagttccatttccaagacctccaaacatagttccatttccaagacgtcgtcgctccaaattagataaccatcaaacagatgctggaactcttggagacctaattatacttccacccttttccccaagacctccagtagatcctaacataatttcctttccaagacctcccaaatagttccatttt

SEQ ID NO: 106082 - DNA, 472 bp, Glycine max
  Clone ID: PAT_MRT3847_66809C.1
tttgttttgcagggtcattaaaatagaatagtagattgagataaggaaggctaaaaaatatcatacacagtgcattattattactctttgtttttttttttttcggaaggcataaaatataatatattattgagataatcaaaacagtacaagtggtactgaatgaaaaggaaatacaaagcaccactggtgctgcctcccaaaataaaacccaaactaacccatccataaagacatctccacataggttaaccaaaggactcctttatattagaggaccaatggttgaagctagtgttgaagcctttctctctagcttttagccaagaccaagctaaaaacatagcctcttccatgactttagaggaatcaaattgttttccttgaaagatgagggtattcctatgttaccatatagtactagttagagccacccaccacccacaccatctgctatggtttatattagctc

SEQ ID NO: 106083 - DNA, 235 bp, Glycine max
  Clone ID: PAT_MRT3847_6680C.1
tcaagatggaagtgattagatctcaaggcattcctgctgacgatcttgcaaagcgagctcatgactttgacaaagatctagctcatgaaagcctcaaggattaaattcctgccgttgaccccttatattctactagggtaaataagtttgccgaaattatgatgcttagacccagtgtcgttggtgatcttaaacttctaactgacgggaagttatctgagggtaagcatattcc

SEQ ID NO: 106084 - DNA, 468 bp, Glycine max
  Clone ID: PAT_MRT3847_66810C.1
gccactcttacgcttatactgtcgaaaatacccttcactatgtcccaggtaatatctttgactacggctaccacgcgtgagccgtatcaggaatcttgcatttaggggcgattaactgccaggctacctgtaacaaggatgaaacttcccactctcgtgcagttatcgacccgacctctgatactccgaggaccatgactggccagctggacccgagatctcctacatgtctgaggtccagctgcaatcagctgttgaggtgattctgatcggaacgcacatgcatgaagccaattactgcggacacaggtgttacattgactgaggctcttctaacgcatgacaccacggtttgagaataagggtcttgagaatctcaactttgctgagcgaacatcgtccaacctggattgtctactgatgctacactatcatggtccacaacctaagatacgtaatcctccttac

SEQ ID NO: 106085 - DNA, 447 bp, Glycine max
  Clone ID: PAT_MRT3847_66811C.1
tgttccgccaacaaatcagttctctgatcagcatgtcaatggtcagaagggtgttactgttgaagccatggtcttagattttttgcatcatcccgcaaacagctcaaggaatgagggggtccatcgtgatcatattgcacaacatcttggaatttctttggataagctcatgctggctgttaaaaatcttattgatgaaggtgccatttatgaaaccataggtgatcactataagtcaatcatcaatggttgataccttgttggataaggacaacgattttgttagagtatgctaactctgcgtatgcattctagtgctgttacacaagcaaaacaacagttctactagattttgatcgacttgtttttctactatatgttaatattatgaaccggtaatacgtaacaaaatatatataacatcatatggaatgtatctgttgtacg

SEQ ID NO: 106086 - DNA, 225 bp, Glycine max
  Clone ID: PAT_MRT3847_66812C.1
tctttttctttatccagtggaacaccctgaaaaatttgagaagtttggaatgtcaccttcgaagggagtccctttttatggacctcctggttgaggtaaaacgcttttggcaaaagctattgcaaatgaatgtcaagcaaaccttaattagtggtaaagtgttcctgagctacttaaccaatgtggtttggaaaaaagtgaggcttatatgtaaggaaaattttt

SEQ ID NO: 106087 - DNA, 259 bp, Glycine max
  Clone ID: PAT_MRT3847_66813C.1
aaggcaaagactaacattaacaaaggagaataaaaaggaaaaaggaaagctaaaatggaattagactacatggccaagaatggcatgccccaagcttccgggaatagcaccagaaagcaccagaattcttgcactttgacaacaaaactgcttccttcttcaacattgcatggtttaaaatcaagggcccatttgtgaaaagagcaaggggagaaattataataccccccatgaagaaaaaggaactctttcctcactc

SEQ ID NO: 106088 - DNA, 375 bp, Glycine max
  unsure (1)..(375): unsure at all n locations
  Clone ID: PAT_MRT3847_66814C.1
ctcactcccaatttgaagcttaaaaagcagtcagtaccaaccttcctttctgttacactgcagattctctaaaccactaactcttctcatccatcaacaagagatgaaaggcatagacatcttctgtgcatcacaggcctcaacagctatatgtcttagcatggatcaaccctcttcctcctattcctcttcttcatcttccatttccaacactgctcaatttggtggcagagccattgaccgccacnaacccatcatcacagatcctaaaagaccccctcaagagaacttcatttccccaactccttcttctcagtccccaaattgagccaaacctttgcaagattatctcaaaaggacaaagaaaaactccac

SEQ ID NO: 106089 - DNA, 313 bp, Glycine max
  Clone ID: PAT_MRT3847_66815C.1
ctacagaagcatgtgtatagttactcgcctgactagcgagtgctgcttcttcctctccccgaaattcggatagccaatagggagggatggatacccgctccagctttctgaaactgcctaaatatctttcattctgctaagaaaccgaaagatggaaaacgggaggagaggattctgacttggagagtcacacctttggttggcccactgaagatgaactcgactgtcagaactattacgtcgtcgtctgaatgtttaaccctacctaaaggagatgctggtactggctctggagaggcaagctcctctgcag

SEQ ID NO: 106090 - DNA, 380 bp, Glycine max
  unsure (1)..(380): unsure at all n locations
  Clone ID: PAT_MRT3847_66816C.1
gcgccaccgaagagcanggacgacagaacttgcactgcagtaaaatgtatgagccaagggtggtgacgggaggtctactggaggaccctctggcggcggcgtcggtgctggattctggtgctgacgtgtgattcccttctgaatatgaccaatagtaagaagaagagaaccggtatgatcgcctttagcattctctttttgatgaggatcctcttgactctgactagccgtaaccttcttgttcttaaggtcttgataagaatcttaactgtacctcttgtactgctggtaagcatccctttggcatcttccctatcttccttctcatctaattaacatctgcaaccctacgcgcctctgaccccgtcctctacatatat

SEQ ID NO: 106091 - DNA, 493 bp, Glycine max
  Clone ID: PAT_MRT3847_66817C.1
gggccttaaaaaaagggggagaccaaaggaaaaattttattaacttcataactaaagggacaaacccttacaatatatcaccaactaaagggggaaggtacccaggggatcactctttgggggacgggggaacccgggccccaattttggccgaaggggaaaaaacgggaccccaaaagcaaagcttttttaactattttccaacatcaaccatgcccaaggggggacccctctgcaatactagcatgagccgcagcccctattgggagaacggcttcatcaatcatgaaatatggaaaagggcccgtatgaaaaaaccccaagggttcattccttacccccatggaaaaaaaagctgggggaaccctctcggagtaaaaagaaaaatcttcagcccccctcatagggggaaccaccctgaaattcttgggacccagcaaatcaagggacacctttttaacaggctcaaacattggggcatcattaaccgggg

SEQ ID NO: 106092 - DNA, 760 bp, Glycine max
  unsure (1)..(760): unsure at all n locations
  Clone ID: PAT_MRT3847_66818C.1
ggctgcgagaagacgacagaagggggccctgtgttggcaggacttccacaacacgagggaaaatttagccttgagcctgagctgccggtgatttcaagtgaggatctgccatggcttgtgggaacagacgctgcaaggaaagcaagatttaaattttggaaaagaactttggagagatcaagtgctctgaaatggctcctggtgaattcctttcccgatgaaagcaaactggaattggcaaacaacaagaagtttacagcttgtcgacgagtgttgccaataggccctatttgtaattgtaggaatgatgagttgagaaaaagtgtgagcttttgggaagaagatatgagctgcttgaagtggctagaaaagcagaaggccaagtcagttgtatacatctcattcggaagttgggtgagtcccattggggaagcaaagttgaaaaatttagcactggcactcgaggcttcagggaggcctttcatttgggtattgaggtccacttggcgtcatggcttaccacttgggtttatggaaagggttgtgaagcaaggcagaggcatgatggtttcttgggcaccacagaatcagattttgcagcataactctgtggcttgatatatcacacactgcggctggaattccatattggaggctttacagttccaaaagaaattgctttgctacccggtggcaggggaccagtctgtcaactgtgcctatgtngttcaggtttggagggtagggttaaaaactcaat

SEQ ID NO: 106093 - DNA, 290 bp, Glycine max
  Clone ID: PAT_MRT3847_66819C.1
ggtgatagagaatgacgtaaccgtggtccaaaatcattggtgtcccgtggtgaatgcggggttttcttcgcccaagagagtggttgtggttggttacgctcttactactaaaaagattaagagctttttgcagcctaagcttgaaggtttagctaggtaaattattaaccgaaacattcctttcattaatcgcaaaccaaaaaccgctaattaaattcatcatatcttgttccgatttttaatttctttttcaaagaaaataaataaataattcactgaaaatcgtttta

SEQ ID NO: 106094 - DNA, 1389 bp, Glycine max
  Clone ID: PAT_MRT3847_6681C.1
ggtgaagcgcgtacccaggcaccgaccttcctcacccaaccccaactgccacttccgtcacggctgcgagaagacgacagaagggggacggttaaagctttctcatggctactacctttaccctcgcaacgctgtcactaccgtcgtcttctcgtgtttccattggcggagctccgattcgccaccaccgttctccgaaccggatcgggttgttgccgcctctcaaatgctcctctttggagccggaaaccgccccgcctcctcccttcgactggactcacaagttgatcgccggtgtcgccggcgtcggattcctcgaaacctcgtacctcacttaccttaaactcaccggcgcagacgccttttgccccgtcggcggcggcacctgctctaaaatactcgacagtgattacgccctcgttttcggtattcctcttcctctgattgggatggctgcgtatggcttggttgctgcacttggtgttcaattggcttcgaagaattttcgttttgggattgagaaaccaactgctgaagcagtgttgcttggagccacaacctccatggcagctgctagtgcgtattttttgtacattctaaccaccagattctctgactcgtcttgctcctactgcttactttcggctttcttgtccttcaccttgttctttgttacactcaaggatattggattgcaagaggtgtctaaacaactgggtctgcaactgcttgttgctagcttagtgattctctcgctgaacgcatcctatagcaattcaaaatctgcctcctcaagcctggctgaaaatgatcttccatattttgcaactgagattacaactccgtcaagccctttcgcactatctctagcaaggcatttgcactccataggagctaaaatgtatggtgctttctggtgttctcactgtcaggaacaaaaagagatgtttgggcgcgaggcagccaagcagttggactatgtggaatgctttcccgacggatttcggagaggaactaaaatgatcaaggcatgcatagatgccaaactagaaggtttcccaacgtggattattaatggccaggttctaagtggtgaggtagaattatcggagctggctcaagtttctggttacgaagaatctgttcaaccttaaggctgattgagcaacaaatgtagcattgtagaatttgtagtagcacatacattattgtacagcttatagatgagtcgtttgtcctctgtaggcgtatgtgacgttatggatccgtttaatttgcatatatttaagggccaagccaacacaaactacttgattcaaaaaaaaaaaaaaaaaaaaaaaaaaaaaaagcggccgctcgccgctctagaggataggtacgacgcgtgca

SEQ ID NO: 106095 - DNA, 206 bp, Glycine max
  unsure (1)..(206): unsure at all n locations
  Clone ID: PAT_MRT3847_66820C.1
ancnactaatttctcccaccaccaccaacaacctaaaaagaactcttattaaaaattctagacccccccccaanccccacaanacataaaatattctttcttctaccttaatcctaaccacacccataatattaccccacaataaattactattccctcccatactatccacaacatactaaccattaacataaaaaataaaacac

SEQ ID NO: 106096 - DNA, 1515 bp, Glycine max
  Clone ID: PAT_MRT3847_66821C.1
gagaactcaagaaatggagagaataacagagaatggatcagatagtagtgtgagtttgaggagaaatacatctaacaatgggcgtcgagggttgccaatgatccaaacggattccgaagtgtgccacgacgacagcacccctctcagcaactccaatccatcaggtttatgtgaatgatcaatttctgaattgggatccagaacacagaatcaaagtccgaatagtatctgcaagagcttatcattccctatttatgcacaatatgtgcatccgacccactcctaaagagctagaggaatttggaactccagacttcactatatacaatgcaggactgttcccttgtaatcgttacacacactacatgacttcatcaactagtattgacatcaacattgcaaggaaagaaatggtcatccttggcacacaatatgctggggaaatgaaaaaaggtctctttggtttaatgcactacctcatgcccaagcgctatattctctccctgcattccgggtccaatatgggcaaagatggcgatgttgcactcttttttggattatcaggtactggaaagacaactctttctacctatcagaaccggtatttaattggagatgatgagcattgctggagtgaaaatggggtgtcaaatattgaaggaggttgctatgcaaaatgtgttgatctttcaaaggataaagaaccagacatctggaatgccatcaaatttgggacagtactcgaaaatgttgtttttgacgagcatacccgagagagaacactcgtgcagcatatcctattgagtacatacccaatgctaagataccgtgtgttgctccccatgcaaagaatgtcatcctactagcttgtgatgcatttggggtgctccccccagtaagcaagctgaacttggcccaaacaatgtaccatttcatcagtggctacacagccctggttgcagggacagaggatggtataaaagaaccacaggctacattctctgcttgtttcggggcagcatttataatgatgccccctaccaaatatgcagcaatgctggccgaaaagatgcagaagcacggggctactggatggcttgtcaatactggctggtcaggaggaagtcatggattaggcaatcgaattaagttagcgtatactaggaaaatcattgatgctattcagtctgacaagaagacctaccaagatacactcttgaaactagcaagcctattcaagaagaattttgatggattcacgacctacaagataggaggggatcaaaagttgactgaagagattgtctctgctggtcctatattctgatgagagcacttccaatttagcgaaacaaaaatgaagttcaaaagcatttggtgattacttctacttaaaggttttcactgtatttagcttgcttgactataagacgatccccttattattgacaagttcgacaatacgtaaatctgttaatttgccagtgtttaatgattgagaatttcggacttgtc

SEQ ID NO: 106097 - DNA, 117 bp, Glycine max
  unsure (1)..(117): unsure at all n locations
  Clone ID: PAT_MRT3847_66822C.1
cataatcatggaggggtctcacatccgggntgttggancntnnccgngttcttccatgctttnncgctgccttcgctggctgcctcctcnagaaacttggacanaataccctttgat

SEQ ID NO: 106098 - DNA, 2426 bp, Glycine max
  Clone ID: PAT_MRT3847_66823C.1
gagaactcgagaaaggaagattaggctttcacaacacctcagcgtcactgtaccagttggaaatggagacaataacagagaacggatcagatggtgtgagtttggcaagaaatacatccaacaacgcccgtcgagggttgccaatgatccaaacaaacatgaagccaacggattcggaattccaagtgtgccacgacgacagcaccccgccggtcagagcccaaaccattcacgagctccattctctgcagaagaaaaagtcaaccccttccactcccctctcagcaacgcaaggccccttcgccactgtttccgatgaggaacgccagaaacagcaactccaatcaatcagtgcgtcgttggcgtcgttgacgagggagtcagggcctaaggtggtgaaaggagacccagccactaaggcagagaaggggacacatgttcatcaccatccgcaaccacattactttgcttcaacggcgtttgatgtcagtgacagtgcgctcaaattcacccacgtcctctacaatctctcccccgctgagctgtatgagcaagcgattaagcacgagaaaggatcattcataacggcaacgggagcgttagctacactttctggagcaaaaacgggacgctctccccgagacaaacgggttgtcagggacgacaccaccgagcatgacctctggtggggaaagggctcgcccaatattgaaatggacgaacataccttcttaatcaacagagaaagagcagttgattacttgaactcccttgaaaaggtttatgtgaatgatcaatttctgaattgggatccagaacacagaatcaaagtccggatagtatctgcaagagcttatcactccctatttatgcacaatatgtgcatccgacccactcctgaagagctagaggaatttggaactccagacttcactatatacaatgcaggacagttcccttgtaatcgttacacacactacatgacttcatcaactagtattgacatcaacattgcaaggaaagaaatggtcatccttggcacacaatatgctggggaaatgaagaaaggtctctttggtttaatgcactacctcatgcccaagcgcaatattctctccctacattctgggtgcaatatgggcaaagatggcgatgttgcactcttttttggattatcaggtactggaaagacaactctgtctaccgatcataaccggtacttaattggagatgatgagcattgctggagtgaaaatggagtggcaaatattgaaggaggttgctatgcaaagtgtgtcgatctttcaaaggataaagaaccagacatctggaatgccatcaaatttgggacagtactcgaaaatgttgtttttgatgagcatactcgagaggtagatttctctgacaaatctgtgaccgagaacactcgtgcagcatatcctattgagtacatacccaatgctaagataccgtgtgttgctccccatgcaaagaatgtcatccttctagcttgtgatgcatttggggtgctccccccagtaagcaagctgagcttggcccaaacaatgtaccatttcatcagtggctacacagccctggttgctgggacagaggatggtataaaagaaccacaggctacattctctgcttgtttcggggcagcgtttataatgatgcaccctaccaaatatgcagcaatgctagccgaaaagatgcagaagcatggggctactggatggcttgtcaatactggctggtcaggaggaagttatggattaggcaatcggattaagttagcgtatactaggaaaatcattgatgctattcactctgggagccttttgaatgcacagtacactaagactgaagtgtttgggcttgagatcccaacagcactagagggagtcccttctgaaatcttggaccctgtgaatacttggtctgacaagaaggcctatcaagatacacgcttgaaactagcaagcttattcaagaagaattttgatggattcacgacctacaagataggaggggatcagaagttgactgaagagattgtctctgctggtcctatattctgatgagagcatttcctatttagcgaaaaaaaaaatgaagtccaaaagcattcggttgattatttctacttaaaggttttcactgtatttagcttgcttgactataagacgatccctttattattgacacttccgagacaatacacaaatctgttattttgcgagcgtttaattattgaaattttcggccttgtcaggctacagtccataaaaaaaatccttaaaccattcatcccctcttcaattcgagagggatacttgctagttttcagttgtcactgctttcgtttaagaatggctatcccccataatggtacttttacccatttttaactaatatgtaatgca

SEQ ID NO: 106099 - DNA, 259 bp, Glycine max
  Clone ID: PAT_MRT3847_66824C.1
gatcacgtaccactcgagtcactaggccaaaatgctgatgttcaaagttctctaatgagccttcaagtcggatgcacaaaacaagttgttacctgcaaaaactccaatgctcaagtcactgagtgtgaaattacagtcgatgaattataaggtttgtttggtgattgaaaataaaagggggagagaggtcattagtttgaattcctcttgctaacatcctaacaaaactaaatattaacatttgtcgaaaaaaaaaaaa

SEQ ID NO: 106100 - DNA, 424 bp, Glycine max
  Clone ID: PAT_MRT3847_66825C.1
gggttccaaaaagaaaactaccccacatagaacaaatgaaaagagcgagggagcagggatgggagcgccaaagaaagagagaaaatgcatgggtgggtcccacacaagaaagagaaacaaagagattatttttattgatagaaaaagagaaagagagcaatgcatgcgtgtgtgggcaccagaaggaaagaaaaagagtgagagactttcctaactgacagagaatgaggaagcacaattggcaaaggaaggagaaaaccctaaaaggaagagagggatagctcgaatggaaatagagagagagaacggaatcaagtaccgcgagaacaaaaagccaccagaaaacaaaaaagaacactacagaaacacggggaagctgcctatgagaaggggtacagatgcttctcatgggtggaaagagcta

SEQ ID NO: 106101 - DNA, 488 bp, Glycine max
  Clone ID: PAT_MRT3847_66826C.1
cggaaacacatcgcgcaagaaaaacaatatccatccccatgtataatttatgatattctaggtaggcaattcctataaagatataggaggttcttttttagcaattttttttcttcataaaaacatcgattcatatatcttaacatatattaagtgtatcatacttttttttcattattggtataaaatatcaatctattttgtctcatcccaattatattattcacaaaactcaaatctataatcttatttaagagaattgagtttaatatcattcaagctaacagtacttaaatataataagttgctttctctatttatatttaattaagtgagatgaatcacggtaaagaatagcagtaccttataatttatattgatttgagagcttgaaagaggtatatataacacgacactcgcaacaacataaagatgagcctaatgttgtcaataaaattgcttttgtggttcctgtttttgtcatggtg

SEQ ID NO: 106102 - DNA, 602 bp, Glycine max
  Clone ID: PAT_MRT3847_66827C.1
acgacccacgcgtccggtcgccacttccgaacgcgtttctctctgcctcttacattctcgccgtcgctgctaagttcatcagttaggttcgcggcaaaaaaatgataaagaggaggttctacaagctcgatcacggtgatagagaggccttggatccgtcttcttcttcttcttcggactccgagattgaagccgaagccgaagtcgatgcctctgaagaagaatcagaggaagatgtaacagcagaagtgaaaccgaatgatgatgaagctggttcaacttcttctgggtatgcaagtgaggatggttctgccagtgatgttgatgtcaactcagcaggtctgttatttagtgaagatgatgctggagctataaatgaaagacaagtgcttattaacagggagttgctgattaaatgtgatactgaaaagtctaatgtcttggctgaaaagaaatccttaccgacagatacgccatcctgtgtcttaaaatgcaaatcagtatttaagtgcaagatatgtccccgaattatctgtttgtctgaggagactttgggggatcatctgggatgggagagacatgctggatctgggggactactt

SEQ ID NO: 106103 - DNA, 1027 bp, Glycine max
  unsure (1)..(1027): unsure at all n locations
  Clone ID: PAT_MRT3847_66828C.1
ggcagttctagggnttttgggggtgggatttggtgaggtcaatggaggatttggttgaggatgcaaaacgcacggtggaggtgaaggttgaggctgcttcaagggctagagaggaggcaatgaagaaggctttggtggctagaagttctgtcgagattgctaacaatgctttgagtttagtagcaaaaaatagggaggagagtagttgtctgaatctgcctcccaaggtggatgaatcctggtaaagttcttgatggttctgagtttacttttgagttgcatccatgtttcgataggggcttgcccaggatttcaaagagttgctgcttattgaatgcaagttactttgatacttcaaagcggtggacctctagtgttgatttgtcgtgcaagatatcaaaatctaggaatgctagtgatcgtgataagcatgaagtagtatccaacaattctgtaggagcagccttggatagtggttccttaactgatctcaatcttctctacatgggcacaagtggcatggaaactggtttaggcacagctgaatttgacagtgaagggataggggaagaagagctgttgaaggaaggggagggaagctgnnnttgatcggctgataaacttcagtgaagatagtggcatggaacttgatcacaagcaagcagattccccattgcatggggaagaacaatgcattgggcaaccagatcgctatttcttcaagtatagtaggaggtgcaatggccaaccagattctgcattgcatacggaagaacgatgcaatgggcaaccagatcgctatttcttcaagtatagtagggcatgccatccccgtcctgctctccactccgtcgagcattgcagggggcgtcccagttctgctctgctctcggtagttctctgctaggggcagcccggttctgcgttgcgtacggtggggccccgcatcgggcatccagtgcgcgtttgcgaaagtggatattttggaagccatcctagaaaagaacgggtannaacaggtttctga

SEQ ID NO: 106104 - DNA, 575 bp, Glycine max
  Clone ID: PAT_MRT3847_66829C.1
gtatggaaacttattttatttatatattttttttttctaagacatattattatttttacttatttacctttactttcaagaacaggacacgagcgggaatttatttttacactctaaaacaaagaaaggggtggaaaataggacactaagacacagagaaaggcttaatcttgcaacggagctccatgatcaaaattacagcatttcctgcgcatgatgcaagaactcccaccatttacttctaataaaaagtatattgggagtcaactcaataatagcataggattacaacctttgaataatctgcgtatatgctatcatagaaaacgccaagtatgaactgacaagaaggggttcgttcgcgtagaaataaaacaaacatacttacgatcaccgaccatcggtgtaaaacagatgatagaggagccgacgggggttcaattgcaaaaaacgatttgactacaccccaaattacattttgtaaaccagcaataggtgccacaaaacctagcaaacttccaatgtacacctcctcctgaaggaatgctgcgctaatgaaagaatccatgactgac

SEQ ID NO: 106105 - DNA, 371 bp, Glycine max
  Clone ID: PAT_MRT3847_6682C.1
ctcatcctttggcaaaagacaccggcccaagatcgtgtccatggttgaaaaaaatggtataaaaatggtcctatctgagataatgtatgcaatgacaaattcaatgtcaaaaactcagttaaataaatacagtgatccatatactgcccacattcatgaccacagatcagagtgctgtccttagagcatcaaattgagcattactcagatcagactttagaaactcctcttgaaagaagagctagaagccatgctagaggctatgaaggttggtgtagcggtggactttttccaatgacagcaacaatggtatcaaaagggccaatcaaagcttcgctgataaatggcacaccttttacatcatccacgac

SEQ ID NO: 106106 - DNA, 420 bp, Glycine max
  Clone ID: PAT_MRT3847_66830C.1
gatcctctcataaacaaatttacacaacacattattattacaagctgtgaaacaataaagttggaaaaatgtttactataccaagtactaaacttcaacacaatcccatgatgcttagagctttagggacaagtcaaggtgcttcatttcctcttgattagtcttcaaaagactaactccactaatcatatatccactgatttcttcattggtcgctgaattaagcctggtcgttttcaccacatcgaatttcccaacattacctcttgatgttttatgaaaactttccatcgttagcttccctatttaggttgttgatcaataaggggtcttgaccaaccacgatgtccaaaagtggttccaaacccattgatgaaaaatgagaataatttgaagaagcttgtgattgtggagtgagcc

SEQ ID NO: 106107 - DNA, 405 bp, Glycine max
  Clone ID: PAT_MRT3847_66831C.1
cttttttttttttttttttttttttttttttttttttttttttttttttttttttttttttttttttttttttttttttttttttttttttttttggggaaaaaggggccaaaaccaattgaatttaacaaaaagggggttaaaacccttaacggggggggaaggggggtccttcccccaggggcccccgggaggtttccctccccaccaaaaaaaaacccttttccccttcattaaaaggggggccaaaccgttttatgccggccaaaaaaaatttagcagccctccttaaaccctttcccccaaccaaactcaccccgaaaaggggggtaaacaatcccaacccgggttaaacccccccccacgggctcaacccaagggcccccttttttggaagcaagggct

SEQ ID NO: 106108 - DNA, 161 bp, Glycine max
  Clone ID: PAT_MRT3847_66832C.1
aataagttcttatatttgattgtggattatgggttttctttattctgggatgttgggccaacttcttgaccttgatctacatagcttttagggggcttcacaatgagcctgtgctatatgagaaatatgaagatcatgtaaactctttgggggagaaagca

SEQ ID NO: 106109 - DNA, 308 bp, Glycine max
  unsure (1)..(308): unsure at all n locations
  Clone ID: PAT_MRT3847_66833C.1
gnctcgttctctttctctgtgctcaaattggggcctctctctttagggatccaagagtgtcttgaactactccagaaccctctctggattttgacaactttgggtctaggacagcactgacccagaaaagaaggtccaacacgtccctaagagaggggatagaaagaaaaaaatagacactgtacgtataaaagaagaaagaaacaaagatataaggaaaaagggaaaatatttggagtaaggaagatctaaggcgatatataaaactatgaggatttgataataatgaggtgtagaaatattatggg

SEQ ID NO: 106110 - DNA, 425 bp, Glycine max
  Clone ID: PAT_MRT3847_66834C.1
aaaaacccgaaatcccgtaattttccaaattcacaactggtttaaagagtacaaaatgattattatctattactataaacaaggcgcacctgaaacaacacacattttgcaggccttcttttccctctgcctgttgggagaggcacaatgccacaggaataatgaaccttgactagaactaccactagtgcattgcgctaatggggcacaggctttacccaggcctctgcgacagaaacgcgggaaagaaatgctccataataagcccatttggatgataaaatccaacgggaagcccctctgatagcaccacggaggattcgggagattctggaccaacttcttccaaaaaaggtcctggtgctggtgcaaacactgcggcctttgcaaaggctgtggttggaactacaaggggagggaattcc

SEQ ID NO: 106111 - DNA, 745 bp, Glycine max
  Clone ID: PAT_MRT3847_66835C.1
tacggctgcgaggacgacagactctgcaaaaacctatcctgaaacggttcgcagagaggcagcaaaacgctaaagccctaaacccccatattgagctttctccctctctctccgtcttcgatggcaacatctcttctgaaaactccgctcaatgtgttcaacagacaccacaatcacgtcgcattcttctccaatggcacaagtgcaagaagcagtgctccaatttcgcagaagaggagatcgcgtccattccccgtagtgtcaatggcatccacaccggttcaaacttctctcgaaaaaactgaactttcgtccaaaagcaccggtcttccaataatggttaatgcatgtactggaaaaatgggaaaggctgtgattaatgcggcggaagctgctggactgaatgttgttcctgtgtcgtttgggtgtgaagaggagtctggacagacttttcagattggtggaaaggagtttctagtgcatggtccttctgacagggagagtgctcttgcatctgtgcttgataagtatccaaatttgattgttgtggattacacaatacccgatgcagtcaatggcaatgctgagttatacagtaaggttggggtgcccttcgtgatgggaaccactggtggagatagggacttgttgcataagaccgtgtgagattgaacattgatgctggggtgtgccggccggtgggaaaggggggggggggtttagttggcgggtgtggggatggtgg

SEQ ID NO: 106112 - DNA, 403 bp, Glycine max
  unsure (1)..(403): unsure at all n locations
  Clone ID: PAT_MRT3847_66836C.1
gtngcangcacgtcgtacgtaagctcggaattcggctcgagatagatgcatagagaatatgccattgttcatctacgtgatactgatagagccgtggtattttcacagtgtaagcaaattgcatatattcgatgcctcataaaccatcgctgacatgcccacgggagcacacgtaatcccttctgaaaatcaggagaagctgtgttttaagaaagtgatttgggtaatttcttttgtatttacacattattcaatcatattaaaacatgtttttatttacattctatcagttttgattgtgtttccccagtgctcaatgagaataaatatgaaaatcacatgctttttttctgtaaaagaactactttatatttagaaatccaataaacttctcattccactt

SEQ ID NO: 106113 - DNA, 378 bp, Glycine max
  Clone ID: PAT_MRT3847_66837C.1
gcggcattccactttcaaaaacaacacttttgttgttgtgctggcaaatttgatccttttcactggcatgattaatgttttccctcctcactctttctcctctctctaaaatcactatactgttgtaccattcaaattaaagattgtgcgaactgcagagtaaactgcagtagagtgctaactaaccctcagatcaacgaaaaaaagaggtccccttttctcatttataggttttttgtttctcactctgcagtttgtcaaacttgtctctctttatttcagtctaccctgttcccagttccttaccctttctccaaagattttcaaattcgtatttaaagtttgtatctttgcgcagtctctgatctgtttcattcg

SEQ ID NO: 106114 - DNA, 328 bp, Glycine max
  unsure (1)..(328): unsure at all n locations
  Clone ID: PAT_MRT3847_66838C.1
nnnnntnnnnnccaaatgcatgactatctatttccatattgttactgtacatgaagaaggtaatgcatcggaataagaaacaatttcttccaaagataaaagaaagcagtcaattgatgttatcttttggattagctaatttttttagtaaataacactcatacctttaatgtttttctcaaattatattcaatactcctttttctttacattactttaaccccttttctattaacatcgtcacctaacgtcaattgaaatatgggggtggccaaaataccctaacctttttggtaacattggacccctggggttttttttttaaaat

SEQ ID NO: 106115 - DNA, 298 bp, Glycine max
  Clone ID: PAT_MRT3847_66839C.1
ctagtcttggggcgtctttggctttacgagagaaagcccgccataaaaaaaagtctttctcttctcgtcctggatcatattccggtgcgtccacagaagaggaaatcgcaatgcatcttgctcagctggcaaggcgtagcttggagtgggagtgtagcgtgggtaaggtaaggaaagtggccgccagagaggaagccggcctattaagcgcagctaagctaatatgcgccggataaagccaggtgccggaggtaagctctattctattcggcccggagcattgattccccataacgaa

SEQ ID NO: 106116 - DNA, 509 bp, Glycine max
  Clone ID: PAT_MRT3847_6683C.1
gattgatggcaaagaaatatattctttatcttctcccttttttttccacttatagattataaccccttaccaaccagtttgcttgccttttgaaaatgaatcactttatgcaaactggggggggcccaagaaagaaaaataatgacgaaacaagcccgctcaaaaattatgatatttttgactgacaaaaacccacgtgagagaacttgacaattgggggggggcaatacctgtgtggaagaaaacatcaagagccttcataggtggtggataaaatgcaggcattgatctcctgccgagttccatgaagatcactgtctattatgcggccccccgggccaaaacataatatatgtgttgggggagaaacgaccattgttcttttaaaaaaaaacacatattattttttcacgcgccgggcgccattatatagatagattcatgtaaattctgggataaaaaacaagcttatttttaaaaaacactcacaggagggcttttgacttttt

SEQ ID NO: 106117 - DNA, 414 bp, Glycine max
  Clone ID: PAT_MRT3847_66840C.1
ctcacataaagcatcttcctatggatccccctttaaatgatggtcgtccaaaagggatcatacatggatgtccaaactgcagtaattgtgtgaaggtatgtacctttcactttacctttccacattggaacagtcatgactatgtctcctttttgtttgtttgtttacccaaaaagactataagagaggttataaaaaaggatctcgaaattaatggtttgaatagaagtatggtacttgatagaacattatggcggaagttgatccatgtagccgaccccacctagtgggataaggcgttgttgttgttgttgttgttgttgtttgtttatcaaagtcttgaaccaggtaacagcaaggtggcatcctgaggatgctataagagaagttttggaagaagctcctacttttcac

SEQ ID NO: 106118 - DNA, 409 bp, Glycine max
  Clone ID: PAT_MRT3847_66841C.1
tttttcggctgcgagagaccaccgaaggggggggagaatactatggatagtgaaattgacaagaagacgaacctgttctcgggactgaccgacgacatggctttgaacatctattacaaactcgctgacgatcctcgctactgggctcgataagcctgtgtttacagcagattatattacctagttcgggagttgtgttggtagaccaagtgcttacttaccagccaccaagaccggctgtcagacgctgtctccgactcaaatctatacattgacaaactatggttctggtgtcgcggcctgcggcacgtcggcttactggttgacacctgccatatctgactgaaacgggacctaaaggtgtgcaccttacacaaaatgaccgatgattctttgtcgaacatgattt

SEQ ID NO: 106119 - DNA, 466 bp, Glycine max
  Clone ID: PAT_MRT3847_66842C.1
caaaggaccaattaccggaattaaccgatggaatggaaagggtggttccaaaaaccttgggattatcctaaaaaatgggggaaccttttttatttccccccaatccatctatcttttggaattaaaattaaaaaaaaaccatttggaaaaatggttttatttccgtagggctaaaaaacctttggaaaatcctttaaaaaacccttccaaaaaacctttggcaaacccttttggctttttcaataaaaaaagtaaaaaccaattccaattttcccctaaaacctttaaaaccccgaaaggggaaaaatggaaatggttccgttttttttttaagtccttaaaaaggggggccaaaaaaggaggaaaatctattttttgggggaaacccaaaaagggccaggtcgccttccatcccccaaacggtaaaaaaccaaaagttctttttttccataaaaccctttttctt

SEQ ID NO: 106120 - DNA, 276 bp, Glycine max
  Clone ID: PAT_MRT3847_66843C.1
acggcacaaagaaacagggactagggtaaatgagattgatgaagaacaccgtagagcactgtagttgaccgaggatatggctgatcccgatatatccagagacattggatactaccaggaagctatggtacgacagagtactggagtacgaaattttaaagagatggtggaatacttatatgaaagggcaaatgtatacaggaaattaccaataaggagttttaatactacatttagctacactggtacaaaacatgttgatgaaacaactacaaa

SEQ ID NO: 106121 - DNA, 668 bp, Glycine max
  unsure (1)..(668): unsure at all n locations
  Clone ID: PAT_MRT3847_66844C.1
gtccggcaaggccaaggtcatgattgccggtggattcgacgacttctccgaagagggatcgttcgagttcgccaacatgaaggccacgagcaacaccgagaccgagttcgccacgggccgagagccgaatgaattctcgcgaccgatgacgagcacccgagctggtttcatggaggccatgggttgcggtgtacacattctcatgagcgccaagacggccatcgagctcggtgcgaccgttcgaggtatcgtcgctttcacttcgacgcacacggacaaggcgggtcggtccgttccggcaccgggtcaaggtgtgctttctggcgcgcgtgaggtctcgctcaaggagccattactcctgctcgacatcaagtaccgagcgcgacaactcgccttccgacgaaagcagatctcgcagtggctcgagaacgagcacgatctgctcaaggccgagttcgaggcgaagcagggaagcgactcggacgagtggttcaaggctcgagtcagcttcatcgaggacgaggcgtctcgacaggagaaagaggcactcgcaacgtttggtatgctcgagggctcacaccccaacattgcccctctgcgtcgcgctctcgccgtttggggtctggatgccgaactctgtcngtgtcatctcgtgccacggtacttcg

SEQ ID NO: 106122 - DNA, 304 bp, Glycine max
  Clone ID: PAT_MRT3847_66845C.1
ctcgagccgattcggctcgagtggaggacgagacccagaatcggtcctctcagcattcagctggaatgtgctgcaagctgcgctccaagtatatagacccttaatttcttgctatcatgcatcattaacattaaatgctactaattaatttggctttgtcaatttgatttctttttattttgggaaattaattacagaccccaaaaggaaagttagaaaggctttttaatcaacagaacgagggaagtattttcaaaataagcagagaacgggtgcgtgcgttggcccccaccaagaaaagctc

SEQ ID NO: 106123 - DNA, 584 bp, Glycine max
  Clone ID: PAT_MRT3847_66846C.1
ccggaacaactaatcctcctaagcttggttatggagttccccctggattccctaaggccttccaattccaaagtaatttgcgaaaagggttaaggaaaaggttcaaatcaccttggggggggtgggcctggggacccctgagaaggaaccccccttaaccaacttgaaaaacccggtggggaaaaaaaaacttccagggatggcctaataaggcatggaccgaccggccccgaagggaacccaaaaattatggtaaccaaataatccggaaacccaatggattcatggccttcttcatggggaagttaaactaactttggtaagggtaacgtcctttaaaataaaagcctggaggaccagaaccatccggaggaatggtttccctggaaagtaaaggctggttcctaacctccggcctaaaaaaaaaaaaaaaaagggcctataggcgcgcgcgctctataaatctagtgtatcccccgctgtgcgagaactctatatcgcttatctctaccgccgacctctcgagggggcgcccgacacacaactccctctatagagaggcattttacgcgctctctgtgcgc

SEQ ID NO: 106124 - DNA, 1151 bp, Glycine max
  Clone ID: PAT_MRT3847_66847C.1
ccacgcgtccgtacggctgcgagaagacgacagaaggggacacactcaaatccaattctccttttcgtgcacgattccaacttcacccccttactcctgcgatccgaaaccaaatccacttctccaactaatgattccactcccaccgaccaaaacgcgcaacacgttgtaattaaaacgacaccgaaactaatgggcgtcttcagcgaaaacccgaatccggacccggttgtgatccgccaggtttgggcttcaaatctcgaatccgaattccaactcatccgcgaactcatcgaccactatccttttatctcgatggacacagaattccccggtgttgttttccgaccacacctggaccccacaaaaccctacaaccaccgcaacaacaatcgcaaccgccactccgaccactaccgcctcctcaagtccaacgtcgacgctctcaacctcatccaggtcggcctcactctcaccgacgccgccggcaaccttcccgatctcgccggaaaccgctccatctgggaattcaacttccgtgacttcgacgttgcgcgtgacgcctacgcgctggactccatcgatctcctccgccgtcaaggaatcgatttcgcgcgtaacgccaccgacggcgtagagtccacgcgcttcgctgaactcatgatgtcttcgggactcgtctgcaacgattccgtgagctgggtgacgtttcacagcgcgtacgatttcggttacttggtgaagatcttgacgcgccgtaacttaccgacgcggttggaagaattcttgaaaaccgtgaaggtgttttttggggacaacgtttatgatgtcaagcacatgatgaggttctgtgacacgctctacggcggattggaccgcgtcgcacggacgcttaacgtggaacgcgccgtagggaagtgccaccaggctgggtcagacagcttgctgacgtggcacgcgttccagaagattgttgacatttattttgtaaaggatgagcaccgaaaacacgccggtgtattgtatggactagaggtcttctgttaattacaaaaattattaaagcataaaaataataaaaattcatttgattgattgtttaaaaaaaaaaaaaaaaaaaaaaaaaaaaaagagccgctctagaggatcca

SEQ ID NO: 106125 - DNA, 990 bp, Glycine max
  Clone ID: PAT_MRT3847_66848C.1
gtttacgacgtgaagcacatgatgaggttctgtgacacgctctacggtaggttacggcgcgtcaagatcttcaccaccgcaaccgtccctccgaccactaccgcctcctcaagtccaacgttgacgctctcaacctcatccaggtcggcctcaccctcaccgacgccgccggcaacctccccgacctcgccggaaaccgctccatctgggaattcaacttccgtgacttcgacgtggcgcgtgacgcctacgctcccgactccatcgatcttctccgtcgtcagggcatcgatttcgcgcgtaacaccgccgacggcgtggattccacgtgcttcgcggagctgatgatgtcttcggggctcgtgtgcaacgacgccgtgagttgggtcacgttccacagcgcgtacgatttcggttacttggtgaagatcttgacgcgccgtaacctaccgacgaggttggaggaattcttgaaaaccgtgaaggtgttcttcggagataacgtttacgacgtgaagcacatgatgaggttctgtgacacgctctacggcggattggaccgcgttgcacggacgcttaacgtggaccgcgccgtagggaagtgccaccaggccgggtcagacagcttgctgacgtggcacgcgttccagaagattgttgacatttattttgtaaaggaagagcaccgaaaacacgccggtgtattgtttggactagaggtcttctgttaattataaaaattgcataaaaataataaaaattcaattgattgattgtttatttgttggataattttattttgttttgttttatatttttatattcagagattatgaatgtctcctagcaagtttttatgttcattgaatggtgaagctttacatcactaattctatgggtttgtttagttttatattgatgtgatttcaacgtttggtaggagattgcgtgaatcaaagacaaaattactagtttagagatggtgcatgg

SEQ ID NO: 106126 - DNA, 515 bp, Glycine max
  unsure (1)..(515): unsure at all n locations
  Clone ID: PAT_MRT3847_66849C.1
cacgcgtccgcccacgcgtccgctttgactggaatgagaatgaccagtgttattttgagaactagagaaaattcttcttgatttattgttctgctaattcttctatttttattttttttatgtatgtgtatttgttagtgtatacttttgctgtaaaaattcttatactgtgaaacaattataaatgatagtcatcaattttatcatatattgtaattcatgatgaataaatagtgtatgcactgacatgtttgaacagtcatttttgtgaatgataaatttgttgactttgttaaaaaaaaaaaaaaaaaaaaaaaaaaaaaaaaaaaaaaaaaaaaaaaaaaaaaaaaaaaaaaaaaaaaaaaaaaaaaaaaaaaaaaaaaaaaaaaaaaaaaaaaaaaaaaaaaaaaaaaaaaaaaaaaaaaaaaaaaaaaaaaaaaaaaaanggggggggnnnttttaaaaaaaaaaaatttaaagggggggggttggaaaattattttttttttttttgg

SEQ ID NO: 106127 - DNA, 1056 bp, Glycine max
  Clone ID: PAT_MRT3847_6684C.1
cgttcatccgtccgtccggagaaacggtgcgattgaagttattaaatttttcaggcaagaacacgagtgaaatttggatattgtactttgttggttaggataaatttctgtttagggtgcttttagtttctaatcaatttcacttccaaaacaaatcttacaaataattccactaaaaatcgtcagatcatatccaaacacaaagacgcagtaagtttgtctgtgcatcttgcagttgcaggcatttggagcctgaagagaagacgataagtttctgcgaccatgatgctggatttgggtccattctcgaatgagaacttcgacccgaagaaatggatcaactcagcgtgtcagagtcggcaccctcaggactctttggacaaacacctggtggacatggagatgaagctccagatggtgtccgaggaaatcgccgcctcgctcgaggagcagagcgccgccgctctcctccgcgtcccccgcgccactcgcgacgtcatccgcctccgtgacgatgccgtttctctccgctccgctgtctcctccatcctccagaagctcaagaaggcagagggatcatcggctgaatctatagctgcacttgctaaagtggatgttgtcaagcagaggatggaagctgcatatgaaacgttgcaggatgctgcgggattaactcaattgagtgcaaccgtggaggatgtatttgccagtggagatcttcctcgtgctgcagaaacgttagctaacatgaggcattgcttgtctgcagttggggaggttgctgaatttgccaacataagaaagcaacttgaagtcttggaggacaggctagacaatatggtgcagcctcgtcttatggatgcattatctaatcgcaaggttgatgctgctcaagatttacgtggaattctcattagaattggaaggtttaagtctctggaatcacaatatgtaaaggttcacctgaaaccaataaagcagcttttgggaagattttgattcaagagaaagagctagtaagcctgcaaatgagaagaatgagatggataggacatc

SEQ ID NO: 106128 - DNA, 551 bp, Glycine max
  Clone ID: PAT_MRT3847_66850C.1
caactttttgcagccatattaatggactcctgcaataattttgtcacacaattaaccattatatggctaacacaggactaactctgtcagtatttttttaggatacatcagaaagagaacacaagactaactcctatggaagggaaagcccagagttgttggttcggttcatgtttattatctcctcctatcattgttaaatactatttcattggcaccaagctggcttaggaactatgttcttgcttattatgtaaaactttatcaataaatctaatatatgaacccataagcaattgtaagaaatgtttcctgtgttatcataagttaaggacttacacaacattgcacatgatcgcagtaggaaagaaaccaatcacacaaccaactactgttacaacattttcatctttagctactgtctggtttctaattttatttcctcaatatacaacttggttgaagcaggactgaatttttattttttaaaatttttggtttctcacatatatacttctaaggcacagtcaaatactaaatgtgggtacctc

SEQ ID NO: 106129 - DNA, 387 bp, Glycine max
  Clone ID: PAT_MRT3847_66851C.1
atttacatattctagtcataggtcatgatgaaacagtcaaggccatcattcgggctgatcagatagctcgaatagtactagaacgcattgagcaatctaatgccgacttaataattgttggtacaactgccgtactgaaagttggcgagggcatagcttggattgaaggctacgatgaatccataggaagctgtgatacgggtagacgtgaagggatctatgggcagggacactgatttcgaactcattgatgtcagctgctggatatatgggtgacactgagaggaggcaataggccaatgcagttcaggcgacgacgttgcactgctgaaatgcctgatgataatgataaagcgcatcctgatgtgtatgacatgacgctaccaa

SEQ ID NO: 106130 - DNA, 356 bp, Glycine max
  Clone ID: PAT_MRT3847_66852C.1
agggaaatgaaaaaaaggattactttgggtgcttaaagggccaggggctcctagggatcgtacagaacaaacaattataaagacctctgctacggacataataatgcatgtataccactgtttactactttaagggacagctaaaaggatgaagaccacaccagtggggatataaaaacgtattaatgcatcgtgacccttaggcggtgactttggagataccaccaatgactgacttcactaatggattctggtggcacattcggcttgacaatgcttttggtacaaagggtgaagatgcaacccaaggacagctatatttggggtacaagacaagggaaggtgaccacactctt

SEQ ID NO: 106131 - DNA, 321 bp, Glycine max
  Clone ID: PAT_MRT3847_66853C.1
tgaaagctccggcatcatctgttacgtcaacgccaatctgcacgacaatgacggtatccgcccggaccagcattgtctcatcttcgctggaaagtagctcaacgaaggtcgcacactcaccgactactccatctagtcggcatcaacacttcacctcgtcctccgtctccgtggtggcatgcagatcttcgttctcacgctcatcggcatgactattagtctagatctctaaagctcctacaccatcgataacatcgacagctaagattcaggattatgagggaatctccccataccaccagatgctgatcttcgccggga

SEQ ID NO: 106132 - DNA, 450 bp, Glycine max
  unsure (1)..(450): unsure at all n locations
  Clone ID: PAT_MRT3847_66854C.1
cggcacggctgctagaagacgaaagacgacaatggggggaaaatgtaactgaaagattacacaatagagccattccttttatgcgtgaaaagtttcacaaggtatccttaattggagatgtcaatcttacaaatcaaaatatagaggaatcatttttagtcagatggttgaaggaaacttctttggagaataaattggacatatgcttggtggtaattgaagaagggtgcagaaacttccaaagtaatgactatttcaaaactgaggttgaagctgttgattgtgctttgcaatgcatatacttgtcaacagttaccgataggtggagtattatggcttccatactatctaaacttcctcaactacatggtgggtgatttaatgtctatactaattccttaataacaatgagatngttgtaatttaataatttcttggtgggtgatttat

SEQ ID NO: 106133 - DNA, 278 bp, Glycine max
  unsure (1)..(278): unsure at all n locations
  Clone ID: PAT_MRT3847_66855C.1
aaccccaagnnggaaaaaaaaggaaaaggggacaacataaatttcagattctatctaaagggcaaaaacaccaatctatccccctctttcttccgaataccattctccttcggagcgagcgagttatggcccacgggacataaaccataattattgcctaaaaacattgattaaaaataaaaaagaacagggaaaaaaacagatccttgttatttttttcccattaggaggagcaaaagaacaatcttttttccgatgatgctttttaccaataaacc

SEQ ID NO: 106134 - DNA, 630 bp, Glycine max
  Clone ID: PAT_MRT3847_66856C.1
ccacgcgtccgtacggctgcgagaagacgacagaaggggaagaaaaggtaagggaaggttccgagaaagaaaaatccaagacttcggttagcggggagcgcccctgtcctcttttctccccccctttcttattagttagaagccgaacctagtctttgtttgtgtgagttgtagcggatcacgtggctcgatggaggttcctcagcgtcttttgtttgaatgactaccgcgtgccattttacctcagtcattttgtcctacttgctttttttcgaatatcctataacgtaccatctaggtctcgtcttgtaagcccggaagggaagatgaaagtgctccttcttcttcttactcccgcccgatcagggagaatgactcttttaaatataggatccgaccactatttggtacactggactatgttggtttccaagagatcactgataaacgggtactcccggatggaaggaaggtacatatcggatatataattatcttgctctaagttatttattgccctaaatagaattgagtacctattggatgtaggcgcgctctagcatggggaatcgctagtaatcgcggcaccgcccatgaagtagtttatgttgacaaaacctaacatagggg

SEQ ID NO: 106135 - DNA, 526 bp, Glycine max
  Clone ID: PAT_MRT3847_66857C.1
acctatacaaatatgatccaagcaccaaccaagcctcattgttgctcagcaatcttgctgtggcagctggggtggcagtaagtggcaatggttcatttgtccttgttagtgagtgcaatgcccacagaattcgcagattctggcttgctggacctaaagcaaatacttcagaagtattcttgcagcttccaggaagaccagagaacataaagaggaactccaaaaatgagttttgggtggcaatgaactatccttttgggacacctccacccccaagacctcctgttttgcctctaggactcagagtcaatgaggatggtgaagttttagaggctgtgcctcttgtcgatgagtttggtactgaatcagtcagtgaaattcaagagtttaatggaacactctatgcttcctccctgcatgtttcctatgccaacattttcaaagtctagttttgtcactgctgcatttgtgtggttataaacaatggaagagacattttaaataaataaagatttattgatcctta

SEQ ID NO: 106136 - DNA, 868 bp, Glycine max
  Clone ID: PAT_MRT3847_66858C.1
ccacgcgtccgataaaacaacactctggctctccctccaccgccccaggccatggcggccggagcctctgctccgccccccgccccgcaggcgccgaggccaaagcggcctcggcctccgtcggggcgcaccaacctagcctcctgcgtggtggccaccatcttcctaatcttcatcatcatcgttatcctcattgtatactacaccgtcttcaaaccccaggaccccaaaatcgccgtcaacgccgtccagctcccctccttctccgtcgctaacggcaccgtcaacttcactttctcccagtacgcctccgttagaaaccctaaccgtgccgcgttcacccactacgacagctccctccagctcatctactccggcagccaggtcggcttcatgttcatccccgccggcgagatcgacgctggcaggacgcagtacatggcagccaccttctccgtccagtccttccccctctcggtgccgcccaggatgggccccacattggccaacggcgacggagtgggcttcaactatgggcttagggttgagcccactatggaaatcgagtccaagttggagatggcggggcgtgtcaaagtgttgcacttcttcacccatcacgtttatgccaaagccggttgcagggttgccattgccgtaactgatggatctgtcttaggttttcactgctaattcttcttcttctttttttttgtaactctagactttttaatagtaaaaaagtaaaactgtaattgttacttgttagtcatgttaagtaaccaaacccaaggcgtcacgattaaaattgtaaagatgattttcaattttccttctcgaatgcaaagtttcgccattttgtttgtcg

SEQ ID NO: 106137 - DNA, 464 bp, Glycine max
  unsure (1)..(464): unsure at all n locations
  Clone ID: PAT_MRT3847_66859C.1
acgagagatcatggtgcaaccgctgtcaagcattgtaatggttctgaaagacttggtgaagctggcctctcactgcactatgctaacattatcaatcagataaacatgattgcatctcgtccaaccgttcttcctccaaatataagagacacattgtatcatggattgccaaataatattaagagtgcacttccttcccggatgcanagcattgatgctatgaaagagctctccatcactcaggtcaaagctgaaatggacaagactctgcagtggctcaatccatttgccacaaatacgaccaaagcacatcaaggttttggatgggttggcgaatgggcaaatacatgcaaaaactggagcagttcaacaatgatacgaacttattttccaatcagaacgtgggacgctgaagacttgaagctaactacaacaacaggctcagtaacttaatcaactaactg

SEQ ID NO: 106138 - DNA, 255 bp, Glycine max
  Clone ID: PAT_MRT3847_6685C.1
acagaacgagaacgttaaacttacgactatatctcactacttagcctagacatactctgggtcatctcattacaataatcatccatagttactgaagaaaatgaccaccatctcctctgctatcacaaccccatctatcacccgcgcatgtatagtgcaaaaacgttctcttgcgtactcatctccccttcttggtacgccagctatgggcaagcagagaagagcgacttactgcatacaagaaaagccttcttc

SEQ ID NO: 106139 - DNA, 425 bp, Glycine max
  Clone ID: PAT_MRT3847_66860C.1
gggggatcccaaattactcaggagttgggaaaaaaagcatgttaaaatttgtcacaaaaaaaaccacaaatttttcaaacaagtcccaaaaaaaggcttccaggaaaaagaaagtaattaacagggaaccggaagctacggggaaaataaaccccaaaaaagttaaaacaatccccccaaatttccatttaaattggacagttataaagcaaacccccccacactatagttattggaagccaaaagttcccaccaaagcataaagccccgctagcaaaaaaccgggcccattcctgggccggtacaacggccccggcccaattaaatttccaaggctgggaaatggtccaaaaaagcggaacaccgggggtgggggcactaaaaaaagctggaaactcaaaagaacagggcgaaactgaagggca

SEQ ID NO: 106140 - DNA, 385 bp, Glycine max
  Clone ID: PAT_MRT3847_66861C.1
ttagttaccacaaacaaacccacccatctgacagtggacatatcacatcgtatgcctataatggtgctctgtctggagaccaaagctatacttgactcagtagcttgttgctcgccttgcggcatgatgaaactaactgcgcttatgcaccaaatcagacagggctaattgcattgagtgggatgcccggtcctttgatattcctctgagagagcggacttactgtagcatattataacgaggccccacatcataaccctccttaacgacagcaggttaggaacacaaactgtcgaactgcccttttctacagttgagatcaccaagcacatgacctagatgtacttcaagaggaacgacttcaacctatattatgagctcatgc

SEQ ID NO: 106141 - DNA, 140 bp, Glycine max
  Clone ID: PAT_MRT3847_66862C.1
ggtgaaaactaattaaaagcctaattataataacaatcaatcaacacgctccaaaaaggttggccaacgggttgaagaagtgaggcttatgacccctggacaatggtgtcttatgggaacccgcgccggcaccgctgatg

SEQ ID NO: 106142 - DNA, 614 bp, Glycine max
  Clone ID: PAT_MRT3847_66863C.1
ccctcacacactcatttctgcagactaataataacgagttgtgtcctccaacaatgattcgtatattcttgtctgcaaccccgggggggtccaagagtgtgccacacacacacatttcttcagagaaaaaaggattgagaaaaaaatgtgtcctctgcgattcattctgatattcttgtccgcaaccctcgccggttttttcgttctcagaaacctcagatctcagcctcaaattgaagaaggcgacgctgttgttcctcccaaccctaaaatctcagactcctccgacgcttcctcaaatgtaacttccaagcttcgcgctgtggtagagtctgggttctggaccttcgtggatatggctagtggccgttatctttggaggcatttggtctgtaattcttccaagagatcgtgatgatgcgattgtatgttgttgtaattgttcggttccatgatctctgtgggcccaaattaggtaattgaacgttgcctctgggattgtaatttttagggtcagtttggatgctgtgtatcatatagatgttgttcatagtgttgttgttgttggttttaaatgatgaaaagtgttatatctgcaaaaataatgataatga

SEQ ID NO: 106143 - DNA, 200 bp, Glycine max
  Clone ID: PAT_MRT3847_66864C.1
ccttcgagccgaatcggctcgagcggctcgagctcttcagatctctctcccttccttccatcacaaccacaaggttgctgagcagacataaccatggtgagatttgctgcattgagctgctatgtggtagccaacatggctgattgccttgatgtctgagacgaagtgtcgcgtgacattgctgcacgcgaatcacgcgt

SEQ ID NO: 106144 - DNA, 266 bp, Glycine max
  unsure (1)..(266): unsure at all n locations
  Clone ID: PAT_MRT3847_66865C.1
agccattttactagctatttaataataccaattttaaaccatttttatattaatagtttatatgggcaccatggcttcattcaacaggagtatgcgcctnctacttttaaagaaaatttatcagataaaattgttaaaaatgaattcatcccaataatctttcttatcacactatttgctgtcttttaatctttcacattcccaacttattttttctattcataacccactcaagcgattttcacggcatatctttatctatttat

SEQ ID NO: 106145 - DNA, 230 bp, Glycine max
  Clone ID: PAT_MRT3847_66866C.1
gcatcatctacaacccctcgagtgggcacatttctactctacgctctaaaccctctctctctctctctctcgatctatcatggcttcgcccaatcagcaaaccgtggattaccctaccttcaaactcgtcatcttctgtgacggcggtacaagaatgacaacattcgtgaaaaggcatcttaccggtgaattccaaaaaaaatactaaccgaccatttgagtagaggttc

SEQ ID NO: 106146 - DNA, 365 bp, Glycine max
  Clone ID: PAT_MRT3847_66867C.1
agacctgctaccatgcatgcacgcctactttagctgatactctggctcaaggcgactatcacattaacaaggcatatcgatgctcaaccgtaccatatacgaattgaagatatctgccttcttaactgtccatcctgaagccacttgaaatgcgatacggcattcctatgtgaatatcaacaacacattttaacgatatattgccgcccctaagatcaaactgtaatcgcaatgatggtgaaaggtaatatggctatcctgaatccataggcaatgctagctgcaaaacgtgattgaacactgtttcacatcaccaagaggtagggatgcctacatgggcatatcttaagagtcatcatgagtga

SEQ ID NO: 106147 - DNA, 516 bp, Glycine max
  Clone ID: PAT_MRT3847_66868C.1
acgagggaattgtacattaggtggctacaatatccaagcaggtacacgatttattttgaacatttgtgaactgcacagggatcctcgtatatggtcaaatcctttagaatttcagccagagaggttcttgagcacccacaaggatatggatgtgaagggtcaagattttgagctcctttcctttggtggtggaagaaggtcatgccctggcatatcctttggccttaaatgacacacttggctttaatcaaacatgaaaactacttctcttgaagttttaatcaaacccactttatcacatcagctactctttgtggatgaagtttagaaaaatccactgcattaaccaatgtctaccctacttaagtaacgagcaaggcttatgtgcttttaccttcccagcatgaacgaattagtgcgtgttttgaactagttatgaacccatggatagcacgggattgttagcattgagagtaatattgagcttcagtcaagttgctacgtcggtaatgaatc

SEQ ID NO: 106148 - DNA, 305 bp, Glycine max
  Clone ID: PAT_MRT3847_66869C.1
aaaagtggaaaattattttttaatatttttttattgtactcttaaaataaaccgaaaaatttggatgggacaaataagccaaccagggttccctaaaaaaaaacgttaagaaaggggggaagaacaagccatatgtgattgctgggggaaagtgctatccgctaagaatggagcacaacatacaaacccggaaaaataaaggtgaaaaaaaggggggcctaaagaatgagctaccccacataaaatggggggggctcgggggcctatttcgaggcggaaaagccatttaacaaattggataaagg

SEQ ID NO: 106149 - DNA, 783 bp, Glycine max
  Clone ID: PAT_MRT3847_6686C.1
ggatcgcgcgtaaacactccctaccgaagaacaaacaagtcctcttacatgcaacaccaacaccaacaacatcactaacgcaatttcaatttcagtatattttgactcccacgcgcgcttacttccttccttcccctatccctgttccgtttcggcgcgtgccatgggcgcgtcgctgtcttcgaacggttccagtatcggcccgggcctcggggacataccggcgccgcatcgtcggactccgtctgggaggccaagctgccgcgcaactaccaggatctgctcgatctcgttccgccggagcgccaccgcagcctctcgaaaaaggacatcttcgcgctcctctcccgacccctacccttcgaccacggtcataaggtgggtgctgctcttcaggtcagtcattatttgcttttttttttttttttttaggatttttagggttttcggtaacttgggatttttgttgatggtggcgagggttttacaggaagtgtggctggatagagtcaccgggaaggtttgcatgtccatttcggcgaaggcgatgccaattaccggaattgatgaccggagatcctggaattggattcctactgaagaatctaggttagatttaattggctttagttgtttgctttaaggttgaatatggatatatgaaacctgtatcggaaaaaaaccaagaaaatagagaagaaaggaaatacttatgatgatgatgcattgtttactgtttcatcgaaaggaaaatggaaagaaaatagtagagttgactttagc

SEQ ID NO: 106150 - DNA, 657 bp, Glycine max
  unsure (1)..(657): unsure at all n locations
  Clone ID: PAT_MRT3847_66870C.1
gctcaatgcagatttttgttgatcgattatcaatttcagcaacactggcaaccagaatcntactctaaacacaactctcttacaatcattgcaaggaatatgtccaaatggtggacctggcactaatctcaccaatttggacttaacccactccagacacattcgactccaactattactccaatcttcaacttcaaaatggcttgcttcagagtgatcaagagttgcttagtgcaaataatacggatatcgttgccattgtcaacaatttcattagtaaccaaactcttttctttgaaaactttaaggcgtcaatgataaaaatgggcaacattggagtgctaacgggatcacaaggagaaatccgatcgcaatgtaattctgtgaatggaaattcttccggacttactactactgccaccaaagaatcatcacaagatagcatggttagctcattgtaaataaattggcaaaggttgtgctgaaaaatgcaaagattgaaagtactaataaagcgttttgtatatgcacatatatgctatgtgcatgtggtgaaccattataaactttttactttgtattcagcacctaggacctagctctatattattcactaccgtgtgacaaaatatatatttactacactccttctatttc

SEQ ID NO: 106151 - DNA, 321 bp, Glycine max
  Clone ID: PAT_MRT3847_66871C.1
gttaacactttcgtttattttttgtacaaaactacgaaatatgatgatggacacttctgaggcctataagtcacaaaaccgaggaaactaggaaaaggaaaaaggaggaataccctgggaaacagaaactggaaagactaaaaagaggggcccaaaatacaataccatagggcaaaagagggaaaagcaaaaccaggatgaaggatagggtgcggactcttgagccccccgggaaagcttgacctccaagagctcccgaataaaatcctgccatgatgaagcgcaaagaaccaccaacctttgaagcactcatcgccggaa

SEQ ID NO: 106152 - DNA, 538 bp, Glycine max
  Clone ID: PAT_MRT3847_66872C.1
ccacgcgtccgggggggagtaacttcagtaatttgcatgctagtaaggtggcatctcatagcaatagcaagttccctatgcaatcaccacacggtaatgccaacaagaaaggatctttgatgagctcagctggatcagtttctcagtaccagcacttgaatggtgatagccatgacattgatgtatctggatggcatactcatacaggtggttttacttcatccatgctgaacaatcaactgaatcctgatggtgactatggcaatgttctttcgaatcatggtggatcgagttatcagggccaaccaacagagacgatgtacgcacaatgcttgcaggcaaaccctgattcaccccttggcgcagctgcaagcatgagccctttccaagggaggggttttactggttcaggacacttggatagtcctggataccaaaaagcttaccttgggtcattatttggccagcaaaagctacaatatgggatgccatacctgggcaattctggtgctcttaatcaaaatatctatggcaatga

SEQ ID NO: 106153 - DNA, 213 bp, Glycine max
  Clone ID: PAT_MRT3847_66873C.1
ccaatatcgtgctcaccatcaggaacctggaagtcggagagcatgacccccaatgccatgacatgaatgctgtgacagatcagcgtactatcggatgcgcacgaatcatgcgactcattactctactacactaaagcagtctggtccaactgctgccgagaataatgcaaatctgggtggaccatgctacatcactccgtcgttcgagcagtt

SEQ ID NO: 106154 - DNA, 2070 bp, Glycine max
  Clone ID: PAT_MRT3847_66874C.1
atagatttggtatttggttacaagcaacgtggaaaacctgctgtagaggcagcaaacatcttctactacttgacttatgaaggtgctgttgatctggaaacaatggaagatgatttgcaaagagcagctatcgaagaccagatagccaactttggtcagactccaatccagatatttcgtaagaaacacccgagaagagggccacctattccaattgcacatcctttgtactttgctcctgattctattagtttgacttccattgtttgtaatacaagtcaatattcatctgctatgctttatgttggtctgatggactcgaatattgtccttgtggacgagggtctcaatttgtctgtaaagatgtggttgacaactcaactacagtctggtggaaattttacattttctggttcccaggatccattctttggagttggttctgacatactttctccacgcaaaattgggattcctgtgcctgaaaatgttgaacttggagctcaatcttttgcaacaatgcaatcaccctctgagaatttcttaatatcatgtggcaattgggaaaatagttttcaggtcatatcattaagcgatggcagaatggtacagagtattcgacagcacaaggatgtggtgagctgtgttgcagttacatctgatggaagtatccttgcaactggaagctatgatacaacagtaatggtttgggaagtttttcgtggtaaaaccgcagaaaagagaattcgcaacagtcaatctgagttgccccgtaagaattatgtcataattgaaactccatgccacatcctttgtgggcatgatgatataataacttgtttatatgttagtcatgaacttgatattataatcagtggatcaaaagatggaacttgtgtattccacaccctgcgagaaggtagatatgttagatccttacggcatccgtcaggcagtccaattaccaagctagttgtctctcagtgtggccagattgtgatttatgctgatgatgatcttagtttgcacctgtattcaattaatggaaagtatgttgctgcctctgaatccaatggacgccttaatgctgttcaattgagcagatgtggaaagtttttggtaggcgcaggtgaccagggacagatttttgttcgctctatgaacacccttgaagttgttaagaaatatcaaggagttggaaaggttttgacatctctggcagtaaccccagaagaatgcttcttagctggcacaaaagatggaagcctcctagtgtactcaatagaaaatcctcagattcgtaaaactagccacagcaaaagtacaaaatcaaaactgacataacagaaaatataacaatacagcagaaggtgcatgtggaattttgaaagttagaggtgttccatgatgactgtttcaggtgcacccactgacaattgacaacatatttggggttatatgctaaattgctgatatcacttacgtggtgatcttctcattttcttcctttggctgttttgtgtatcatccccgtgaagtgcttgtggatactgtgagatcagagatgagtgagtaccagctttacctgaatatagaaagcagcagcatatctacttcttttgtactgtggaatagaagaactgggtggagtatcatctactttctaagctcctggaattagggaggtaaagacttggcgggtttggtcatacatgtacattatattcgttaattcttcaataggattcttgtgaactaaaattgtagctgtgctattatttttggttttctctgttaacacttggattgtacagacagacaggccctaatgccttatcatacaggcgaaggataactctccgcccatgtcatgtatctgctgatgttgctcactttaaggtctatgaaatgaaatttaaggataccaagaacaaatgactgggaatatcggcaacggagaattatcactcgtaaaacagaatattatattttctttttctaaaacagtatattctaacctcttaatttactttcgctttgaccttcaaaaaaaactagtagattatattt

SEQ ID NO: 106155 - DNA, 1240 bp, Glycine max
  Clone ID: PAT_MRT3847_66875C.1
cggccgctttttttttgagagagagagaactagtctcgagttttttttttttttttttaattagtaaatattcaagaattagataaatacaagtcagtcacagaacaaataccatgatagtcatcaaaaagggttcaacatttaatccccaaagatggcagaccaaatgcataaactatttttctttttgatcttatgtaatagataaataccagtcacagaacaaataccatgatagtcatcaacaagagttcatatttaatccccaaagatggcagaccgaataaatacactacttttctttttggtgctatattccagtataattttagcctacaaaagaatcttaaagctacaaaacctattccacatcaccagatctacgatatggcatgtatctatggtcctttgcagcattcctcctcctccttttctcaacaaatgcttccagtttgccagatgacttgagatggttatatttttcaataagcctttgcttccgtatttcagatttcttgagataaaaaggacgttttccctgctttgctgcttctctctctttctttttgtgcttagccaatatttctgcatcaatatgcttcgctgaatcagacttcacttgtttatcaatccatgatatacgttcttctatttcatttacgcgcttcgggtctttatattttttcaattccttcttaagagcctgtctttcagcaggaagatcattttcgtataagaaattatttctcttactgcttgcatgagggtctagtttattacacagagattcaaatcgtggatcacggcatgtgtcccagtcgctcgagctatctgcaactcctcaaatgttacatcagccagctccttctctatctcttcctcttgttcgtcctttttaattttatgtcttctttgggtttcgtgaaaaatgcatgtgccccattcgagcgtgctttctgcaactcctcaaacgttacatcagccagctccttctctatctcttcctcctcgtcttctgaggaactataagaagaggaagactcgtctttctcactctcctcgtactgggtttccatggaatctgggattctggttctctgcttctgagtcatgtattttagggttcaatgctgacgtatagttggtgggtggtgtgtgatgtttgatggcaatcggagaaaattgaagaaccctaacactgtgatccgagggctagtgaagacggaacgaggctcgagcc

SEQ ID NO: 106156 - DNA, 245 bp, Glycine max
  Clone ID: PAT_MRT3847_66876C.1
ctgatataacgtagggtgccctatagtcaggaactacaaaatcaaacttgtaaacgtggacgccctatgcatgcaatctctaaggttactatagaggttaccatgagggtgaaacccgattattgactgtacccaagcaacagtggttaatctgcctgaatctgggaacaaggtccccgtatataattataaatgttggcctgatgctcctaaatggtgatactcatattgcactgcacgaattt

SEQ ID NO: 106157 - DNA, 448 bp, Glycine max
  Clone ID: PAT_MRT3847_66877C.1
caagtcttcagatccttctgttactggtgttgagcttgtgcagctaagaaatggtcaatccaaaaatgcagagtcatctgcagaaaataatggccgtgataatattactaaagatccattgctttcaattgatgctcgaccttcccgtacatggaactcaatgcctgcaaactccctaactaatgataacctaggtcttcaacgacatcgctcaggaggagagtggggagatattttagatgtcatctctcacagaaagacccaagctcttgctccagaacattttgaaaatatgtggactaaagggaaaaattacaagaaaaaggatggcgagaaccagtcaaatgagcatgtttcacagcattcccaggtaggaaaactgtcgatggtagatcatatgaaggaaatatcttgaccaaacgaaagagatactaattccaaagctatg

SEQ ID NO: 106158 - DNA, 187 bp, Glycine max
  Clone ID: PAT_MRT3847_66878C.1
ttcgtagcaccgtccgggcgaagcacacggggggttttattgacgattttgttatttcttccgcaaacaaagaccgggccctcaaatacctgagaatcgtgcaacgcctgaaccgcgaatgggccctccagtccctgctcgaaaagagcgaccgctgcgattcgcactccgccggcgctgacgcctg

SEQ ID NO: 106159 - DNA, 337 bp, Glycine max
  unsure (1)..(337): unsure at all n locations
  Clone ID: PAT_MRT3847_66879C.1
cgggnccggattccccgtccgccccacccttccggcctccattgaaccttgggcccatgtagtttttcaaaaccaattttttttaagaaaccaaggccgtttggccttggaggtttattcctccctctccctgttcccttagtttaactgcttcgcctccgccttccgatgggatctttttttttcataggcggtgtttgatggaggattatattccttctttcctatggtttgtttcccgttattcctcctttttctttatgtttccttctttctttcttattctttatagtgtgatcattcttcttttttacttttattttttctttctttcatt

SEQ ID NO: 106160 - DNA, 1137 bp, Glycine max
  unsure (1)..(1137): unsure at all n locations
  Clone ID: PAT_MRT3847_6687C.1
cggtccggaattcccggggcgacccacgcgtccgcaaaagctatccaccaacaacaaacaactcttcttacatgcaacaccaacatcactaacgcattttcaattttcagtatattttcactcccacgcgcgcttacttcctcccttcccctcggcgcgtgccatgggcgcgtcgctgtcgtcgaacggttcgagcatcggcccgggcctcggggacataccggagagctgcgtggcgtgtgtgttcctccacctgacgccgccggagatctgcaacctcgcccgcctcaaccgcgcctttcgcggcgccgcctcgtcggactccgtctgggaggcgaagctgccgcgcaactaccaggatctgctagatctcgtgccgccgccggagcgccatcaccgcagcctctcgaaaaaggacatattcgcgctcctctcccgccccctccccttcgaccacggtcataaggaagtgtggctggatagagtcaccgggaaggtttgcatgtccatttcggcgaaggcgatgacaattaacggaattgatgaccggagatactggaattggattcctactgaagaatctaggttagatttaattggctttagttgtttgctttaaggttgaatatggatatatgaaacctgtatcggaaaaaaaacaagaaaatagagaagaaaggaaatacttatgatgatgatgcattgtttactgtttcatcgaaaggaaaatggaaagaaaatagtagagttgactttagcaacaaaaatttatttgactagatagattatgtaatgataatgtaaagccttttttttacagtgttatctaataattagatatcatatcacatgtacagtattgttgactactatttcctatcttgaaagtcaaaccaacaatgnnnnnnnnnnnnnnnnnnnnnnnnnnnnnnnnnnnnnnnnnnnnnnnnnnnnnnnnnnnnnnnnnnnnnnnnnnnnnnnnnnnnnnnnnnnnnnnnnnnnnnnnnnnnnnnnnnnnnnnnnnnnnnnnnnnnnnnnnnnnnnnnnnnnnnnnnnnnnnnnnnnnnnnnnnnnnnnnnnnnnnnnnnnnnnnnnnnnnnnnnnnnnnnnnnnnnnnnnnnnnnnnnnnnnnnnnnn

SEQ ID NO: 106161 - DNA, 155 bp, Glycine max
  Clone ID: PAT_MRT3847_66880C.1
ctctcaccttctacattactctctcttctcctacacatttctaaaggttccattgcatcatctgactcactcctcagtagctctgagactgaaccctatccccatacaaaccttatccctcccccaaatgcccagcctcagatcaaccagattcc

SEQ ID NO: 106162 - DNA, 232 bp, Glycine max
  Clone ID: PAT_MRT3847_66881C.1
accattacaaaaccaagaaacttttattgggggtcattcaaattgaagggcccatgattaataagattcaaccaaacttgagaaggcccccacgggggcttagggccacatattcaaagaaattttggttttttatacacatttaagggagggaaaaccctttaagcgtggattaactggaacttggaatagcccccacgggggcttataacaagggggagcgggggtttct

SEQ ID NO: 106163 - DNA, 742 bp, Glycine max
  Clone ID: PAT_MRT3847_66882C.1
catccatcccctgtgtctctcttttttatttgataaattgaacctccttttgtgagtgtagtgagtgtctctctcattcattctcaggtcccaaccgcattaagcgtctttgatccatcttcttctgtccccgaaaggacgtacccaaaccaaatcgccacatatcaaatgctaagctacgcgcccttttctcagtgaccgattcttcagttaactctctctgatccaattcaattgaatgggcctcaacctcttcgctctccctccatggcaatggcaaactatttctctgctgtgatcctccaccgccatcccatcaccgccctcgatcttctcctcatcttcctccacaccctcttatagctctcacccgacaagagtaaaaaaacccaaccattttttttctctctctggtttcgaattttttaaggatataaaaactagaacaaaattcgtttttgattgtgattcctgatacccttttggattctgatggcgtcggtgttcgtgtaccacgtggtgggcgatctgacggtggggaagccagagctggcggagtttcacgagagtgagacggtggagtctgcgattagggcgattggggagtgccatgaagggaccatacccatttggagagatttgtttcaattggggattgctttcacttagtgggtttttcgctaattgttggtattctttcctttgcttgcgtttttggctaaaactgtgttttgacaccaca

SEQ ID NO: 106164 - DNA, 232 bp, Glycine max
  unsure (1)..(232): unsure at all n locations
  Clone ID: PAT_MRT3847_66883C.1
aaagggcataacccaccaantcattttctcttacccatgcctaaatactcatcttctttcacctattctaatatttaacacaaaaactttacacctttatgaacatatgtagaaaaagagcaattagtctataatccatttaatgaaaggacttacatatacaccaaaaaagctctcatcaatatgtaaatatttctttccaaattggtcaaaaaaattcaaaaaactttat

SEQ ID NO: 106165 - DNA, 544 bp, Glycine max
  Clone ID: PAT_MRT3847_66884C.1
ttttttttttttttttttttttttttttttttttttttttttttttttgtttggttttttttttttttttttttttttttttttttttatttttttttttatttttattttttttcttggtattagaatttgttataattttttaagaatgttaacttattttttttaaaaccccaaaaaatgaaaaataaaataaaagcaatactataaaagagagaggggggaagaaaccatagcaaaaagtggttgagggaacctctctattaatttgtctatgaaagagggggggggataaaaaaaaataaaaaataatcacccctctgaccaaagttttgataggccaaaaaaagaaaacaagcaccatacttctcaaattttttggtgaaaaaagacaaaacgtgctactgccaaaaaaaatgtgtttataaaaaacagtattctggcgcggcccgcaaaaaaaaaaaagaaatttattttgaaacccccaccatcttttttagtttaaaggagggggggggatatattatggaaagagaacttttat

SEQ ID NO: 106166 - DNA, 357 bp, Glycine max
  unsure (1)..(357): unsure at all n locations
  Clone ID: PAT_MRT3847_66885C.1
gggggngcccctccctttttttcttcctcctttcnctggtgtccctgtccttcccggggtggccctctggccgccccggtgggtnttcttcccggacctattcctgctttaggtttggtcgtgttccttccttcctccccccccccggctttggctggcgcgtcctggcctcttgtgtgcctctctttcacccctccccgcctgtggcgctccctactgtgggctccctgggtgcctgggggcggctgcggctgctgctgcggcgcccgctcccccgggttgtgattgcgcctgccgccgttttgcttccgtgggcgccccgggcccctttccgtcgccactctttccctgctggtg

SEQ ID NO: 106167 - DNA, 123 bp, Glycine max
  Clone ID: PAT_MRT3847_66886C.1
tgcccccgcccttaagctgggaattggggttaagctcgagccgattcgtctcagagcacggttgatagaacactacataagggggtgtccaaatgggagtactatagatgctgagatggaggc

SEQ ID NO: 106168 - DNA, 870 bp, Glycine max
  Clone ID: PAT_MRT3847_66887C.1
attttgttctctatataaaccctttaacctatctcttcttgtcacatagcatagctttgaatccgttcaccacaaaacaaaaagtttacgttacaaatcgcataataaccgtcctaagtttattgagagaattttgcaagtgtgagaaacatggcatctcgtcaaaacaacaagcaagagcttgatgaaagagcaaggcaaggagagactgttgtcccgggtggaactggtggcaagagcctggaggctcagcaacaccttgctgaaggaaggagcaagggagggcaaacaaggaaggaacagctgggtacagaagggtaccaggaaatgggacgcaaaggagggttgagcactgtggacaaatcaggagaagaacgtgctcaagaggaaggcattggcatcgatgagtccaagttcaggactggtaataacaagaaccagaatcagaacgaagaccaggataagtgataatgtaacacccttcactagcatgtgtagtgtgttcttatgctagcttaaatgtgagtgtcaagtgttttaggaagtaggaaaagaataggttataaaaaataatgtttaggcaatagttatataggtcaaagtgtcatgtcatgtgtgtcgtgaaataattagctagcatgtttaggttgttttagggtttcttttgcatgtgtgtttctcttatgtgtgtaagtgatcagtgaggcatggctctatagctatccagaaattagcacaagcaagcatgtgcctccatttcactaatgtgtatgtatctatggtgtgaccacgttcaatactagaatgtaatggtctcaactcttatgttaacttatcgtggcacaaacaattacgtacgtactcaactta

SEQ ID NO: 106169 - DNA, 1071 bp, Glycine max
  Clone ID: PAT_MRT3847_66888C.1
cagcttcccgcatacatgctgcatttagggaacactctctaaaactgagaactaaggcggttgcatcttccaatccagaggctcaagcacgcaaaatagttgcagcaatgaagattcagcatgcctttaggaaccacgagacaaagaaaatgatggcagctgccgctcgcattcagtgtacataccgtacatggaagattcgtaaagaatttcttaacatgcgtcgtcaggctgttaaaattcaagctgcattccggtgctttcaagttcggaagcattatcgcaaaattctttggtctgttggtgtggttgagaaagcagtgctgcgttggcgtttgaagagaaggggcttccgtggtctccaggtcaaaactgtcgatgcgggaaccggagatcaggatcagcaaagtgatgtagaggaggaattcttccggactggtaggaagcaagccgaagaacgtgttgagagatctgtagtacgtgtgcaggctatgttccgttcgaagaaagcacaagaagagtacaggaggatgaaattggcccttaatcaagcaaagctggagcgggaatacgaacaacttcttagtactgaagtggacatgcaactgtagattttgtaagttcccctcgaccgtttaagacttccttagtatcctagaatgggtcattatataaagttttcatctgttattgggctctatggttgaaacttctgatgcaaggatactgtgccaccccaaagtttaatatactgaatactagaatagttatagccacaagcctggtccggggatggtaatgcttcttcgtttcttttaactaaaaaatagcagaggctacaaagatcagagcgaatttttataattattatttataggcgccaacacatcttcagtattagccgatatgtacaaagacactttttgtttcttaaattaccatatccaatatcagttatctctttatcttcaatattagcccatatttacaaagatactctttgtttcttaaatcaccatatccaatatcagttatctctctagattaatgataaaatttattatatgataa

SEQ ID NO: 106170 - DNA, 393 bp, Glycine max
  Clone ID: PAT_MRT3847_66889C.1
aattcggcaccaggatatttaaaatggcttaactacattaatattccacataaatgtctaagttagagggcgactagtactggtatgaaggagagagaaaacctaagggtgtgtttgatttgtattttcattttctgttttcattttcctattttcattttctgaaaattattttcattttcaaaagattagaattctgaaaacatgtttggtttgacttcttgttttctgctttcaagaaataaaaacactgaaaatgcgttttcaaaaggaaatgtatttttagatttgcttaaaattaaattccttgccaccgcatttttattttacccaaaatgaggttcctggtttcaactgaaaacaagattttattattgtcatctgagagaatat

SEQ ID NO: 106171 - DNA, 465 bp, Glycine max
  Clone ID: PAT_MRT3847_6688C.1
atgaaactgagattgatgatacatatggcaatcataagcgtggatactgggtagattacaaggtgggcgagtttattgtcagtggatcggagcctacaactcaagttagattttccatgaaacagatcgattgtacacattccaaaggtgggctttgtgtagatgctgtatttattgtacctagtgatttgagagagcgaaagagaagaggcattttgaaatagccatgtgcagaataggaagcttatttttttagtggtgtcagacatcctagaatactcactctattggggatctatcacacagcagcttatacactgaaaaaagtttacaatttggagaatgtcataattttctgttttttttttttaattttttaatttttttaattttttttgcctgtaggtgtgtattctctatagctttgtaattataatttctattcaatgtattttagttgtttcc

SEQ ID NO: 106172 - DNA, 711 bp, Glycine max
  unsure (1)..(711): unsure at all n locations
  Clone ID: PAT_MRT3847_66890C.1
aagaatttctcaacatgcgttgtcaggctgttaaaattcaagctgcgttccggtgctttcaagtgcggaagcattattgcaaaattctttggtctgttggtgtcgttgagaaagcagtgctgcgttggcgtttgaagagaaggggtttccgtgggctccaggtcaaaactgtcgaagcgggaactggagatcaggatcacgcanaagtgatgtagaggaggaagtggtccgggctggtaggaaacaagctgaagaacgtgttgagagatctgtggtacgtgtgcaggctatgttccgttcgaagaaagcacaagaagagtacaggaggatgaaattggcccttgatcaagcaaagcttgagcgagaattcgaacgacttcttagtactgaagttgacatgcaactgaagacatagattacccaaaaagattctaaattttgggatgcagtatccagtagattttgtaagtcccccttgactctttcagactttcttagtatcctagaatgggtcattatataaagttttcatctgtcattgggctctctatggttgtaacttctgatgcaaagatactgtgccaccccaaagtttaatatacagaatactagaatagttatagctataagcctggtctggggatggtaatggcttcttcgtttcttttaactcanaaatagcagaggcaaccaaagatcagtgcgattttt

SEQ ID NO: 106173 - DNA, 272 bp, Glycine max
  Clone ID: PAT_MRT3847_66891C.1
cgtcaattttgtggcttttctctacaagctggtgcaatttggggaggtttatgaaacagcagtttcgccaatcccacatgatgcatctcttacaacttgttcaactcaggtgcgttctgcatcaactctcctcgctgattggagtccatatgagtatacagtcaatccatgataggtccaaggctaaaactcctattgcttatgcgactattgtcaagttgactaccgtgaactatatctgtgcatatcggctcaatcgtgatatactaggt

SEQ ID NO: 106174 - DNA, 399 bp, Glycine max
  unsure (1)..(399): unsure at all n locations
  Clone ID: PAT_MRT3847_66892C.1
aaaaagcggtccgaagtgaacgtgggaaatgtacatatatgctacactagttgcattacacagaaaagggtatnaatatcacacatattggggatgacctgttcatgtggttggtgccaccagggctaaagtgcataacagtgatgcaacatacgaacacattactaaggtgtgctcaattggaaagaggagcttgggttcatcagaaagggtattgaattacacgtatctaaagagagagagattgagcacacgcaaaagcactaagaggtgtaactagagtgagtgtacggcatgatacctgttaggaggcagacgtaaagacaccatttggatatacaaggaaagatgtcctatgaacttgacctggagctacttcactagagattgacttaaaaa

SEQ ID NO: 106175 - DNA, 311 bp, Glycine max
  Clone ID: PAT_MRT3847_66893C.1
aaccaagggtaaagggccatgatgcataaactcattgcacttgtgaaggcatacactaacgtgtaatcaaaggtggacgattgtgttctacgtgaagggaaggcactagatgttgacccgcttactgcgatgcatgaaaccacataaaggacatctataaccttgcaaaccaagttaattgctgttagtgctaatataggaccacttaaggagtgcatgtatatcgatccaaaaagggcctaagctattcctacataaaaagactctatgacaagaacagcatctacaaaggctatatatcgcacaacaac

SEQ ID NO: 106176 - DNA, 151 bp, Glycine max
  Clone ID: PAT_MRT3847_66894C.1
taccgctgctataagacgacatatgggtacggctgctagaatactattgaacggtacggttgcaacaatatgtcacccagcgagacccgaggagcaaccttttatcctgcaactgtaataattgactgccgttctaaaagctccatgctta

SEQ ID NO: 106177 - DNA, 398 bp, Glycine max
  Clone ID: PAT_MRT3847_66895C.1
tttttatcaaagaacctcatttattagggacaaggtgaatgcaggggaacacaatgggatataaagcaatgtctgaacaaattaccaccagcttctgaagtcatattttgcatccacacttgtgcacatactcacaaatatttggagaaagcggtacatagattaattgggtatttcaccggcagggacatgtcttgcactcaacaaaagttaaagatctttaactacaatgcttatgtttagtcttaaatcaccttcatattgcacacacagtacatcaacagcgtaccattttaacaacatctttagggcggtattatccatctattgctggatcaacacactcgctggctttatccaaactcattttttggctaaaccaattaaccaaactcttc

SEQ ID NO: 106178 - DNA, 150 bp, Glycine max
  Clone ID: PAT_MRT3847_66896C.1
gggaaattgcatggatcagttgcattccattgctgtcgctgtgtggcatttgcagagggtgctctctaaaaaacgtgatccctttacacatgttttgttgcttgatgaggtcattcagatatccactggtcctgaatcacgtcaagtaaa

SEQ ID NO: 106179 - DNA, 2391 bp, Glycine max
  Clone ID: PAT_MRT3847_66897C.1
ttgggataccggttcctgctcgctaaaccggtagaagtgcctgcggtgttgtaaataactctaggaagggtgttttgtcaccaagtaaaacgatagattgaatgtgtagacggtgttattttcctgtgactcgtactcgatattctcggaatcgagtttgtttctgtgacttttttcgtatacgtgttaactgccatccccccgatgctccgaagcgaggaggattagctccgtaaagtgtcccctgcgcgtcctttgaaaacggtttccaacgccgactcgccgagtcaactcgctcaccgccccaacagcagtgtcatttccgcgctggtgctaaacgacgccgcgttcgactcccacgtaaacgacgggtcgtctgaactctacaagcaagtgaagcacgcgcgcgaggttggacggagtctatgggaacacctcgaatctggaaagccgctaacacgaaccgttgccgagaaccggcccggttcgtgtcccggttcggtttcgctttccggttcggatgttgttgacgtctcgggccgtcgtgccgttaccgtgtgggctcacattggggtcccacataacggtcgttgggaagccgttggcggcgaagcccgatttcgagccgaagataacggtggtgacggagaacgagcccgtgatggtgtcgcaattcgtggtggagttgcaggggctgaagaccgttgacggtgaagagcctcctagggtttttcatttcaacccgcccacgaagggggattggagtggtaaacctgtgattgaactcaacacgtgttaccgcatgcagtggggttctgctcttagatgtgacggttggaaatctaaggccgatgaagataccgttgataggatggtgaagtgtgagaagtggattcgggatgatgaagatcatttggagggatctaaggcgacgtggtggttgagtagactgatagggcacacgaagaaagtaaccattgactggccattcccgttttctgaggggaagctttttgttctttctattagtgctgggttggaggggtatcatgtttctgtggatgggaggcatgtgacctcttttccttatcgcgctggttttacccttgaggatgccaccgggctttcgttgacaggagacattgatgtccactctgtatttgcggcgtctttgccttcatcgcatcccagttttgccccacagcggcatcttgaattttccactaggtggcgtactcagccacttcctgagtctggcgtcgaattgttcattggtgtcctctcggctggaaaccattttgctgagcgtatggctgtgaggaagtcatggatgcaacataggctcgtcaaatctggagtagtggttgctcgtttctttgtggcactgcatgcaagacaagaaattaatgcagagttgaagaaggaagccgaattttttggtgatattgttatagtgccgtatttggataactatgatcttgttgtgttgaaaacacacgcggccatttgtgaataggtacatacagtttctgctaagtatgtcatgaaaggtgatgatgacacttttgttagagtggatgctgttatcgatgaagcaaggaaggttccagatggttcaagcttttatattgggaacataaattactaccacaaacccttgcgctatgggaaatgggcagtgacatatgcagagtggccagaagaggattacccaccctatgctaatggcccgggttatattttgtcatcagatattgcacgctatatcgtatctgaattcgatatgcataaattaaggttgttcaagatggaagatgtgagtatgggaatgtgggtggagcaattcaacagctcaaaaccagtacactactcgcatagcttgaagttctgccagtttggttgcatagaagattattacaccgcccattaccaatcgcctaggcagatgatgtgcctgtgggataaactgcaaaggaattcaaggcctcaatgctgcaacatgagatgacagagaaaaaacgtaggttgtgtgatcttttgattccagtgaagagggacacgagaaaacaagttttgcagtgaagccataccctcgaattttgtatataactggagcttggttagttaaacgtcgccctgtataaaatggcctttttaatttttttaaaaaaaactctatttattagtgtttttctggttcttttttggtacccctttttggggttctcaattcttttggccggggattggaagatgacaaggaggggaaggtgggatgggaatatattgatgcagatgcaagttctgtataaaaatttgagggatagcattcgatatccatagaaaatatagattatttatttattaccccatgctggtgctttttgcttt

SEQ ID NO: 106180 - DNA, 378 bp, Glycine max
  unsure (1)..(378): unsure at all n locations
  Clone ID: PAT_MRT3847_66898C.1
tcaacctcaacccgattcnnctcgattgcttacctacctatttcagaagcatcatcatcagcttccaatgaaaagctctcncattccgtagagggaccnntcccaatgctttcctttggaaagtctgtatcccaaatcctcgagcccaaaaaaaagaaccggatctggctcggcacctttgccaccgccaatatagccactcgtgcacacgacatcatcatctctctccatcaaaagcaactcctccattctcaacttcccctaactcatctcctacctgccccgacccgactccaactcgccaatagacattcattccgccaccgccaaatccacccccattgaagttaacgattctccgacaactccaacttcgtc

SEQ ID NO: 106181 - DNA, 288 bp, Glycine max
  unsure (1)..(288): unsure at all n locations
  Clone ID: PAT_MRT3847_66899C.1
tttttacttatttttcattgataatttattagaaaataaatattcaacagatactaattagataacccttttttttaatacaagtcatcttcctaccttatttatgagcaccagaacaattcctttatgcagaaaacacctggcgatactctattgggtcacaaaaggcaccagtcactgtcataaaacgnnaaaccccacgatatttcgcacgctaactcgccatatccgcaacccaatatatcgtcacatgtaaattcatgtggaccccacacancttnatcnngt

SEQ ID NO: 106182 - DNA, 2257 bp, Glycine max
  Clone ID: PAT_MRT3847_6689C.1
ttcctaaaactacttaaagggatcaagctgatctccatcttggagctaaaccaaatgacctagttctttgatttgggttctcttatttggcctgaatctaatataaactcatttgaattatacagacaacttggcagccgtactactttgttctcttgcataaaaaacaaatttgtgaaaaaatttaacattcttttccataaaaaacaaactattattaaatatataaaggctacatcaatcttgaaaagaaaacatttcgcaagattgtcttagattcatgaatccattacatgtaaaaacaatttgaatggtacaattctctacttacatatactggccttaatctggattaggacaaatacaggccttaatctggataaggacaaatctttaaatatttgtaacatggaatgatgttttaagtattaattgcaatttggttccgtatagattctgattgaaccaaagtacccattctcttaatgatgtaatgtaggttgatttgcacaacctagttaataaacagatacttgtaattctcattgtcagacttcaattatgtcaacttactgcttatattctatttgcatttcttttgcaaaatgtagcactgtcacaaatcttgatgctgaagctgttttgttctccatttgttcttgtaatttgtcagcattctgtcataccttagatgattttcccggggttttacaggaagtgtggctggatagagtcacaggctatcctccaacaacaaacaacgcttctcacatgcatcaccaacatcactaacgcattttcaagtttcagtatactttcactcccacgcgcgcttacttccgcccttccccggggcgggggaaacactccctaccgaagaacaaacaagtcctcttacatgcaacaccaacaccaacaacatcactaacgcaatttcaatttcagtatattttgactcccacgcgcgcttacttccttccttcccctatccctgttccgtttcggcgcgtgccatgggcgcgtcgctgtcttcgaacggttccagtatcggcccgggcctcggggacataccggagagctgcgtggcgtgcgtgttcctccacctgacaccgccggagatctgcaacctcgcccgcctcaaccgcgcgttccgcggcgccgcatcgtcggactccgtctgggaggccaagctgccgcgcaactaccaggatctgctcgatctcgttccgccggagcgccaccgcagcctctcgaaaaaggacatcttcgcgctcctctcccgacccctacccttcgaccacggtcataaggtgggtgctgctcttcaggaagtgtggctggatagagtcaccgggaaggtttgcatgtccatttcggcgaaggcgatgacaattaacggaattgatgaccggagatactggaattggattcctactgaagaatctaggtttcacactgtggcatttttgcagcaaatatggtggtttgaagtggatggggaggtaacgttcccatttcctgctgatatttatactctctcctttaggcttcacctcggacggttttccaaaaggcttgggaggcgtgtttgtaattatgaacacacccatggttgggatataaaacctgtgaaatttgagttttctacttcagatggtcagcaagcatcatgtgaatgctgtttggatgaatctgagattaatgatacatatggcaatcataagcgtggatgctgggtagattacaaggtgggtgagtttattgtcagtggatcagagcctacaactcaagttagattttcaatgaaacaaatcgattgtacacattccaaaggtgggctttgtgtagattctgtatttattgtacctaatgatttgagggagcgcaagagaagaggcattttgaaatagccatgtgcagaataggaagcttttttttttagtgatgtcatacattccagaatactctattggggatctatcacacagcagcttatacactgaaaaaagtttacaatttggagaatgtcatatttttctggttttttaatttttttttttttttgccagtaggtgtgtattctctacagctgtgtaattattatttctattcaatgtattttagttgtttccagattaggcttataaatttatttgtttcgagggaaaaaaactttcccttgcctgcctcggttgttctttatgccttctgaaacttggttgcaaaagtatatttccgtcggtcataaacattttgg

SEQ ID NO: 106183 - DNA, 275 bp, Glycine max
  Clone ID: PAT_MRT3847_668C.1
cctggacggcctgcgggcaccgttccggaattgcccgacccatccacgcgtgcgtggtctcgagggctggagcaaagaatgctattctcatgaatatgccaggtgctgttctttaaatgtggagatatgtagggggacacctcgtctttgatggttgtaagaggacttctacctacaataaatgtgcaggctgttttttcatagcaatcgcaaattgggctgatgacaccattaattgcgagagcttttcccacaagatggtgcttaccggaaag

SEQ ID NO: 106184 - DNA, 218 bp, Glycine max
  Clone ID: PAT_MRT3847_66900C.1
gaaagacatcttttgatttgacctagatcgcgtcatggatcatattcagggaatgatggcttcaggatcagatgcttttttgatgattgattatcaaaactgctagagatacgagctcggcaatccaaacgctttataagaaaggtctgatactgggggaattgaaccggattaaaaggaagcctttaggattcgggctttttggaccatggttcccc

SEQ ID NO: 106185 - DNA, 258 bp, Glycine max
  Clone ID: PAT_MRT3847_66901C.1
ggaattcagctcgatctttgtctgcacagacaccaccctataaccaacatgtcatcaatcacaagctcacctcactcacaacttcttcttacccacaaccataatcactttactcttgcaagtggagattcaagcctcattcacaccctctccgagccctttccggaccatctcgattaactggagctccatcacgcccaagtacatacccatcatgcccttccggctcaaagccgggcattaagagcgcgtattcaa

SEQ ID NO: 106186 - DNA, 326 bp, Glycine max
  Clone ID: PAT_MRT3847_66902C.1
ggaacgaaacccaaatggccggatttaatttgcctggtcttttcatcttgagaagtttttttccgggggaaagaaacccaattgtttttaatgcccctttcaatgggaaacttatttttccgggagggggggggtttcccccttattttaaaccctttcccatgggccccatcagtttttgggttttgttttttaggggccaaaaaaaattttcccttttaccctcttttttacaagggcgaaccccaagtttttttcccctttttcccccatttttttttaggaggtgttttttaaaccaatttgggggggtgtggggtgttttt

SEQ ID NO: 106187 - DNA, 252 bp, Glycine max
  Clone ID: PAT_MRT3847_66903C.1
cccacgcgtcctaagtataaagcttctatcttatctaattgtaacagacaactttataaatgttgctgccttgtactcaaattgtgtttaaaataaacaacttattcaatctcaagaaaaaaaaaaatcaacaaacaaactatgacaatggacatcattccctggtctaaaaagatcgcagaacaagtgataggaccgctctaagtaagcttgctgactaactgcactgcttttccacaaggagaaatagaa

SEQ ID NO: 106188 - DNA, 155 bp, Glycine max
  unsure (1)..(155): unsure at all n locations
  Clone ID: PAT_MRT3847_66904C.1
ttcacaattagaaaannaaaaanacacncaaatgggggtttcacnttctnaaaagctgcatgacntttntgggncattcccagnacanggncangtgaacccttttatgcaattaagcaaantccttctttgnacnggtttcnncataacctttt

SEQ ID NO: 106189 - DNA, 401 bp, Glycine max
  Clone ID: PAT_MRT3847_66905C.1
atcatatacagactgccgcaagctatcacgccatagctatagctctttcattgatagatgcattttctctgagtgtgcaacatgagcaaactacactaaagatacttcaagcaaagcttggatcagaagatcttcgtacacaggatgctgctgcatggcttgagtattttgaatcaaaagccctagagcagcaagaagcagctaaaaatggaactccaaagcctgatgcatccattgcaagtaaaggtcacctgagcgtgtcagatctcctggatttattagtcccaacccaaaaggaaatgatgctcgaggaaacagaggcgtacaaagatactctcaacaagtgatgacaacatcaagaacatgacgatgcaatagctgatgagactctttttgatact

SEQ ID NO: 106190 - DNA, 333 bp, Glycine max
  Clone ID: PAT_MRT3847_66906C.1
cggccctacactgcactcaagtctttcatccgggcgcagtggggatcttttccatgatcagctggaccttgacctccatctgctgatcccgcatctgtctgaagaagagccacctgcgccctaacgaccacccagcgcttaccaatctgatatatcctgactctgatttgggactcaaatctctcattcgagacacgaccgttgatgctgtcattgccgacaatatcatcacagctgagagagacgatctcgcaactgactacgatagagactttgctatacataaccaatcaggaatcaacaagacataacttagaattacagctcttcaaa

SEQ ID NO: 106191 - DNA, 338 bp, Glycine max
  Clone ID: PAT_MRT3847_66907C.1
cccacgcgtccggggaagggatacccaattttgttgaactaaggtgccatacaaggtgggggtggccattaccatggccatggccaggctagggcggtgcttttaattttggtgttgccactgccactactttgtcaggagcagtaataaggagggggaattggggatttaagggtccccggccgattgggattgggccttggacttggagtttccttctggtttatggccaggcccaaatccttaattgcctcggttaaaataaaggggggaccttctttggatgagatactaaaaattttctaatggcccaagcagttccctttaaaggaggagga

SEQ ID NO: 106192 - DNA, 370 bp, Glycine max
  Clone ID: PAT_MRT3847_66908C.1
aaaaaaaaaaaaaaaaaaaaaaaaaaaaaaaaaaaaaaaaatttaaaaatttttaaaaaaaaaaaaaaaacaatatataaaaaaacaaaggggaaacggggggtgctctaaattttggggcggccgcccctttggaaccctctccccccggaaataaattccggaccgctccctgaaggtgtaccactttcccctattgggggatatatagaacctgggggattacagggcaaatactgtttcctgggaaaaattgtattccgctcaaaattcccaaaaaaataccacccggaaccttaaagggaaaacccggggggccccatggagggagcaaccccccattattgggtgtgggcccactcgccctttt

SEQ ID NO: 106193 - DNA, 259 bp, Glycine max
  unsure (1)..(259): unsure at all n locations
  Clone ID: PAT_MRT3847_66909C.1
gtcaacaagcacagtngnagtttttcttgcttgcttggcctgacagttcttcctgtaaacattgttgttggaagctatataagcaacatgttccaggacagggcaaattctgttggcatcagaattatggnncccnataagtgttctatgngttttccagtaatcattcnatattctgaggccaccaatanatctgttcnggtctcctttnattgtnctgncgagtacttggaagtgtcnacttgtcattntttcgcgg

SEQ ID NO: 106194 - DNA, 247 bp, Glycine max
  Clone ID: PAT_MRT3847_6690C.1
gcaattggttggcatcagtgccatgctgatggcatccaaatatgaagaaatttggactcttgaggttgatgaattagtccgcctcacagattatactcatgaacaggttctggtcatggagaaaaccatattgaataagctggaatggaatttgactgtgccaacaacttttgttttcctggttcgtttcatcaaggcatcagtcccagatcaggagttagaaaacatggcacattttctgtctgag

SEQ ID NO: 106195 - DNA, 406 bp, Glycine max
  Clone ID: PAT_MRT3847_66910C.1
tgtttcattgctaggcaaataaatgctggtcagattatcttacattgacaacactccgtacctacaatttttgctaaaagaaaccctaatgctgcacccgtcatctctcatattcataagaaaggccatccttacatgccaggatgcaagctaccactttacttaaaatatcactattccgatcagcacatgctccattgttcggtatccactttactgttctcactcactctaatacaagccatactggatctagctgtccgtccacccggccaagaactagattgacattaggagagcccactatcaactgctgcccttaactagcaggagaagatttctcctttgagtctcgctagcgttgctcgtgatggtcctaatcctaataaaccttatcccgttgttt

SEQ ID NO: 106196 - DNA, 461 bp, Glycine max
  Clone ID: PAT_MRT3847_66911C.1
ggctcgagctgaagttagatacccgatcatatttctccaggaactccaccaccgcacctgaaaacggtgattaccatgtctagcgctccgaacaacaccctcgctataacagaaatggctggagcagcgcatattgtagcaaatcatgatggacttcgacggcagatgatcggaacctcatgtctgtcgctacactatcactgttgtcactgcataggctgctgggatgaacttgtgctcacttgcacacgacatgaaatgaattatcccccgatgatgtcgtgaggaggatggagactctatatggttgtacgcgggaacacgagaagtccatcatgctggatcgtgtcaagaccgttatggagtaacactttccggactaccactcagctgatgctccgatggtagagttctacccgacgacaggggtcagtatccgggacctagatcagctgatgccc

SEQ ID NO: 106197 - DNA, 422 bp, Glycine max
  unsure (1)..(422): unsure at all n locations
  Clone ID: PAT_MRT3847_66912C.1
tctcactaccccccggccgccccccnnnnnnnnnttttttttttttttttttttggttttttgggtttttttttttttttttttttaaaaaaacaagcccgactttttgggttaagtttattgctttttgtccattacaaaagccccattgatcggctccttaaaattaaaagttgaattattttttttcgaacaaaacaaaaaacccccgacacatttaaactaacaacactccggtccatatttttcctgaagggcttcatataatttcttttataggcccactttgggccgggatctcttataaaaaatatgtttaggccaccttaaacttttgcttttgcttttttccattgctcttggggcaaggccaaccttttatgatccctttattattcgcaggcgcttggttgacccaacaa

SEQ ID NO: 106198 - DNA, 199 bp, Glycine max
  Clone ID: PAT_MRT3847_66913C.1
aggtcccgaagcttgcgcttatccctctgcagttcccggcttcctgggcggcggcggccccggccacctcatgcaccccaacggcaacgtcagagtggacggcatggtaagcgtgatcgggcactagctgacggagctatcgtcgaacccgctggtgaacgcgtggtactcctgcgaggaccctaccgcgcctaccgag

SEQ ID NO: 106199 - DNA, 406 bp, Glycine max
  Clone ID: PAT_MRT3847_66914C.1
tgaattctgtatagcgggcgcccttttttttttttagtcatcttctaattttctcttggacccggtaattaatataatacagggacctggttcctttcaacaatatcccttggaggagggatcaaaaccccactcaaaatttcaagacctgatatttccatggaaaaaggatcctgttgggctaccccacatcataggaaacagctggaccaagattgaaaaactttgaacactcaccagcgaataatctcacaataattttgttttaattacaggccggcctccaaacggggccgctttacatccacctgtatttaataatttgccaaccccacaacgggaaaatctttacctgttggggaaacaattttatctctcttttatccaacccaaggggttatatttt

SEQ ID NO: 106200 - DNA, 869 bp, Glycine max
  Clone ID: PAT_MRT3847_66915C.1
ggctcgagaaattgtaatctcagaacatgtttgtatgtttgtgtttacgatcttttttttctctatttaagtagatactatgttgtcttcttataatgcaggttgctttgctcacctaggcaccaatgctacgaaaaaagataaaactttggttatctcaaaatatggagcaagtggagattatcctgcttgtaccgacttagcatataataaggccatatctgatggtgtggatgttctagactgtcctgttcaaatgtctaaggacggaacaccattttgcttaaactccattgatcttatagagagtacaacagtcgcccaatcaagcttcagcaaatttgccatgactatccctgagatcaaatctggcagtggcatatttgcattcaacttgacatggaatgatataaaaatcttgaccctgcagcctcaatattgaacccttttgcaaaatacagattgttcaggaatccaagatctaagaatgctgggacattgttggcattatcagatttcttgtccttgacaaaaaatcagacttctctatcaggtgttgctatcattgttgaggtgtgtgcttccatgcctattcattctttatagtattcattctaccggctgttatttgaacatataattttttttgaagaattaggacaaatttttgtgagaatggcttagggtcgcttaagttatttaataattcctatgattgatttcaccttggaataataggggaaatagaaataagaaatattaagactatcatgcattatttctatcaaattgttacaagacctgtttctcacttgtttttgttggccatactttacttctaaatttctgtataacttggccaaaaatta

SEQ ID NO: 106201 - DNA, 575 bp, Glycine max
  Clone ID: PAT_MRT3847_66916C.1
cccacgcgttcgtaaatagtatgtaaatacacaatgatagactgcatgagaaaaagttcttccggtgagttaagacctgatttctctctctaaaagttttgaggtggttgggttcatcacttggtcctgttcgtaatctgccaaggttgccgggatgtggaatccacgcgctctctctgcgccactcgccctgcttcttcttcactcgctccttgctctcatctctgctcagagatctacctggaacactctcagcggaggtgcgccattggttgtagcacgtggtggattttcggggatgcttcctgattccagtgatgcttcctataatttggcagtaataacgagtggaccagatgtctatatatggtgtgatgtgcaattaacaaaagatggacttgggatttgccagccagatataaaccttgcaaattctacttacattgcaagcgcttacccaaataaaaccacaagttacttagttaatggtgtacccacccgtggctattttcctctggattataccctgaaggacctatctagtgtcggcttaactcagggagtttactctcgat

SEQ ID NO: 106202 - DNA, 2198 bp, Glycine max
  Clone ID: PAT_MRT3847_66917C.1
ccagcctccgacttgagaaaaagttcttcccctgagttaagacctcattgtctcacacacacacactttctctctctctaaaagttttgaggttgttcctgctcttaatctgccaaggttgccgggatgtcgaactcacgcgctctctctgcgccactcgctctgcttcttcttcactcgctcctttttctcgtctctgctcagagatctacctggaacactctcggcggaggtgcgccgttggttgtagcacgtggtggattttcggggatacttcctgattccagtggtgctgcctataatttggcagtaatatcgactgggccagatgtctatatatggtgtgatgtgcaattaacaaaagatggagttgggatttgccagccagatataaatcttgcaaattctacttacattgcaaccatttacccaaataaaaccacaagttactcagttaatggtgtgcccaccagtggctattttcctctggattataccctgaaggacctatctagtgtcatcttaactcagggagtatactctcgatccaccctgtttgatggaaacgattttggaattcttactgttgatgatttagttaaattagatcaaaaaccaaaaggaatatggttgaatattcagcatgatgcattctacgcacaacacaatttgagtatgagaagctttgtgctttcagtttctagaagcgtagttttcagttatatctcatcacctgaggttggttttctgagaagtatagcatcacgtttcaacccaaaaacaacaaaattggtcttcaggtttatgagacagagtgatgtagatccatcaaccaatcggacttatggttcgcttttacaaaatcttacatttatcaagacatttgcttctggaattcttgttccaaagggatacatatggcccgtagatgcaactctttatctacaatcacatacatctttggtctcagatgcacataaagcaggcctggaagtttttgcatcagattttgtgaatgatgttccatttagcttcaattacagttatgatcctcttgccgagtacctccaatttgtagacaatggtgacttctctgttgatggtgtgctgagtgattttcccataactccatttgaagctataggttgctttgctcacctagccaccaatgctacaaaaaaagataaaactttggttatctcaaaatatggagcaagtggagattatcctgcttgtaccgacttagcatataataaggccatatctgatggtgtggatgttcttgactgtcctgttcaaatgtctaaggacggaacaccattttgcttaaactccattgatcttatagagagtacaacagtcgcccaatcaagcttcagcaaatttgccatgactatccctgagatcaaatctggcagtggcatatttgcattcaacttgacatggaatgatataaaaatcttgaccccctcaatattgaacccttttgcaaaatacagattgttcaggaatccaagatctaagaatgctgggacattgttggcattatcagatttcttgtccttgacaaaaaatcagacttctctatcaggtgttgctatcattgttgagaatgcagcctatcttgcagacaagcaaggattaagtgtgattgatgctgtcatcggtgctttgagcaaagcaggttatgataaaccaggatcccaaaaggtttatattcaatccactaatagttctgtactgctgaagttcaaggagaaaaccagttatgagcttgtgtacaagattgacgagaccattggtgatgccgctaatgcagctgttgaggatataaagagctttgctagttctgtggttgtcaacaaggactccataattcctaataatgatcaattcctgacgtatactattcagcaaaatgctaacctctcagttgtagaacatttaggtgtgtgcttccatgcctattcattctttatcgtattcattctaccggctgctatttgaacatataattatttgtgatgaattagtacaaatttttgagacaatggcttatggtcgctcaagttatttaataattcctatcattgataccaccttgtaacaatatgtgaaatagttataataaatacctacactattattcattatttctatcaaattgttacaagacctgtcctatcacttgtttttct

SEQ ID NO: 106203 - DNA, 556 bp, Glycine max
  Clone ID: PAT_MRT3847_66918C.1
taaaccttttgatctttatttgttttattagcaataatacaattttcagtgattttccatgttgaatcaccgtctcttagctgcttttgccttctcattggaattagttctctcttctccccaatgctttttgtgtttggatgcataagatgaattcaattaaatgctaccaagtagtaacttcaattgctcccagtttctgtgtgctcaatttattcccaaaacatcaagagtcacgtctcaaaatcttgagcaatttgaagacttgagtttcaatggaaatgctttagtgaaaaagcactcctgagatttcatatttacacacacatttcagaattagttacattttagttttgcaagagtaaatactaatgcaattcccaaagtacaagaatctgaaagttcatgaattctaagcttttaatgcaacaattaccaatagacaagtttccaatagaaaacataagcagagtataagtagaactactgatatagtgatctgagttctgaagtgcgactgctatttactgaataggcttatgatggagataagaca

SEQ ID NO: 106204 - DNA, 617 bp, Glycine max
  Clone ID: PAT_MRT3847_66919C.1
gagtgaactatcgacattgagaacgttagacaggtgctcgtcatgaaagtgcgatttcccacatcatatggggagaaaagaaccccacaaacactcacgggcaaacttgcacatctcatggaaggagtattgaccactttggaactaaaaacaatgcgacaatgcctaatggaaccgagatcatatccagccatacaaaatcatccataatctttccacagatcatatgcaggaaaagctgtaagtacaacctgccccgaacagagcgagagcactctacacccatatttgcgcctatgtatcaggatcagacacatctctgtatccagtgggggggaaaacaagggggaataaaaatgcatgataggtatgacgatatttgctaggagagcttctgcaaaagcaatgctagacaataggccttaactaaaagtcaccaagtgttatgggcccacactaaaatactaaagagggtggccccccatccatggacaagtatcatacaaattcatttgacatgcaaacgcttaaagcacggacaatagggggctgacagcatacctctccagatgggggtgaagggatgagtgggctccaactaatcctctttcttatgc

SEQ ID NO: 106205 - DNA, 742 bp, Glycine max
  Clone ID: PAT_MRT3847_6691C.1
aaaaagtaagtatcaaaattaactcctattttaaatgtaccaaaagttatttaaacctaaaatgtaaatatacaaattttccttccctcacccatgaacttcaggatttaagtcttgtgcaagatttattccttgggatctttgttttgtaaattaaataaaataaagaggaaaataaactgtaaggactacaatttgtaatggataattatttatctctgcattgcgtggcgaactcaaatgtactgtaatttacattacaccgttgattaatttctagtagtatgtttgaattttcctagagagagagagccaatggtttgaacaagagtttagcttttattcaaatcaccccaatcaaaattaatccaaacttttgcctgcgctgaataactccacttgatccattttgtcccttatccataatgtgcttcttctgtcacaagagctgttctttttattctcaacagccttgctcatggtgtggttggggcatgctgctgctcaaggcctgatgattgttttgacttatctgttgttgataaagagctgccatgttgctgaagatatccatgttaattggctgcaccattatgttctttgttagtccttaatgactaggagaaattgggtgagaccagcagcactatatggatgaggcaaatgaattgaggcaatggaggctgaagatgcaggtaattgttggggctttggagtgcttggatcatgaaagtggcatcat

SEQ ID NO: 106206 - DNA, 500 bp, Glycine max
  unsure (1)..(500): unsure at all n locations
  Clone ID: PAT_MRT3847_66920C.1
ggggacnnnngnnntttttgtttttttttttttttctttttttnccggaaaagaaataatgcccccttttattaatataaagaacattctcagtttaattaaaaatacctattcttacaaaaggggaaaaaaaaaaaaccattttaagtttctaccccaaaaatttgttaatctttttttaaaaaaaaaaaaaattgacccccccaaaagccttggaacggttttttcttgtttttactacccccctttgacttttccatgccaaagggttttatttacttttttccccccaacaaaaacggtttttccccttcccccccactggttgaaaaataaatttttttccccccccttttacaataacagggagcccctcttgggaacccccgcgatcggaataaccatcattttttagcctaaacaacatggaaaaaacatgggcctgggggctttaattcaaattttttttcaggggggggaaaaaaagaaccaaaattttt

SEQ ID NO: 106207 - DNA, 547 bp, Glycine max
  Clone ID: PAT_MRT3847_66921C.1
atgtgcaaggggttaaatgggcattcgggtttaaaatgctcattacataagtgaatgggtggggtgtaatacatcacaaaactccatgactggaacaaactaacaattggccctaatttgggaccagtttacccattaacccaaggcccctaaaaaaaaataaattggggcccgcgcgaaaaaaaattggcccccccttccccgaggaaaaaattatcccccccgtggggaaacatttttgggtcacagggggcgggaaggagaaacccaattggggcccccccggggggggggggaaaaattcccccggaccccaccctcccccgaaaaaaaaaaaaggttggggggggggttttttttaagaccccccccccccccaaaaattggttgttttcttctgggggggggggggggggggggggccccgccccctttttttgtttcccttcaaaaaaaaaaaaccaggggggggggggggggggcgggggttttttcccccccggcgggggaaaaaaaaaccaaaaaacgggggggggggggggggggg

SEQ ID NO: 106208 - DNA, 375 bp, Glycine max
  Clone ID: PAT_MRT3847_66922C.1
cggctcgaggaacctgaccctcaagcccaaggtttgtcttaactcacccaacacctcgtgttggtctttttaggggaggacaatcccccccatatgcacaaaaccggccatgataacacgtgttttgttcgagactgtctttacattgataggcgaccatcctatgtatctaagacccgatgacatccaaatgtgcaagcggagaggagactcgccacatttctcgcgttacgttctagctataatgacatcattatggctccgatttttgctcataaggacatacttgatctttcaaaatatgctactgtatcagtcatcaatggattgacagactacaaccatgcttgccagataatggctgatgcccttacc

SEQ ID NO: 106209 - DNA, 294 bp, Glycine max
  Clone ID: PAT_MRT3847_66923C.1
tttttaacctctgtagtcgggaaaacaaacgagaatgctggacacagtcatacatgtggcaagcaaaaatgaacataattgcaaaggcgagagaagatccaccaccatacgacgcatgggctcaacatcgaataatatggtgtggcgagcgcgcatcacatcaacagagacgggaaatgagtgagtcaaggcttcgaaccaccactgtgaagaacatgcgcaatcaactgtcttgcacactgacagactacaactgtggtctactgaggaagcgaagaaggtcaaaggctttaa

SEQ ID NO: 106210 - DNA, 368 bp, Glycine max
  Clone ID: PAT_MRT3847_66924C.1
ctcgagccgtttttttttttttttttttttttttttttttggggggttttttttttgtttggtgtgttttttttttttttttttttttttttttttttaaaccaattttaaaaccggagcggcccccaactatagagccctttccccccggaattaatttctgaccggttcctttaggctaaccattttttcttttagaaaattcaattaaaacttggcataattaagaaaaatattttcacccgggaaaaaattttttccccttaaaattccaaacaaaaaacaatccggaaacaaaaaatttaaaacccggggtccctaatgggggaccttacctaaattaattgcgtgtgcctcacttccccttt

SEQ ID NO: 106211 - DNA, 279 bp, Glycine max
  Clone ID: PAT_MRT3847_66925C.1
ggggcttggtttgctttgtgcctgtttgcttgcggccgcccccctctggttctggcgggcgttcgcgtgtgtctctcccattctctgccctccgcgttgtcttgctggtccccgccctggccttttggtccgcgcgctgaccttctgagcacgctggttggcgcgcttctgaggggtcgtcgcccgctttacttgcttccttgggatgctgcgtcttccgcttgggtgctttcttgggtgcctgccttgcctgaaatgggcgcttgtcccccttgcata

SEQ ID NO: 106212 - DNA, 677 bp, Glycine max
  unsure (1)..(677): unsure at all n locations
  Clone ID: PAT_MRT3847_66926C.1
tatatataatatggaaaagttgaacaaaataataaatggatgagtatttcttttttaaaattaatctggcatgggcagatgtgcctctcatttgaaaattgccactaagctcattgttgtcaaaatcgcctcccacacataggattgtgtggtccaatgcgttttgaccacccaagtgacttgtattcccaccagaaagcattctatggttcacttgtgttggatcattgctccaagtcgtggaatcataggattactgcactccaaaaatcagtttgcaaaagtgaacgatctgggttgggtcatacaatcctttagaaagaaagctttttttttgtttgattccctaaattgtgtagtgtttgtgcaaccctcaactctcctccactgtcattctttgacactcttctctggttcttctctaactgttgaccttttctggttcttccctcactcttttagcttgccccctatctctttggtttgtttctcttctccaactcctctgtttgaggctgaatgctctctcctttgttctccctctctcttcgggttctaaagtttgctacacgatgatgtgttttgttgtcaaggaaaaaggctgatttttcaatttagtttaatgtctggtgagntttnnaggttacttttctaatttatgtaattttttatgcata

SEQ ID NO: 106213 - DNA, 523 bp, Glycine max
  Clone ID: PAT_MRT3847_66927C.1
agaagaacttgctcactggtcattaccagaggatgatcttgttttattggctattattggcctaaaggatccttgtcgacctggtgtcaaagatgcagtgcagctttgccaaaaggctggggttgaggtaaaaatggtcactggtgacaacgttaaaactgcaagagcaattgctgtggaatgtggaatacttggttcaatttctgatgctacagaaccaatcatcattgaaggaaaaagatttcgtgccttgacagatgaagggagagcagatattgttgaaaagatattggttatgggacggtcatctcctaatgacaagcttttgcttgtgcaagcattgaggaggaaggggcatgttgtggctgtaactggagatggaacaaacgatgctcccgcactacatgaggccgatattggtcttgcaatgggtatccaaggtacagaagttgctaaagagagctctgatatcattattttggatgacaattttgcttcagttgtgaaggttgtcaaatggggg

SEQ ID NO: 106214 - DNA, 496 bp, Glycine max
  Clone ID: PAT_MRT3847_66928C.1
ttccgttccaaggaaggtttcccgtcatcactgtatgacgtcctccttctttggggggggggggggggtagaaaacgataatatacgatatcgaagatagggcaggggcgagtaccaacgtaaagagggaccaaagataagaaagagggagacaacgggtatgggggcaacaagaagggattacaaagaaaaggaggggagggtgccgaaaaggtggggtaagggaacaataagtagttatgaaaaggcggtagcggcaatcaaaggaagtaaggagtgcatgaaggcggtggtaatggaaaagatggggatgaacaatatggcgagggggggttgaaataggagacgcaagagcgtgatagagagattagagggatccccgagacgcgcaaacaagtacgaacaggtgataacgggcgccggagtgttagtactcatgtgctggcgcacccaaccgttgtaggcgcataagcctgcaggtaggactttactggga

SEQ ID NO: 106215 - DNA, 694 bp, Glycine max
  Clone ID: PAT_MRT3847_66929C.1
acgacagaagggtacggctgcgagaagacgacagaagggtacggctgcgagaagacgacagaagggggtcccttttacacttctctctcactcgcatcacacacaaacaaacactcccattctctctctttctctttctctccgacctagcgagaccgagcgatccgaccctaatctcgcgatgctccgccgcgcaacctcctccctcatctccggcgcctcccgccgccgcctctccaccgacgtgccggcgacgccggcggcggattccgtcttcgcggaggcgtggaagaaagtgagccccaacatcgacccgccgaagacgccgctggcgtacatgaagccccgaccacccactccttcgactctcccgccctagtcttctccgccacctgttccctcttcacctccaccctctcagtctccaccaccagcttccactccccctccatccccactcagctctcctcctccttcctctcctccaccctcctcccctcctccttcttctccaccccccgcctctcctcctccttcttctccaccccccgcctctcctgctccttcttcccctcccccttcctctccccctcctttttcaccacctgctgccactcctccccccgccactgctgcccccgcagttccaccaccctcattgaccccaacagtgacccctctttctttctcacct

SEQ ID NO: 106216 - DNA, 690 bp, Glycine max
  unsure (1)..(690): unsure at all n locations
  Clone ID: PAT_MRT3847_6692C.1
ccacgcgtccgcacgactcacaccaccgagacagaacaaaaccctaaaaccaccttcttcttcttcttcttcttcttcacggttgatgcccaatccctaaaacaaggctaattccacantcctctccttgatacaagctacgttatgaagttcgagatagaggacataaccgtgtacttcccctacgacaacatctacccggagcaatactcctacatggtagaactcaagcgcgccctcgacgccaagggccactgcctcctagaaatgcccaccggcacgggaaaaaccatcgcactttccaaaccccattcccccctcaagctcctctactgcacccgcaccgtccacgagatggagaagacgctcgccgagctccgcctcctccacgactaccagctccgccaccttggccccgccgccaagatcctcgcccttggcctgtcgtccaggaagaatctctgcgttaatccgcgggttctcgccgcggagaatcgcgactccgtggacgccggatgccggaagctgaccgcgtcgtgggtccgggctgtggccgcggagaaccctggcgtgccgacgtgtgagttctttgagcagtatgagcgggcggggtcgtctgcggttctgccgccccgggtttatacattggaggacttgagagtatatgggaaggagaaggggtgggggccc

SEQ ID NO: 106217 - DNA, 342 bp, Glycine max
  Clone ID: PAT_MRT3847_66930C.1
acgtgcgctcggcattcgcctcgaggttgaattctaggtctggacatcaagattttactcacattgatgttgatcatgtggtggattgtcttttaaagggtgattgattccattgatttcgtttggtaaatgtaaattgtgtcgctgatttcgttttgccttttgaattattagtaaataccatagccactttttgcatgctaaaatttccgattaccttttgtttcaattgaaaatacctaatacattggtatagtgtggctggggcaaaatttgttttccatttcaaaaaagttaaaaatctattgaacaaaactagatttcttctcacatattagttct

SEQ ID NO: 106218 - DNA, 634 bp, Glycine max
  unsure (1)..(634): unsure at all n locations
  Clone ID: PAT_MRT3847_66931C.1
acgagaatatgaaataagtttgatcagggttgctgaacctcctgaggaaagaatggagcaggctctttttagccctccactttcaaagcaacgagtggaatttgcagtgcaacaaattctagaatcccatgctactacgttgattgattttggatgtggttctggaagcttgttggaagcattgttaaattatccaacgtctttaaagaaaatggctggtgttgatatttcacagaagggtcttagccgtgctgcaaaggtacttaattcaaaactagtcacaaattcagatgctggtgggcaattgacaagcatcaaatcagtaattctttatgaaggttcgattacaaattttggctctcaattgcatggatttgatatcggcacttgtttagaggtgattgaacatatggatgaagatcaagcttgtctatttggggatgtggcattaagttcttttcgtccaaggattctcattgtttcaacgccaaattttgaatacaatgtagtactccagaagtcgaatccttcaacccaagaacaagaggaatcagacgagaaaactctcttacagtcantgtaatttcgtaatcatgatcacaaatttgagtggacaagagagcagttcacccaa

SEQ ID NO: 106219 - DNA, 124 bp, Glycine max
  Clone ID: PAT_MRT3847_66932C.1
atacgctgaataacttatttatactgaataatcgcagcagaaaaatcaaaataattgcacacagggaattaaaacaacaactactacgaataactgtccgaaaaaattcttctatgctggccag

SEQ ID NO: 106220 - DNA, 450 bp, Glycine max
  Clone ID: PAT_MRT3847_66933C.1
tacggctgcgagaagacgacagaaggggcattacatgtttgattagaatgatccttatcaagcttataaatatgggagcaatctttcggatgagttaaaatatgaaatcagatttatcctttcataaagaacaactcgagtgataagctaagcttccataacatacttaatggaaaaatcacagaactttgacgagaattaagtttttagtttcaaatgtatttcaaagcattttaatacttaccttttcacatatttttatatgtgtggaatctttcctcaatttaaggataagcaggaataattgatgacataagttctgataggtaatagcactgtagattaagacattaagttattggcttgtattttagatgtcattagattatgtttttgagagaattctaaccgctccatggaataataatacatgtcaacttaatttttttt

SEQ ID NO: 106221 - DNA, 721 bp, Glycine max
  Clone ID: PAT_MRT3847_66934C.1
gcctcgtgaggacgtgtgagtggcgagggaggcactgccacaagcaatggaagagtcttcatccattgaggaatcggtggcaagcgtggtcgaagaagcgaaggaggttcaagacgccgtttccgctcacatctctaaggcttccagcgacgaggaacctctccggcaacgtgtccgtcgcgtcgattcccgaatccattcgctccgttcctctctcgattctcttgtctccaccaaacaaatccctccctccttagccgataagttggatgaagatttgcagagagcgagatgcatcatcgttgacggtgactcctcttcgcttctccctggccatgcacaaggaagctttctgaggatgtttctgggtcctatcaatgttcgtgcctccaggaaggacgttcagctcaaggtcaaagaggaatacaacagttacagggatagaactgccctgctattcctgctttttccggcaacactgcttattctaagatcttgggtttggtctggatgcttgccaacttttcctgttcagatgtaccaggcctgtatattatcactatacaccttttttgtgatgttagagtttattttcagagatggtaaaatatatgtcagcaatctatcattatgtattatctattgtcatcatcaggcgtggctgctattcctttacaccggtttggcatttctgagagaacatattgagagtcaatggaag

SEQ ID NO: 106222 - DNA, 280 bp, Glycine max
  Clone ID: PAT_MRT3847_66935C.1
gccttgtgaatttgtgaaaaaatcatattctgagagcataatgtccgggaccattcacatgattggggagacccttcatgtgggagggcactagaaggctgaggagccttgggtgaccaccatgctggacaatacaacggggagcaccatggcagaacacagcgttgagctcaaatgcaagcatgacgtgtaacacaaagctggagagtaccatggtgctctccagcctgagggcaacgaggggctcctagacaaagacgagggcaagaaccatgggtgg

SEQ ID NO: 106223 - DNA, 609 bp, Glycine max
  Clone ID: PAT_MRT3847_66936C.1
gcgaagcccgttcaccagatctggggctttccgtacctgattactccctttgtaattcctgtgaaactcatttcatttcattagggtgagagagaattatcaaaggtgaaacgaagaagccctaactacgcacgcattcgtgagaaaactcaatattcgtcgctcatggcactctcttctcgtctcttttccaaatccaaattgatctatggcagtcaaatacttctacaaaaggagcatgctattccagttcgtcactttgctaaagagtctgcccctcctgcccttaagggagacgagatgctgaagaacatttttgtggaggtgaagaacaaatttgagaccgccataggaatattaaagaaggagaaaatcaccattgacccagaagatccagctgctgtttctcattatgcaaaggtcatgaaaacaattagagagaaggcaagcttattgtcggagtcccaagacatactattcaccattgaaattgagacacaggatattccagatgctcggacctatcttctgactttgaaggaaataagaatcaagagaggtcttacagatgatcttggtgcggaagctctgatgatagaagcataggac

SEQ ID NO: 106224 - DNA, 2052 bp, Glycine max
  Clone ID: PAT_MRT3847_66937C.1
ctgcagtcatcaatccgatacccgcagtctgctcaaataccacagctgaaacaacgtcgcctctaccactcggtttcgatgaccgtgtaaccaattccgcccccaccattcgcctcccgacattgtcaatggagaaacacgcctgctgagaggcattacccgaattgttatggggtcgcgatacaagtccgatatttcgctgttacacacaaaaacccccaaatacagatccaagacaaaggaagtctcaatcctctcaaatagtaactaatatttcacagaatcgtggtacgagcatctttaatcgctgattattgttgtgaaactttactaaggattttttgagagagaaattagcagtcgtatatttttttacaaaatttgcaatgatttagatggattgaatatatttggtcatcatcgtatttcctattgaactgtctacaaatgatattagatttaggtaattgttataaataatgactgctttgtatttggggagttagcttggggagtttgaacatttggtgaaacgcttggttaaaaaatgaaagtatgtttagcttttcttaattgaattagtaaatagaacaatctagtggaataaagcaagaatagcttggtattcttctataactaagaaaattttgttttatttcttactttttgctcaaaaaagtagataataagtttcatttaaagaccatgtggactttaactcatcttcatgcagcagcgaatgataaggtgatctatgggaattcatccaattttatctatgatatgtatgaagagtatgtaaagtacaaatatatttatatttttggattaaataatattttcaatgttatctagaatattttgggtttaactgtggatgaagctacaataaagatgttttgtttacttttgaagtccttcagcaggttattgtaggtcaaaattccaattaaagtaggatataacgaaattaggttttttccaatgtgtttcaccaatcacaacattgaaggatgtaaatagtattttgttactgttttttgttgtctctaaggagtggcagtactgatggtttttacattctactgtaatagaaatttgtttacaatgaggtgcagagatgttattgattggggcagatgattgctgtgcacattcttataattgtcatacttctgctaaaatgtttgaccctcacttttgttagttgtcattgcaaaacaaacaattaatgttaattatcatctttaataagtttgcatttgtcttgaaagccatggatggtacaacaaattgtaaggaaaagaccagtactcatgcagaatgaataattgacagttatggcttatgtactggtgtctggtgtacccccatcattgaacgccaatcctgtgtgagagaaggattggattcaacatacatttggaaagtgaaatttttgctaaaccacactcttctcgagttgatagtttgggattgtgcgttgattatcagcacgacaaggcattaaatttagaggccaattggctctacctttttgaactgcataacaggtagctaatgtgaaagtaggggaaaattttgtatcatgattcaacggactgatagaactagtatgtttccgtgagtcttttgtaactaaaatagagcctagcttcataattttttgctccctcaatgctgctgtacacggatttacaaaagaatgatttgcaaatgaaacatgcattcagccctgagttactatggaagtcgaaatcgctgagcgattttcaataaccgctgtagcggctgcaatagtggtctaaatacagcttttcgggtgctacagcgcactgccataatattagacttcaaattctatatttactccagaaacatcattgtttgggtaaaaatttacaaaaaagttacccctgttttgaccctttattcctttacacattacaagattatattttatcctatgttttgttctttctttctttatactttccactcaattcacattttgtcaattttattttatctaatttgttatgttctttttct

SEQ ID NO: 106225 - DNA, 1216 bp, Glycine max
  Clone ID: PAT_MRT3847_66938C.1
gtctgaaccagacgtccgcccacgcgttcgctgattagtccctttgtgattcctgggaaactcatttcattagagtgagagagagagagagagagagagagaggtatcacagtgaaacgaagaagccctaactacgcacgcactcattcttgagaaagctcaatattcattcgtccatggcactctcttctcgtctcttttccaaatccaaattgatctatggctgtcaaatacttctgcaaaaggagcatgctattccagttcgtcactttgctaaagagtctgcccctcctgcccttaagggagatcagatgctgaagaacatttttgtggaggtgaagaacaaatttgagactgccataggaatattaaagaaggagaagatcaccattgacccagaagatccagctgctgtttctcattatgcaaaggtcatgaaaacagttagagagaaggcaagcttgttgtcggagtcccaagacatactatccaccattgaaattgagactcaggatattccagatgctcggacctatcttctgactttgaaggaaataagagtcaagaaaggtcttacagatgatcttggtgcagaggctctgatgatagatgcattggacaaaattgaaaaggatttaaaaaaacctttactgagaaatgataagaaaggaatggaccttctcttggcagagtttgataagattaataagaaaattggaattcgaaaggaagatctaccaaagtatgaagaggagctagaacttaaagtagccaaagcacaactggaggagctgaagaaggatgctctcgaggcaatggaaactcaaaagaaaagggaggaattcaaggatgagcctgaatcggtcgatgtcaaaactttggacatcagaaacttcctttaaaatgtcttcaggatgtttttgcacaccctagaaattattgcatttggataatgatgaagctgtgttcaataagtagacaccactggtttgaagtgcaacattgatgccagtttgaatattcttgagttttttcaagatcttttttgtatttcagattccatgttaaactggaagttgaggctgtcaaattttctaaatttttcttgtcacgttgtttcccaagtatttattcttattgattttatggctgttccgcgaccctggtaaaaatcttacgaaaaaaaatttaaaataaatactactctcttcatccc

SEQ ID NO: 106226 - DNA, 415 bp, Glycine max
  Clone ID: PAT_MRT3847_66939C.1
agagcataaaaacctttattgaatgttctataaatagagctcaaagcttacaagaaacatacacaccccttattcgttagcataactaacatcatcttaaaattaaaacatgcattcaaaagacttgtaagaaattacaaactgctgaaaaattaagccatccatttcaagctacacattaaatcatacttttaacaataactacgtacgactctaacacacaaaacaagcatgacaatcagaatcaagagacccaattaatttgaataccgagtgctccatgagccaattagtacctaatattttttctgtttgttattctttggctcatcatccaccataatgctagctagctctggttctctagttgattgattaattgctgtatcatctttagatacttgttcgtcatatg

SEQ ID NO: 106227 - DNA, 383 bp, Glycine max
  Clone ID: PAT_MRT3847_6693C.1
ctgcaggagccgggacgctatagaggggtcgtcctacgcgttttttttcgtgaaccggtgaatattgctcggttatttaacaatgtacaaaaggaacgaaccaaacacttactaaaaggataaccaatcaacatctatttctcaggcattaataagcgcgatgcttctcaacagggtctaacacgaacccaacatcatcttcattacaaccagcaaaaactcgtattatcaacacgtaccttccaacaacgctctctagaattcacatcgcacaaacaaaagtgtgatctggtctaattggaatagaaacacaccgcgagcatgcgactatacgcacaaaagtgctcttacatgggaaagagcggattcaagataaaaacatg

SEQ ID NO: 106228 - DNA, 431 bp, Glycine max
  Clone ID: PAT_MRT3847_66940C.1
ggagagaaacgagttatacctatttttatccgaccaagacggggaataatcaaaacaaaaatttgtttctgagtgaaattggtttccaatcacaaggccaaacaaaatcagaagcaaaaatataaagccgcaaggcacgaaaacataatgagtgaacaaaataatattaatgcaaccctggcaaaataacaagttgcagaagctaaacttgtctgggcaaatagaaaataaaataaaccaactaaaaaacataggcggcttgcgtatacaacgaatgggcccttttccttataaacagggagaacagataaaaaccaatggcctcctccccctgtaaaagtaaaaccttcaaaaaaacattctatttgatttgcccacaaaataaaaatgcatgaaattggccgtataaacccaaaaaaaaaaaaaaataa

SEQ ID NO: 106229 - DNA, 270 bp, Glycine max
  Clone ID: PAT_MRT3847_66941C.1
caagtatcaacactcgttcaaatcctttgtattgtttaagggacttaaatactgattgtctcttagtatagggtgctgaacactgtgctattggatataggactcgacggctgatttaagctttatcccagacgggattagttcaatgtggaggtaataggtcgagctgcttgcatactggattagtgattgcactatactatgtatgatacgacctgggggaccaagtctgctattagtatccttggtttcgctctcttgttctcactg

SEQ ID NO: 106230 - DNA, 530 bp, Glycine max
  unsure (1)..(530): unsure at all n locations
  Clone ID: PAT_MRT3847_66942C.1
ggctcgagatctcttcttttccgttcaaatcaaaaccacaatcattcattcattcaccgaaactcaacaacaacaattcttcctccatgttctgaaccgaccactcaatactcgactcaccgaatcggcttctttcaatctcaacacgcaccaacatggccaccacaaggtcatcttccgaggacatcgtcgattccacgccgctgctcgccaattccggcggctcctccgacgagctcacctccggccgcggtttttcgcggcgacagcggctacggcaggcggcngcggttcctccggcgggcgagcgggcgccggatgatgcgcgagccgtcgatgctggtccgggaggccgcggcggagcaattggaggagcggcagagcgattgggcgtattcgagccggtgggggttctggacctcgtgtggaacttccgttgtggttgtggcgggggccgtgctggttttgagcgcgagcgaagcgccgggcatgcctctaggttgtggattgtagggtacgctatgcaatgc

SEQ ID NO: 106231 - DNA, 1807 bp, Glycine max
  Clone ID: PAT_MRT3847_66943C.1
gccctcagctccgtcctcgcccaacctcgccttcgtaaacgagctggggcgacaccccttccgacgagcagggcccttcggcctcgaaccctcgggctgcgtcgtccaatcctccgacctctcctattggcggtcatgtcatctgagtggggaatttacagatctgatgatggaagagttcaatgagaactttatatatgagtgttatccgtgaaaatttgaaacagtgcaagatttcactttttaagagatttcgggaactcactaggaaaatctggcatacacggaagtttaaaggacaggtcagtccacacgagtttctacaagctgtgatgaaacagtattaaaaaaggtttcggataggtgcacaatctgacccggtagagttcatgtcatggctacttaatacgctacatgcagatcttaagacttcaaagaagaatacaagcataatatatgagtgttttcagggcgaacttgaggttgtgaaagagattcctaacaaagtgatctctgataagaaagaaaacagtgaaaaccaaaacaatgctgagaaactttcagatggggtgaatgagcgatatgcatttgtcaaagaaacttcaaaaatgccatttctaatgttaggattggacttgccaccacctcctcttttcaaggatgtgatggaaaaaaatataataccacaggttccactctttaacatactaaagaagtttgatggtgaaactgtcacggaggtggtccgtcctcatatagcaaggatgcagtatcgtgttaccagattgcccaagtatatgattctacacatgcgccggtttactaagaataatttttttgtcgaaaagaatcctacgttagtcaactttcctgtgaagaacctggagttgaaggattacattcccttgccaacaccaaaagaaaatgagaaattgcgaactaaatatgatttgattgctaatgttgttcatgacggcaaacctggtgaaggattctatagggtatttgtgcaacgcaaatcagaagaactatggtacgagatgcaggatttgcacgtctctgaaacacttcctcatttggttgcactttcagaaacttatatgcagatttatgaacagcagcagtaaaaggccgagtttgaatccttctctgtgcatcgtaacctgaagcacgtagtatgcagaaaggttgagagtatgagaggtttcatgcgatcatatatcaaattgatcaacaggctgcaattgagttaggatgcttggggttaaaacaaaaaattaatccgtgcttctgattgttgaagctgtctaaacatgaaagatgaataacttctttggtgttcaactttgactggtttaaccccataatacacagatgtactgcatggcaccgagggacccagttggatttttcttgtacttagctgatagtaagtttactagtaatacatggaatgtgatttatctatcctttaagcgtattccagattttggttgcgttgaacatttttcattccccttcaggaggcggtttagaagatgctgatggtattgtttggtcgatgaaccttcaaggtgcctgcctgatgcatattgcgtttctattaacagtgattgggtaaaatatataaattttgttggcacactagtgtaaatctacaaagagattgatgttattatgctagtggattatagctgggtatgcataggctctgtgattagtcggatattgttagttgtttcattcaggatcataattttcctacaccatatatttatgaagagtttaatttctatgtaaaaaaaaa

SEQ ID NO: 106232 - DNA, 149 bp, Glycine max
  unsure (1)..(149): unsure at all n locations
  Clone ID: PAT_MRT3847_66944C.1
atnatcccaacangccctcatacaacccactcaggcttccattgtacgatgtctacaaaattggtggtnttggtgncatgccagagggacgtgttgaanactggtgtcgtgaaacacggtnnggtggtgactttagggtcccactgggc

SEQ ID NO: 106233 - DNA, 272 bp, Glycine max
  Clone ID: PAT_MRT3847_66945C.1
aattccctcgtcgacccactcttacgtactgctacaaaaacccccaaaagggactctttaatcttattcagcttccaccatccttgaagaatatcaataatcttaacactaataatcatatatacatataaacttactcatacactctttctactttattcaacccaacatacttaatttaatcctttcatacattcatacattaattatatcatttattcctatgtttaattatacaaacactatcacccttatcaactcctacttaatta

SEQ ID NO: 106234 - DNA, 296 bp, Glycine max
  unsure (1)..(296): unsure at all n locations
  Clone ID: PAT_MRT3847_66946C.1
cctcgagggccgtccgggagttagggtttcggtggtggacgacgccacgtgttcacgtgggatttgatgcgggattttgcgccgaatggggaaggagaagggaaggatagttacgtggagttaaattcttttgatgatgaagatgatcatgagcgagtagagaaggaagaagaggaagatgaagaagatgaagaagaagaagaaggggaagttggtggagtgagggagaagagtggggggganggaaaatgcgcnaggattgcggaaattgtggatgatttttgagggttttctac

SEQ ID NO: 106235 - DNA, 266 bp, Glycine max
  Clone ID: PAT_MRT3847_66947C.1
aaagaaagcaattcatttgggttaggtggcaggaaaaaaacgatgatatttttaggatttaatcaaaggtcccaagaaaaaaaatcctctagggtaaagtgaactatcttgacaagagacaagagagagctctggaccaccatggcgctaatactaatatgtggcacgcataaacatgattaactgaacctcgttggttccgacctggtaggtctttatcaaaagaaaccttgtaacagaaggaggggcaatacacatggttttag

SEQ ID NO: 106236 - DNA, 1341 bp, Glycine max
  Clone ID: PAT_MRT3847_66948C.1
accactcgtacgaaggctgcgagagggcctctgtagggggtgtcctattggtggaggaatgcttgttacctactcctttttaagttcccaaattccccaaagaagcctaaggccaaaccaaaccaaacgtatcagaataaacaaagaaagtcctctctctaatggagcggtacaaatgcaagctctgctccagaacattctccaatggcagagccctcggtggccacatgaaggctcacttagccaccctccctcttcccccccaaaaccaacaaccaccactttctccctctgctgctgcttccttctcttctaattcctcttcagaacaagaacaagccacacacgatgaaaagtccctgatttatgggttaagagagaatcccaagaaatgcttcaggctcgcagatcccgagtttgacacgggctctgtcgttcaagacagggagagcgagaccgagtcaaagaacccaactcgccgacgatccaagcgaacccgaaggcccgtgaatttggaacaaaaaaagcccaaactgagtttcatggagtcgcctgagcccgtgagttcggtctccgacacttcccccgaggaagatgtcgccatgtgtctcatgatgttgtcgagagaccgatggagtaagaacaacaacatcaacgttgttaatgttaatgatgaggatgttgtcgaagaggaagaagaagaagaagaagaggaggaggagggtgggagatcagtactagagataaagttgaggagagttcgcgggaagcaccagtgtcagagctgcgggaagacgtttcgatcttcacgcgcattgggcagtcacagaagcatttgcgaaggttcgggtaacgatagtaaaatcttccaatgccccttttgttccaaggtgtttgggtctggtcaagcacttggtggccacaagagatctcacctcatgccttcttcttccacaaccgctaataatgattctgttagattgaaagagagcttcatagatctcaacttgccagctccgcccgaagatgacgaccttagtgttgtttctgatgcctgataattacttgttcttctctgcagcaattgggtaaagtccttttctttttttatagtaggtaacgatatttcattgcggttcattgttagatcagatgcttttgatgctacaatcatagcttataatttatgctctattgtgcctagattctcaactaaattgttactctaggtaacatcgtaatcaattaatataagattattttattttaattaccctgatctcaagtttgtgtttttaagtataattctacttaactccatcatcattactttgatttccc

SEQ ID NO: 106237 - DNA, 204 bp, Glycine max
  unsure (1)..(204): unsure at all n locations
  Clone ID: PAT_MRT3847_66949C.1
cacgcgtccgcggacgcgtgggtcagaattgtatcctgaatacctatcccacaatccatactgcgctgaacctgtntggatggtncngnaccaactgtatagtatggttgctgtctggggtctgttactttgggntctctgttgttcgcagacatggaggatgcctggggcgggtggtgctgaagctgatgctggggggggggg

SEQ ID NO: 106238 - DNA, 147 bp, Glycine max
  Clone ID: PAT_MRT3847_6694C.1
caatgttacagtggataatacaacttagtttgcagacgaacatgatctttcgttgcagagacgcaaaagggcattcatattaaaagtagaggctttcagagtgatagttcagaagactcaaaagaagcccgatccctaagaaaggga

SEQ ID NO: 106239 - DNA, 429 bp, Glycine max
  Clone ID: PAT_MRT3847_66950C.1
aaaaccccaatgggactatttaacaaaatgtttaccaaaaaaagcccaccgcttttcaagggggaggcgccactgagcttatatcactttgaagagcctaattgtgcttcgcgaagccggaaattttaaaaagaccctacatttgccccggaaagggggggcgcatttttcgcaaaaaagggagcccttatttttccccatagccttgaagggggccccttaataaactaccccccaccaaaagaaacaaagagcccattatttgccatgggcgggtggacacaggttattgtatgggcccacaaggtttgatacacggggcttctgcacccatttgggatgggaccacggactggcgtttttccggcgagagggccaggactaaagaattgctcttaggccacctggggggcgaaaaaactggggggg

SEQ ID NO: 106240 - DNA, 324 bp, Glycine max
  Clone ID: PAT_MRT3847_66951C.1
ggggcgtgggagttgatattcttgcccataagactgaatgtatccttgctttgatgatttctacttgggttaattagatatgctgctataatgttattggtaactaaatttgttttttgttttttactttcctgattaattgtaagggtgttttgtaatgcttattgttcacatttctaatacatggtattgtaaattgtgaagaagtaccaaggatttctgttaactgcaacccttgtttcccctaaacaactgattccatttctggggtgggggagttgctgggacccccttgccagcagaatgtgagaggctttagatgcc

SEQ ID NO: 106241 - DNA, 326 bp, Glycine max
  unsure (1)..(326): unsure at all n locations
  Clone ID: PAT_MRT3847_66952C.1
cccacgcgnccgcccacgcgnccggcnnaancgggcgaggcaganncnaaaaaanngagggggggngggcnggagcaancggggcngccaagaagaaanncgaggaagaggaaccgccgcgaagcnnccagagcgggggcccggngancggcgngacgggcancgngggcaacagccncgccgagaaccncccncncgccgacacccccgccggnccaaggaaggncaacggcgncgcacgccgcccccngccgccgnggaacgccgaccaaccngncgagaacaaccagggcgacgncnacgaacccgccgacgccgaagccaaa

SEQ ID NO: 106242 - DNA, 486 bp, Glycine max
  Clone ID: PAT_MRT3847_66953C.1
aggataataggttgatgggtggttttcttcttttcagaaatggggagatgggttctgaactctgaagctataattctgatgagtttgaaggagaaaacatatattgcgctttaaaattaaaagacacattattatccgtgttgcaagttgatttgatggcacaacaactatagtacctcctatggaccaaagcctttctttgtttctttattttttaaattatattttactcgcccttgttgttcgtttgtactttgtttaaattaataatccttttcaaattgactagaaaactcgtaaatgtaatatgaaattataatttatgaatcataattcgatttttctttttcgttctaaagatggccagtcatttccatacgtccatcatgtcggctccttgtgatctctgagagagcatcttaataatggtaatggatcagacgcaactgacgcggttgttgattagccgtataaaacaagaattaa

SEQ ID NO: 106243 - DNA, 157 bp, Glycine max
  Clone ID: PAT_MRT3847_66954C.1
gttccatactcttggactttatgtccataatgatctcgcccttagagttaggtgctaattgtcaacgagaatgtcattgatcattcacaagattgatgagacccttcatgtgggaggccacaataacgatgatgagtacaagggtgagcatcaccat

SEQ ID NO: 106244 - DNA, 206 bp, Glycine max
  Clone ID: PAT_MRT3847_66955C.1
tgttcatgcaataaccaaatgctgtgataaacagaacttgtagaccatccctatggtgagcatgcaccatgggcgttaataagtgggaaacttcattgtaacgtcggggcctactgagcccctagcgctcttcgacctatccggggacatggaaacctcttgcacgcgatgccatcttttgggcttggtgatcatatcctgactac

SEQ ID NO: 106245 - DNA, 257 bp, Glycine max
  Clone ID: PAT_MRT3847_66956C.1
cctttggtttggctgtagctcaaaactcgctcttcttgcccgttcttttattggtaggttcaagtcttcttggggccattgtgaaggttaatgtgttgaatgatgctcttaaaagcatgtaccacgcccagaaaccggggaagcgcccagtcatgattaggccgtcctcgaaagtcataataaaattccttttggtgatgcaaaagcatgggtacattggtgaggtccagtattttgattaccacaaggcttggaaa

SEQ ID NO: 106246 - DNA, 502 bp, Glycine max
  Clone ID: PAT_MRT3847_66957C.1
ggtttacctcaagagtttgactctgtaattcctttgattgaaagtcacagtgatgaaattactatcgaagaggttgaaggcctcattgttgctcaggaactgcgattgcagaaatatttcaagaaaacctcatcagactctaccttctctggatctctatcaatttgacacaatctgtttctcagatccctaccacttcttttgatcaaaacagaacatcaattttcctctgatcagaatcaatcttcgccatttacttaatattgtggttctggttggaggctgttttggccatggtaggggccgtggcggttggggttctgttcactgacatgtgcacttcaagtttgggcacactgcttttgttacgtgctggaaactgaaagctgaacttcgagggtcagcacctccagaagaagaagaagaaaactaagggagaaaggaaattttgctattttcattcatgcctgatttggttatttacatagaatttgtccgattt

SEQ ID NO: 106247 - DNA, 452 bp, Glycine max
  unsure (1)..(452): unsure at all n locations
  Clone ID: PAT_MRT3847_66958C.1
cttcaatgatgtttgttggatgtgagctatgtcagctttgatctattttcatatttttatagaaattgttggattgggttgtttccttataaacctttctaagccttagtaactttttttatttttgctatttaaaatttgctcttgtgcctattactctcatgtagataatgtttcctatactgatttgtataggattttttggttgatcatgggcagtttcaggctaaaccacaggttagagtcccacaaacctaactgcatttgtgtttagtcctgtttatgtgtcattggatacatgttatgtatttattatgttttggttagatgagtacaagaaattgttaagatgagtgggcacataaaacgattgatatttttgcctttctatataaatctcacttggaactntattagtgttccttataaatactcattcttgtgtcaacagc

SEQ ID NO: 106248 - DNA, 691 bp, Glycine max
  Clone ID: PAT_MRT3847_66959C.1
caagggataaagtacctacttacactagttgattagaaagttgacaatttagattctaacaacacaatagttcatattacatgcacatatatctcatcaataaaatcaattctacaattccaatactgtacattactctctaaagtgcacctaaatccaactcctcattttccataaccaaaatctagcttcctatgaatcccaagcagccctttctctaccacaacttaacagccattaactaatgcacatatattcaccaaccattatacttttagcaaaaccaacaatgaaggttttacattgcgatggtagtcacatcgcaatccttaacacggcaggaacttgcaaataaatgtggctgcaattacaattgtgatgtggtcatggttacctaaaaaatctcgaggttgaatcaaccaacctagcattaaacccgccatcactaaccttcaacatatcttccaaattcattgacacgccaacacgtcttagcatcccaaaccgcggcttaattctccgttccaagctaaaagagaagtactgtggaaacctcttgagctcagcaacatccccattcatctccctcaagaaaaactccaccttcggccccaaattcttcttcacactaaaagtcaacaacccaggtgacctcacgaccatgttagcaacctcttcgtgggtgaacccc

SEQ ID NO: 106249 - DNA, 1380 bp, Glycine max
  Clone ID: PAT_MRT3847_6695C.1
ctgaaataattagagattgtgatatttcatgacattatttcaaatttgtaatggttattttataaaacgcacagttctcttccacttattttcctacctttttacttacctgcagcaaacttacatcgagtaagatttgctctttcctacggtgctagaaggcttaagcagatcctcacacttccaggagaaaacatgggtgcagcactagagaagtttttcttcagcactttggacaggaatgggaaaggagaaagggcggatgttgcccttccggtttctccatttggtattggaagatctgaagagtctgtcctccgtggagattgtgaaagttactgtggtggcttacaatatgttcagttgtatcgtaattatgccatgccaatagctgtacattccagttctccatcgtcaccttctcaggatgatatccttgcaccatcaacgcagcaaaactggagtatgttttaccaaggcggtactgatgtatatatcccgggacagacactctatcatccaacttacaaccttgaaggaagagggaaatcacgaggaacgggcacatacatacctgacttgaattataattcctactgggatatgcgcaccaagccacccaggccaaggagatttgcttcttcaaagtacaatgcattgcccaaatcacctccgaaaaagcaacaagcagaagaggttcattctgagatagacataaatgctaattcagattcaaggctgtttgagttctcaagtgaagattccccccttcttctatgcaattgcaaggctataccgccaacacaagcccaagagtctactccattagcaaagtttcattctgagacagacatggatgttacttcgcagctgcttgagttctcaaatgaagatttcccccttcttccaaaggtttattctgagacacacatggagggtaattcgaggtcgtttgagctctcaaagaaagatttcccccttcttcaaagcactcacaagactgccctgtcagagtctgctgctaagttaactaagcaagccaagagtttcccatcctctaaagagtctaaactgaaaaatattgagtttggaactttcaagaaatcacaatcattgatagaaccaagtttatcaacaaagggtgagagagaagattctggtgttccattatctcaagaaactgtgttggtggttccaaaggtggcagccgagaggaaagatgaatctccctagagcaattagaagatgaattgacagtgttaacattatatattttgtagaattttgaaggatatacatcagcagagtttctaatgtgtggctttgttgctggtggtcatgttttgatcaaataaaaatgatagtaatcttttccttttt

SEQ ID NO: 106250 - DNA, 593 bp, Glycine max
  unsure (1)..(593): unsure at all n locations
  Clone ID: PAT_MRT3847_66960C.1
tcgagcaaaaacccaaccatactaaaatcagttgctgcaacatctccaacatttaacatagctatggcacctcctcaggcagacctaaggaagatcggtgcagaaggctttgctctgatagacaagttctatggtccagcaagaaggaacagtgtcaatgatgcattccatgggcgaagaggagatcgttgttgggttgtttataatgtgtctaatgatgtcatggaagattctgctgcaattggcatggaggcaacaactggccattttgctgcgaaatctgctatgaattatccaaaggcaggtaaacccgaaattcgttattggggtagacccttaaaattttaagtttttttggcttatgcatgttatcaatatcaggtgtcttcaaatgggtctgtatttcatgttagcttactcttgtttgatatatacgtgtataaaaaaaaaaactcggagaccttcatctatatttatatcaaggtcttctgtagtttgtggaaggtaaattacatatgtagttgaataaagtactcaagtatcaagggatgtaatgaaactactnngtatgcatggactactattttttttag

SEQ ID NO: 106251 - DNA, 341 bp, Glycine max
  Clone ID: PAT_MRT3847_66961C.1
ctgtatattaatatcctttaattatatttcattttaataaatgattatctttgggattgggataaacactctacaatgtggcgactacacctcacttctaccttcagccacccctcaagtcattaccgacatggaaggtaatgatctccacattgccgggaaagaaaccctgatgtctttttgggcccaaagggtccctattttagaaacccacccactgggaaagaatgattcgctaacacctaacgcccataatgtttatcacctgccttggggactgcatccctaatataaactccctattgccgttctgaaaaccccaactgatttcccgagaacat

SEQ ID NO: 106252 - DNA, 678 bp, Glycine max
  Clone ID: PAT_MRT3847_66962C.1
gccaaattattgaaacgatcagttcttattattgcactagctcacaagttcctaagaatttaaatacttccctccaaacaaaaacaaaaaattgatcttcattgattaacataattacagagagtatgtctgtaaagctaggatacgggcttaagcatggcattcagaacagcttccttggtgggcaaagctggtattgcacctctctcggtcacagtcaatgcaccacatacattagcaaacttgagagaatctctcaactcgtcctcgttctgaagtattgaaagatccacagctaattgtgataatattccagccacaaatgcatcaccaggcccagtggtgtcaacagcatccacctttaaccccttgaccctaccactgaactccttggtgtaatatctgcaaccctctgcaccttcagtaactaggagtagcttgaggcttggatggaatagtttatgaacaacagcatcactcatatgggttctcaccttttgtaagaaaagaaatctcttcttcacttatcttaatgatatctgcagtctcccatatactcagaattccttctcttgcactatccgcagaaggccataaaggaagcctcaggtttagggtcataagacagaactacaccagcatcttttgcagcttttgctgcagcttatgtgtgctgat

SEQ ID NO: 106253 - DNA, 858 bp, Glycine max
  Clone ID: PAT_MRT3847_66963C.1
attgaaacgatcagttcttattattgcactagctcacaagttcctaagaatttaaatacttccctccaaacaaaaaaaattgatcttcattgattcacataattacaaagagtatgttggtaaagttaggatacgggcttaagcatagcattcagaacagcttccttggtgggcaaagctggtattgcacctctctcggtcacagtcaatgcaccacatacattagcaaacttgagagaatctctcaactcatcctcgttctgaagtattgaaagatccacagctaattgtgatagtattccagccacaaatgcatcaccagcaccagtggtgtcaacagcatccacctttaaccccttgaccctaccactgaactccttggtataatatctgcaaccccctctgcacctttggtaactaggagtagcttgaggtttggatggaatagtttatgaacgacagcatcatcatatgggtcctcaccttttgtaagaaaagaaatctcgtcttcacttatctgaataattatcagattggttgttagagatggtattgttgtctgtttttttccattcccttgtaatctgtactcttgaaaaagggaacaagaaaaagtctattgctaaagaatatacattcggccctattgataggagaggaaccttaatgatatctgcagtctcccatatactcagaatcccttctcttgcactatccgcagaaggccataacggaagcctcaggttagggtcataagacagaactacaccagcatcttttgctgcagcaatgtgtgctgattggcatggttctgttataagacttatagagccataatggaagatcttggcctttctg

SEQ ID NO: 106254 - DNA, 1165 bp, Glycine max
  unsure (1)..(1165): unsure at all n locations
  Clone ID: PAT_MRT3847_66964C.1
ttcatgcctaaaaagatatatgaattaaagagaaggtacatgagatctgtgtgtccaatatgtttctttttgctgatggatattcctcttgttttcagagatcggggtatgaagtttacattttagaagctacatacaaggatccggtgggttgtgctgctaggaatgtccatggatttacacaggaagacatagaaaacgatgtctaagcaatgggaagaagcttcatccttgtatctgcagcttgatgtgaagtcattatttcatggagatgatctaaaggaaagcagaatacaggaggttgacatggatatggaagatgatctaggtgatgcattacctccatttcaaggaaaagaagatgagaaagttgttgaccctcctgttggggaagatgcaagtagggtgctttaacctgttactatttgtgtggctatgttttatctctatgctgttatttttctctatatattggatgagtttagactggcagagttgtaactttgatggagcctaacctgcataaaagtaggaccctaagtattcaggtttcctaaaggctgggaagaattggcatgctgaagaggaacatccaacagaagtcagggaattgggtaaaagcaaatggtcagaagattttggtgaagatgacattgatcaaactgaaggtatgaagggcaatattaatgctctgtctgggttaattcatcaatatggcaaggaacgaaaatctgtacattggggtgataaggtataacatattttttatgctgttatctgaaagcttagaaactactacatgaagtctctttcaatcttatagtgttgtaccaaaaattgcatttttgtttaaatttctttgcaaagaacgaagggaaatgggtggtgcagggattgaacccatggcatcaagtgctctatggtaaagatggtagcgagagctatcagctcattggtgtctgttttttttaattatattcatctttttattttttctcttgccttcttgaggcgttgggggcactgaaatatagaaaaagggaaatgagttaatccattatatttaagagagaatttcaattattaggtttggtgtgtgtagaaacatggcttacagtacaacanacgggtaaaacctgcttttgtggcttttattacatagcca

SEQ ID NO: 106255 - DNA, 1329 bp, Glycine max
  Clone ID: PAT_MRT3847_66965C.1
gtgggtgtttccgagaagaggaagacaattgaaattgaaattgaaagtggatgacattgccagtagcagccaccgttctttaagaaaaagtgatttttttttttttcattacaattacaaggctgaatttgtgattccaatttccacatattattagatctctccatggagtgggagatgaggcccggcggcatgttcgttcagagacgcgaggcagcggcggataacggcggcggcggcaacggcaacatgacgacgacggtgttgatcactgtcgtccacgcttcctcccactacgacctccacctccctaccaactccactttctgggatgttaagagtctgcttgtacatagaactggtttacagcctgaagagcaacaactcttctttggaggaaaagaaaaggacaatgaagataatttgcatgaggaaggtgtgagggacaagtcaaagcttttgcttttggaggatgcttctagtgaagagaggaaacgcgaggaaattagaaaacacaatgaaatgttaaaggcttctgaagctgttgctgaagtcagagcagaggtggataagctcgctgagagggtatctgtcttggaagtggctgtggatggagggaccagggtttctgacaaagagtttttgatgtccacagagttgcttatgaggcaattgctgaaactggatagtattgaggctgaaggtgaagtaaagctgcagagaaaagctgaggtgcgtcgagtgcagaactttgtagatacactagattctctgaaggcaaagaactccaatccttttacccccattggtaaagctgtctctgtagcaacccaatgggagacctttgactctggaatgggaagcttgaatgcccctacctcaatgtcatcttctagaaatgtaagtcaagattgggagcggcttgattagctaagaaatttctatgtaacataaaacgacaaagcatatagaacaccatatttttagaccttgattcctcaatcaaggttgaattttttgtagtttgctgaagacaaaatatctgtaaaccatttgactgccttagggggcatactttgaagttagaatttggaatgaagaagaaaatggaggagcataatctggttattcctttacataaatccttccatgaaatttggagagtgtatccattgtcagttctgatatgcactgaaaagattgttgatagcaagtacactacaaccattgtttgataacagtcagaacttggtccatttcattcgaaatggcaagatttgtttatggagaatgttataaaaggcgattaaaaaatttcaatttccaagt

SEQ ID NO: 106256 - DNA, 649 bp, Glycine max
  Clone ID: PAT_MRT3847_66966C.1
tcggcttcgagacaacgccaacgattaaagacacatagttttgtctatagtacggtgacaggggactcattcacaaggacggagggagaccgattaatgatgagaaagccgacctgaaggatggatggagcacaataggtgtatctgcacccatggcgggagagattcaaagggggacgcatcatcggtgaacacagtacctgattcctaagggagagcatattcgtcctggagctcaaccctggatctccatggaagaaaacagacctctaaggggttcctagacgagatcaaagacaggatccactgccaggaggttggccccaccgccgagggctgaaattttaacaataagaagcacttgatcacgcatgatcatgggcaggacatgctgtagcctcttgaaacagagatttcaatatctcccagctgatgagctcttatatttcatgtgaggcgtattgcaccatagcggtgaggggtgagacttagatattgtttcctacttgacatttatatttatgagccagagaaatagtgcgtgtatctggttgctaatacgagtgctattactctgagttttcgtggtttgaaccccttttgtttggaatgctggattgatattattctttaagaataaaagattatt

SEQ ID NO: 106257 - DNA, 211 bp, Glycine max
  Clone ID: PAT_MRT3847_66967C.1
gtattacattttgtttttataagaggttaatggatcaccgcgcgaaaagagatattcaccccccttaaaaaaaagcacagtagttgcataccgggtaaattgcgaattgtggccagaatcattcggaccaagcctgcctgacaaaaacgatggcttctgggttaacaccaaaacagacaggtctagaccgtcatcaccctttataaatgaa

SEQ ID NO: 106258 - DNA, 1187 bp, Glycine max
  Clone ID: PAT_MRT3847_66968C.1
cccacgcgttcggccggtttgccgtagctggaacccggaaaacacacccggagccaccgtgaatgacgaccgttttgaggccaccgattgggttgcgcttcctccaaccaccacagctttccccttctcccacatcgtgtgtttctttctccctctcactcaagcttcccagaatcaactctaattactcctctttcgaagttagagacgttacctatcaacccccggggactcagcttagacttctgaattcagttagtttttcacttccagagaagagttttggtttaattttcgggcagagtggaagcggaaaaacaactctgttgcagcttcttgcaggaataagcaaaccaacctctggatctatttacattcaagaatatgagagtgatggaaatcccagtcaacctccagagcccttggtgccggaaagggttggtattgtcttccagtttcccgagaggtattttgtggctgataatgtgcttgatgaagtcacttttgggtggccaaggcaaaagggttggattaagtgggatatcattgaataaaaatcctcactccctcagtggtggttacaagcgtcgtcttgctttagcaatacaattagtgcaaacccctgatctattgatattggatgaacctcttgcaggacttgattggaaagcacgtgcagatgttgtgaagcttctgaagcatctaaaaaaggaattaactgtgttagttgtcagccatgatttgagagagttcgcaagtcttgttgatcgatcatggagaatggaaatgggtggcaaccttagagaggaatttctaccattatgatttatgttcattgccttgttaatcagcatgagatgccatgaggtttaaacctttatcttcaagtgcttgatatattttctactatacctttgatgcttagattggaaaattttaaaagaaaaaagaaactgtactttagcagtagtcaggagttcaattctagctactctcatttttcctaattaaattaaaatttcagcatatgcctacagcatgcctatgctctacccatgtttcaagccaaaggccaaagaatggggtaattatagtgatataattgtataataaggatataagaatatgtgtgtaagataactaaaaattttcacatttaaaaagtaaattacgcttcttgtcaaaaa

SEQ ID NO: 106259 - DNA, 1585 bp, Glycine max
  Clone ID: PAT_MRT3847_66969C.1
gtgagcagatattcgttcgaagcaaatattccatcgtcccatcctgccggtttgccgtagctggaacccggaaaacacacccggagccaccgtgaatgacgaccgttttgaggccaccgattgggttgcgcttcctccaaccaccacagctttccccttctcccacatcgtgtgtttctttctccctctcactcaagcttcccagaatcaactctaattactcctctttcgaagttagagacgttacctatcaacccccggggactcagcttagacttctgaattcagttagtttttcacttccagagaagagttttggtttaattttcgggcagagtggaagcggaaaaacaactctgttgcagcttcttgcaggaataagcaaaccaacctctggatctatttacattcaagaatatgagagtgatggaaatcccagtcaacctccagagcccttggtgccggaaagggttggtattgtcttccagtttcccgagaggtattttgtggctgataatgtgcttgatgaagtcacttttgggtggccaaggcaaaagggtaatcatcacctgagggagaatcttgctctagggctacagagggcaattaactgggttggattaagtgggatatcattgaataaaaatcctcactccctcagtggtggttacaagcgtcgtcttgccttagcaatacaattagtgcaaacccctgatctattgatattggatgaacctcttgcaggacttgattggaaagcacgtgcagatgttgtgaagcttctgaagcatctaaaaaaggaattaactgtgttagttgtcagccatgatttgagagagttcgcaagtcttgttgatcgatcatggagaatggaaatgggtggcaaccttagagaggaatttctaccattatgatttatgttcattgccttgttaatcagcatgagatgccatgagcatgttgcaggagataattgctgttcttgaaagttcaacctcatgcctagaaagcgatgggtgtcatattttcccaggggaaaactgtagtaaagttcaggcctgaatactattaagcaatgttcatttataagatatacacgaatgtgctgcagtaactttgaggacttttctatgcatagggacaaataattgttgcggctcattcaaagctaaacatgcttaagctattgtttctccattaatggtaatttgtaattgaattagctcaatatattgaacatacttaattagaacacctttagttcatgatggacctttctttctagtcaatttttgaggcatcaactaataattttcgaaaatagtaaagaagactggattgctcctgtacaagtcagaaaaagagttgaattattgttatttaattaaaattggcttactgttgatgtgtcattccaaagcccaaagaatggggtaattatagtgatataattgtataataaggatataagaatatgtgtgtaagataactaaaaatttttacattcccaaagtaaattaaaaatcccgcccaaaaaaaaaaaaaaagggcggcccagaaaagtagctcgtcgacccggaattat

SEQ ID NO: 106260 - DNA, 292 bp, Glycine max
  Clone ID: PAT_MRT3847_6696C.1
accagaacctttatatagaggacaaagcagtcgatcatatgagcgtcaccagaagatctattacttgagagagggtgatttgatcgctgtgcctactggagttgcatggcggatgtacaacaatgaagacactcctgttgctgccgtttgtattattgacaccaccagcttggagaaccagctcgaccagatgcctaagagagtctatttttgtgggcaaccaagagcagaagtttctatatatcagcaagagcacggtggttattacagccacaaaggaaagcatcagcat

SEQ ID NO: 106261 - DNA, 215 bp, Glycine max
  Clone ID: PAT_MRT3847_66970C.1
ggatccaatactgccattcgttgaacctacagtctcgttctttctctctcatcaactcgttcaactacccaatacccatcatgtcaacctttatcacttctcttctgatcaaaatccaacaccaacctctcaacccattcaacctcttttccatctttctctctctattctgttttctcgcgtgagaagggttgttggggttgtggaggcggatg

SEQ ID NO: 106262 - DNA, 206 bp, Glycine max
  Clone ID: PAT_MRT3847_66971C.1
ctttctgcgttcgcacgaggtttaggtcgtgtcataggtagacttgtaggcagagataaacatgatgaccatgatgcagttgatgttttctagaggcgtaggcctactgtctcagcctgtaggcaacgagttcatcagacgaatgcggatgcacgtgatatggctgatggcgtttctgacatgactggcgatgtctctgatctggc

SEQ ID NO: 106263 - DNA, 204 bp, Glycine max
  unsure (1)..(204): unsure at all n locations
  Clone ID: PAT_MRT3847_66972C.1
actaatttcgtagttactttcgtntngaacgcgcacggtaaactaggttgttntgtncntcttctcttcatcgttcgncnaagtcaagntttgactgngcnctgcatctnncaatctctacgaagcaacgctnngaagtnnnnatgtnaagttccgncaaaggtattaccttgatacaaaaactntgaagtanatnttgtcnag

SEQ ID NO: 106264 - DNA, 469 bp, Glycine max
  Clone ID: PAT_MRT3847_66973C.1
tccggggcgaccccgcgtccgtcgtccttctccgtctcccctcatttgctgactttctctctctaaccagatctcgcactcgcgctttaactctctaggattcgatcgagcagaaggaggagagccgcggcaacgaggatcacgtctccgtcatccgcgactaccgagccaagatcgagtgcgagctctccaacatctgcgacggtgtcctcaagctcctcgactctcgcctcattccatccgcttcctccggcgattccaaggtcttctacctcaagatgaagggagattaccacagataccttgccgagttcaagaccggcgccgagcgtaaggaggctgccgagagcactctctctgcatacaaaggcgcacaggacattgcgaatgccgaactggctcctactcatccaattaggcttgggcttgctcttaacttttctgtgttttactacgaaatccttaattc

SEQ ID NO: 106265 - DNA, 125 bp, Glycine max
  unsure (1)..(125): unsure at all n locations
  Clone ID: PAT_MRT3847_66974C.1
gtacagcatcgctgcactgctaggcaccaacggacacgtctaagacgatggtgactgcaatngtcatgacatgatgaacgtagtcaccgacggggcagcgaaggagctcttctcgatgaaggaga

SEQ ID NO: 106266 - DNA, 435 bp, Glycine max
  unsure (1)..(435): unsure at all n locations
  Clone ID: PAT_MRT3847_66976C.1
aggccggactatcacgaactcgcccactctcgcggtaacctctcatgtatctggatcccactccatccgagaccgcttaacaaaactctttctagtcaaaattggtgagacacatcggggtgatggagaacaaggagngctcttcctgccttgggggggggganacaacagcaagcggacgaggcacagagacccccccgangccgggcggaaggggagaccaaaccaacagcacaganccggggcggaggaacacgggggcggagcccccgccgggcacagaccccgcgacaaccacagcggaagggacccaagcaccgcgacgaagaaccgcgcgaccaacggcaaaacagcgaaccggaagaaggagcaaaaacaagcgcagacgaaacgcacaaacaaaaccgagcacncagccgcccccncggcgaaacc

SEQ ID NO: 106267 - DNA, 1678 bp, Glycine max
  unsure (1)..(1678): unsure at all n locations
  Clone ID: PAT_MRT3847_66977C.1
ccacgcgtccggggacgcaccaaccttttccgccacacacaacacagagaacagagaaagagtatcaaaaccccgtgtctgacagctgtctcttttttcttatttccaatttcaagatattaataaataaataaatcatcgatccaacggtccatattcaatctccaaaacgacccctcccacgcttctcaaaacgcaattatcggacgcaatagcctcaaaaccaccctttaccctttccctttcgtccttctccgtctcccctcatttgctcactttctctctctaaccagatctcgcactcgcgctttaactctctaggattcgacgacaatggcggccgctccctcgcctcgcgaagagaacgtctacatggcgaagctcgccgagcaggccgagcgctacgaagagatggtggagttcatggagaaggtctccgccgccgccgacaacgaggaacttaccgtggaggagaggaacctcctctccgtcgcctacaagaacgtgatcggagcgcgccgcgcctcgtggcgcatcatctcctcgatcgagcagaaggaggagagccgcggcaacgaggatcacgtctccgtcatccgcgactaccgatccaagatcgagtccgagctctccaacatctgcgacggtatcctcaagctcctcgactctcgcctcattccatccgcttcctccggcgattccaaggtcttctacctcaagatgaagggagattaccacagataccttgccgagttcaagaccggcgccgagcgtaaggaggctgccgagagcactctctctgcatacaaagccgcacaggttagccgtttttttctcttttcaaatttttatctgattttgtgattcagatctgttcggtttattctccagatttgagatttcgttttattgttttccgatttttgttattctgactatggaatctatgtgattatttactcgatgcggttctgtggagcggttatgcgttattctttttcttggttaaaatgttttggctaatatgaattttaactgctattatttttcaattgcaaatgaaataataatatatctgcgcgcttttattctgtacaatttgaattgaacgatttccgttgtgttgcttttgtttattctagtcttactctattgttttaacgaatgggcgtgttcctttgtttttcaggccattgcgaatgccgaactgcctcctactcatccaattaggcttggccttgctcttaacttttctgtattttactacgaaatccttaattctccggatcgtgcctgcacccttgcaaaacaggcttttgatgaagctattgctgaattggatccactgggagaggagtcatccaaggatagcactttgatcatgcaactccttcgtgataccctcacactttggacctctgacatgcaggacgatggagcagatgaaattaaagaagcagcaccgaaaccggatgaccannaaaaatattttactgttaattagaattgaacttctcctccatatctttttgaagggagaaggtgtttgttgctaatatctctttggtactgggattttaggcattcatgtctgttatgaattgtggatgtactgggccgttttagtttgtccttccattttctcaagtgtttccaaattgcctattttattaaggcc

SEQ ID NO: 106268 - DNA, 392 bp, Glycine max
  Clone ID: PAT_MRT3847_66978C.1
ggaattcggcacgtggcatagttgaaagtgagaacaatggagggagaaagaaggaagaggagaatggagagggaagaagaaagtgaagagcagcagatggagaagttctttgccctgataaagagcactaaagatgtaagggataggctctccaaacagaaagaagaagagaaggcaaagggtggttggaaaccaacgtttcaaccagaagatttcatgggatcataaaggactttggcccaagattaatgttttacgtcatcaagcctgcagcgtccttcttcaggttcagggataagaggtaacacccagagccacacccagaggcccaacatggaaataacaacaaaccaacagatttagacctaaccctttctttataattgacaata

SEQ ID NO: 106269 - DNA, 232 bp, Glycine max
  Clone ID: PAT_MRT3847_66979C.1
taccactgtcaaccgtgccggggccggcatggttgctccattcactggcctgaagtccatggctggcttgctcaccaagaaaaccaacacatgacattacctgcattgctaccaaccgaggaagagtgcaatgcatgcacgtgtggccacgagtcatcaagaggagctggagactctttcctacctgacaacaatggatgatacacaataccaaactgaagcagaatacctt

SEQ ID NO: 106270 - DNA, 314 bp, Glycine max
  Clone ID: PAT_MRT3847_6697C.1
gggaaacaaaaatgcaaacaagattttctgttgttttgaaaacccagaaacaggtttgttttcggcttaaaacattaggcgaaataaaatccaacaaaaggttttaaaaccttaaaaggggggggccggggcccctaaaaacggggggtcctttttgccacccttagcatttgtaaaagcaacggaaacaaacttggtttaaccccctactgggatctttggttaatttttgggggcttcctttttaggcccctaatacgcttttttttccacttggcccttatggggaaaggaaaacaaaacccttttttgtt

SEQ ID NO: 106271 - DNA, 594 bp, Glycine max
  unsure (1)..(594): unsure at all n locations
  Clone ID: PAT_MRT3847_66980C.1
tganncanaatgcccctgcttcatcgaanaccccgaatatttcgcgcgccgacccctcactaaacggcggccgccctcatctttttttttattttatgccttttttttttcttcgactcattcacttctttataggggggcgtttatattcttattcatagctttttacgatcctccaatccaaaagcccctccaaccacaaatgtttcccccccaaaatcccacaaattctcccacatagaaggcccaacccacaagggaggtagagaagcgccaaacccagcggcccgatttaaaaaaccgggggggtaaatatgctgtccacaaccatttatgaaataacgccttcctcaagcgcatatcattttccccgtgcacaacctgggacctataaaataaacaacgggcccccccaacattagatggggaacaaaattaacacaccccttttttctctgccgtggcgccgaaaaaacctctcccaaaaaaaccttggtgtaaaacacccccacttggtgctacacccaaaatgctgtcaccccccatcttaaaaaaacaaaaaacaactttttttttaaaaaaaaaaaaggcccc

SEQ ID NO: 106272 - DNA, 217 bp, Glycine max
  Clone ID: PAT_MRT3847_66981C.1
ggtttatatggttttcattttactttttagggctattgtcattttggctttataacaagagcaagaattttcctggaaccagcacctgccatggtaataatgcatcaaggacaataataatataccaggaaacaagggtcctatcaatttttaataagtgggatgcaattaaggacggggtgggaacatggagtatttctgtttttgaacaggtaaa

SEQ ID NO: 106273 - DNA, 365 bp, Glycine max
  Clone ID: PAT_MRT3847_66982C.1
ggatgcaatcaagaatacaatggcgtggcatagagtgagaagttatataataataatgtcaatctacatacttattgaactaatatttataaatagacagtgattagtgcctgttttcaactatctagattaaatgattacacccgctactgatgacgttataatgattaatgaaaactcgtctaatcacactgtctttcttgcggttgatgctgctaaaagagcctttttccataacaaaagcaaagattggtcttcagctcctggctctgttcgagctcgctatctattagccattcattccaagataacagataaaaaagatgaactattaaagcttgaaacaatttattgttgaaaatcac

SEQ ID NO: 106274 - DNA, 641 bp, Glycine max
  Clone ID: PAT_MRT3847_66983C.1
cgccttataaaaaaaaaaaaaaaaaaaaaaaaaaaaaaaaaaaaaaaaaaaaaaaaaaaaaaaaaaaaaaaaaaaaaaaaaaaaaaaaaaaaaaaaaaaaaaaaaaaaaaaaaaaaaaaaaaaaaaaaaaaaaaaaaaaaaaaaggggggggccgtttttaaagaaccaaattttactaccccgtccttgcggggggaaattttttttttggggcccccaaatttaatttcctggcccggtttttaaaaacgtgggaatggaaaaacccttgggttacccaaattaaatccctttgaaaaaaatccccttttccccagttgggtaaaaacaaaaaagcccccaccgattcccctttccaaaaatttccccaccctaattggaaaagggaccccccctttaaccggccattaaaccccgggggtgggggggtttcccccaaggggaccctttacttttgccagccccttagcccccgttcttttcgtttttttccttttttttttccccagtttcgcggtttttccccgaaaagtttaaaaggggggcctccttttgggttcccatttaagggtttaacggcccctccccccaaaaaattttttttgggggaaggtttcacgaaggggcccttccccttaaa

SEQ ID NO: 106275 - DNA, 129 bp, Glycine max
  Clone ID: PAT_MRT3847_66984C.1
ttccggggttcgaccgcacgcgtccggcttcccggggtatgttgaatctggctgtgaataacaatagaaataaggaagttatgatatcaacaggaatcttgatgttgagggaggaaatgatgataaaaa

SEQ ID NO: 106276 - DNA, 652 bp, Glycine max
  unsure (1)..(652): unsure at all n locations
  Clone ID: PAT_MRT3847_66985C.1
agctcggaaatcggcccgaagcatcgacagacgagaaccatgacttttaaactattacatctggtcaagccctttatgcccttcctccctgaggtcacagcgcctgagaggaaggtcccattcaaggaaagagtcctgtggacagcgatcactctatttatctacctggtctgctgccaaatccctctatacggtattgtctcaagcgacagtgctgacccattctactggatgagagtcatccttgcctctaacagaggtactcttatggagctcggtatttcacccattgttacctctggactcgttgtccagctcttggctggtgctaagatcatcgacgttgaccagggaaacaaggaagagagaaacctatacaatggtgcccagaaacttttgggtatgctcatcactcttggacaaagtactgtgtacgttatgtccggcatgtacggagacactgcctctcttggcttcagcaactccaccctcattgttctccatctcttcttcgccggtatcatcgtcctcgttcttgacgagctgttacagaaaggacacagtcttggatctggtatctctctctttatcgctaccaacatctgcgagtctatcatctgaaatgctntcagccccatcaccaccaacatgg

SEQ ID NO: 106277 - DNA, 201 bp, Glycine max
  unsure (1)..(201): unsure at all n locations
  Clone ID: PAT_MRT3847_66986C.1
ttaaacaaaaccatttttcaagcattccaatcaatatacatttcgaactttttatacaaatggtggttcaaaaaatanaaagaatcctacaaggatccttattattcatcatccaaattatcatattgccaagggttgaattctgttctactgtcaatcacctctattcactcataactattcaacatcatcgccatgttc

SEQ ID NO: 106278 - DNA, 433 bp, Glycine max
  Clone ID: PAT_MRT3847_66987C.1
ggctcgagggcaggctttgccgtgccaggtgtaggtttccaagggccattcagctctcccgagcctgcgacaccccatggtggagcaccttgcatccagtctgcttcggcacctgtttattactcacctgctacggatcagtctgcaccagcagcttgtgctgctctaccagtcaaactcaggtttgctgccgatgactcccctactacttgagctccaccactccggtgtcctgacccatggtgtccttgtcgggtatctcgaccacccgcatctccttcccgtgggtaccatggtccgggatgtgcttcgccagacactcctagtactggactactcactgcgtttacaccggcaccagcatctgcttcaccaggaacgcctgcacccgcattgacccctacacccctttcctttccaccagccacttttt

SEQ ID NO: 106279 - DNA, 510 bp, Glycine max
  Clone ID: PAT_MRT3847_66988C.1
ggagagtctactctaggagaaatatgatagtgaattaagttggaagggagtacgtgacttcttattctgttatgttttccttttttcttcatgattattacaaaaagggtggcagttataaagagctatggaagaaggatacgcctcttggcattctcattgtttttatcttttggcttaggtttgggcagagagtaccttctctgcagcgttttgtctgttaggcgaggttatagtcttatagtaattctctcttatttctctcttttcagtaatacaagtgacatgtttctgttccttggtttccattataatatacaatgttctatgcataatagcaaagaagaaatttataatcatcaagtttctgggtttggttgagtggcttgattgttgggccatcttctgggtcagcctaaattgttggtactgaaactgaaacacctttcttctttttcattttcccatttattcatcattaatcttgatcaatgtaatttacatgagcaa

SEQ ID NO: 106280 - DNA, 925 bp, Glycine max
  unsure (1)..(925): unsure at all n locations
  Clone ID: PAT_MRT3847_66989C.1
tacggctgcgagaagacaacagaaggggacacacaaactttattacagttgttgtaactaagcaagaatattattaggcaatgaagtcttctggaccttcaacaactcacggctgcgagaagacgacagaagggggacacaaactttattacagttgttgtattgtaattaagcaagaatattaggcaatggagtcttctagaacttcaactactcttgctctttttttaaccatcaatttgcttttctttgtcatggcaagtggctgctacacttgcacacagcctaagccaaaccctatcccattcccttaccctaaccctagtcctgccgcgaagagctgccccagggacgcacttaagctcggagtgtgcgcaaacgtgcttaatggaccaattggtgctattgtagggtcaccaccggaccacccatgttgctcagtgctagaagggcttcttgatcttgaagttgcggtttgcctctgcactgccatcaaagccaacattcttggcattaaccttaacatccccatttcgcttagcttgatacttaacgcctgcgagaagtcgccaccctctgacttcctgtgcaactaggcatagttaattaagcacgtcattctcaattattcatgcactacttaatttaatttcatcgacgtgttttgtttatgtgatttttgtgccctttgtgttgtgatgattcttatgctgttcggacagtgttaactcatttagtgagaattcggttgtacccgtagctgtagccgtaatttaacttctggtgttagtgatgagtgatgactttctaattttttaaatttgaagaattaattgctctctctgttgtgtttagttattaactaagaattctcctttgtataagcttttgcggggggtggggaaantatttaangaganaaaca

SEQ ID NO: 106281 - DNA, 324 bp, Glycine max
  Clone ID: PAT_MRT3847_6698C.1
acccttccggttacttcctaggaatgattctgctacaatttctctgattctgaaggaacaataactcatagtgatacccccaaacaacaaaatgggagataacaaacgttagagaggacgcatagccataaccaccgccttcgaaaccctagaccaccccgcccccgttaccaccaccgttccaaattccacctacaccgccatggacgatgtcttctccgacggcaacgtagatctcatcgacaccacggtctgttcgcaccatcgacgcctacgggcccgtcccaacacactgcgagaagccccacactctgcccacggggc

SEQ ID NO: 106282 - DNA, 388 bp, Glycine max
  Clone ID: PAT_MRT3847_66990C.1
gccacgaatgcactattaatgctttaatattgcctcttcggactggggggaaaatcccctcggaaggggcggggaaacccatctatacgtacaacgttgaattaagatcaattatgcccacatttcaatgatgacccccaccaactcaaacctttaagaaagacaacagaacctccaaaagattcactcagtgccaaggctttttttagataaagggctgggttttatttattcaagggatgatggcctctaaaagaaaattctttttatcctacaaaaagtttggatgaaccctattgctggttatggggaccactttggggaggcggaggatctctatatggaatgggataaagatgccgaggaaaagaaccaaggtggtgggctt

SEQ ID NO: 106283 - DNA, 419 bp, Glycine max
  Clone ID: PAT_MRT3847_66991C.1
gggggggtaataaaaggactacccccttttctcccccgaggaggaggagaataaaatggttttctcccatccagatatattggtcaaaaacaagacccacggagactcaaaaccataaagatacttaaactcaaacacatctaaaataactgtgcatatttataaaccctaatcaacgacattatagcccttgtttttacagcctttaataccacctgcactactacgagagaaaccacggtcaccaccaccaccattaaccacggattttgccaccgacatagtcacctgccaccgccaccgacatattaactgctgcgccatagtcttcaccgtcaccgcttcggttgtatctttttcacaactgtgaccaccaccacaatatccatcagtgggacaccactatattcaccactttc

SEQ ID NO: 106284 - DNA, 302 bp, Glycine max
  Clone ID: PAT_MRT3847_66992C.1
ggaaccggcgacccacgcgtcgccacgcgtcggaaaatctacatttttgtagccaacacttatggagggtgtctggcagcgtatgtgatacacctactgggaaatcgaagaccacctatacgccgttatggcaagacgaggttggctaagaccaacttcctagtaaacctgggaaaaactgctaatatgactttaatggcggacatgtcaactggtgattggggccaaatacatggcatcaggggcctgggctgatggggagaagtcgggggtctggagaaaccggcggctgacttgcatta

SEQ ID NO: 106285 - DNA, 249 bp, Glycine max
  Clone ID: PAT_MRT3847_66993C.1
cctggggacaattttgttggtctaatatatgggcctgaaggtgataatcaaaaacaactagaaaaggaaactggtgcgaagataaaaattcatggaatcaaagcagacacaggagagaaaggtgaaattaaacccggaactgatatccagtgcaattacaaagagatgcatgttaacctatcagctgatagttttgaaaaagtggatgctgctatgttaatcattgaactgctaatcacctctgtaaca

SEQ ID NO: 106286 - DNA, 1038 bp, Glycine max
  Clone ID: PAT_MRT3847_66994C.1
atggtcaatcatattattattagaacgagagtgactcttcaactcttcatttctgttttgcaaaatcaaattcctcattccattctttttactgatcgacatctatatttacttcctccatgcatttttggtgtatttgttttgtccataaccaaatctctggatgtgaaaaattgttcaagcctgaggggtgtgttagaatatcttggcaatcatcaaaaggaggggatcaattacacaaagacttttgcacccattataaaattgggaacggttcgcacagtgttagccgtagcgaccagggaccttgaggaggttgtgtacataaagccgcctcttggatttcttcctcagcaatatggcatgatgtgtaaactcaacaagtccttatatggactcaaacaggcgcctcgttgttggtttggggatatatatattgtagtgttagtgtatgttgatgacctaatcatttcgggagataatcatgaagctatcaccaaatttaaagcctatttacacaattggtttcacttgaaagacttggggatcctcaaatatttcttgggtgttgaagtggcgcaatcttccacgggtatctttctttatcaacgcaaatatgctttggacatttggaaaactaagaaacaacaaaaagtatctcgctcctctgctgaggctgagtatcaatccatgacagttgtaacagaagaattgaaatggttaaaatgttttctccatagtcttggtatctcttattctcagcctatgcgacttcattgtgacagtcaagcatcgcttcatattgtcaagaacccgatttttcatgagctcaccaagcacatcgaagtggattgtcacttcattcgcgacgagtatctcactaacaatattgcacctacttatgtttctgtaaatgcacaattaactgatattattactaagactcttggtcccactcagttcacctgttgtgcaagttggagatatgtaatttacatgctccaacttgaggggggcaatgatatcatgatgagataa

SEQ ID NO: 106287 - DNA, 303 bp, Glycine max
  unsure (1)..(303): unsure at all n locations
  Clone ID: PAT_MRT3847_66995C.1
tcgaaattctgctcgagcgcgaacctaatagattatagcaccacagatataaatataccttactccaacagnggctacttgacaaatttgtatgttttcgagaggagtacgggcccttagacacatcaaaggtttcaaacattggctctaaccttgcccctaacagatacgttttaccatatgactccaagacaacacgtataatcatatgcacaatcaaaggctcgaaggttagacatgttctatactgcctggctcattcattatcatagagcttttaatacactcctttgttactaatgt

SEQ ID NO: 106288 - DNA, 1448 bp, Glycine max
  Clone ID: PAT_MRT3847_66996C.1
agttggagcatgtaaattacatatctccaacttgcacaacaggtgaactgagtgggaccaagagtcttagtaataatatcagttaattgtgcatttacagaaacataagtaggtgcaatattgttagtgagatactcgtcgcgaatgaagtgacaatccacttcgatgtgcttggtgagctcatgaaaaatcgggttcttgacaatatgaagcgatgcttgactgtcacaatgaagtcgcataggctgagaataagagataccaagactatggagaaaacattttaaccatttcaattcttctgttacaactgtcatggattgatactcagcctcagcagaggagcgagatactttttgttgtttcttagttttccatgaaattgagaagatccaagtagagcaaatcatccgataagagacctacgagttaaagggcgtcctgcccaatcagagtcaccaaccagatagttgcaggtcacaatccttacgcaacaaaacaccctgtcctaggttccctttcagatattgaacaacacggagagcaacctcccaatgggcctctttaggtgtctgcataaattgagacaacacatgcacacaatatgaaagctaagggtataataaaacagaggtaaatgagacgacctactaaccacctatactgatccggatgaggaaaaggcaagtctgctgcaagtgccagacgatgattctattcaattggcacatttgatggcttagctcccagaagtccagtttcagctataatgtccaaagcatatttgcgttgataaagaaagatacccgtggaagattgcgccacttcaacacccaagaaatatttgaggatccccaagtctttcaagtgaaaccaattgtgtaaataggctttaaatttggtgatagcttcatgattatctcccgaaatgattaggtcatcaacatacactaacactacaatatatatatccccggtctttgcaagacgaaaagagaataatcagacagagattgccgaaatccatagtgttttagtgaagcggacagcttgacaaaccaacaacgaggcgcctgtttgagtccatataaggacttgttgagtttacacatcatgccatattgctgaggaagaaatccaagaggcggctttatgtacacaacctcctcaaggtccccgtgtaaaaatgcattgtgcatatccatctaatgtaattcccaagctcgtttggtcgctacggctaacactgtgcgaaccgttcccatttttataatgggtgcaaaagtctttgtgtaatcgatcccctcattttgatgattgccaagaattactaaccatgctttgaacccttctacacttccatcaactttatgctttattttgtacacccacttgcagccaagtgctttctttcttagaggcccttctgtcgtcttctcgcagccgta

SEQ ID NO: 106289 - DNA, 326 bp, Glycine max
  Clone ID: PAT_MRT3847_66997C.1
tagcgggcgctttttttttttttttttttgcagcagcgcgaccaagcgtaaccatatgatctttagaaattgggctcacatgaaagcgtcctgagaaactttgatgacaaatttgctggatgctttgctggaatacccaaaagccttgccccttaccccatggtgtacaccccaacgtgatattctttcacaggttgtttcttccactgtatccataaataactagcacggaaactttaaaatgcttggctgttccacaatactgtactgatcatcccgcaccgccttgatcatatcgctaacgccagcatctatgatgcttgggc

SEQ ID NO: 106290 - DNA, 401 bp, Glycine max
  Clone ID: PAT_MRT3847_66998C.1
gaaggtggtccagttctcaagtttctggaaatgtttgatagctatcgagttgaacattgtttacgcctgtgccaagaatatggcattatagatgcatcggcgttcttattagaaagggttggtgatgttggtagtgctctttcacttacactttctgatctaaataataagtttgttgatcttgatgcctctgtggaagctgtagttttaaaccatcgcagagatggttcttcacatatggaaatattcaacagtgttttaaaaacaaaggaggtaaatgacatccacaatttattgcgtgcctgtattggtctgtgtcagcggaacacccctcgtctaaatcctgaggagtcagaggcacattggtttaaattacttgactcgttttgtgacccactgat

SEQ ID NO: 106291 - DNA, 128 bp, Glycine max
  Clone ID: PAT_MRT3847_66999C.1
ctgacgcgtggtcggacgcgtgggttaattttgtaactactaggaataggagtgacggggcaccccatccagccctccctccttaactacaatttccccttcactccatcaccttattaaaacccatc

SEQ ID NO: 106292 - DNA, 327 bp, Glycine max
  Clone ID: PAT_MRT3847_6699C.1
ctattatcgtgcgcaatgctgataccaccctaacccgggaacgcatatcatgagtgcgtgctgagcgaccactgggctgatgtatctagcccggctacctccttgctctgtcccatctgggcctcacacttcttggtcgagggtctcttgacggcctgcaccctgctcatcactgccggccttgacgtcatgcgcacgggatcgttgacctgctagtgctgccaggggtttaaggtatggtactgggtcggacgaggacccgggtccatgactatgtcgatgttgatttacatgatcagagccgagctcgctgacagaaagatgctc

SEQ ID NO: 106293 - DNA, 453 bp, Glycine max
  Clone ID: PAT_MRT3847_669C.1
ggcagaattagaatgtctgaagagaaccaagctcttcagcaccaactaccgcagaaacatgaaaaagaactcgagaagttgcgagctgctgttggagaagaatgggatgataggtcgcagttaaaggagcaaattgaagcaaaattgttgcacaggcaagaagctgctttgagaagagagagagctttggcctattcattctcacatcagcaaacatggaagggctcttcaaagtcattaaatcccacatttatggatccaaacaatcccaaatgggggtggagttggctagagagatggatggctactcggccaagggatggccacagcactgtggtggatcacaatgatcatgcatctgtgaagagtgcagcgagccgtgccatgtctgtaggggaaattaccaaattgtgctctctccaagataaaagaccttccccttttggccaaaaa

SEQ ID NO: 106294 - DNA, 257 bp, Glycine max
  Clone ID: PAT_MRT3847_66C.1
cgacgattccctgtgatctctctctctctttctctctctttctctctcagtcttctctcgctgtggttcagatttcagagcaggatccaaaagccttgcttggtcaagactcattcatgtctgttcctaatgaggaaaacttgtcgtcacattcccagctttcttctcattttttcttggatctccttgattccatcatagttgatgtggcatcagagtgtcacagagtagcaaggctggggcttgattctaatttg

SEQ ID NO: 106295 - DNA, 315 bp, Glycine max
  Clone ID: PAT_MRT3847_67000C.1
ctcggcgctgctccgtaccattttcactgcttaaatttaagagaaaactcggcaacatgcggaattatcaaaacctccttacaaacgatcagcttctctcacactccttccgttacaatgaaatctataatgtaatcctgtactaaatcgatctcaaatccgttcctaattaagcatccaattactatcattgctacaacactcttcataaccttgataaacatcatttagtaaatcacacaccctttaattctttccacaaaacttacacatttacacttcattatcacaccaattactcctaaaaaacatatt

SEQ ID NO: 106296 - DNA, 345 bp, Glycine max
  Clone ID: PAT_MRT3847_67001C.1
tgatgaccgcaaagatgcacaggatgctatacgagaattggatgggatttcctcaactagctagttaagacttttttatggcctatggggcaagcagatgctgctatgtctttcttatacatgtgccttggcctgcagtaatgggtttttcttcaatgcgtcttactcaaattctgctgctttgtacagcatgactacttctactactactgcatgtgaagagaattaagaatgtgaacacaggggatgtgcactgctatccggagctacacttatgttgcataatgggtttgctttatgagatgtgtgcttctacacttaaactatggggaccatgtgcgtgct

SEQ ID NO: 106297 - DNA, 458 bp, Glycine max
  unsure (1)..(458): unsure at all n locations
  Clone ID: PAT_MRT3847_67002C.1
cccacgcgtccgcacgcttagtgagattgagattgttaatcttgagagagttggactttggcagaagaannttcattgggtagttattatttatgactgcaatctgtatttaatggtcttttcttgtattttttccaatttattagatagcttgtattatttgtttgtctttataaatatttttttttttttgttcttgcttttttttattttgttttaataatcttttattattatttcttttttactcttataacatattatttcagtttgttgttatgnattttttttgtttttttttgttttctttttttataatttgatttcctatttttatattttttaatgtttttttatttttttttatttgctaattagaattttaattttcgttgtattttgtttttcttattattgatttttttattatgatgtttattttttttattttgatggta

SEQ ID NO: 106298 - DNA, 146 bp, Glycine max
  Clone ID: PAT_MRT3847_67003C.1
ctcgagccttttaattttcagtatttcacttatatgtagaaaagctgttcggatttcctacattatgaagttgtgtaatatttcatgagctcttcgttcatcatttttaaaatatatatataataaattgtcttaaaaaataaaaa

SEQ ID NO: 106299 - DNA, 2234 bp, Glycine max
  Clone ID: PAT_MRT3847_67004C.1
ccacgcgtccggtccttgcctgccggaaaagaaaaaaaaaaaagtgatccaggaatctgaatatctgatgaatgcgtcaccgcacgacgtcgtctcttgaactggtggcgtcaagttttccccttttcttttcccttgacagaccaaactgaaactgatacacacaacacagcgttcgcagtaagcaaagcaataaatagcgaataagtgaaaaaaaaaagagagagagaagaaaagaacgcagaaactgaaataaaaaatggcagaacccaaggttaaatacgatcgtcaactcagaatatggggtgaacaaggacaggcagcccttgagaagtctagtatttgcttacttaactgtggtcctactggttctgaaacacttaagaatcttgttcttggtggggttggaagcatcactgtagttgatggatctaaagttgaagcgggagacctcggaaacaattttttggtggatgaagcaagtcttgggaagtcaaaggcaaaatgtgtatgctcatttcttcaagagctgaatgatgcagttaaagcaaaatttgtagaagagtctccagaaacattgattgagacaaatccatcattcttttctcaatttactttggttgttgccactcagctcatggaaaattcaatgataaagcttgaccaaatctgcagggaggtgaatgttatgttgatatttgctcgctcctatggccttacagggtttgttcgaattagtgtgaaggaacatgctgtgattgagtcaaagcctgaacattttttggatgatctccggttaaataatccttggcctaaactcaagagatttgcagatgatattgacttgaacgtgcaagatcctgtggctcataaacacataccgtatgttgtcattcttgtcaagatggctgatgagtgggccaaaagccatggaggaaggctcccatcaaccagagaagaaaaaaaggagttcaaggagcttcttaaggctgggatggttgcacaagatgaagataattataaagaagctattgattcagcattcaaagtatttgctccccgaggaataagtttggagtcgcaacagatactaaatgatagttctgctgaagtggactctaattcttcagatttttgggtgttggtgacagctcttaaggatttcattgcaaatgaaggtggtggggatgcaccccttgaaggatctataccagacatgacttcttctactgagcaatatgtgaatttgcagaatatctatcacgctaaagctgaggctgactttcttgtaatagaacgtctagtgagaagtactttgaagaagattggtcgagattcaaatagcatttcaaagtcaacaattaaaagcttctgtaaaaatgcaagaaaactcaaagtttgcaggtaccgtctaattgaagatgagtttaattctccaaacctacccgagttacagaagtacctaactgatgaagattacagcattgctgtggggatttatattttgcttcgtgctgttgaccggtttgctgctaattacaacagctttccaggacagtttgacagtgcaatggatgaagatatacctcgattaaaaagcacagcaattgccctacttaatgacttgggatgcaatggagccactttggctgaggaccttataaatgagatgtgtcgatttggtgcagcagagcttcatgctgttgctgctttggttggaggaattgcatcgcaagaagtgatcaagctcataacaaagcaatttgtacctatgtccggaacctacatattcaacggcattgaccacaagtcacagcttttgtcactgtaactgctcgtaccatgatttctattggaagaatcaagggcttgatggagcaagagcaatcatctattatggcttcctttaatcctatgcaaactaccgaggcatttttgctcgtttggtggactaaagtggattcttgttttatacacaaattttgtaactacggacactggtttcagacagaaacagcatcaagaggaaaagagacatttgcaaaatttgtagagtccatcttatttaatgaattctacgtttatatgtaatctaacctctaaagtatcttttttatccgcatcggtaaatataattgcagggaaatcgcattatcatggtaagtcacaagtcccaccgttgttgaaatgttatcttttttaaattcataagaaggctcgtgtttttatgtttg

SEQ ID NO: 106300 - DNA, 767 bp, Glycine max
  Clone ID: PAT_MRT3847_67005C.1
cctacctgagttacagaagtacctcactgatgaggattacagcattgctgtggggatttatattttgcttcgtgctgttgaccggtttgctgctaattacaacagctttccaggacagtttgacagtgcaatggatgaagatatacctcgattaaagagcacagcaattggcctacttaatgacttgggatgcaatggagccactttggctgaggaccttatcaatgagatgtgtcgatttggtgcggcagagcttcatgctgttgctgctttggttggaggaattgcatcgcaagaagtgatcaagctcataacaaggcaatttgtacctatgtccggaacattcatattcaacggcattgaccacaagtcacagcttttgtcactgtaactgctttgtaccatgattcaagggattgatgggcaatcgtctattatggcttcctttattcttatgcaaactgccgaggcatttttgctcgcttggtggacaaaagtggattcttgttttatacgcaaattttgtaactacggatatgaatgtaaggcaaacaacatcaagaggaaaggagatatttatttgcaaaattgaagagtccatctaattagatgaattgtacgtttatatgtaatctcaaatctctttttctgcagcggtaaatataattagggaaatcacatttatcgtggtaagtcacaagtcacaacgttgttgaaatgttacttttttaaattcataagaatgctcgtgtttttatgtttgaaaa

SEQ ID NO: 106301 - DNA, 537 bp, Glycine max
  Clone ID: PAT_MRT3847_67006C.1
aattcggctcgagtacggctgcgagaagacgacagaagggggacagaccaaactgaaactgatacacacaacacagcgttcgcagtgggcaaagcaataaatagcgaataggtgaaaaaaaaaagagagagagaagaaaagaacgcagaaactgaactcaacaatggcagaacccaagggttaaatacgatcgtcaactcataatatggggtgaacaaggacaggcagcccttgagaagtctagtatttgcttacttaactgtggttctactggttctgaaacacttaagaatcttgttcttggtggggttggaagcatcactgtagttgatggatctaaagttgaagcgggagacctcggaaacaattttttgggtacatgacttcttgttgtacactggttatgtgtttgtaaatgtctttgtctgatttttgtcccatgtttgtagtggatgaagcaagtcttgggaagtcaaaggcaaaatgtgtatgctcatttcttcaagagctgaatgatgcagttaaagcaaaatttgt

SEQ ID NO: 106302 - DNA, 253 bp, Glycine max
  Clone ID: PAT_MRT3847_67007C.1
ctattctttcgaatttttatattttaacaaaacacaaaaactattaagaagagggcgggggatctaaaagtaccaagcttacataacctttcataaaagggatcatataatataataacaaggccaaaggatttaaatgtccggcgggttacaaccccgttgctgcaaaaactctggggttacctaaacttattccccttgcataacatgcccctattccccagaatggccctaaatatagataagaagctcc

SEQ ID NO: 106303 - DNA, 390 bp, Glycine max
  Clone ID: PAT_MRT3847_67008C.1
ggggggggccaaaccaacccccaattttttttccccccccaaaatgtttttttggtgtttaaacaaaactggctcttttttttccccaaaacatttggccaaaccggaggtttggaccttaaattttccagggtaccccaaaaaaccgaaacccccaaaccatttggaattcccttttccccaaaaccaccccccaccatttccggggggtcccctgcccctttttcattaacagggttgtttccctttgcccccacatccccggggaaatccccctgaacccccctcagtttcccaaaaacaaacttaagggcttttaggatttttacttttccaaccaaccccttttggaaaggggaaaaaccaaagggggccttttcgaaccttttt

SEQ ID NO: 106304 - DNA, 782 bp, Glycine max
  Clone ID: PAT_MRT3847_67009C.1
tcgagctggtgatgtttatctgccaattgctagtgtgaaaggagacattcagatctggggaggaaagggtaagggccagggtggctctggagcaaatggaactataactgggaaggcttgccccaaagggttgttccggcccctgcgccaggaatgtccagctgggacttacaaaaacgttactggatctgataaatcactttgtcacagttgtcctgttaatgagcttcctcatcgtgctgtttatatttcagtccgaggtggtattactgaaaccccttgtccctaccaatgtgcttcagacagatatcttatgcctgactgctatacagcccttgaagagttaatttacacatttggtgggccttggctatttggtcttttccttattggtctcttgatcttgttggcactggtgcttagtgttgcaagaatgaaatttgttggggttgatgagttaccaggcccagcacccacccaacatggttctcaaatagaccactccttccctttcctagagtcactcaatgaggtgttggaaacaaacagagtcgaggagtcccagagtcatgttcacagaatgtactttatgggacctaatactttcagtgagccctggcatctgccacatacaccttcagagcaaataaaggatgttgtttatgagagtgaattcaatacatttgtggatgagattaatgctatagctgcttatcaatggtgggagggagcaataccccgcgttcttcccccccccgcttatccacttgcatggtcctggc

SEQ ID NO: 106305 - DNA, 278 bp, Glycine max
  unsure (1)..(278): unsure at all n locations
  Clone ID: PAT_MRT3847_6700C.1
tggtttcgntgantgatcngtgtncatttgatccttcataagtcgtcatcnatnatcatncatcatcaccgttgnttnacgaanatgccgatcagaaacatcgccatcgaangcctgaagangcanncaccccgacacgttgaaggcggggttggtgagttcatctccaccttgatcntcgtgttcgccggttcaggttccggcatcgctaacaacaagttcacngacaanggngccgncantcncgcnggcctcanntncgttccatcggccatgtt

SEQ ID NO: 106306 - DNA, 400 bp, Glycine max
  Clone ID: PAT_MRT3847_67010C.1
ggtcttatcaaactgatactatttggcatcagaatcttaaattatgaactgtcttaccataaactctattattaaggtttaatgctttgctaccaaaatacagttgagtaatgaaaagttattgattgtatgatttaattttttttatgaaagactgtattttgacatgcttatagtttcacactcaaaactattgagtgcataaattatgaaagataactgcttttattttagtgctgaaatgagcgtgaaatgggaaatttggttctaaaagttgaagtagtttcctttcaacttacttctctattataaatcctagaaaaggggcttagaggcttgacttctatacaatgacggtcttaaactttttatttttggcagcttgttgggtgtgagattg

SEQ ID NO: 106307 - DNA, 337 bp, Glycine max
  Clone ID: PAT_MRT3847_67011C.1
ggaacctccggcctttttaaataattttttgaaaaaaaaaaccgccccagcggtggaaggctataacatagaagttccgttggttttaattggaaaacccaagaaatggcctttccaaacaaacttagaagatcttaaatggggttctggaacacaaactacaaaagggggaaggggtggaaaaaatttaaaggggctttgagctttttgaaagtcacttccggggggggaccctaacagcgcgtatgttcctgttgttgaaagcagacttagctactttggggctgctattgacagggctgaaccttgcacaagctgccttgttgaaaaacggcct

SEQ ID NO: 106308 - DNA, 532 bp, Glycine max
  unsure (1)..(532): unsure at all n locations
  Clone ID: PAT_MRT3847_67012C.1
atgttatgggcctcaacttgtgactatccaaagagaggagcacttcactgccgaagcttacgccacttgctctttcattggggcattttctctgagttcaatgagcacacactaaagatcttaagcagcttgataaagatcttgacacagatgctgcggggtgatatttgaataaagcctaacaagaacactaatggctcaaagcctgatgctcttgagaaaggcaccttacggcaatctctgattattatcccaacccaagaagatgctcggggacaagcgcaagtcttcacagtgtacacgcagactgtgacatactgtgaacatctttgtactcaaaagctctagttgtcaggccctagaaaacatggcaacttgatctcagtcaaaacaatgggattcctgggtcgaccngacagtgacctgttatgagcgctctgtgaaggtgcagaaccattcaaaggcggcaggaatgctgctaccgcagtttgggccccaagcgacctctcatcaagctcanctaatggtcaat

SEQ ID NO: 106309 - DNA, 463 bp, Glycine max
  Clone ID: PAT_MRT3847_67013C.1
cagcatgtggcggactatctggataaaaggaggttctgcattttcatcttcttgcactgctgatgaagttacacatcggaatcgaatggcacttggcctcactggcctattgttactgactgctaccagcaggacttgctgctgagactactcgagcccttgccatgcgaggagtccatgtctttttcgctgtgagaaatataattgccgcacaagatgttaagggagcaatactgaaggagattcctgctgctaaagttgatgctatggatttagatcttatcccaatagcttctgctcgaaaatttgcagctgagttcatttcatcgagtcttccattagacattctcataaccactgcaggagtttttgaaacccatttcacactgtctacatactccgttgacctacaatttgccacagatcatatggggcacttcctattaacaaatctgggtgttag

SEQ ID NO: 106310 - DNA, 256 bp, Glycine max
  Clone ID: PAT_MRT3847_67014C.1
ccgagcttctcgatcttgacatattctggaaacctccgaacgcagaggcgaagtttggtggtacctccttcagtccgccgtgagcttggaattgtgccagccgcaagcttgttattgtgtgtctaagtgttaacagccagccgcaatcttggccgtacctccttcactccgaccgttgtgcggagtgaggacagcaaccaaatacgttgaaatctgttgcagctgggcaggaaaggttcaggactctacacagttc

SEQ ID NO: 106311 - DNA, 265 bp, Glycine max
  Clone ID: PAT_MRT3847_67015C.1
ccacccaaaatgggcaaatttttattaaggggcaaaccgaaagtttttcttaaaaagggaacaattaaaccgaagaacatttttaaagctccttttaaattgaaaaaaaaactttgggagccaacgccaaactttaaattttggttacatgccaaacaaaacgtcctttccttttattttatccgccccctgggttacccccgaaatttccaaccggtccctggagggctaccagttttccataaaaggggtggtattaaagcgg

SEQ ID NO: 106312 - DNA, 298 bp, Glycine max
  Clone ID: PAT_MRT3847_67016C.1
agaaagggcaaaaacgtaacttttggaacccccaaacggggtaggcccctaaagggccctccaaatgaaccccagggcactcttttacatgggcacttttagccgggggtaactgggggggtcccattcatataaaagaaaaattttctcccggctaagggcagggataatgggattggatttgccctttttagcctccaaaaggggaaccgggtccgacagggagcagaaaattgtgggcatgattgggagttccgcaaaaatgggctcaaaatttttgggcccgaggtttggccca

SEQ ID NO: 106313 - DNA, 184 bp, Glycine max
  Clone ID: PAT_MRT3847_67017C.1
acctagatggtgtgggtcggggaacacaacggagggtttgtttataccaaactgcccttcctaccggcgaatccagaggctaaccctacacctaaaccccacggtgatggtcgcggtgaaacagccggagatggcaacctgcgcttgtgaacagctgctcgataacacaccatctttgtctaaa

SEQ ID NO: 106314 - DNA, 1022 bp, Glycine max
  Clone ID: PAT_MRT3847_67018C.1
ctgcgagaagacgacagaaggggagtctcgatcagtttcattcattggaagatatgggaacattagaacaaattgatgcccctcaaaccaggtcatcatcatcttcatcttcttccattgatagcaacaaccacccttctaggactaggactccaccaccctcttccccttcatcaagtgcctgcagaaacagaactgatttgagcactgacctcagacttggtcttagcatctctccttcttctcaatctgaattacccttcaattcaacaccaagggaggaaagttttgactggccaccaattaagtctatattgaggagcacccttgtggggaaacaaagccatctgagccaaagaccctccttgtttgtcaaagtctacatggaaggcatccccataggaagaaaattgaatctgatggcacattatagctatgatggactagtgaaaactcttggccatatgtttaggactaacattctctgtcctaactctcaacctcttaattctaggaattttcacgtgctaacttatgaggatcaagaaggggactggatgatggttggagatgtgccgtgggagatgttcttgaacagtgtgaagaggctgaagatcacaagagctgacagatgctagttaatttaataatgtatacaatctctctcacaacacaagctcctcctcaattttcattgttcataaatttttgctgtagatctagttattaattagtgggttggtgaaactcgttgaagtatttcaccaaaaagaatggatcccgtgattatcatatatctaatagctttatacaccgaaaaacaatatagatgtgtaacttcttacctaattctcaattcagtacatagctgcagtattcctagtctctctgtttgatgatggagtcatctaattttcctctttgttttggaactagctccattattttgtagtcatttggaacaatgcatgtcccttttgtcttcatacctttaatgcatgatgtttcttggtgtctctttt

SEQ ID NO: 106315 - DNA, 1083 bp, Glycine max
  Clone ID: PAT_MRT3847_67019C.1
gtggtttcgtcgcccaccctcatggcaaatcaaaaccaaagagagtgtgctgaatgtctgacttggctttgctttttgcttatcactctctctctctctttctttcttttttgttttaaagtagcttctgttgtgtgcatatataaggagcctaaggtggcggcttttcttttcagtcttgatcagtttcattcattggaagatatgggaacattagaacaaattgatgctcctcaaacccagtcatcatcatcttcttcttcttccatcgatagcaacaacaacccttctaggactaggactccaccatcctcttccccttcatcaagtctatgcagaaacagaactgatttgagcactgacctcagacttggtcttagcatctctccttcttctcaatctgaatcacccttcaattcaacacgaagggaagaaagttttgactggccaccaattaagtctatattgagaagcacccttgtggggaaacaaagctatctgaaccaaagaccctctttgtttgtcaaagtctatatggaaggaatccccatcggaagaaaattgaatctgatggcacattatggctatgatggactagtgaaaactcttggccatatgtttaggacgaacattctctgtcctaactctcaaccacttaattctgggaattttcacgtgctaacttatgaggatcaagaaggggactggatgatggttggagatgtgccgtgggagatgttcttgaacagtgtgaggaggctgaagatcacaagagctgaccgatgctagttaatttaatgatgtatacaatctctctcacaacacaagctcctcctgatcaattttcattgttcataaatttttgctgtagatctagttattaattagtgggtgggtgaaaccccttgaaatatttcaccaaaaagaatggatcccgtgattatattatctaatagatttatacacccaaaaaaaatatatagatgtataacttcttacccaattttcatttcagtgcatagctgcactgtttcttattctctctgtttgatgatggagttgtttaattttcctttgttttgg

SEQ ID NO: 106316 - DNA, 412 bp, Glycine max
  Clone ID: PAT_MRT3847_6701C.1
aaagctacaaactcccttttgctatgggcatatcaagatatgagctcatcagagggtgatcaaatggtcggcgcacactttcatatgttgacatgtactattgtatcttgcatgattacaatgtcttgggagctctttctatcctatgggagcaactgacatcagcagattcatgggaagaagttgaactaacagcgtggggggaatagaacaattacaaaggctttcagcgaccattggctgcatttaaagattggtggagcctgatagcacgtcagagcccctgcgtactaaatattcaacttgttctgtacctgcgtaggaggagagagaggagtatatctcttgaattagttccgagaccatactgatcgaatcttgatgttcataataaaggtaccctacaaatata

SEQ ID NO: 106317 - DNA, 212 bp, Glycine max
  Clone ID: PAT_MRT3847_67020C.1
gtaccatgccatcggcaatcgtgataaagcaagtagatggcaaaccaggcaaggtgtactaccctctcgaaaagatcagcatcccagagcaacagccacaggtaaatgatacggtcatatccctaacggcagtcgactcaatcaccgcgagctcttcattcgccaacacatctaccccggcacaaacttcggcgtgtcccttctcgccgacg

SEQ ID NO: 106318 - DNA, 1569 bp, Glycine max
  Clone ID: PAT_MRT3847_67021C.1
ccacgcgtccgctctaacccaaatctcaaagaaacaaaacaaaaccctaactgcattaaacccgtccacacatcactctgagttccatccatggcgtcgcaaatggcgatcctcttccgcacgcgcaccctcctctcctccaaacccaccaccaccctcatcaaaaccattaccacattccccttcctctcacaagaaccccaattagtggaccccaccccacccccctcttcctcttcaacccctctccctcccaaccccgcctccggcagccccctctaccacgaaaactggcgcagcccaatcccgccaccaccctcctccgccggcacctcccatgcgctctcccccgtgggcttctacaaccgcgccacctcggacacctacgacccccgcgccctcctcgacctcttcggcgattggatggcctcgcagcagtggcacgacgtcaaattcctcttcgagtcatgggtccgctccctcgacaagaccggcaaacctaacaagcccgatgtgaatctctttaaccattacctacgcgccaacctcatgctcggcgcctccgccgcggagctcctcgatctcgtcgcgcagatggcggagttcgacaacgtcgcccccaacaccgcctccttcaacctcgtcctcaaggccatgtgccaggccaaggaaaccctcgccgccgataaattgctccaacggatgttgcagtcaggaaatgatgctctccctgatgacgaatcgtatgacttagtcattggaatgctcttttccatgggccagattgacactgcatttaaatatatagatttaattttgaaatctggtaatgtgttgtcaatgaaggtttttatgaactgtgtggggagttgtgtcaataagggaaggcttgatacattggtgacaataattgaaaggtgcagggcatcagatcaaaacaaagctctttgccccaactgggacttgtgcaattttattgttgaaatcgcaactcgagaggataatagcaaattaagtttttatggcctggagtttatggctaaatggattgtaaagggtgaacgtcaaagaccccctatatatctttctgtagatgaaggtttagtactgtcagctcttttgactgctggtagaacctataattctgatctgctagtggcatcatgggctgttttggaccgctcattgcgtaaaaagaaagttcctaatccagagtcctatcttggaaagatatacgcgcttgcgtcattggggaatctacaaaaggcttttggtactctaaatgaatatgaggcagcttatggagactctggtcaagaagctgaagacttgttctgcccatttacttctttacatccattggttgtggcatgctccaagaagggttttgagactctagataatgtatagctttctttctgttgaagaaaacgtgtggatcccctttaggatttgttagcaatccaatcctgttgtgatgtttatagtttttgtagactttacaagttttctattggatataaattgtgcaacttttcattcttaaaaaaaaaaaaaaaaaaaaaaaaa

SEQ ID NO: 106319 - DNA, 1376 bp, Glycine max
  Clone ID: PAT_MRT3847_67022C.1
cccacgcgtcggcgcgaacagggggccacgaaaaaaagaaaacacagaaaaactctgaagaacagttcgttgaatttcgcttctttctgcttatgaacggaggctgatcgggtgtccatctggtttcacaaatgctcccgtcaccagggccttcatcattgcacaatctcttttcacatcctactttgggatccaaggccgtgtttgtcctctggggttatcgtttgaaaatatttttggaaagatttgattttggaagttgatcatgtccatattttccttctcgtcaacaccagagttgatgtttggactgtatcttctatattacttcagggtctttgagcgacagataggttccaataaatactcagtctttatcgtgttctccatattaacttcactactgcttgaggtccttgctgtagcacttttaaaagatcctacagcaaacctagtcactcctggaccatatggccttatatttgcttcatttgtaccctttttctttgacattccagtttcaacacggtcttcgtgtgtttagcttcctcttctcagacaagtcattcatatatctagctggtcttcagcttcttttgtcatcatggaaaaggtctatcttaccggggatgtgtggcatccttgctggttccttgtaccgtttgaatgtcttttacatccgcaaagcaaagttcccagagatgatctcatcattcttttcacgaattttgttgccatctatggggagtccacgtgcaccatcatcagcaaggaatgttgtcgggaatttaccttcctatccagctcgccaaatggagagaaactaccctgctccaatgcaagctgctgtagaaccaacagaggattcgatcactactctagtctctatgggctttgacaggaattctgccagacaagccctggtgcaggccagaaacgatgtcaatgtggccaccaacatcctactggaggcacagtctcactaattcgataaatgttgcgcgtaagcgagagccagattgttctgaattgatagatggaatcctgatcacgagggattggaaattcactaatcatgatgtgaggatgtttttgaacttcaggcattcgtatatgatatcatcctcaaggactactcctttctcaggatcatttttcccaccttaacttgaatctttagaatatccattccagtactgccattgatagacagatgagttaggatcctgtacaaattacttgcaacatatggaaatgatgcacatttttatgaaatgtgaaaatcagatatttgttgttgcaggttctatctgtgccacccacaaactaaattaaaaatcatattgcaaattgttgaggttaattttgtgtcccag

SEQ ID NO: 106320 - DNA, 592 bp, Glycine max
  Clone ID: PAT_MRT3847_67023C.1
cccacgcgagcgaagacgaggccacgaaaaaaagaaaacccagaaaaactctgaagaagagttcgttgctttctgcttcactgcgaagatgaacggaggcccatctggtttcacaaatgctcccgtcacaagggctttcatcatcacttcggcgcttttcacaatcttctttgggatccaaggccgtttcagcactctggggttgtcgtatcaggatatttttggaaagcttcgcctttggaagttgatcatttccatattttccttctcgtcaacaccagagttgatgtttggattgtatcttctatattacttcagggtctttgagagacagataggttccaataaatactcagtctttattgtgttctccatattaacttcactactgcttgaggtccttgctgtagcacttttaaaagatcctacagcaaaccttgtcactcctggaccatatggccttatattggcttgatttctaccctttttctttgacattgcgggtgtggcgcgggttgcgggggtgaactaactcttgtggggcggggggttggtgggtgaaggtgggcggggggtgggtttggggggggtg

SEQ ID NO: 106321 - DNA, 388 bp, Glycine max
  Clone ID: PAT_MRT3847_67024C.1
gggggaaaaaggggcaaaaatatttggaaaaaataagggccccccccctttgggttgaaatttacaaaggtaaataaacccaacaaagggaaaaaaaccccccccggggggaagagggggataaaataaccggggcccccttaagaaaaaaatttatccccctttacccaaaaaaaactaaatattgggaggggcttgattaaaaacatcagggggactacccaaaggggggggtggggccaaaattggccgtatccccaaaaccaaaaattttgggattctggcccgggaaaaggcaattcccccaggaacaggacccaccaaaaggggggtaatccccccaattttcaaccctggagcaaaaaattccccaaaacccgggtatttt

SEQ ID NO: 106322 - DNA, 153 bp, Glycine max
  Clone ID: PAT_MRT3847_67025C.1
gtttcaagatgaacattgtttgatcttatgttcctccacccccggaggagggagaagtttaattcatacgagttcatttatggttaggggaagaatggtgatttgaaggtaatggattatatgaagaatgtgggtggtacattataacagtat

SEQ ID NO: 106323 - DNA, 255 bp, Glycine max
  Clone ID: PAT_MRT3847_67026C.1
actaccagcagtgctaaagtaaaagcttgggttactgcaatcaatgaagctagtctaagacctcttgagggctggtgttgtcctcatcgctttggttcctttgctcccataagaggtttgactgaagatgggagccaagcccaatggtttgttgatggacaggcagcatttgaagcaattgctacttcaattcaagatgcaaagtcagagatcttcattacgggttggtggttgtgcccagagctatatctgaga

SEQ ID NO: 106324 - DNA, 443 bp, Glycine max
  Clone ID: PAT_MRT3847_67027C.1
cgattcctgcctgaggctataaccttgtcatcctcaacaattacacatctggcaacaaatacaataggtggcataaagagagtaaagcatagcagcaataatgctccaatgaagtgttcaaataaatagtatgaaattgtgaaggaaacttacccaacaggcacttcaagaacatccaaagctaactttgcctgtcacataaagtagagcaatagggtaagaatgaagatttgaacgtagagtgagtagtgagtacatggtgtatgtaaggaaataaacatattttcagagcattacctgttgtatggcgagctccatgaatgctcaggcacagctgggtctcattgctgggttcagtaggaacgggagaaggccagtgctccggcggcgtcgagtggaggaagcccttctggttcagcttcggaagggttcagtctgtggtg

SEQ ID NO: 106325 - DNA, 838 bp, Glycine max
  Clone ID: PAT_MRT3847_67028C.1
gtccggaattcccggctcgaccacgcgtccggctttttacacgcttatgatcaaacacaacttgttctcccttttcatttgtctttatttgcatatatgtgagtgagtataggtatatttgcattatgtcattttccttgggctcgaataggctcttccgtcttcaaacattttaaattttaaattaaccatttgggttgtgaatacggttttgttttttgttttggttgttcatgagtatgaacacccattgtttagggggggtgtaatgtaattaacaactatagaggaacatagtactcttcttctcacattttgcaaccaacccatctaacgtttttttttcgatccttaaacatggttttttggctagcgtagcatctacttgtgttcatgttagatgctaatccttcacggtggtgaaacaaggaagggagtggaacttggaaatggaagaattggttggttttatgtgacatggctttgcttgcagttgcagcagagtcaaatgctttgaaatgtgtttcactttaactgctgcttctcccctctcggttaatttgaatagctcatcttgttgctgattgagagaagttgacacttgtggaaaatcagtatggctgctgattgttcaagatttgtaagatttcaagatgatgctgaattagcaaaattgccaacaacaaatggcggcaatggaatcaagcctaatgaaacacaagtagctgagactagcggggaaaagggtctgaagaaagacacaaggaagttcctgaaagctagagtattgtaaaaaaaattctcaaaggattataaaaaaggttagaaaagaacatta

SEQ ID NO: 106326 - DNA, 272 bp, Glycine max
  Clone ID: PAT_MRT3847_67029C.1
acactcattcgtgcaaattcaatggtaggatctctattgcgacttatgtatgcatgcgatatggcatctaagcgattgtggaacgagcttacagatcagtagacggatccttccacatcttgcactgccagaactgttgctgctgaagacatgatccattggcaagctacaattatggttcctgcagacagtccatatgcaagacgcgtactgatagtgaccattcatagccgtgcagactatacgtttaaggcaaccaacgctgcattcag

SEQ ID NO: 106327 - DNA, 133 bp, Glycine max
  Clone ID: PAT_MRT3847_6702C.1
actggttagtctgtgtagactgaaatttccttagtgagggattctatgacgcccaagcctgggggcagagacaacactcggtgaccttctctagaaaaaggcaaatgccgcggttcaaggtattgatgcttgt

SEQ ID NO: 106328 - DNA, 323 bp, Glycine max
  Clone ID: PAT_MRT3847_67030C.1
gggtgatgtctttgtttttttttttttttttttttgttttcttatgtttttttgttttcttttttttggggacgcgccatgtaaaaacacttttttttcttttgtaaaagaaagtttgttcccccaaccttttgaatggggggggggggaaggaaattgacgtggggagatagaccacacttggtttgccttgttactggggggcgaagaatattgaaggttggagctgatggaggggcttgcttcattgggggtgcccgagagggggggagggggtcttaggggggggggggccttaaggggggctaacaaaaaattttttt

SEQ ID NO: 106329 - DNA, 432 bp, Glycine max
  Clone ID: PAT_MRT3847_67031C.1
catggtctagctatctcgatcgaactgtccaaggtcctgtcaccaggggggtacggacggaggctgcgtggtgggggcgcgcgcttaataatatacaaacacacgacaaacatagcctgtgcaattaagtaaaccttcgcggcggcacccgcacggaccgccgccgcctctgcgcgagactacgagatagacgccgcgtttttgtgtgatgcctagggtcggctacgcaataattatgtggtagtggtgatggcgctatttgatagtgctcaggctgtggtataatttaggtgggtgaggttataccgatggactaatatggttggtcacaggcggtaacgttgcatttacacgcacgccacatatgcaaaacaagggcgtgcagtgaggcatacaacaatgtaactggtacacacttaactgcccaaaagt

SEQ ID NO: 106330 - DNA, 599 bp, Glycine max
  unsure (1)..(599): unsure at all n locations
  Clone ID: PAT_MRT3847_67032C.1
gttccttaccacaatacttattggcacaacggtggtcaatattggggcaactgctcttgtcactgaagcagcaactgctatgtttggtgaagctggtgtcagtgcagcaacaggagtgatgactgttgccattttgcttctcactgaaatcactccaaaaagcatagctgttcataacgccacagaggtggctcggtttgtggtcaggccagtggcatggctttccctggtgttgtatcctgtaggaagaattgttacttatctttcaatggggatgctgaaattgcttggcctaaaaggaagaagtgagccatatgtaactgaagatgagctaaaattgatgctaagaggtgcagaattaagtggggcaatagaggaggaagaacaggatatgattgaaaatgtgttagagataaaagacacacatgtcagagaggttatgacacctcttgttgatgttgttgcaattgatgcaagttcaagcctggtagactttcatcacttgtgggtcacacatcagtactcaagggtacctgtttttgagcaacgtgttgataatataatgggtatagcatatgcaatggatctgctgnattatg

SEQ ID NO: 106331 - DNA, 388 bp, Glycine max
  Clone ID: PAT_MRT3847_67033C.1
attcctcggtcgacgaacttattagtctagtacaattaattattgtggggggataataccaacggtggggtcgacaactttatcgtccgcgctttactcggaccctgtcatagtttcactaaccatccttatactatacttcttatgaccaccattaaaacacaacactcctcgtatgaaaaatttacactgtatcctacgtttccaatttctctcaataatacttatcctctatattaactacctttgtctacattcattcaagatttcccttattcaacaaaactattgagctctcctcatcacccacagtattattggctttcttgatcatcacctttccttttatttttaaaactttttttcatatattccaaattttccaccc

SEQ ID NO: 106332 - DNA, 230 bp, Glycine max
  Clone ID: PAT_MRT3847_67034C.1
tcgactattcgtaagggcagacttgaatgcgaacactatggtattcttatgcacatgcttggactctgtgactcacaggatataacccacagaaaaggaccttaaaatacaagattgccttggacgttgcagcagggctcacgctgctcttctttactctactgaccgaaagggagcttgtgaaggaacagaccatagagctgaagtacacaacggccagctccagaagg

SEQ ID NO: 106333 - DNA, 353 bp, Glycine max
  Clone ID: PAT_MRT3847_67035C.1
cacctcgtagctcggaattcggctcggggccctcgtttattatttttttttttttctccctcattactacaacagcgagggaaatcaattcctcatcctggatacttccttctaatttcatttctctctcttccttcttagaaaaaaaaacaaaaaaaccacagcttaatatcatgtatctagctcttcattgtctcttgttcaataaaggttacgctttaaaattctgaacctcacaacttaaggcaaatgttagcctacagatctgtgcgttgacccttggcaggatcagcttttggaagggttggaattgttcttccacatacgccattgattattccaaggttctgttt

SEQ ID NO: 106334 - DNA, 543 bp, Glycine max
  Clone ID: PAT_MRT3847_67036C.1
aatttacaatatcaaccaatatcttgtttctacaaaattggtttttcaaccaaaattttaatgtgcaaacatatatttaagaataattaagttaatatgttacaaaattgagtttactatttaaattaagtttggaacaccccaaacagaaaaaccaaacatattcattgtcaccaattattcattggtcattacgtgcaagcatcgcttggtctttaaggggatcgagtgctaaagtacgtccacccgtttttgtttactttttgaaaacaatggaaaatggatggacaaagccgtgtcaaacagaatcaattatcgttgggctgaactaattttgtttgaggcttcgaaaatggactcattattgtcgtttttaaatttaaaccaaataaagatatattcttagcacttctcatttagtatctattgcccgtaagacttttgaaataaaaaggaagcgtgaagattgcttaaagtattgttgattaataatagcacacaaataaaaaattatgcaaatttctgatatccaacttgtatgta

SEQ ID NO: 106335 - DNA, 272 bp, Glycine max
  Clone ID: PAT_MRT3847_67037C.1
agcgagagactagagattagagagagctgcagacgccgttactgagctcatttgactacggttgaggcccctgcagctccactgcagatttactactcaaaaggactctatgatctagcatacaggggtgcagctatatagagaccgacggccgcgcttgcatcgtggatgccaggtaacatgccatgctgcccaccgcactatgaggctgcgacgttcctggatggagcactgctgaccagagagccgacactcatatctaaggacgatga

SEQ ID NO: 106336 - DNA, 1534 bp, Glycine max
  Clone ID: PAT_MRT3847_67038C.1
cggaattaccgtgttgcactctcagagctgaagtacctaaaaataacgattcctcggcggtgcaatcgttcgagtccaccgccatacacaccgaatcaatttcttcggagatcaatttccccttttccgttttggattttcttgcgttgcctaatttctcggcaaccaaacagcttctacaacttccatttccattccgttgattttgccgcatctccgatcatggaagctcctgacaactcagaagccaccgttccatataattctccaaaactagctggaacagttaactggggcacggcaactgtcgttggagtatttgcaggcatgttatatggcggtagcaaggaggcagctgcttctgttagcaaggatgcagaagttatgttgaaacttgggagcacagaagacaagcgtgagcaatatcgattgatgagagatgcaatggagaaacgattcattcgagttacacggggctcaatagttggaggggtacgcctaggaatattcactgctgcattttattgcttacaaaatctgcttgcagagaagagaggtgttcatgatgtttttaatgttgttggagctggatcagccactgcttcagcttttggtttaatcatgccaggatcactccgttggcgagcaaggaatatggcactagggtcggtgctgggagcagcattttgctttcctcttggttggatccatctgaagctggtagaaatggctaatgaaggtaatccagctgcacatccacactcagatcagagacaagtgaagagtggggttagtgctgcaattgagaggcttgaaggaaatttaagtaaatgaaaagctactgttaggtgtgatacccctctcacggctagtacgctttgtcatttttattttctcagagaagtggggtaactttgagttaagggagttgatggcgtttgccctttttactggaagaagtgataattcaataatttagttgaacgtgttacttaagttttttaatgtttattgcgcaatatgggattcagctatgatgctttcagtctaggtggtttgtagtatgcatattcttaaagtgctaatgactttggatttcaattattctagtagctcagagccgaaaaaataaaatattttagtggtggtagtatcacagtacgagtcaacttatccagacaatctaagccaggcattctggaaaagctaaaatcaatggaagagctgattgggctacttaacctgttatcaatggaagaacgttgcagattaatagcgtcaagccttgctcattctagcttagttatgacttcggagaacattacagaagaaataagagtgaggggaattacgggtagctccttttagtgaggggagccacctaggcagttttgtattcaatacccttgtagcagctctgctctgggttttcttatgaaatacactgtcctcataaatagcactattctattctataatcatcttttacttgtctcaaaaaaaaattaaaaaaataatttataataaaaattaa

SEQ ID NO: 106337 - DNA, 209 bp, Glycine max
  unsure (1)..(209): unsure at all n locations
  Clone ID: PAT_MRT3847_67039C.1
cangctacgcgtacgtaagctcgggaattcggctcgagctntnaganagaangnannantatnnannatcatannnnatcagtnantnganagnatgcctgtgcgatgttccnnatgacagcacnntngagngtcataatgnncgtgatatgntggaactgcntgcnagaggtgaagcgacngntacnctgagcngngacagngtgcnt

SEQ ID NO: 106338 - DNA, 659 bp, Glycine max
  Clone ID: PAT_MRT3847_6703C.1
cggttttggtccggaattcccggggtcgacccacgcgtccgggacatcgtgtagctgtgtcataaagactatcgagccccaaccatttgctgtgcttgatgatctgaaaaatgttgttaagaaagtcaatcttcttgaggaagagggtagaatctctccttgggacgatgaacatgttccagaagaaattgtcactacaaagcctaatatggggcatgttgtgcaggaattggaatattcaaatattggagctactgaactgattctgtcaaatggcatgcggatctgctataagcgtacagactttcttgatgaccaggttatcttcaccgggtattcatatgggggcttatctgaactcccagagaatgagtacttctcttgttcaatgggacctactattgctggagaaattggtgtgtttggttatagaccatctgtcctgatggatatgcttgctggcaagagagctgaagtaggtaccaagattggtgcatatatgagaactttttatggtgattgttcaccttcagacctagaaactgctttgcagcttgtttatcagctgtttacaacaaatttaacaccaggtgaagaagatgttaaatagtcatgcaaatggctgaagaagcagtatctgctcagaaaagggatccata

SEQ ID NO: 106339 - DNA, 295 bp, Glycine max
  Clone ID: PAT_MRT3847_67040C.1
gacctccaatcacaacttattcatgtaaaaaaaatgcgggtcagatgcttcacctacctacattatgacactgaatcactgattctaatacatgaaacaccatattgactaaatgtcaagcagcttatacaatatctatgaaatggcctgagacaaatgatctacaataccgtaaacgaatgctctggaataccacatccttagcatatttgatgtgaggcaccatcaccttggaatggcatatccactctatgtgtcgctatagcatcaaactcacccattgccccacactaga

SEQ ID NO: 106340 - DNA, 675 bp, Glycine max
  Clone ID: PAT_MRT3847_67041C.1
ccagccaaaaacaaaatactagttttggtcctaacaaaaggggaccagaaaatttgctttagggaacaatattctcctacaggggctgggtctaaatcatacatatccatcaggggaggcttttttcgttggacccaagctggggcccaccttttttcagggggggctaaactggactattctatgccctatacaagggaaattttccaccaaagtgggaattaaaactcccagggtaaggggggccctcaaactccacaggtgaagccccaaaattaatcaccttcccatcactataataaagcttttttattatccggccattagtggccacattccccaccgttgtttttttttgcagccattgacagggttaattacccttggaaacaatgcacccaagggcttagttttttggaagtgggggacaacctcaaatccttaaaaagtcaccggaatcaaagcgatccaaagggatccctcgggggccagatggatattataggggccccaggaggggttttcaagtgaaaatattcggggggcccctttggtgggcccccttttaaaccaaagggcccttaaaaaacccctggttttttcccaggtttgttccccaaccccccccaaggaaaatctcctctgccccctttaagaagaggggcccaccccccc

SEQ ID NO: 106341 - DNA, 250 bp, Glycine max
  Clone ID: PAT_MRT3847_67042C.1
acatactcggggggggggcgctaaattactcgctaacagggaaggggtgttgaacaagaaacaacgatgcctgtccaagaagagatacgacaccatcatgagctccattctgcatgcgaggctctttgcgtatagccttgtgacctcgcccgatatttctggttggggtgtggaccacgccaaggttgacccgctgatagaacggtcttcacggaccgaacacatgtatatttggctgatggggcacaat

SEQ ID NO: 106342 - DNA, 403 bp, Glycine max
  Clone ID: PAT_MRT3847_67043C.1
accaagcctcggaatctcgctctggggctcgagacagcacatgtccctatcttcccttgctctgtgatgatttctctggttggtgcctaggaaaacataacaagcctgggagtgctgtcactgtgcggagcgccattcactgtcattaaagctctacttaagcggtatttgctgttacactgttcatttggttacaaatcatacatgttgcaacggttgatgcagaaattggcaaacttgctttggatagttgatggaattttggcaggtctttgataagaatattatttatgttaccttgaaagctatttaggtctaaccacttccagaaatcttatgcttctggaatttttgaatctatgtttcctccaccgcctaaggtgttagggagaattattattta

SEQ ID NO: 106343 - DNA, 247 bp, Glycine max
  Clone ID: PAT_MRT3847_67044C.1
cccactcataacattccactcagtatcttactatcttctttttatacgtcagaagttgacactacaacgaaacacactagacgatgggtagagtcccctacaatccctttttttctttgtgctttttttttattctttccaaatctgctactatgtttattttgccaatcattattcttatcccatattttttagtccaatttttattcttcaatgttctattcttaatttcttttctctatattat

SEQ ID NO: 106344 - DNA, 163 bp, Glycine max
  unsure (1)..(163): unsure at all n locations
  Clone ID: PAT_MRT3847_67045C.1
gacgaccaggttcaagatgacaggaaagaagagaggtcacgtcagcgccggacacggtcgtatctganagcaccggaagcatcccagaggtcgcggtgacgccggtggcatgcatcaccactgtatcctatgctacgagtaccatcctggtttctctgggagg

SEQ ID NO: 106345 - DNA, 517 bp, Glycine max
  Clone ID: PAT_MRT3847_67046C.1
cgccgtaagctcggaattcggctcgagcgccgagacggtctttgccttcttcgactctgcattcttcttcctctgattctaagaacggcaatgttgaaaaagagcctgtgattttacaacttccgagggtggcgccgcctcctccgccacctcctcccatggctgcgtctaaggctgctccgcctcctccgccaccgccgccgaaggggagtaggcaggtttcggcgaaggtgaggaagataccggaagtggtggagttctaccactcgttaatgaggagggaatcgcagtcccggcgggaatcgctctccggcgtggtggaagtgccgcctgcggcggcgaatccacgtgacatgatcggcgagattgagaaccgttcatctcacctgctcgcaataaaaaccgatgttgaaacacaaggagaccttattcgatgcttaatcaaagaagtggagggtgctgcatttacagacattgaagaccgtgggctctttgttaaatggcttggtgaccagct

SEQ ID NO: 106346 - DNA, 391 bp, Glycine max
  Clone ID: PAT_MRT3847_67047C.1
agaggattctttggggaattccaatttcacacccccaagattcattgcggcaaaaatgcccacacatgaatgggaattatttgcattcttactaggcctatcctgaagccaaaggaaacgagatcggaactcctcggggaattccaataccacatttccaagaaataaggaggcaaaaatgtccatacatgaatcggaatcactcgccatctcattaggcctaccctgaagccaaaggaaatgagatcggaactcctcggggaatccccaattccacattttcaagaaataaggaggcaaaaatgttcatatatgaactggaataatctgcttacttattaggcccatcctgaagccaaaggaaatgagatcggaattcctcgggggtacc

SEQ ID NO: 106347 - DNA, 909 bp, Glycine max
  Clone ID: PAT_MRT3847_67048C.1
aaccagaaaagatattagagagtctattaccaataatgcctgagaaaacatgccaactttaagaacttctttactccagtttgctgacaagtaggaaaccaggcagaataacatcctctagattccttgttttttcttttttgaagctattaaaaagaagcatgtaaattaaaaaaataaaatggtagtacaggattctagtaatcacaaacttcttaggcgactaaatgtctcagaggacacttttatcttttctgagttacaaaataaagatgccaatgaattccagacagaaatttcaggaagcttcccctgacttatcatgtcctccaaccacataactgcttcatattgcctacctatggagcaaagacccctaatgagtgaattgtaactgttggtacaaggccagtatgatttaattgacattttctccagaagttggcttgcctcaagataccttctctcaccacaaagcatttccagcaaaatgctgtaagtatctctgtcgcctgtgcaaccgaccttgctagacatcttgttcaagctctcgagtatggctgtggaatttccaacattgcataggtttttcaagagaatattgtacactttagcagttggtagacagttgactttcaccatgtcctcctctattaccttgattgcttcataaactttactaaccttgcacaatgcagctacttttgcctcaaagatagaatgtgttggtttaaagcctctgacttgcatttcaatgatgactttatcagcttcatccaccttattaacgctgaacaatgcagcagcttttgcttcaaagctagtatgtctaggaattaagcctctactttcttgcatttcaacgatgcccttagcgccttcatctatcttaccctcactgtacctcgt

SEQ ID NO: 106348 - DNA, 258 bp, Glycine max
  Clone ID: PAT_MRT3847_67049C.1
ccatttagcaatctgagattccattttctccgttgttcccaatggaaatggattcccttcccaacggcaacaacaccgccggaaccccgatctccgccaccgccaccgccaccgccaaccccgcgccgcctcagtcgtcgaaccttcctcaactgacggagtctctgaagctggagcaccagttccttcagggtccctttcgagcactacaagaaaaccctccgtgccaaccaccggcgccgtcgagaaggagatgtc

SEQ ID NO: 106349 - DNA, 422 bp, Glycine max
  unsure (1)..(422): unsure at all n locations
  Clone ID: PAT_MRT3847_6704C.1
cccacgcgtccgagatcagcaaacccatttcaaaatccatgccttggatcttggaaacggctgacttagtagacgaacaaacaacaacaacatccatacttttcaaatttgatgaaacaaacactagaccctctcaatcttccacttctgactcttcttcgattttctgaagcattacttccctgagctcctggaacccgaaacacagtttcccctcttcgaattcaactccaaatccaaaatattcaacctcgaaacccgaaacccgaaacccctaacattagttgagaaggaacctcaattgaatcggaaacccaaacctcacattctgagcacctatgtcttggtagcaaccaaaaaaccgagaatgtcgatctcaggtctgcgactaanaaatctcagagctagtcgatgttggctcc

SEQ ID NO: 106350 - DNA, 467 bp, Glycine max
  unsure (1)..(467): unsure at all n locations
  Clone ID: PAT_MRT3847_67050C.1
gcgtcgtcgtttaacgggaatttggcacccgacgcttcgcccaccgcgctcgccatgaagcacaaccccggcatagccctcgattggactctccaagagcaaactattctcgaagaaggactctctctaaaaaagaaaattgcaagagaaggaaggatgattttccaaggaaaagtaaagataaaaaggtttcggatcctgcagtgagatcatctcactatactgctcaacccaatgtttccccatatgctcctgctatgactatgatggacaatgatgatggcatctctcacatagctattggaggccccacaggtgagctcttagagcaaaatgcacaggccttgaataaaatctctaccaatcttgctgctcttcaggtgagttcattccatttttaactgatttaacctgatgtgcacanaaataatctcttgatctaaaaggctaaaaaacacaatttctga

SEQ ID NO: 106351 - DNA, 494 bp, Glycine max
  Clone ID: PAT_MRT3847_67051C.1
cttctgggaatcacgaagaagagcagacaacccatgttgcgtcgtcgtttaacgggaatttggcacccgacgcttcgcccaccgcgctcgccatgaagcacaaccccggcatagccctcgattggactctccaagagcaaactattctcgaagaaggactctctctgtttgcatctgaacctaacctcacacgctacgcaaagatagcacaaaatctaaataacaagacagtccgggatgtagcactgagagtcaggtggatgaataaaaaagaaaattgcaagagaaggaaggatgattttccaaggaaaagtaaagataaaaaggtattgctttcatttatttgatgtcatgtattaatgtattaaccaaatgggtgttttgtgtttcactgttgtgcataccaatgtaggtatgctttttaacatctttcactgtcctgtgcaagctaatactatctctctgtttccttttcacggcatactactttgaac

SEQ ID NO: 106352 - DNA, 1352 bp, Glycine max
  Clone ID: PAT_MRT3847_67052C.1
aacagaagagaatcctcgctctcttcgccatcttccttacctttttttctcatttcctcagtctaacgtgtccatcattatcaaaccacactcactcgctcgctcgcacactctttcatttttgaattatgtatcattttcaaatacgtttttaatgttatgcggtaattggcgggaaccaagtgtcaattcagataccctttgtgtcgaattggccaattacgaaagattcgcgttgaaaaggattcattcagtctcgcaaagaagaatcttttggaaagagaaaagaatcaaaattcaatggctaacccttctgggaatcacgaagaagagcagacaacccatgttgcgtcgtcgtttaacgggaatttggcacccgacacttcgcccaccgcgctcgccatgaagcacaaccccggcatagccctcgattggactctccaagaacaaactattctcgaagaaggactctctctttcgaaatcaaatattgtcagttcatgtattttttgatgcgtttgcgtctgaacctaacctcacacgctatgcaaagatagcacaaaatctaaataacaagacagtccgggatgtagcactgagggtcaggtggatgaataaaaaagaaaattgcaagagaaggaaggatgattttccaaggaaaagtaaagacaaaaaggtttctgatcctgtagtgaggtcatctcactttactgctcaacccaatgtttccccatatgctcttgctatgacaatgatggacaacgatgatggcatctctcacatagctattggaggccccacaggtgagctcttagagcaaaatgcacaggccttgaatataatctctaccaatcttgctgctcttcagtttcagggtaatgtcaatcttttcagccaaacgagagacaacatcatcaaaattttgaatgacatgaatgacatgcaagaggcaatgaagcaaatgccacctcttccttttaagatcaatgaaacaatattcaactccatactttccaaaacaaatcaacatatgcaataacgatgcttgctcattcattatgatacctgggcttgcttcttccatatttatgcttgcattcaaattgacccagcattaaagaacaaagaatggaataagttgaccaccacccagctgaattagccttcattttttgtaactttctggtttccctgctcttgctcgcttactaagtttaacttaattggagtataggaagtagttgttattattttggggttgaatttagggactgataaaaataagtagaacttagttatttgtaaattttattctccatattatataaatgatagatattgtttcctaaaaa

SEQ ID NO: 106353 - DNA, 351 bp, Glycine max
  Clone ID: PAT_MRT3847_67053C.1
agaacgaagaaacatcacactaaattgcatttataacgagggctaaggatttcaaaccggctggatgcaatcattggccttattccatgacaaattgtaaccaaggtcaaccaaatgcttacttaggcaccctagagccaaacttatttctaacggaattccaaaaggcggaaatagatatgtcatccggcgctcccttaaatgatgggagagagttctacattccaaaaaacatggggacagagacctttctggttacaagatcaaaaccaaaggcgggttgcggtggccttattctagcccatttagcgtgatttggaaccagattaaggagaatggaaacattacttg

SEQ ID NO: 106354 - DNA, 506 bp, Glycine max
  Clone ID: PAT_MRT3847_67054C.1
cacgcgtccggatgttacgaaaaatgttgtctttgaattacatccaaattacaggaatatacaccaaaagatttatgtgcgcataaccaacttgccagtttatgatcagattcgaaaataaggcagatccacttgaatacaatgatccgaattgggggagtagtaaccagacgttctggagttttcccccagttgcagcaggtgaagtatgactgtaacaaatgcggggcaattttggggcctttttttcagaattcatattcagaggtgaaagtgggatcctgtcctgagtgtcaatcaaaaggaccgttcactgtcaatattgaacagacaatttataggaattttcagaagcttaccctccaagagagtccagggatagttcctgcaggtcgacttccaagatacaaggaagtgatactattaaatgatctgattgattgtgcacgccctggagaagaaattgaggtcacaggtgtttataccaataattttgacttatcctt

SEQ ID NO: 106355 - DNA, 696 bp, Glycine max
  Clone ID: PAT_MRT3847_67055C.1
tgaatggttttgatgagagccccaagattgttgaaattgacacatacaagactcgatcaaggtctaggcgctttacctctacaatgtctgagtgtggagaagacatgtcctgtcatgcaatctcatcccctcttccttgtccagtcccgggtcgaatctcagttcctgattgcagatacattcaagattttgattggtactacaatgttgatgagtgtagattctccacagctcatagcaccccacgtttcacaaactatgtgaggcctaatgttccagctacaccagccaagagtgtttgtggagacaccttcttcagaccttactccaatttccccaactacatggccaatactcagtcattcaatgcaaaactaaggtctcatagtgctccaaagcaaagacctgaacccaagaaaaggctctcactcaatgaaatgatggcagcaagaaacagcataagtggtgttagaatgcaaaggccatcatccaatttcttccagactcaagaagactcctggaatttttgacaatcacaaggaatatttgagaggcaattggagtctaaatgatgttagtaatatctagaatttgtttttttttttttcacttgtgcttacaacttacaaattcagggatgaaattctcaattctcaattctgcttgtgtacattcttttaattaaagagtttttct

SEQ ID NO: 106356 - DNA, 387 bp, Glycine max
  unsure (1)..(387): unsure at all n locations
  Clone ID: PAT_MRT3847_67056C.1
aagaagacagagagaagagaaacaaagaaagaaagaaagagagggaggtggttgaagaaacgaaccctaagagagagagagaaaaaaatctttgctgtgatttcaagctcctttaccattgcatttcgnggatcctcgaatcttcaaatctgcaaaaggtattttttgattcttgcttctaatggcaaattcaaaagggctcaatcgagtttcaaaaattttatgtatcctggaaagcatcctctactttctnctaaaagtccgtttctagtgnttcccagcatatgctgattatgtccaatncgctgttgtttaaaggcctgtacagaccgagagatggaacacacaccaccacgtacttcatctgagagcctagttatagaggag

SEQ ID NO: 106357 - DNA, 233 bp, Glycine max
  unsure (1)..(233): unsure at all n locations
  Clone ID: PAT_MRT3847_67057C.1
ggggtggcagtccatccagtgacacaaatgatatcacaatgcagaatgttcaggttacaataagtactgataacacattcctgaaatcagntaaaccaatcaattgtaacctgaacatccttcattggggtgcgcatccatccagtgacacaaatgatatcacaatgaaatccggtacgcttcaggttacaattgattgatttattccctctcaagaatgtgttcccaagacc

SEQ ID NO: 106358 - DNA, 543 bp, Glycine max
  Clone ID: PAT_MRT3847_67058C.1
ccccttcttttcattcctctcaaaccttttctttgcattcccttttcgttaaatctttaccaatttcatcacgggccgctgccaaaacccatcctttcttgtccttgttccatggggggctgaaatttgccaccaatcatatgtagggactctaaaaaatggtaattttgaagggggagaaaatcaggaataaaggggcataaaccaaccaaattaaaaaacctttttttggggtttaaaaaatttggcctcatttggaatggataaaggaaggcccaccctaaggaacccgttggaaccattttttgggggaagggggttggttttcaaaaccaattttggcaataggtggttttttaaactcggggaaggtgctaagggccggatttgggggaagagataaggaggtgggcccaaccaaaaaaccctacatggggctgtgtttaaggtcaagagaattgcgcgggggtgtgttgagagagagttggaaaaaaagagtttgaaaaaaatagggtttccaaattgatttttgggcaaaatgat

SEQ ID NO: 106359 - DNA, 187 bp, Glycine max
  Clone ID: PAT_MRT3847_67059C.1
actgagcatcgtctagctatctcgatcgaactgtccaaggtcctgtcacataaatgggattgtgccatcttaacatgcggcctagtgaagatgtataggcagtgcgtagataagcatctgtgactcgcactaatgcacgttagtgtattgctgtagctgagatgcaagctctgagaattctatttgg

SEQ ID NO: 106360 - DNA, 308 bp, Glycine max
  Clone ID: PAT_MRT3847_6705C.1
ttccagcagacatgccttgactaacttgtggaaccggggagcagtgtatggtatccaggacgtactacaactcgtaagccgtgagtccgctgacagaatgaatgaagatgtgcaatgtgtgcaagctagtgccggctgagctcattaattactgttgacttaagatggaactatttatgcctgagcagttaactagaaaggagtggagccagctaaaggactcgaaaacggatattgtacaaattaatcatacagcattagaattctccgacagaaataaatcgacatggaaagatcgttcagattac

SEQ ID NO: 106361 - DNA, 452 bp, Glycine max
  Clone ID: PAT_MRT3847_67060C.1
tcccacgcgtccgtacctttcttattttaaatttcttttctttcataatacttctgcatttgttctatattttcggtggtcatcaacattccactatagcaaactttcatacctacatgctttaacattattatttgtgactttccattcttatattcttctgttttttcttttcttcctttttgaaatctctatttcttttagtctagctacattgcaaatctatacattttatatttaaataccctcttccttactacctactgtcttctgtaattatgacaattattcataaacacaatagaatcctaaataaaatctggtgattatttctgaagattcttacattggctctctgtatctcaatgaatcatttaaattcctaatgacatctctcaactatggttttcctctttctatatctgttatgacctctaatctataatgttcat

SEQ ID NO: 106362 - DNA, 280 bp, Glycine max
  Clone ID: PAT_MRT3847_67061C.1
ggaaaacaggttttctctggataaaaaaaagggggaaaggttgcctcatttgagaggccggggtggcaccccaatactaacggggggggtgttttaataaacctggggggggggcacgcccctttagccccacaaagggccttccataaaagcaccatttttttggggcccccaaaaaaacccccgggggggcctttgaaaaggttttaaacggcctccgctggggtgggggtttaggattttcctatggggcccctccccaaaaaacatgggggggggt

SEQ ID NO: 106363 - DNA, 643 bp, Glycine max
  unsure (1)..(643): unsure at all n locations
  Clone ID: PAT_MRT3847_67062C.1
agtttattaattagataatcacattaaaatttttaaaaaaattatattatatttttaaaaattatccttaaaattacgagcctcatcatttcacttttttcacttagttacattttacataaataattaattaatgtgtgttagtcttcttttctaatcctaataaaagagaatgaatttatcttattactaatttataacatttattgtaatataattaagagtatttttgtcaaaaattatataacctaaaagacaacatggaaaaagagagacaaacaaatttaaaaaattaaagagtcttaaattcagaaatggaggtagtataaaattttaattatttttaattaagattaaaacaaattctaaaattatttaatatttttgcaatcatactattgccgaataattttgtaaatttttttaggaaataaagtgaaaattttgtcattatagaatcaaaaaattcttatacatgcttttccaatgcaaaaaaaaaattaaataatagtaaaatatcnnnatggagaacatttttatattttttttgtcacccaaattataaagaaattgtttgttcccaatgttttcaaataatctaaagatatttgctgcagnttggttttattcttatgattaaata

SEQ ID NO: 106364 - DNA, 334 bp, Glycine max
  Clone ID: PAT_MRT3847_67063C.1
ttttgcttttaaaaatatggatatttgaggaccaagattaaaccaattttcaattccaatcctgggcctttaaggattaaagtcattttcaaaacctccctcaaaagggcgaaccccttctaacccaacaaaaaacagggaacctttttttttttagggggggtttggaaaccccataattcttccttcaacttaaatcattaccgcatttgaggaactggattattcatccttcaactgaatcatccccctcaaaaaccttcctcagtttctctttcgtctgattcaaaaacccttctcgcttgtttcaccttttcattcataaaaagcagtt

SEQ ID NO: 106365 - DNA, 433 bp, Glycine max
  Clone ID: PAT_MRT3847_67064C.1
cccacgcgtccgctcacgctttctgtctttgtttattcggctcgcacctactttcatgctgcgcagagctacagtctcaccgatcttgcgattatttttctaatatgttatatgtgctagagagagagacccactcttggggacactcctgttaagacccgcgaacgaaatattgctagtccagtgaccccttctgcattgtaggataccctggatcatatttagtcggatcagggtcgtgatctaggtcttgatagctcgaatgttgaatcttaataccttaacctatgaagatgctgggactcctagattgaggatgcttataatggcggtcgtacacaagcttgtactacgaatgatgatgagggggacggttagccatactatatgattgagtgcgagcttaatcgtgtaggccacttaccatctgtca

SEQ ID NO: 106366 - DNA, 185 bp, Glycine max
  Clone ID: PAT_MRT3847_67065C.1
cgccctacattctggccccgggaggggttaatttaacttaacccggggcacttgcaaattccaggtatcatctgcgggctctcaaaaggaagtttgataggcaccttggaattccattgctgctgtaacacctttgcatttagttatatgcaacatcataatctattttcaaatggttcactact

SEQ ID NO: 106367 - DNA, 134 bp, Glycine max
  Clone ID: PAT_MRT3847_67066C.1
ggaccggcccggaagacccggggcgacccacgcggccgcccacgataccggaaaggacgcaaaccggaaacacaggaggacgcaccataaaaccggagacaaacacagccgaaagcggaaagcaagaatccgac

SEQ ID NO: 106368 - DNA, 410 bp, Glycine max
  Clone ID: PAT_MRT3847_67067C.1
gggaaaaaaactgaattggttttgtaaagttttttttgttaaataccttaaagaatcaatttattttaacaaaaatccttgactcaaagaaaatttattcctgtttttaatgtttggggccctcattttgctacccaatgaaccacccttttggcccatacgtttacgaaaccttggtttcaactcaatcacttgcttctgaaacctactttcccatttttaatgttcacttctaacactcacacttttccacctttgatgatcacttctaacccttatcattttggttttcaaacccaaatcactatcatactggtctctaagccttggattggacaagggctcttaagccgtatttagctgaacaaacatccttgttgactcccccttcatggaaggatcctggcccc

SEQ ID NO: 106369 - DNA, 146 bp, Glycine max
  Clone ID: PAT_MRT3847_67068C.1
ctaggaggcggccggagccctgatggtgtttctattccccaccaccgtgcaccatcattttttctgcggaggaaaaagcagacgataccgatgccaccactacactatgtcggcgtgaccgaccgagggcacggaatctccaccca

SEQ ID NO: 106370 - DNA, 654 bp, Glycine max
  Clone ID: PAT_MRT3847_67069C.1
gctgccaaagggaattttagttctgtgccatggtggaatgagctttctgagtgtggaaaaaaaggactttcgattaaaccaaaaaggggtgatgctctacttttttggagtatgaagccagatgcaagtttagatccatcaagcttacatggtggttgtccagtgatcaagggtaataaatggtcaagtaccaaatggatgcgtgtcagcgaatacaatgcttgaatatacattactataggcttgtctgaattcagcatgccaatggtgtactatttgagtctcagctaaaaatttgcgtgataatgcttcagatctggaaggaaatatttacagcatgatgtggcattctgtaattttggatgttcagttgtaagctaactcattttttcccctatccttttcatttataataatagcgaatataataaaaaaaaattatttaccgggttaatttacaatagggatgtgcaagaaaatgtatgaaaccaatagatggaacaagtataccagttttttttccctcagagctcctttacctttggttgtattcgttgttatatgtcagcttgtgttattacccctaaagtcgtgcattcgaggggtctttgataattgagttaaatatttatttttggttaaagaatcgagttg

SEQ ID NO: 106371 - DNA, 2105 bp, Glycine max
  Clone ID: PAT_MRT3847_6706C.1
ccgccaatggcattgggcatgcggcattcgactgtccgaaacaacacttttgttgttgtgctatcaaatttgatccttttcgttggcatcattaacgttttccctcctcactctctctcctcctctaaaatcactatacggttgtaccattcaaattaaagattgttcgaactgcagagtaaactgcagtatagagctaataatcctcagatcaacgaaaaaaagagttcttgtaggtttcattgtcatggagctgaattcacagaagagaccattttcaatcaaattatggcctcctagtcagaacactaggcagacccttgtggagaggatgaccaacaatctgactactaaatctcttttcacacagaagtatggaactttggacaaggaagaggctgaagagaatgcaaagaggattgaggatgtggcttttgctactgcgaatctacactatgagaaagagccagatggtgatggaggttctgcagtccagctttatgccaaagaatgtagtaagctcctcctagatgttcttaaaagaggacctagtaaaaaggatgatgaagtggtgacatctgttaataccacttcatctcttgaatatgtttttgatatatctaaaggccaaagggccttcattgaagcagatgagacagagcaacttttaagtccgttaaaggagccaggaaattcttacaccaaaatatgctttagcaacaggagctttgggttaggagcagcgcaagttgccgagcccattctcactgccatcaaggaccagttgaaggaagtagatctatcagattttattgcgggaagatcagaagtagaagctcttgatgtcatgaagatattctcaactgccctagaaggaagcgtcttgaggtctttaaacctttccgacaatgcattaggtgaaaaaggtgttagagcatttggagcacttttgaaatcgcagaaatgcttggaggagctttatctgatgaacgatggaatctcaaaggaagctgctcgagcagtttgcgagttgattcctttcacagagaaactcaaagttcttcattttcataataatatgactggagatgaaggggcactagctatagccgaggttgtaaagcgttctcctttgttggaggattttcgctgttcctccacaaggataggctctgaaggtggagttgccttgtctgatgctttagggaattgtgcccatctgaagaagcttgatttgcgagacaacatgttaggtgtggagggtggggtttctctgagtaaagctcttagcaagcatgcagaactaagagaggtatacctgagctacctgaacttggaagacgatggtgcaattgctattgttgatgctcttacggaagcagctcctcaccttgaagttttggagatgagcggaaatgatattacagctgatgctgctcctgcaatagcagcctgcctagcagcaaagcagtttctcactaagttgaacctctctgagaatgaactcaaggatgaaggggccaacctgataactaaggccattgaaggccatgtccaattaaaggaaattgatctaagtgccaaccaaataagcagggctggggctcaacaactggctgtgactgtggtgcaaaaggctgatttcaaacttctgaacattaatgggaacttcatttctgatgaaggcattgatgagttgaaggatatatttaaaaaatctccagacatgctcggtccattagacgaaaatgaccctgatggaatagacaatgatgaagaatctgatgaagaaggtggtgcagatgaactcgaatccaaaatgaagaaccttgtagttgatgattgactgaagcagttgcagtcttctttcatgttctgctgcgcaagtaactctcgtgacagtagagggtttttagaccattttattcgtagtagtttatgtaactattaagacgcatcaatttgacagcagtcaattattgaggggacataaaatgtctgcaatatttatcgaaatgttgttttcgatgtttcctttcaaagttccatttcacttggctagattatattattttcaattgcatccccgcagtcattagcgtatt

SEQ ID NO: 106372 - DNA, 417 bp, Glycine max
  Clone ID: PAT_MRT3847_67070C.1
gactggtaacatttctcttaatattattaaatactgaaagcggggtgtaacgtgtacataatactcctcagagtttatatacttatatcatagttattgatatttttatagatggttcaaacttcaaataacagataccactcatttatgcctataaacaaacgagatattgtacataatatatataacagtctcagtattcaatcgaagatcagaaacgcaatcagagcttggttcatcttgtcttgttagttatgtgactagataaccaatctagcccctcatagagtccttggccggacgtagcacaagttggctggatgtaccagcgacgcaggcggagtgaatgtaaaccgagtttatctgtaatttccgcaacacttaaagcatttggaagatcttgcttattggccaaca

SEQ ID NO: 106373 - DNA, 1555 bp, Glycine max
  Clone ID: PAT_MRT3847_67071C.1
gttcaaaatcaaaataacaataacagttcaaaatcaaaatcaaatctacgtctcatcgaataatttcagatctcgtcgatctgagctcaaaacaatggcgaaaccaaggtactctcgtcttccacctcgcaagtcatcgtcgtcttccacgctgattctgactctgttcctggtcttcaccttcctcgttctaattctcctggctctcggcatcctctccattcctagctcctcgcgtggaaatttgcccaaacctaacgatctcgcatccattgctcgcaacacaatccacacttccgacgatgacgacgtgaggggagagcagtgggttgaagtagtgtcgtgggagccgagagcctttgtctatcacaattttctgacgaaggaggaatgcgagtatctaattgacatagcaaagccaaatatgcataagtcatcagttgttgatagcgaaaccggaaagagtaaagacagcagagtacgtacaagctctggaacttttctggccagaggtcgggataagattgtcagggatattgagaaaagaattgctcactatagttttattcctgttgagcatggtgaaggacttcaagttctgcactatgaagttggacaaaagtatgagcctcactacgactactttcttgatgattttaacactaagaatgggggtcaacgtatagcaacagtgctgatgtaccttactgatgttgaagaagggggtgagacagtgttcccagctgccaaagggaattttagttctgtgccatggtggaatgagctttctgagtgtggaaaaaaaggactttcaattaagccgaagaggggagatgctctacttttttggagcatgaagccagatgcaactttagatccatcaagcttacatggtggttgtccagtgatcaagggtaataagtggtcaagtaccaaatggatgcgtgtcagcgaatacaaagcttgaatatacattactataggcttgtctgaattcatcatgccaagggtgtaccatttggaggtccagctaaaagtttgcgtgataatgtttcagatctggaatgaaatatttacagcatgcggtaacattttgtaaattttggtcttcagttttaatttacctcatttttcttcaacccttttcatttatgataccacatgaatataataaaaataaaataaaaaattatgtgccggttaatttacaatagggctgttcaccttaatgtataaaaaacaatacatgtataatgtaaaccagtttttttttcctcaaatttacaatagggatgtgcaagaaaatgtatgaaaccaatagatggaacaagtataccagttttttttccctcagagctcctttacctttggttgtattcgttgttatatgtcagcttgtgttattacccctaaagtcgtgcattcgaggggtctttgataattgagttaaatatttatttttggttaaagaatcgagttaagaatagtgttatttattatgaaacagttatcgcaagaatcaatacaaaagttgtgcatttttttggaaaaaaaa

SEQ ID NO: 106374 - DNA, 563 bp, Glycine max
  Clone ID: PAT_MRT3847_67072C.1
ttcggcacgagggtgttctgtgtggctatttttggagaactatgtagtctgtccatcatcattctcttgtcagtcttgtgaacaaagaaaattgcttctactgttcacatggttcttctcttaattgtccttctaatcatgtaaatggacatatcatcttgcatggagtttttttttttcttcccttgctgacaattagagtatgttttatgtatattattcttaatatgctgctattaataaatattcatgcatgtcctctcattattgccttaatttgagattaattcctcttctgttctgagatggtgattgtatatagctgtatgtatattgtcatcaacttggagaggctatcgaactaatttcaatgtagtatttatttgactattttacaagacaaagcattcagaatacattaataagttccatgttttggtcatattcctctctatatctcaaagttctcttgggttattattagctctgttccttttactttaggtttaatagttcatcatccttggttatcacatagtcattgtgatattgtattggtttga

SEQ ID NO: 106375 - DNA, 625 bp, Glycine max
  Clone ID: PAT_MRT3847_67073C.1
caaaccttcctccttacactcttccttttcaccactcaaatgctactactctcgcttgctcacaaaaccccttcaattttctcaggtataggaagaagcaattctgagcgaattgcaaccttcacgaattgaatttgtttctgttaatttttgtgcgtatttatcataagctacgaatttcgatagtgtgtaaatggcgacctgttatactccctcgaatgttagaaattcggcgggggtgctggctgttgttggaggcagaacaatttctgagaatcacggtatcagatcgtgcttcttgagaattcaagagagcaagaccgtgtttggcagcaatcggaagtgtggtttcgtttccagtgaaagtgttccgcgaattcccacagcatcagtcgcaaggatccttttctggatctgcaccctggaggtttcaatgctcagaggagaaggaggggagtgcactgaacagccctagacctagaaaggatgtatcaggtgggaaacgtcgcttgaaagtttggaagccacaacggctcccgagtaacttacagtgaagcaaagatcaaagtcattggtgtgggttggagggccggttcaaatgcagtcaaccgcatgatagagagct

SEQ ID NO: 106376 - DNA, 441 bp, Glycine max
  Clone ID: PAT_MRT3847_67074C.1
gaacaattaccgtttacagagcatataggttggttctttaatgatatttgggtggaggctatgtaggatttactttctggaatgacataattgattctccaagctgaatcaaaagtctttggtatataccagatgttcaaggaaaaaacaatctctgcgtggtttctaatcctcacaaattcaaaaacacacggcaatggatagcttaacctgctgcttggaaatcgccaaaatcattatttaaaacattctctgtgctttgttttttaagaaaaaacttaggctctggggctttaactgttaaaagaatctcaactatattaggtgtcaaaaggctaaaatttgtaggagaatttggtggagacttttgaatgccgaaaaaggtgaaagtggtgctggaggacgccaaaacaaaatactaggtatagattctttccccat

SEQ ID NO: 106377 - DNA, 250 bp, Glycine max
  Clone ID: PAT_MRT3847_67075C.1
tatatctctctttcatcataaggctaatcctggggtacttttaaaagcaaatggggtctaacccaccatcctaaaaaccaaccaaaaggacaactttaaccaccgaaaaaaacccaacaacctattcttaataccttataaaaaccacactgtctaaaacaaacatgaactactccccaatacaaaataaatatgtcaaccaaacataacaacacccctcattttcaacattaaattaaaacattcactc

SEQ ID NO: 106378 - DNA, 868 bp, Glycine max
  unsure (1)..(868): unsure at all n locations
  Clone ID: PAT_MRT3847_67076C.1
ccacgcgtccgtacggctgcgagaagacgacagaagggggcattatatttgagttcaaacaaatcaaagccatggccacctccaacttctctattgttctctccgtctccctagccttctttttggtgctacttaccaaggcacactcgaccgataccgtttctttcaccttcaacaagttcaacccagtccaaccaaacattatgctccaaaaagatgctagtatttcatcctctggggtgttacaactcaccaaagttggcagcaacggcgtgcccacctcgggatctctcggtcgtgccctttacgctgccccaatccagatttgggacagcgaaaccggcaaggtagccagctgggctacatcctttaaattcaacattttcgcacccaacaaatcaaaacggcatcgtgggggttgtccaatggacaagtggcggagattctcgttacctataatgccgccacgagcctcttggttgcttctctgatccacccttcaaagaaaacaagttacatcctctctgacacagtgaacttgaagagtaatcttcccgaatgggtgagcgttgggttctctgccaccaccgggttgcatgaaggctccgttgaaacccatgatgtgatttcttggtcttttgcttccaagttgtcatatggtagcagcaattatgctttggatcttccaagctttgtgctcaacccgcccatcngaggcaaaacatcgtagttaaatgtgacaaaagaaaaatgtaataacgccctagcttgctagaggctggtgctactaataatgtttgtcccaaaaattatataataataggtgttttactccgtcccaaaaaaaaaaaaaaaaaattaaccaaac

SEQ ID NO: 106379 - DNA, 337 bp, Glycine max
  unsure (1)..(337): unsure at all n locations
  Clone ID: PAT_MRT3847_67077C.1
ttttcgtttgatgaagctaattngnggaaaggccaaagcggacctgagctaaaacagaaaattcaacaccaaaccaaaaacatcagagcaccgatggattgggtaggaagtgagaaatgttgattataaaagcaaaattttgggtgttggaatcggaaccgcattaaagagggggttggggggtgattgtctctaaaacccaaaaaatacacttttttttttttggaatgaagtatttgccttggggaaactttttaatcgaaaaccataataagccaaatttttccaccacatggggaaatatctctaaaaaaaagagggggggaggacatttttc

SEQ ID NO: 106380 - DNA, 1317 bp, Glycine max
  Clone ID: PAT_MRT3847_67078C.1
ccacgcgtccgtacggctgcgagaagacgacagaagggggcattatatttgagttcaaacaaatcaaagccatggccacctccaacttctctattgttctctccgtctccctagccttctttttggtgctacttaccaaggcacactcgaccgataccgtttctttcaccttcaacaagttcaacccagtccaaccaaacattatgctccaaaaagatgctagtatttcatcctctggggtgttacaactcaccaaagttggcagcaacggcgtgcccacctcgggatctctcggtcgtgccctttacgctgccccaatccagatttgggacagcgaaaccggcaaggtagccagctgggctacatcctttaaattcaacattttcgcacccaacaaatcaaactcagctgacgggcttgccttcttcttggcacccgtcgggtctcagccccaatccgacgatggatttcttggtcttttcaacagtcccttaaaggacaagtctctccaaaccgtggcgattgagttcgatactttctcgaacaaaaaatgggatcctgcaaaccgacacatcggcattgacgtgaactcgatcaagtccgtcaaaacggcatcgtggggggttgtccaatggacaagtggcggagattctccgttacctataatgccgcccacgagccttcttggttgcttatatgatccaacccttcaaagaaaacaagttacatcctctctgacacagtgaacttgaagagtaatcttcccgaatgggtgagcgttgggttctctgccaccaccgggctcgcaccaaggctccgttgaaacccatgatgtgatttcttggtcttttgcttccaagttgtcagatggtagcagcaatgatgctttggatcttccaagctttgtgctcaatgaggccatctaacttcaaacatcgtagttaaatgtgacaaaagaaaaatgtaataacgccctagcttgctagaggctggtgctactaataatgtttgtcacaaaaattatataataataggtgttttactccgtctaaaaaaaaaaaaaaaaaaaaaaaatcaaaaaataaaaataaaaaaaaaacctcgagggggggcccggtacccaattcgccctatagtgagtcgtattacgcgcgctcactggccgtcgttttacaacgtcgtgactgggaaaaccctggcgttacccaacttaatcgccttgcagcacatccccctttcgccagctggcgtaatagcgaagaggcccgcaccgatcgcccttcccaacagttgcgcagcctgaatggcgaatgggac

SEQ ID NO: 106381 - DNA, 363 bp, Glycine max
  Clone ID: PAT_MRT3847_67079C.1
tttacttttttttttttttttttagaaggttttttttttttttttttttttaaacccagggaaattttaaattgtcaaacagggtggtgataaaaagttctttcgcccttttttcacctaaaatactaaagggtggcgaacatggcctaccgtcattttttttaataatgtacattttacaacaaaacaaaaagaaagctgtgcaccccaagcagaattccccctttcataaagcgattttattatagccctatgtgcaattggggggtgcttttccattcttgtgtaagaaacctcactcccccccagcataaaaatatccctataccctttttagaataccggggtatccttccctggccc

SEQ ID NO: 106382 - DNA, 636 bp, Glycine max
  unsure (1)..(636): unsure at all n locations
  Clone ID: PAT_MRT3847_6707C.1
tgaacagttgaaccccggcatgtatggtcaatatgagtctggaaatgggtaaatggctaaagtcttattctctattttccatgctcttctctctcgtaccaaataagaaacacccagttctaaacaaatgtacattacaagtacaataacacaataacatgataaaaagatagaaactagtatacataagtattaatcaaaatgtttaaaaatatgaatattgaaagctcatgcaaagttaataatatctaatagcttgctttcttgagggaggtgaaggtaagggaagaacccaaagatgaattccccacttggacatcaaaggaatcataatgaagaaagaactccaccaccagaagccgagagaacaacaccacaaaatccttccctgcacattgcttgttcccaagggtgggtccctcggtctcaggcccattggaccaaagcacgtgtttgagcaacttctctccctcccccacaaaccgatccgccacaaattcctccgcattctcaaatatcttcggatcctttgtcgcnnncggctnnnnnccgaacagcatctccccttccttcaccacgaacgcattctcgtggctctcaatcaccaactccttcttcgccctcccgtactgcagc

SEQ ID NO: 106383 - DNA, 784 bp, Glycine max
  Clone ID: PAT_MRT3847_67080C.1
cttcgctactcttctctctctttctttctctatctattctattctatattctcttttcttttcaattcttgtcctttgcttctgacgcaactctaccaactaaattcaactctttcgctacttccttctgcgtttcacagctcccaactcattctttaggcgcccctcgacatactcgctcacctttcttcgcttccacaaccatgtctcagaccaactgggaagctgacaagatgttagatgtttacatccatgattatcttgttaagagggatttgaaggcttctgctcaggcttttcaagctgaaggaaaagtatcatcggaccctgttgctattgatgccccgggaggctttctgttcgagtggtggtcggttttctgggatatatttattgcaaggacaaatgaaaagcactcagaggttgctgcatcgtatattgagacacaattaataaaggcaagggagcaacaacagcagcagaaccagcagcagccacagccccagcaatcacagcatcagcaacaacacatgcagatgcaacagctcctgttgcagagagcacagcaacaacagcagcagcagcagcaacaacaacagcagccccaatcgcagcaacagcagtcacaaccacaacaacaacagcaaagtagggaataggcctcatcttttaaatggtagtgcaaatgggttagtcggaaaccctggaactgcaaatgcactagcaacaaagatgtatgaggaaagattaaaacttccccttcaaagggactctttggatgatg

SEQ ID NO: 106384 - DNA, 384 bp, Glycine max
  Clone ID: PAT_MRT3847_67081C.1
acggctgccagaagacaacaaaagggggagttgatcttggaaaaattgcacctccaaactcaaacccaacccctacttgcgttactttttaataacggaggtgatacaacaacacacctatgtcatattcacctaattctcgcactttactatttctctctataaataattaaccacaccattattgatgggccgacgatcccttatcgttacggggtttcactcgcttctttttgattacagatccaactatacctttgatagagatattggcttgcatattctcatgaagaacaaaaactgtatatgatcgcaagtttgactttattcgcgtctatttcctcgatcactatgctttttatgtgaacaagacagatggcctta

SEQ ID NO: 106385 - DNA, 459 bp, Glycine max
  unsure (1)..(459): unsure at all n locations
  Clone ID: PAT_MRT3847_67082C.1
aattcataaaaaaaaattatattacttttttaattcattatattttttccgtaagcatttactgaaaaaattacgtaagacggaaagatggccattacatcatatcgtttccatggatcaaaatcctgaagattcataggtccacaactcaaatctttagataagccagttctagctagcccctcctaatcaaggatagcctaaatcactaacccatcaatgacacaacgaagtattgcatttagaaaacatgctttccaccatttttctttaaattttttaataaccttcctagtcctacgtagttgcagttgcactcacattgcaagtcaataacctgccacttgtacttcctagcactcagncatgtaagttgccgacgcactcagagcacccacaaaaacaacctcatgcactgccagaatcagcatatcttacaggctcatgctatgagacaaa

SEQ ID NO: 106386 - DNA, 804 bp, Glycine max
  Clone ID: PAT_MRT3847_67083C.1
acggtaaatcactaaagtcggccttatagtatgcatagttcataggttcgaatttcactacaccattgtaaaaataaaaaaaaatggtaacagttgtattctacattccttttcttatttaccagacattagatttgcaagagttggattttcaatgatggaagcaatatcccaatcctcagtagttgaagtaagtgctgtgagagtaaccacaacagaactcatatttggacgttgttgtggatcgctctctgtgcatgctctagcaagttgtgccatcttgcaaactgaatcaattgggtagttatctccaagcctaggatccaccagttttttaagaccttctgtggtatcttgctgatcaaatacttcatcaaacaaagatacaaggccctttagttcagcaccagagacaccacctctgctcaatgcttctttaccagaaattagttcataaagaacaactccaaaagcatagacatctattttgggagaaacattgccatatgcatattctggtggcatgtaacccaaatgtgcccttcatattaacagtgggaagtgatgaacttccaacatcaatcaacttggttaatccaaagtctgcaacctttgcaccgaagtttttgtctattaaaatgttttccgactttatgtcacgatggatatatacaggtaccgtatgctcatgaatgtattgaagacctctggctgaatccagagcaatttgaactcgggtagaccatggcaaaggattgaaacctgatttacgtagatgttgtcctaagttgccattctcaatgt

SEQ ID NO: 106387 - DNA, 300 bp, Glycine max
  Clone ID: PAT_MRT3847_67084C.1
cggaagaacccgggacgatccacgccgccggattgattaccagaagacgacagaaggggacaggagcgaaaaaaaaacaggaagaccaggggcagaccacagggaacagaaaaaacgggaaacaggacacccacacagggcacaagggagacagaacccacaacggcaccagagcggacagacgagaaacacagcagggagacaagcctacagaagcacccagcgcaaagcagccaaacgaacccaagcaaacgaaaacaccagaagacccagccaccaacaccggccaggccaagggac

SEQ ID NO: 106388 - DNA, 1095 bp, Glycine max
  unsure (1)..(1095): unsure at all n locations
  Clone ID: PAT_MRT3847_67085C.1
atagtataatagtgatgctttggtaatggctggctggatttgtcagcttttcattttgccccaccttctccttccatatcacaatcataacttgagttgagcacgttcccgttacatctgaaatttcctctgctgagattttctcaagtttataagccacaagtgcaaatgggaatgaaatgaagaatggggtttagagttagtcaagattagtggtgtggtgtcctatgttatgactgcacacatgtgaagtgaagtagagactattcagtccacagcagctgtttctagtgtgtgtgtcattgcattcctcatccttttcctcttttttcacgccttaatttctttctctctttctccctcttcctctctggaatttggagcatcagccagcactctatggattctctgattggtaattggccatcctacgatcctcacaacttcagtcagcttcgaccttccgatccttctagttcttctaaaatgatgccggccacttaccatcctactcacaacaggactcttccagcacctgatcaagtgataagtactgaagccaaaaacatcctcatgagacatatttatcagcattctgagcagaagttgaatccaaaaagagctgcatctgataaccttcttttaccagagcatggatgcaagcaacctagggtttccagctgacacttgcccgtttccattgacctttgtgatcgtgagcaagtttccaaaagatcagaacttacaagagtgaacttacaagagtttggtgcttgtttggaactctgaactattttggcagctatatagacttgggagcgtgtgaaaataaaccctgttaatgcccatcaaagtttaccatgaatgaaataatgatatgcttttgttgtttatttttgtgtcatgcttgttgtactctacccacaactgattgtccacaatagttgggaagagataagtgcttgattgaggattttcaaaatctatctatcttttggactcaggagcatattctggggccataatgttctccatctaaaaanaaaaaaanaanaaaaaanggnnannannaannannanganganagggnncnt

SEQ ID NO: 106389 - DNA, 308 bp, Glycine max
  Clone ID: PAT_MRT3847_67086C.1
cccacgcgttcgatatatttggttattcatttatttttagaaaaagtggtgagccatatggggtttgacgagcacgaggaccaacagcaagaagaggaggtggaggaggaggaaatgggattttcagtggcggcggcggcgagttacaactcgttgggaaactgccgtgtgaggcctaaaattatcggctgtgatggtgttgcagacaccgagaatttcggtcggaaagggacggtgagatacagagaatgtcataagaaccatgccggctgtataggcggtcacgccgatgacggatgctgcaagtt

SEQ ID NO: 106390 - DNA, 177 bp, Glycine max
  Clone ID: PAT_MRT3847_67087C.1
acacacgcgtccagtttcacataccgtcaacaatcgcaaccgcaccgagccagcgagcgagaacaagactcattaaaaaaacgtggtgtgtcagtgttactcaatgcgcggcatcgcacgtacgtgaattcggcacgtgagtgtctattcgtcagccgagtcagagggattctcgat

SEQ ID NO: 106391 - DNA, 262 bp, Glycine max
  Clone ID: PAT_MRT3847_67088C.1
agtcatctactccctgtgtgccaccacgaataatcgcaatcgtgcccataacagcggatgctccacaagcaatatatccgggtttctctcgattgtctactctggaacatagcataatcattgccgccacataccatggaatgccagcacgagagatgcctactataaccagacaccagccggatccaaggccacagcgaccagagcggtgttctgttacaggtgtttcttcactcaatgtgtaaccggaaaccgctcggta

SEQ ID NO: 106392 - DNA, 216 bp, Glycine max
  Clone ID: PAT_MRT3847_67089C.1
cgctgaccatcatggtcatgcttggtatttcatttcgtgtcgttctgctaaccggctgtgttcttcttctagtgcaggcacgatcttactgttgccagatccatgtgccgcatgccttcccgcgcgctaaccgtgtgtaggctgttggggaattcattgtgacctgcaaccttaacaacgctgcattctactggatcggtgctgacgtctatggat

SEQ ID NO: 106393 - DNA, 244 bp, Glycine max
  unsure (1)..(244): unsure at all n locations
  Clone ID: PAT_MRT3847_6708C.1
attccagcgacgcccgacgcatacgactgcttgcttcgtttctgcaaacgatcatactattcccagcactagcanaactggtggggaggcgataaatagaaacgctacttcttccccaacatctacttttcaatcaaatacttgtggccgcaccacttcccaaatttagaatccttcctttaacacatgttacagtgccaccacaactgccactacggaatcaacaccatcattcagctctaaa

SEQ ID NO: 106394 - DNA, 343 bp, Glycine max
  Clone ID: PAT_MRT3847_67090C.1
agtaatctttgcctgcgccgctggtgactagccatcaagttacattccagctccagcgaaggaatctggcctgaaaaaagacagaggcttgattggggaatatcaaggaaggatgcattacgttgctaagaacgtgaatcacccacaggagaaagatttgatggagggaaatgtcaacctttgatatgaaatctcgatatagattggaaaaagttcccttcactgaagcacattttgctcgtggaaaaaccctcatagctgatttaaagggcgctcggtcacatacttcacaagatgtttctgaagaagaagatcaagaaaaaccccaacagatagacgccag

SEQ ID NO: 106395 - DNA, 213 bp, Glycine max
  Clone ID: PAT_MRT3847_67091C.1
gcggaagatttctaacatgttgttcttactttttttctgattccaaatactgtggcaacaagggggtctacaaacctcgattgataattcataatctgattgttcagcgcatagcctgtcacatattcgcccagcatcgagctctcctcatacttatacggatccaagctaaggtccataaccatgtccctatacgaactccagtactacata

SEQ ID NO: 106396 - DNA, 191 bp, Glycine max
  Clone ID: PAT_MRT3847_67092C.1
cgaggccatggttgagataatcatgctcatggctttctaaggctcagctgcttagacaatgcaaactagtatgccgtagggaatctgtagataacatgtcagattcattgaaagacgaaactaatcaaatggggctaacatctctgaggttacctacaatccataataaactccttcacttctggatggaa

SEQ ID NO: 106397 - DNA, 818 bp, Glycine max
  Clone ID: PAT_MRT3847_67093C.1
gtgcgcgcattatagtgagggactctgagatccatgaaaatcgagatattgctgatgagctttgtgatgataaaatggatctgccccagcccgcccgcgggtcccggggtgcgcgtcccactactcttgttgtttctgcttcaacatctttatatcagctgaaaatgatgatatgggaatcctttggggttgtcaaggaaaaccagatactacataaaggtgataggataattgatggcgatgatgaatgtgctaccctcgcagatgtgaacatatttgctggagatcaggttatagtgagggactctgagatccatgaaaatcgagatattgctgatgagctttgtgatgataaaatggatctgcagcataccgaggaagggttccggggaacacttctcacagcaaatgtttcatcccagttgcaggggtattgaactgttaaaaagtttctaaatacaatgtttatgacttcatgaattataggagcctccaccgaaccatgaatcccagccagaatctactggatcttaaactcctgctataacatgatcactagcaatggaagcagtagatcaggaccggattcagcgcttgaaatgacactgcacaaccacatcgcccatctaatttagatgatgtgaagtaaccaaagaccctttgtatgcgataagcttaagaaaaattgtagttgtgtatttttgcttttctgcagacagtcgagtatccacgaatgcttaaaatttcatccaattcttcgtgcatcgtcatattcatctttttgtaattatagccagatgagaaaagtaattatatcc

SEQ ID NO: 106398 - DNA, 484 bp, Glycine max
  Clone ID: PAT_MRT3847_67094C.1
tctttgcggtcactgttcgttgtcgccatcttcttccccaaataccaaaaccctagtttcaaccggcatcgtcgtcacctcttcaaacagactttgactctcgcttcatctttgacaagcttcgccagccactcaaacacttccccgtcacttctcaccaacgaaaccaccgagagagcagcgacgagaacaactacgataagccaacaacaaacatgagaactctcgcttcgtcttcaacaagcttcgcctccttccgaattcctcgcatttgaactctgaagttctgaaatccgccgattctgggagcgtcgcaccaatatggagattgacaaaaatctagcgtaggagaatcactgttgcaagattaatcctaggagttaaaatcatgctccaatatggaccatatgttaaagtggtccactgtaataatcaccttatgtaagtaaaacaacttttacttataaaattttcatgcttaatg

SEQ ID NO: 106399 - DNA, 216 bp, Glycine max
  Clone ID: PAT_MRT3847_67095C.1
cgttcacttttgttcacgtgttcaatcaataaggggctttattccatgcatatagttagctcatatagtagcagaagctatcgcatcaaaatccttcttcttataacatctacatatgaagtgtctaatgtgatcaacttgacaatgggaaaaaattcatccaactttcctaatggtagaaccactgcgatgcgttgtactgatcgtgacattggt

SEQ ID NO: 106400 - DNA, 324 bp, Glycine max
  Clone ID: PAT_MRT3847_67096C.1
cgctagcggcctggagcaatgagtacgattattggggatggctcttccggatgagacgagacgcgtgaaggtcactagcctacgttgccatggatcggagcttgtcggtgagagaagaggagggcgaccgcagagggtcttttttgtagcatgagattctgcgtctcaaatgaggtctgaactttgcttcgtaattctcaattgattggcgcgctaaagaatgcatgcatatgacctctatgtacaccctagtggcacccagatgggaaagatgtcgggatttctattcaaattctgctggaactcgaggggccggcagtggga

SEQ ID NO: 106401 - DNA, 442 bp, Glycine max
  Clone ID: PAT_MRT3847_67097C.1
aaactctcctcctttatgcgtttctctctctctctctctctcctctgctcgctgcttgctcgaagagctttggagggcaaagtttcaccatggatgcatctcggatcgacatctttgagatttaccgaagatactgtgtttggttgtgcagacataaaatcaggacatgcatatattggtggggaagaagggtacaggcaagatagtgacattcagaaggctaaggtctcaagggaggcactcacacagctctcaaaattggttgagtctcgagttactacagggtgcttggcctgttttaatagatgattttgttgagcatatgtacaggatgcaaggatcgtattatgataattccaacttccattgtaactgtggtgatccagaatctcagtcatgtgtttttgatgaccccctccctggactgagaagttttctggtc

SEQ ID NO: 106402 - DNA, 711 bp, Glycine max
  unsure (1)..(711): unsure at all n locations
  Clone ID: PAT_MRT3847_67098C.1
gcacgcctacctaagctctctttcggctcgaggtgcctttgagcaagttgaggattgacttgctcaaggatggtgtttctgttcttgtcttgactggtttggggggatcggggaaaagcacgcttgctaagaagatctgttgggaccctcaagtcaaaggaaagtttgagggaaacatcttctttgtcaccgtctcaaaaacaccaaacttgaagtacattgtagagacactgtttgaacactgtggttgtccggtgcctaagtttcaaagtgacgaagatgcaatcaaccgactcggagttctgctgaggcttgttgggaaaaatccaatattgttggtcttggatgatgtttggcctagctcagaagcccttgttgagaagtttaaaatagacatacccgattacaagatcttggtgacttcaagggtttcatttccaagatttggcacaccatgccaattggataaacttgatcatgatcatgcggtcgcccttttctgtcactttgcacagctgaatggcaagagctcatacatgcctgatgaaaaacttgtcgacgagattgtgagatgttgcaagggttcaccgttggcgcttaangtcactgcangatcactctgtcagcanccttatgangtgtggcaaaatatgaaggatcggttgcaaagtcaatccttctgctggagtctantatttctgatttgctttt

SEQ ID NO: 106403 - DNA, 1308 bp, Glycine max
  Clone ID: PAT_MRT3847_67099C.1
aaacaaatgagtgcaatgtggaactcaataagtacttcgctgtgtataagattattgatatgtatagcttgtacactcccagatgtttcagcaacaccagcagcaccagaaaggaagcccttcaaagtttttcaaaaattgatgggtggcacagaaaatcagctggatatgatccttgtgcatccgattatactgaagcgtacctaaataggccagaagtccaaaaggcattacatgccaatgtcaccaaaattccatatccatggactcattgcagcgataatatcacattttggaatgactcaccacagtccatgcttcctgtcatcaagaagcttattgctggtggtattcgcatttgggtttacagtggagataccgatggaagaattcccgtgacttcaacaagatacactcttagaaagttggggcttgggatcgtcgaagattggactccctggtataccagcaagcaggtgggaggatggaccattgcttacgatggacttacttttgttaccataagaggtgctggtcatcaagttcctactttcacacccaagcaagctctgcagttggttcgacacttcctagcaaataagaaattaccatctcaaccaatttaatcacttttcttttaatttatcattttgaagtttgtttctgattaagaatggatatttcttgtttctgggtttcaaaaagcccacttgtgttctatttttaattttcaattttcttcataagactcttctgaagctttaggtgtttcatatccatatgctgacagagtgcatggactacccggacagcctccggtgaagttcaaacaatattctggttatatcactgtcaatgaaacccatggaagagcactcttctattggttctttgaggccactcataaaccagaagaaaaacctcttctcttatggctcaatggaggccctggttgttcctcaattggttatggagaagcagaggagctaggacccttctttcctcaggacagcagccaaccaaagctaaagttaaatccttattcttggaataacgctgccaatcttttgtttttggaatcccctgttggggtggggttctcctacaccaacaccagcagtgatataagtgagcttggtgacaccattaccgctaaagattcacacacctttatcatcaagtggtttagaagatttccacaattcagatcacacgaattctacatttccggtgaaagctatgcagggcactatgttccgcaactttcagagctcattttcgataataatcgcaatcctgtcgagaaag

SEQ ID NO: 106404 - DNA, 415 bp, Glycine max
  Clone ID: PAT_MRT3847_6709C.1
ggctcgagctatttctagatcgcgagcgtccgcccttttacctttttttttttggccgagcgagaatatacatagctttgacggtcatacacatggctttaaacagcacatgaccgattcataaaaaatttggctcagaatatattgtgactagggactgcccgttcatgagagggaataatttatgattcaaggcctctttcttataatacatgaaagtgggaagagaataacactaaaacccacagaaaatgtaatcgaagaatcaagggaacaagccctttttcagagcaatgatgtgttagccccctacgcttgctctatttaaatatacacacccgtaaaactgaatgccagatgcaactcctggacagaatgtgaagcatgtgctggctgggttctctaacaggactgg

SEQ ID NO: 106405 - DNA, 1118 bp, Glycine max
  unsure (1)..(1118): unsure at all n locations
  Clone ID: PAT_MRT3847_670C.1
ttgatanagtatacacaggtaaaatggatttggatcatataaaataatttatgaaaacaaagcgctcttagttcagttcggtagaacgcgggtctccaaaacccgatgtcgtaggttcaaatcctacagagcgtgatgattcaaatcctacagaacgtgattcttgtatttttcgaatgataattacactgaaataattgaacattaaaaagtctgaatttaatccttgtagattaggattaaaacaaaaaaatagggaatccgcaaaaaaagagacattaattaatcaaagatccaactgatcacctcgtcggtattgtaaatatgcagttacaaataatccagccaaagtaatgggaattaaacctaacacgattccaaatagaaaaacttcaatcatttttatttgttcgaaaggtaaaaagaaaggtaatatctatccttaaccattaatctgtattgatcatgaatctcaacgaccgagaattgtaaattgacacagtaaggaactatagaatgtcttattccaaaattgactattcctctcaaaattacaaatcaaataagtcgtattttactcagaccaataaatagagatgaggttataattaaaaccactagtaaaaaaccgaaataactagttatagtgagcatatagaagctaaatgaaatatgttatttttatacatctgtttataaagcacttccctaaatttccatttttgagagaaaaaagaagataagaaaaaatactacttaaaagatacaattgaaaattggagattcatcaataaattattacagacgaataaaaagagaaatagaatgacataatttagaaataaattcatcatctgtgacatctactcatcctgtgattccaaatcaacagacttattaatcaactcatgaattgagtaaactaatctaatgataatgaaaatctttcgtattattttatatattattctagaatagaattctatttctattagaaagaaaaatgaatattaaaacaaaaacaaagaaaaataactttgttatttcaattgttatttcaatttctttaattttgaattaatatagaagaaaatagaaaaaatattttcaccaccccc

SEQ ID NO: 106406 - DNA, 2393 bp, Glycine max
  Clone ID: PAT_MRT3847_67100C.1
cggacgctctctctctctcctctgctcgctgcttgctcgaagagctttggagggcaaagtttcaccatggatgcatctcggatcgacatctttgagatttaccgaagatactgtgacataaaatcaggacatgcatatattggtggggaagaagggtacaggcaagatagtgacattcagaaggctaaggtctcaagggaggcactcacacagctctcaaaattggttgagtctcgagttactacaggggtaacaatttttgatgaactttcaatgctcatgtcacggttgaatttaagggcggactttccagaattctcgcggttctatgattttgttttcttcatgtgtcgcgaaaatggtcaaaagaatattactgtaagcagggcagtaactgcatggaaattagttcttgctgggaggtttgctcttgttcaaacatgagtttgatgtgagataccagatttctgaagataaattgtatattgctcagctatatttcccacttgatggacaggaattaagtgaagaagctgccatgtgccttcttgcacaatttgatggatagtcttaaaacggtggaggaaaggacaatctgtagagtcgtgggatgctcataatgcaccggtccaaactatcataaagctgtccctcaagagagcttgttataggccctagttgttcctcaattggttatggagaagcggaggagttaggacccttgtttcctcatgacaacagccaaccaaagctaaagttaaatccttattcttggaataacgctgccaatcttttgtctttggaatcccctgttggggtgaggttctcctacacaaacaccagcagtgatataagtgagcttggtgacaccattacctgtaatattatttattgttgttatctaaatatttgtactttttttatcttgcttttacaaaatgtgatttattgatgtcctgttattgcttagcatgatctaaaagttcacaaacctttgacatctagttggttagaagatttctactattcatgtatcacaaattctacatgactgtctaacaggcagaaagtatgtcacttgtctataaagcagaccataactggactctacactttgattggtatcatgttgtgatttcttaaggataaaacaaacaatgaagaatgataagttaaatcacataattaatattaaattgtataaattatagaactcatgatgcgaaagattaaaaggccattcagcatttgattactagggataactattacgcaaccaggagacaaaacagtcaggtaagttgatctatcaaacccggagctgtttaaagttttttcgcaaaaagttttgctggtctagtaaatactcttaccttgttccagttggatacgaagacattggattctacataactaagcaccacctcctaaagtcaaaaaatggtagagaactcatttttcctttttcatctcctatttgtaacgctattattatattgttggaagtgtaactacaatcttccctttgtttcataaaaaatcttattgctagtggtattcacatttggattaacagaggagataccgatgcaagaattcccgtgacttcaacaagatacactcttagaaagttggggcttgggatcgtcgaagattggactccctggtataccagcaagcaggtgggaggatggaccattgcttacgatggacttacttttgttaccataagaggtgctggtcatcaagttcctactttcacacccaagcaagctctgcagttggttcgacacttcctagcaaataagaaattaccatctcaaccaatttaatcacttttcttttaatttatcattttgaagtttgtttctgattaagaatggatatttcttgtttctgggtaacaaaaagacatgttcaaaagttactctaggacttgagaaaaagtgatgatatggattccagtgacatgattctttcaaattgtaaaagaagtagagcttatgatggggcggatttggaggacaatccaccagggaatgcagcagatgactgtatggaaaccagtagacaaaatagtctattgtgttgatcgatgtcccgatgtgcagttgaaggttgtctatctaaggaatttgcaggactactctcaactcgttcctttgtgcagcttggtagggagagaagggcttccttttgatgaagaacccccacctatagttaaagaagtatatagaagtttcttttgctagttgatatctgttgatgtattcattttgaatgttgttggcattgtaatttgtaacatcatcatggtgagtgttaaataacttaactatccattgcctttgataaaatcaataaaaaagagttgtgttttggttttaaaatcc

SEQ ID NO: 106407 - DNA, 768 bp, Glycine max
  unsure (1)..(768): unsure at all n locations
  Clone ID: PAT_MRT3847_67101C.1
tgaaaaccagacaccaatcatcaaaccaacaaacactctcaaacttcaaaaaccaacgcacaccttcttcttcttcttctctctctctctctctctctcttgttattgctgcagtgctcaatcaagtacacccatcatccttcttctcttcacgcctagcactcaaatttgtagcgcatgctataactattaactaaccctctgtcccttcttgcaacaattgcaacctccttccttccactcttttcccatcatcattccacacctacctttctctctcccccatgttttaactttcttcaacactcactgacttttccactatctcttccttcttccattcacatcattttctcttccttcttcctccccctttttgttgttgttgttgttgtttatttatcaattatcaccatgcccctcaaacaattcaaccaaagcttgcaactttgacaaccctttggcctcttcttcttgntccccttaatgggctctctccaattcccctcacaaagcctatctattctgatgtctgaatttcactttggttttcatatgttcccaaangctacacctttgcgggtgtagaagtggataatttcagagtttttgggacaccccatttggaagaaagtgtgtgtgtgtggctgcaactatnggcgcagaagcttggaatggtaagatgggtaaccnngtaagttccaatcttaagcatggcccttctttttggaaaccttggccaagaggaaaaccggacccccaaggang

SEQ ID NO: 106408 - DNA, 408 bp, Glycine max
  Clone ID: PAT_MRT3847_67102C.1
gttggagtttgggagatgtctcctttgacgagcggaagagcatgcagatcccctcggccgtttctactagaccgacactgtaacgttcgcgctcgtcaaaattgaatgcccattttgatccgtttcaccccacgacccgttggtgactttccagtgggcttctatttgatgacggtcctgtctttcacgcggccgccctatcttttcttttccccagcatgggcgccgagcggggccccggtggcggatgagaaggtgctcgcttcctccgggccatgaatgccgagatctgcgccaagatccctgtactttccgagcgataacctaccgactggggcgaatcgctcgatgactgcgactgcgacttcgactgtgacgcatgattgctatgagcactatgctgacctt

SEQ ID NO: 106409 - DNA, 474 bp, Glycine max
  Clone ID: PAT_MRT3847_67103C.1
aatccattcattccatgttggagtaaccgttgagaggataatagttgggttgtttgtctcgacttttttgttttccgaggtggcttaaattttatgaagaaaatctttgctgtagattttcttaggattttatttcagattcactttggatgttgtcgatactctatattgcaccccccttcccactgttattaatttatcactcattttaaaaaaatattttgttgagtcaaatcaaatggaactctatttttccgaccttacttcttgcttttgacgattatgctttgtggagaacataagaaaaaatatatggtttctcttaaaatttttttacctggaattaagaaaaatatcgtctctataaactgttttgagatcgtgggggattgggacctttctattttgtatgggatatagattattttatgtgttacttgataaagtttttgtgattcatatcaatttcttact

SEQ ID NO: 106410 - DNA, 440 bp, Glycine max
  Clone ID: PAT_MRT3847_67104C.1
atgggaaaaagaggattaccgaccttttggggacaaaaggggggggtatccttttttggaaaaggggggggggaataacaattgggggactttaaagggcatagggggggaaaggcccctattttttttttaaaaaagaaggggggaataaaaattcggggccccctaagggaaaaagggggggggggggggaaaaaaggccccctttcccccaaggggggggcaaaatttaaagctattttttccatgaaaaaccaaaaaagcttggggggggattcccttggggggggaaaaaaaagactttttggttcccagaggaaaaacctttgggacccccggggcccactgggaaaggtggaccccggggccttcactaattttttttttggcccccaacccggggaaagggccaaaatggggggcccccgaggggggaaccc

SEQ ID NO: 106411 - DNA, 162 bp, Glycine max
  Clone ID: PAT_MRT3847_67105C.1
cgttcatgctcgacaggtggacaactccttttaacagcctcttttaatggtattgttttgatgacacccctgatgtcatttttgataaccacattgagttttagggcattgatcatggccattatcgatagcatgttagatgtcaactttatatttgtgtcc

SEQ ID NO: 106412 - DNA, 471 bp, Glycine max
  Clone ID: PAT_MRT3847_67106C.1
atactccatggaatggactggtttggccaatacattactgtgtctgggcaatgatatcatgtgttgcgattatgctagttctgatggctcagattaccaagcaaggtactgagcacagatgagcagaaatgattaacagtctctgtggtggtgattaaaaattgatgcgttaaaggacgcacctgctgttggctcgccgttcactgatggcaattcgtatgaaagatgtttggtgagctcaatgtggaattcctcacagatttccgctcacaattatctgcattagcattttcaatgatatgctgattatatatatctatgaaaaatgactgcgccatgctaaagctccaagtatgtttttacaacccttcaaaaattgtggtgctctcgttatgcatggtgataataactgaattctggtgcatgaatatgtcaagccttactatagtgggtataaattgaaaagctttc

SEQ ID NO: 106413 - DNA, 455 bp, Glycine max
  Clone ID: PAT_MRT3847_67107C.1
tactcgagccgattcggctcgagtacggctgcgagaagacgacagaaggggaagatgactggatatgacaacgagattctgcaaaacaacagaatgctgcaaccatccaatgctttccttgctcaatatttgcctgccctttccttcctcccgtacccccatccatatttttgccacccaattctggtatcacaacagaattccttctccactcagcatgtagatttgctccccaataaaaattcctgataaggcaccttcagttatgtgcttaggattcaatttcaacgtgctatcattacctcaatgcaattcagtatagctgtccagtgctatcattacctcaatgcaattcagtatagctgtccagtgtccaagttgttacagctttccttctctcttctaatgaactccattggcatgttctctgcagcgatcattttctccaatttctc

SEQ ID NO: 106414 - DNA, 212 bp, Glycine max
  Clone ID: PAT_MRT3847_67108C.1
agatcagattagtattggtaatggtcagggattaaaatcaattcataaggtgtaacctccttttaattcgcaaactcctcttgttcttaagaaccggctatttgttccttctataaccaaaaacttgatgagtgtcagtcagttttgtagaaataactctatttttgagtttcattcttagttttgcttggtcaaatctcttgtctctaaag

SEQ ID NO: 106415 - DNA, 1017 bp, Glycine max
  Clone ID: PAT_MRT3847_67109C.1
ggctcgagcttcactccaacaccaacaccaacataaaatactcgtcacagcaccattctctaaaactgaaaagttgcttgtgcttcgtgcttgttcttcttttgtctgcatttgtacctcttgatttgagccacagcacaccctttttcataaatattatttttaaaataccaacaaaaaagagggtggtgggagctgaagaaacaaaaaaggtgcagcaggggcttacactgtaccattaccaaagccactttttgtctcttgaatttcttttcctttttcctttttctttttgttttttcattgacttgttgttgagtgaggggtcttctttatctagccgaagaaacaaataatggttgctgctgtctagttctgtgaaattcaaccccatcatggatcttgagtctgtgatccacaggaacacaattaaggaagaatcatggaagacggtgttgactttggcctatcaaagcttgggggtagtgtatggagacttgagcacttccccactttacgtttacaaaagcgcttttgctgaggatattcagcattcagacaccaatgaagaaatctatggagtgttgtcttttgtgttctggacactcacactgattccactgctcaagtatgtgttcattgtgctgagagctgatgacaatggtgaaggaggcacctttgcactctactcattgctgtgtcgccacgcccgggttagcttgctgccaaacactcagcttgcagatgaggacttaactgagtacaccatggataatggaactgttcctgttgataagaaaaatgttgggttggggctgaagaacttgttggagaaacacagggtgctgcaaagggtgctacttgttcttgccttgatagggacttgcatggttattggggatggtgtgctcacaccagcaatatctggtattttgtcatgataatattattgtgtgatttttgttgcagaacaacacagatatgtggagggtccaggggcttgtgtaatactgatat

SEQ ID NO: 106416 - DNA, 335 bp, Glycine max
  Clone ID: PAT_MRT3847_6710C.1
ggaacaggatatggaggtcgtcgatctggctgaagactatggtgctaacggggtcacatgtgaacatgaaggaacagtgttactgaagtataattataaggagtatactcggtattctctcacaagctggtggtgagtctttgatgatagactatgcagccgttactggccgatacagattactctatgatgcattgtaactttaactgaagatatcgaactcttttatgacatacggcaatgacatctgctttgataagttagtactctgccaggtagctgcaaccaaagaactctttgtgttgcttacaaagaagcattttgaggaattaatg

SEQ ID NO: 106417 - DNA, 402 bp, Glycine max
  Clone ID: PAT_MRT3847_67110C.1
ttacttgaggctacattattgataacagttaattattggcaattcctagaagtggagctcagacaaactgggtaacattatttacaaatgcatctgatgaaagaaaaagtaagacactgagctccaaaggtaacaaaaaaggggaaaaacaattttacaagggggctataaactctggcctattatacctcaagatttgattgaaatttttacgacagactactggatcgtaccaccaagaaattttttctgtgatcatcaccttacatagaagcctactttgattaaaagcctgtttatttatttttctctgccgcttctgtatcgcatgctgagctcactttagactttatgttaatacacagaatttctggcaggacaagtcaattggccagcgtttac

SEQ ID NO: 106418 - DNA, 321 bp, Glycine max
  Clone ID: PAT_MRT3847_67111C.1
gggccaccaaccaaaaataatactcaccaaagtgaatagccttgttctcaactaacaaccatgcagtcaggggatagccaacccggacccatcacctaatgggcgttctaaaccctattttgatggaactaacttcagctgattacccaacccaccccaactaaaccgaccaccatctttaaacttcaccatacaaacctatccacccccttaaccctaaacggatccctttggccaagccttggaatcaacgtcaacaagcggactcggctaaaccaaactagttcaccctactttccagtttgaactcaaaccgaaccc

SEQ ID NO: 106419 - DNA, 870 bp, Glycine max
  Clone ID: PAT_MRT3847_67112C.1
cctggacctagtggaaaatttctcgctgccggtcccttcgtataccatctatgaaatcttgggcgttccatccgaggatctgaagttcttgacgaagcaagccgccgtccgcagcaacgggagcgcaactgccgctgaggcttcaaacgccaatcaagagctcctcaactacatggcttctctggtggacaagcgcatccagaagcctcaggatgaccttataagtcacctccttctcgtcgctggcaacgcaaccatggtcaacatgatcaacctgggcataatcgagctcctccaccatcccacccaactcgccgacctccgtgccaaccccaccggcctcgcccccgccttcgtcgaagagctttgccgctaccacaccggctcggccatggccctgcgccgcgtcgccaaagtcgacgtgcggtggggagataagaccatccgcgccggcgacggcgtcatcctcgccaaccaatccggcaaccgcgacgccgccatcttcccggacccagacgtgttcgacatgcatcgcgcacgcggcgccgaggcggcgctggggtatgggttcggcgcgcaccggtgtgtggccgagtggctggcgcgatgcgagatggaggaggtgtttggcgcgctggtgacgcgggtgcccgggttgcggctggcgacgccggtggaggagctgcggtggacaccagcgacgaaagatgtcggcgttgtggagttgctggtgtatttgcggtcatggggcgagtgaggcgggagggaatgaacgtgaagcatggtagatcagggggtcgaaagagtaattagtcggcgacatgcagcattagcattctttcagcaaattataagacgaaaataaatgag

SEQ ID NO: 106420 - DNA, 502 bp, Glycine max
  Clone ID: PAT_MRT3847_67113C.1
gttcgtagttgagtctaatttcgatgcactataatataaaagtttttacttgttaaattgatggatgatttttaagattattatcataaaaattaataaatttatcatataatatcatctaatactaaaattaaaactcataactacatatatacttttcacacttcttaatattagaccaaccttaatgattcaaatcatacttatttattagtatatatattttttagaattttataatcttaaaaggtgagtttaaagttaacttaatcttaaaagttagtttaagggatgagaattttttagttcacgtgaaacttgagttttttttaatacatttccgcacgtctaacctttcttaggcttggtgtgtgatcttttggatgaatcttaaatataatctgataccatcttaaaatacaagtttaagtttaactcaactcaaaaactaatttaagaaataagaattttcccttatatattctaaatcaattgtatactt

SEQ ID NO: 106421 - DNA, 466 bp, Glycine max
  Clone ID: PAT_MRT3847_67114C.1
ggctcgagggctgttggaacagttatatgtgtcttactatggacggatataactgctcctgagcaaaatgatgaacgctacaatgaattgtctcccaagagctctatgtctgaagcagggatagacgattctgaggacttggttaacatagatacaaagggtgctatcatcttcgtcatcactgcatctacttttcttgtactactgttcttcttcatgtcgtcttggtttatctgggtgctgattatacttttctgcattggtggtattgaggggatgcacaattgtattgtaagcctcgctttaagaaagcgtccaaaatgtggtcagaagactctgaatttacctatgtttggggaggattctattttctcgctggtagtgatactattctgcgtgatatttgcggttgtatgggttgctactcggcgggaatcattttcaaggtttggccaagatgctcttg

SEQ ID NO: 106422 - DNA, 113 bp, Glycine max
  unsure (1)..(113): unsure at all n locations
  Clone ID: PAT_MRT3847_67115C.1
atattcaggaaagtttatgacacatttgacaaacaaaatctaanatttttgagagaaaacaaagggcaccacagttaaaggttgggagacaagggaaaatttttccctatatg

SEQ ID NO: 106423 - DNA, 142 bp, Glycine max
  Clone ID: PAT_MRT3847_67116C.1
tccggttgcaaaaagacaccagatgggcccaggttaaagaccaacctaatttacctaagaaggcaacccctaaggccggccttgcctttttttttgctagaaccaaaggtttagaaaatttattaccattggcctaacttgg

SEQ ID NO: 106424 - DNA, 250 bp, Glycine max
  unsure (1)..(250): unsure at all n locations
  Clone ID: PAT_MRT3847_67117C.1
gagagaagaaaacgnnggnnggagaacannaccggaaagagaannnnngnggagggcagaaangnnnagcanngnnngcgcacaccaaagcnnccncaccaacgcccnnannccacnaacgcacaacccaaagnncaggaccaccgnnacccccccnncnncacccaaaaccgncncnngcagnnccccacaacangaacagcaacaancnccaaggaagaagaangagaacaagnnagcaaagnnggca

SEQ ID NO: 106425 - DNA, 106 bp, Glycine max
  Clone ID: PAT_MRT3847_67118C.1
aggaaaacaagagttcgcatttcctaacctttatgtttaatttcgaagatttaggaaaaatgggcaaaagacaccctgtgaaatggggcggagatcccataatccc

SEQ ID NO: 106426 - DNA, 435 bp, Glycine max
  Clone ID: PAT_MRT3847_67119C.1
cagctcggaattggggttgaggtgaggacattttatatatttgttttgaacatcaaaggaaaaggcattcagtttatctggtagaagggaggtgcaaggagtacccaatttgacaataggaaaacagggcatatggtcagaagcatgcatttgcagccaaatgttaaggctttagagacaagagatgtagatgaaatggttctggcaaactggaagtctcaaggaaccatgggtagcatgtcagtgcttaaagaccgtgagatgttattttcaatgattcaggttggaagttatgtctctaagtggatcactgtaaagaatcccagtcaacattcagttgtgatgcagcttatcttaaattcaggagaaataattaatgagtgtaggggtttagatgatttattacacccttcttcatctagtaacttggttcta

SEQ ID NO: 106427 - DNA, 193 bp, Glycine max
  Clone ID: PAT_MRT3847_6711C.1
ggttcactgaggctccatacctatcaccatcactgtgatcagccctgcgtagattcttggggctgctatcatcttcaacaaggacctgagctgggatgatcactggatcttctgggtgggaccttacataggtgctgcacttgcagaactctaccaccaggccggaatcagggccattcccttcaagaccaag

SEQ ID NO: 106428 - DNA, 269 bp, Glycine max
  unsure (1)..(269): unsure at all n locations
  Clone ID: PAT_MRT3847_67120C.1
ggactctgggagggggaagtcttgctttctagcatattattggggtcttggagcttctgttatgtgacaattgtttcctacttatccccgcgcggaccaaattgtcctggtgcttcttttatgcttgcaaggagagtctggttttttctttacgcgaatttttggcttaggggggggatcctcctgcctcgcctgatttanctcctcccagcgaacatgctcgagggtgggactcttcctttttagcatgcctgttggcgctccgatct

SEQ ID NO: 106429 - DNA, 772 bp, Glycine max
  Clone ID: PAT_MRT3847_67121C.1
ttcgcgatctagaactagtttccgttctcaccaaaacgctacccttcgccgccgcattctccggcttcggcgatcccatcccctggctcatcgccctcgctttcttcttcgccaagggttttatcaaaaccggcctcggaaacacctaaccctaatattgctaccgctccaagaggtaagggttgtgttattatgccgacgattgtgcctaagaaaatcgcgagcagttgccacgcgttgcggttcacgccggcgggaacgggtctcgagccgctcgagccgattcggctcgagctcgagccgaattatgaaagcgccttgccatggctgtaccggcgccgatgaaggcgatatactcaacacgacggcaggcgctttagaatcacccaatagtttgattatggaacagagtaagagtcgcgcagcggattcgccgccatcgcgtcaagaacatcgccgacgtaatgacgaaggtctgaaagcacgtgagcatgagccacgcccccaacctgtgctccgtcccgtcgccggagtgatggaggctgcggaggctctgacggttagagaggagggtttttgattgaaaactaggcttggtttttttagtgagaaatttgggaaggaggaaattgaagcgttgagggttggtttgagtgaggagagtgaaatggaagagtggcggttgggtttgagggtggcggcggtgttgcggcggaggcggaggtaggggagtgcggtggtggtgagtgctacggaggccatggctcgagcc

SEQ ID NO: 106430 - DNA, 186 bp, Glycine max
  Clone ID: PAT_MRT3847_67122C.1
tgttctgcctaatcagattacgtatgtcaaatattttgaacgactcttgacttactttaatggtgaaaacccacctgccctcatgtgcatgcttaagagattccggcttcacacatgcccttactggattacaccctctataaccatctcaaatcacaataatatattattctcaaccaaaaacca

SEQ ID NO: 106431 - DNA, 141 bp, Glycine max
  Clone ID: PAT_MRT3847_67123C.1
attttcataaaaaagaataaggttcatatcctataagattaccatatcgagtaatcgcaaatggcgcttccttatatctgatgttctatctatggatttacaagaaccaattttgagagcatgagttatatttcacaagaa

SEQ ID NO: 106432 - DNA, 463 bp, Glycine max
  Clone ID: PAT_MRT3847_67124C.1
acgagataaaatgttgatgaaatagtaaattgattcccctttctgcttccattcccttctttcctgaagattgtctctacagatgacattggatagaggaaagcatttccgtcttatcattgttgaaccaaaagtgatctgagattgccacgccaagtttgatttttattttaaattccacttttctttcctgtaaactgtgtttgatatttttttttcttcatattccgtgttcccagttttttgttttgacaattggtttgcttttctgttttcttccagaatgtataaataattgtatttgtaggtgcttcatactttgtgatttgatttcattccccccctccccttttacctgttctgtttttttttttccagagcacaaatgttgaaatattacacatcaccgattggaaactggtttaaaggaaataaagctatattctgttctctgttatatttg

SEQ ID NO: 106433 - DNA, 466 bp, Glycine max
  Clone ID: PAT_MRT3847_67125C.1
attatatctttcaaaactctaaaccttataattagagaagtttgccctataccttaatatcattattttatatcggcaacgtaaattgatcttttcaaccatatttttaggtactattccctcaatacagtttggaccctaatctctatgaaatcttttttcagttttttatccctacattttttgttccctctattatatacccaccgccagctatttttttttttacggaagcttcttacctacttatgtgattaataaaatgtctgtacctcgtgccaagtgacacctcatgccatgtggtactcctaattcccctttctaaatccttcttctccatcttccgtaccggtgttcgttacttcgtattttatcgagaccaaaataaggcttgttccttaagagtgacaggtacttccactccttttatctttggttggctatggatggaacctcttagcggggt

SEQ ID NO: 106434 - DNA, 392 bp, Glycine max
  Clone ID: PAT_MRT3847_67126C.1
gcatcacgttagctgctacttatgcttacatatacatggtgcacacggatctagattggagtgagagtgaatagggtacatataggatgaatgaagtgcatagcttgagccagcgttctggatgaacacatgtggtaacatctttggtcctctggcacagggccacaaccctgagaagtgagcatgacttccactatgtgacatctactattctggatcattcttaggggcacttgttaagcacagctttcaagcttctgagaccagcaaaggaccgatcagaacccttgacatcgttaactaactgcgtcatgtaacaacattacatgacttcatcaatgaaaactgtccatcctgatttcattctattaagtttacttatgcacattctc

SEQ ID NO: 106435 - DNA, 333 bp, Glycine max
  Clone ID: PAT_MRT3847_67127C.1
ggttaaaataaaaaagcaactgggggcgggcaaagaaaaaaaaacaaaaactgaacgaacccaacaaaaaaaaaaggggggggggggcaagaaaaaaagaggggagcccaacaaagcaaaaaagaccagggggccaccaaaaaaaaaaaaaaaaaaaaaaaaggccccaaaaaaagccccaacggcccccggggggggccggtgggccccagggccccccaaaccagaggcaggagccgggcggttgaactcaaaggaaccacaaggcaacggccgaaaaccccggggccaaacagccaccacactcagaagagaaagcaaggcccggcgagg

SEQ ID NO: 106436 - DNA, 295 bp, Glycine max
  Clone ID: PAT_MRT3847_67128C.1
tgagcatcgtctagctatctcgatcgaactgtccaaggtcctgtcaccgaagcttccataggcaggaaggtgctatgacagtatacgaattagccttaaaagtctatggccaactatttcacaccttatgtaattacatgcataggtacatttgtagtctgtaaggtagacttattggttgatgactaggtctggcctcaaccaagtggttagccgtcgacataagtgaccacccgcatatatgacctcgaagccaacctgaccgattaccctatagcttaatgccccccacctg

SEQ ID NO: 106437 - DNA, 196 bp, Glycine max
  Clone ID: PAT_MRT3847_67129C.1
cctagccgttcccatctgagtgttgaacagagtagtaggcagatgccaatcatggattgcactttagtgtcatcttttattccgatgtcaactgctacacactccagctttcatgaaaaacttcgtaaccctcataagaagcctcaaaatgaggttcctactactacaactaggactcccacaacaacttcttttt

SEQ ID NO: 106438 - DNA, 584 bp, Glycine max
  Clone ID: PAT_MRT3847_6712C.1
cccgcgtccgcaaaaacataaaaccgatgaagagcggtggtggtggtggtggtggtatgggcgcggttccgtcgtacggcgtccccgcgaaacggcggtggagagggctcgtaattgcggtgctcggtcttgtcattctctccatgctcgtccctctcgtcttcttgctcggtctccacaatggtttccactcctccggtacgatctcgccgagatctctctcctctctataaatacccttccattctcccacattctccctccgcaacagatccgcgtcgatttcacctccgatttctctcttctcgcacttccaaatgcgctagatctatcgttttctcgcgcttcacgagaaacggcgtcgttgaatcttcgcttgttccatatcaacgaatcgatgtgttctgagtagttcgagctcgaaacgcttttgctgttagtgaaagatctgtgtgctcgttttcttttttatagcgaaaaaagtaataatgaataggataaaacttttagataggattatttaggtgctttgggggttggtctttcatagaattggaggttgacctgagggattgacgggggga

SEQ ID NO: 106439 - DNA, 351 bp, Glycine max
  Clone ID: PAT_MRT3847_67130C.1
caaaggaatttccgtcacggatttatattttccccatggagttcatcttgtgatttgaaactattcttaggcttattattttctatagatatggaataccatcaagttctgtgtgcaagaatatatgacattctactacaagttagatgcaataaattaacaagaccccgaacttcaagctatttttaaagaacttgttcaatcttgtataaggctattctcaagataatccttcgaggcaaaagatgcatacttcgtaatagttcattgaagcctcaggcactctcatatggaacgactcatccctatatgctattgttaacttttgacattatccatattgcttgttta

SEQ ID NO: 106440 - DNA, 589 bp, Glycine max
  Clone ID: PAT_MRT3847_67131C.1
attttcgcctccctttctttaccttagtggtatatttttatttttgtagccatttcttggtctctatatatcattctatgttttctatgaaagcagatatttgaaaatcgttgcagaaatcatgatcggcctgttggattaagaagcggcaagtgcatccaagcatgtcatcaaagcaactaggatgttgtgtgttactatatatttgattatatatatgatcattatatatatatggcatgagattcattttcttttttgattattatggataagtgaaatataattatttgatgttggcttggctcaatcaaattaaaatttttaaagattttgttaacttttttgatctgattgagccgtgccaatatcatattcatctcttataaatgttcaaactattaactatatatatatataagatatgctatatttgtctttaaattaatcataccagtaaattttgttgctttgatgtatatatatatatatatatataattaatcataccagtaaattttgttgctttgatatatatatatatatatatatatatatatgtatatatatatatatatatatatatata

SEQ ID NO: 106441 - DNA, 447 bp, Glycine max
  Clone ID: PAT_MRT3847_67132C.1
ggacaaaataagcctttttttgtttgggcaaaatacgccgtcttaagtttgggtaaaattccatgcttcacaaaagcgtaaattgacaaggttttcgaattggggctttgtaagggggaacggtttattccttttttagaatggacctaaaggatggacacttgacttggcccaggattttagcacttcacttggccccgggttttgattgtccctaaaaagtataggaatgcttgccccaagaggtctctcttggggtgcaacaaagaggatttggttggggcccaaccccctttgtatgggtgctgaccgaacctaaaaaaattccttcagaaccatggaacagaaaatcctcaaatttaagggtttggggagagcgaaaaaacatcttttaataaagagagccccgttttcctccaaaaaagccaaacgggttgggaaattcct

SEQ ID NO: 106442 - DNA, 244 bp, Glycine max
  Clone ID: PAT_MRT3847_67133C.1
cgcacgcgtccgattgaatatccatggttcttatagatctgtcatccattctaaaacggtaggttaatatatctaagaggaactgtaatagctggaagatctcataggcctatctgcatatgcaactgacggtgctataacttggacccttactgctgaaaaaatgcgtcttaacgaagatgtacctattatccatctaccttggatatgttccatgcaatacgccgttggtataaatgatcag

SEQ ID NO: 106443 - DNA, 326 bp, Glycine max
  unsure (1)..(326): unsure at all n locations
  Clone ID: PAT_MRT3847_67134C.1
tacggctgcgagaagacgacagaagggtactatattaatcaagtaccacgattttttaaaattgcaaaatggtatgcaaaattcgtagcttctttaattttcataaagagatgttgtttatactttttttcatattgtgtctttttttcctgaaagtgaaggctaaaggattattagtgtttgatcattgaactcattgcatcaacacagaactgcatgaacttaatctattattcacacccatttcaaataattgtaaaaaaaaagtcaataataaggattttaatcaaccttaaatcaaccattgtcaagatcattgcngccct

SEQ ID NO: 106444 - DNA, 288 bp, Glycine max
  unsure (1)..(288): unsure at all n locations
  Clone ID: PAT_MRT3847_67135C.1
ccttgtacccttggnnctttaaatagtnnttctggaagaggccttaatgatatgaaatttgcttggtccactattgatcccattattggtcnnccatttatcttctganntcgtgaaccganncttcaaatattattatatcanngatgcccaggagtaccttgcatgtattgcctatgtgccnnnttttccgtcttgggccatggcataaaaggacctttgcctgnnggtggtgtgtgggtttaatgggaagttccaaattgctaagtanggtcaatggaaattttt

SEQ ID NO: 106445 - DNA, 161 bp, Glycine max
  Clone ID: PAT_MRT3847_67136C.1
ggactgaatggaacagggatttgaagcactttaagttatacaacacgtcactttataatcgttgggacataagcccatttactggcgaccttattgtaaacttaatgctagctcgtacaccacttatttttttgtcgagcctgaatcgtcccttacgtaca

SEQ ID NO: 106446 - DNA, 150 bp, Glycine max
  Clone ID: PAT_MRT3847_67137C.1
ctcacatatgctacataccctgccgctatttctgattcgcacagactcacccacgatagaaccatccaaattcatgggctcattagagctcggaagtctatgcataatggggaatgaatctgaactatattcacgcttaacctcaaaaat

SEQ ID NO: 106447 - DNA, 262 bp, Glycine max
  Clone ID: PAT_MRT3847_67138C.1
cgataagacaacacaacggagttctagtgtgtgattgttagttgtcagtactggttgttcaactctagatgatgtgcgtcagcgagcagtccactatctgaactcatcaatgtctcgatgctgtggtcactggcgttgcagaagcttctgcacatccaccgacacctagctgacgctgccagatgtgctcacacttgcgctacatcttagtcaaccactcaccgaaaccttggtcatcttgattaccaactgtgcatgctgc

SEQ ID NO: 106448 - DNA, 367 bp, Glycine max
  unsure (1)..(367): unsure at all n locations
  Clone ID: PAT_MRT3847_67139C.1
acagcatccatcagtanttcagaagttatctgaacagtcttatttattgtctaagcttacccctactcactcaaaaaactattccacaactgatagttacttcaatggaagcttgcaatcttgcaatttagttccagtcatagcacatgcgaccactaaaaaaagaatatctggatttttattaaatttcataatagaaagagtgtcgactactatagccaaaacgactagcactccaatcaagcaagttaagttactcatccaaaaccaggatgaaataatcaagagtagtgcattatctgaaccatacaagagaatcagcgattatttcagtcnaaccatgaaagatgaagaagtgattactgtt

SEQ ID NO: 106449 - DNA, 696 bp, Glycine max
  Clone ID: PAT_MRT3847_6713C.1
ggattcaacacatgataaataaattatttgttttaaacctattatataattaaaatgttcataacaattaaaatgttcataataattaaaatgttcaaaatcctaaattgttcataaacaccgccaatagagcacacggttaacattgggatcaatgaattcaaaaactattttcatgtcagcgatcaaagataacgtctcgcaaaaatgtttccatccgactccaattttaagtgtcttcctataatggttgaacatgagcggacaatctacaacgtcctccaagtgcaaatgtgtccagcctttgtctttaagaaaataatacatgctacttggaacgtccagattgttacaggtaactttctgctcagtgagataaaccttgaaggtgacagaacctgacacttgatggtataaaaagtgtcatcttgggaatgatctgggcaagcaactgatcttgaatggtaagaaaaaatgcactgctaccataaaaatgcaaggatactagatgatctccggtcagctggtaaaaatctcgtaatgttgtccaccctgctacaatggctggttggtctaaatctttgttatacacaacgttatgataattttcgtctttgtcaaccaaatgccacacaccgtccagtacgtcattccacctgacagcatataccttaccaacttcaccgaaaaatctac

SEQ ID NO: 106450 - DNA, 366 bp, Glycine max
  Clone ID: PAT_MRT3847_67140C.1
attcttcttgctgccaatactgacaattaatccccatgggacacctcagctctaattctcaaatgacactcatattattattagcccttgcaattttcacttcactaaatttggtcacagcacaggttattaccacgccctgcacgacctctatgattaacactatcaccccttgtgccaacttcatcacaggaagcattaacaatggtttaactccatcagctacgtgctgtgattcatttctgtctttgataaccactagcgtggattgtgcttgccttctactatcagctaattttccattccaaatacccagtaacaaagttctttccctctttctttcacaagcattcaacgtgggtcaaa

SEQ ID NO: 106451 - DNA, 672 bp, Glycine max
  Clone ID: PAT_MRT3847_67141C.1
ggtttttatagaataaaatgatcgacattctgaaattagaaataatatatataccatagtgaaattttttacatcactaccattaattcagaagttaattttattactttgctaaagaaattaagataggtccacatattctgtttatttggagacttgaaggaacaatgctgaattccaaggcagttttcatgatgattcaacgctcttggtgcgaaagtatcaattcaagtagaagtccgtcacacttaaatcccagagctttgaaagacggacttttttcattcccgccatccttgtattatccattgactacgttgtcctctgttgagatgaaagttttcttcaaattcatctgacatatgcacacaatggaaaaccttaagctttggtaacttgtcaataccacgaggcacctctgtcagtacgtcagtactgactaacttgagcttttcgagagaaggcaatgctccatcttcaatgacgatggatttcaatctatacaaatgtgacagtagtatttgctttaggttcggaaaccccctgtttggaaactgcaaaacttcaccctcgtatgcaaaatcgatacaaaggtgcgtcaaatttggtagatctttaagtagtggcaatggatcatgtgtcaactcggtgcatgataaggacaacgtaaca

SEQ ID NO: 106452 - DNA, 1323 bp, Glycine max
  Clone ID: PAT_MRT3847_67142C.1
agttttgcagtttccaaacagggggtttttgaacctaaagcaaatactactggcaaaagatttaattgaattgaaatccatcgttattgaagatggagcattgccttctctcgaaaagctcaagttagtccgtattggcaaactgaaagaggtgcctcgtggtattggcaagttaccaaagcttaaggttttcccttgtgttgatatgtcagatgaatttaaagaaagctttaatttcaacagagggcaacgtcgtcaatggataatagaatgatagtgggaatgaaaaaagtccgtctttcaaagctttgggatttaagtgtcccgggcccgtgcaacttgctcaataattgaacactaaagaatgaccaagggaaagtgaaagtcttcctcttgaaagacacactttactttctcttcagccgaatcggctcgagtaacaatagcagaaactagatctatactaagatgcagaaattgcaagaaattgcagtgtccttggctgttgattatttgcttccacccttcaagaaagcagtgaattcagtcatagaggttccaaaagattctgcagacatgaaagacaaacttgatgggattcaagccatgattcatgatgtggacaagatggcagcagctgaagaaagcaactcacgtgatggtctcaaagcaaaggtgaagcagctggtggaaacatctttttgcatggaagatctcgttgatgaatacattatccatgaggaaaggcagcttgctgatgatcctggatgtgcatctttaccttgtaaggctattgatttcatcaaaactacggacttctacttgaattggtactttggcaacagcagcgttgaatcatcatgaaaactgccttggaattcagcattgttccttcaagtctccaaataaacagaatatgtggacctatcttaatttctttagcaaagtgacaaaattaacttctgaattaatggtagtgatgtaagacatttggctttttgattcaatgccttcttagatacatcatgtttgcaccatgttatgagaattcctctttcaatgaatggtaagaccttattcattgaaatctgttttctatttgtgaatgaggagaaaaacaatttgtcactgtataacttctcgaagatgagtaatttttttttttttaattttgtttgatcaaggagaggaacaaaagtgaggattgctcccaaattcaatcttctggaggaccccaaaacaatacgtttgacaaccttcgaatggctcctatgtttttaaggaggctgaaggtgtgggcttgacagccctagagacacattg

SEQ ID NO: 106453 - DNA, 460 bp, Glycine max
  Clone ID: PAT_MRT3847_67143C.1
atagcggtcgcgcctcaaccctcgcgttagtttaaatttatgctattaaactgcaaacaaactcacccagtatcgcataaataccttatgtaaagtgccaaactaactctggggacttcactaaacatcctttttcggcaactcttgtagaaaagccaactcgatctttaaggaagtcgtcctgaacgcatttatactgaaaattgggcacagggggagcatcaaaactatccacaataatcacctcgattccgccggtgccggcggtctactatctgttccctccaccaaaccaccctcctagccacggatgctcggacgactgtggaggctgagggtgcggctcgtccatgatcataggcatgggctgctgcgcgctgatgaacttgttgagcatgatcccggcgccctcgatgagggcgaggaggacgccccccaatgcctcggagcgggctgaggc

SEQ ID NO: 106454 - DNA, 565 bp, Glycine max
  Clone ID: PAT_MRT3847_67144C.1
tttgttttttaacttgggtagaagtccaaaatatttggaaacaatacagcggataaatactgaaccttaaccttgctttcccgaacatcgatgttacaactcccgaattgttcacagacctatatattaacaaggcgctagtctaaactaccccgggcatatttcccgcactaaaactgcaatgtgggtgtgtgatgcgggtacaccttcaaaccatgcactgtatgagactgtctacgtacaactatggccttaagttcacgaacccaacaaacggccctaattttgccattcctcgcagtcttaactgcaaccctacccaatgtggtcgtctcaggcacttaggagcgggggcgtgggccggacccggtaggaacggatgccgcacctgcgggcgatctggctgggcctatgtgtagccgcattatagcttggcagagtcatcgccaaatgcgttacatgggtgaggtgggaaaccccgaacatgaacagacccttcacgggccgcaggcattttgtgtcgcgccggcggggcctagcgagagagctcactcacattagttgg

SEQ ID NO: 106455 - DNA, 338 bp, Glycine max
  Clone ID: PAT_MRT3847_67145C.1
gtctggagaagcgtcctcagtggcggaccgggcccaagtcccctggaagggggcgccagagagggtgagagccccggcgtgcccggaccctgtcgcaccacgaggcgctgtcggcgagtcgggttgtttgggaatgcagccccaatcgggcggtaaattccgtccaaggctaaatactggcaagtgttatcgattcaaacattttattgtattcttttaagatgtagctagttactctagtctaagtcttgtacacacaaaaaaaaaaagttactcaagtctaaattttatctttttctgtgtattttttgcattttagtgaatggaaattagtcttt

SEQ ID NO: 106456 - DNA, 314 bp, Glycine max
  Clone ID: PAT_MRT3847_67146C.1
gggaagccaaaacaattgggtttttttttttttaagacaaagggttggtttacaccggcgaagtccccataaaacattttttttacagaactggaggctttttttgactttgagcgcccccttaaagggggttttttcccgaaggttttttttattttttgctacggggaattaagttttgcagggatcattacaaccacgggggaccgattttttttactcctttttgggaattggacggggtcaatggtccatatttttggggcatattaatgaattgggggggcactggtaaacttggatgaacctggtgg

SEQ ID NO: 106457 - DNA, 279 bp, Glycine max
  Clone ID: PAT_MRT3847_67147C.1
ccattcacacttgcacatgcattttatctcaatccataaaatcacgtaacatcgtgcacttgtaaactcttgcatccatcatcctaagcaaactacatctcagttctctctgaagataactccaatatggaactgggtcactacagaagacctctctataagtactatgctcctacttgtaaacactaccaaaagcttgctccataatataaaaaccctggaagcaacttccataaagccaattctatattcatctccattgctgactgtcatcagcac

SEQ ID NO: 106458 - DNA, 276 bp, Glycine max
  Clone ID: PAT_MRT3847_67148C.1
ctctatgtctcagtctctctgatttgcggctgaggattccgaacgagtgaccttcttcgtgtctcgcaaagtttaagtaatcgtgggtaatgacaaggttgacatcaacattggcgtcatgggacatgtcgactctgggaagtcaagtaccactggtcacttgatctacaagcttggaggtattgacaagcgtgtgattgagaggttcgagaatgaggctgccgagatgaacaagaggtcattcaggtgatgcctgggtgctctacaagctcaaag

SEQ ID NO: 106459 - DNA, 417 bp, Glycine max
  Clone ID: PAT_MRT3847_67149C.1
ccacgcgtccggttttttgctgccatggcaggcgccggtgcgcccgcagttccccaggccggtcgcccagcccccaacttcgacgtcatcgtggtgggcgccggcatcatgggcagctgcacggcgcacgcggcggcgtctcgcggcgcccgcgtcctgctgctggagcgcttcgacctgctccacccgctgggctcctcgcacggcgactcccgcatcatccgggacgcctacgcgcagccgcggtacctccgcatggtgcgcctcgcccgctgcctctgggccgccgccgaggcggaggccggctaccgcgtgctcaccccgacgccgtaccttttcatgggcccgcggagcagcgcctcgcttgccgccgccatcgctaacattggagccgaggaggtggacgtggacgacctt

SEQ ID NO: 106460 - DNA, 2697 bp, Glycine max
  unsure (1)..(2697): unsure at all n locations
  Clone ID: PAT_MRT3847_6714C.1
ccacgcgtccggtatattatctcttctacatagagtgagagagaagaaaagaggaagaaaacaaaaaaaaacaaaaacagaaaaccgatgaagagcggtggtggtggtggtggtggtatgggcgcggttccgtcgtacggcgtcccggcgaaaaggcggtggaaagggctcgtagttgcggtgctcggtctcgtcattctctccatgctcgtccctctcgtcttcctgctcggtctccacaacggtttccactcttccggatatatatatgaacagaagagtactccttcgaatgagaaaagtcttgaaagatatgatagacatgatgttggccataatgagtctgaggaaggacaatcaaatcatgtggaggatcttatcacaaagtttgaaccaactcttccaaaggatgctctcaagaaatatgctcgagaaggcaagaatgattccaacaataaggctggcaaagatgataaacaaagaggttctaaggcgccacctaagggtgttctgcaatcacgtccaacttcaaataatcctagaagtggtcaagttgaacaagtcaaccgccctaaaacaagcactgccgatgaaggtggaaagtcatgtgagctcacatttggtagctattgcctttggcaacaagaacatagacaagaaatgaaagatgctctggttaagaaattgaaagaccaactatttgttgctagagcttattatcctagccttgcaaaactcccagcaaatgataaattgtctcgccaactgaaacagaatatacaggagatggagcacatgcttagtgaatctaccacagatgctgatcttccaccagtggctgaaagttattcaaagaagatggaaaaaacaataaccagggtaaaatcaattcctgtggtttgcgacaatgtggacaagaaattgagacaaatatttgatttgactgaggatgaagccaacttccacatgaaacagagtgcattcttgtataagcttaatgttcagacaatgccaaagagtcatcactgcctgtcactaaaactaactgtagaatatttcaaatcctcgcataatgacgaaaaggctgacgaagaaaagtttattgattcttcattgcaccattatgttattttctctaataatgtgcttgcagcttcagtagttatcaactcaactgtatttcatgcgaaagaaagttcgaatctggtttttcatgttttgactgatggagaaaattattatgcaatcaaactctggttcttgagaaatcattataaggaagctgctgttcaagtgctaaatgttgagctggacatccaaaaggaaaatccgttgcttctatccttgcctgaggagttccgtgtttcaattctcagttatgataatccatccacaaaccagattagaacagagttcctttcaattttttctgattcacactatttacttccggatttattcagcaatttgaataaagttgtggttctggatgatgatgttgttatccaacaagacttatctgccctgtggaacacagacttgggagataaagtgaacggtgcagtgcagttctgctcggtaaagctgggtcaactgaaaagttatctgggtgagaaaggtatcagtcagaattcctgtgcttggatgtcagggttgaacataattgacctggtgaggtggaaggagcttggtattcctccaactttcatacagatgatagaacgagtttacaatgcaataatgatctgttgagggtattgcatgacgggatagattgctcatttttggaaaatgaattatatccactctatgagtcatgggttggattctggactgggtaatgattataaaattgctactcttctatcctagcctgagtcggtccgacactgcaatcgcaatatgaaaccttggcctgatctcggaattccacagtataaaagctattggaagaagtttctgaacaaagaagatcatctcttatgcgaccgcttggttgatgctgtggttgagtattgaaaatgtacatgtctattcttccctgctgtaattgaaaagaaaactgaacagtggttggttggaggagaacggaagggagggaaggggaaataagagggcaaaatccctcccctttgattttgcctccctccaatatttgggagtttggaggaaggggacaaagcttagagtttgtgaattgtgctgacctaattatcctttttatgcttaatggttttctttgtttactctaaggttataatagtaaattactctagttaccaaccccttctcttaattaaaatccctcctctgcccaaacagactgagagtaaatcacatttatgtcactgtcatcattataatttgggttccatgtcaatctaaaaatttcatccatgtaagttgttgaggattttggtttttccttatcatcatagtgaaataaattcatcagctacgatctcnccgagatctctctcctctctataaatacccttccattctcccacattctccctccgcaacagatccgcgtcgatttcacctccgatttctctcttctcgcacttccaaatgcgctagatctatcgttttctcgcgcttcacgagaaacggcgtcgttgaatcttcgcttgttccatatcaacgaatcgatgtgttctgagggtacgagctcgaaacgctttcgaggcttga

SEQ ID NO: 106461 - DNA, 349 bp, Glycine max
  Clone ID: PAT_MRT3847_67150C.1
cctaacttagcatataacaacagaaaaatcctgaataacagggggcctatattcctagaccgtattttaactgatccgaaaaccaaatcaattacagaaaattggatacgaacaattgttaaaccgcatatacgtacatatctcaaatgctataatggggagtatccaagtatatgcaagatcagcgattgatcgctatgcatctaggaccgtcatagtgaatagcaccatgaggactctactactggggccagatgtaagatgatgctttcagatctcgccttgaacagcctgcggtccaagggatctagggccctaaatgatatacgcaggcaataggaataccgcc

SEQ ID NO: 106462 - DNA, 314 bp, Glycine max
  Clone ID: PAT_MRT3847_67151C.1
caaacaaaaaaaaaaaggtttcaaagcccccttttaataagcgggggggtttttgttaaacttttaaggcaagctaggttttttaaaatcttgcaaaaaaacctggtttcctacaccaatattttttggcgaagggcaatccttgttattaaactaacgaggaaccctttaaaaagcccattgatttttttgcaaagaatcattttatgcttttaacgggggaaacctgtctttattctctaacaccgaattccgggtttaaatacccgggtctgcgaacttatacttttttttatgggggccctaaattgaat

SEQ ID NO: 106463 - DNA, 1106 bp, Glycine max
  Clone ID: PAT_MRT3847_67152C.1
aaaaaaagtcatagtttttttttggggttgtgtgtgtcttttggtggaggaatgcttgtcacctactcctttaaagttctcccaaaaacacttttgtgagtgagtgagtgagagaaagaagagaaggagttgaagtggttgttgtattgtagtagtgtgtaaagtcttggtgatggatagacacaaatgcaagctttgttcaaggtctttcagcaatggcagagcccttggtgggcacatgaaggctcaccttgcttctctccctctccctctccctccaaagcttcactcttgtttctcttcctctgactcagaacaagaacaatctttaagggagaatcctaagaaaaccttgaggattctggatcctgaagacagagagagcgagacagagtctaataagaacccgactcgttaacgatccaagcgcaactggaaatctaccatgcccaagctcagcctcggacaccccgaagccgaacctctcagctccgtctccgacacctcccccgaagaagacctcgccatgtgcctcatgatgctctcccgcgacacgtggcaggaacacaaactcgccaatgcaggtccacccaagactcgctgcagcagcggatcagagatcaagctcaagagcaaagtccgctccaagcacctctgccacgcttgtcacaaatcctttcgatcctctcgcgctcttgggagccacagaaccctgtgctctccccgtctggaagcccaaaataacagcatcattagtaataacaacattaaggtttttgaatgccccttctgttacaagctgtttggttctggccaagcgctcggtggacacaagagatctcacctaattccttcttcctcttcaaccgttaatcattctgtcaagttgaaacagagcttcatagatctcaacttgcctgctccggccgaagacgacgatcttagcgttgtttctgatgcctaattcgatctggcatatgttttaattgtttaatgtttagttgtctggtggtgttactcataaagtgaatttttcttcttcttcttcttcttcttcttctttataaaagtagctgagaatatttcattatgtttattgacagatc

SEQ ID NO: 106464 - DNA, 229 bp, Glycine max
  unsure (1)..(229): unsure at all n locations
  Clone ID: PAT_MRT3847_67153C.1
gagcgctctagtcggcgggcgccctttntnttttggggtttatttttaaaattaatcgcgttacaatatacttattaattttggnaatatacatccaaattccaaattacaaaccaagacactctatgattcaacaaggatttaaaaagggggatgattccatcacggtattctttactcttcagagcacatattaagcaacaatgtatatatangattattttacaat

SEQ ID NO: 106465 - DNA, 344 bp, Glycine max
  Clone ID: PAT_MRT3847_67154C.1
cacaaaaccacaaacaaacggcgtcaaatacaaacccatacatccatcctaacccttcttctttctttctctatccttatctcttaatccacttctatttactacccaccagttaatactccatcatttttcaagctttcataatacaaaccaatactctacaaactactcctactattatccaaaaacatcaaattacaatcctaaactccctctttaacaaccatcatataataatcctccatacaatattccaccttatccttaatacccttctccaaattaccccccccatacctaacttaagtcatgaaatctattttctactttataaataacattta

SEQ ID NO: 106466 - DNA, 416 bp, Glycine max
  Clone ID: PAT_MRT3847_67155C.1
ataatagattattgaattttggaaagcgtagattctacacttcaaaacataatcaaagaaaatctatccatataactagttctttttcaaaagcaaatcattacacaactcacgacaatttgagtattttaagcaccagcagctcaaaacacagaagctaggaaacaacatcaaagcttcagggaacttttcaatggcgaaactaaacacatgctgacagacagatacaacatacagaaaagatagtagaattcaaataaaaagcaaggaagaagaataactatgaaggggggatggtaataaattatgagtaccatggttcatgattatgatttttctttggatgggagagaggatcagtaaacaatgccatcaaaaccaacagatcagtcaagatgcatgaccaaatgaaccaa

SEQ ID NO: 106467 - DNA, 1345 bp, Glycine max
  Clone ID: PAT_MRT3847_67156C.1
tgaaatttagttttgcaaagtgaaaagcgaaaattgattgagaccaagtttaggcttggcgcaaaacttgcattgctttgtgtaaggctaactctgcctaactcacgtgcttccgttcattcttaggtctgttgtggccgcatccgtgatttcaattgcagttatatatattagatctacttgccattctgaatttcacactattccattataaaaatgctcaagatcccggagcaccaggtggccgggcacaaggccaaggacggaatcctgggcccactcgtcgacgattttggaaaattctacaagcccctccagaccaacaaagacgacgacacccgcggctccaccgaactctccttttacacctctctcgccgccgccgcccacgactactccatccgctccttcttccccgcctttcacggcacccgcctcctggacgcctccgacggctccggtccccaccctcacctggtcctggaggacctcctctgcggctactccaaaccctccgtcatggacgtaaagatcggctccagaacctggcacctgggagactccgaggactacatctgcaagtgcctgaagaaggacagagagtcctctagcttgcccttgggtttcagaatctcgggagtcaaggactctatctcctcctgggaacctaccaggaaatctctccagtgtctatccgcccatggtgttgcacttgttctcaacaagttcgtttcctctaataatatcaaccatgatgatcatcatcccgattgcgctttcgcaacggaggtctacggcgccgttttggagcgcttgcagaagctcaaggactggttcgaggttcagacggtgtatcacttctattcttgttctgttcttgtggtgtacgagaaggatctagggaaagggaaagctaccaaccctctggtcaaactcgttgactttgcacacgtggtggacggaaacggtgtcattgatcacaacttcttgggtggcctttgttccttcatcaagttcctcaaggatatcctagcagtagcatgtcttcacaagtgactgattttcatcgagttaatcttattcctatcagaaaataattatgcttgaattagtgtcgcagactaactgtttgaagtactgtcagaaacaaaataataatatggactgagaggcaatcttgttctgctaaactccctttcaagttgctgtcagatactagccgtcccttttcctttttcatattctgtcaaagtgagtcatttaataataataacaatgtccttcaactccatttgtttcagccaacctttatgctcctactacttttatgaattctattgctcta

SEQ ID NO: 106468 - DNA, 518 bp, Glycine max
  Clone ID: PAT_MRT3847_67157C.1
tttcttttttttttttttttttttttttttttttttttttttttttttttttttttttttttttttttttttttttttttttttttttttttttttgggggcggggaaaacaattttaaaccaaaaattttcccaccttggaaaaaaattaaaaaagggggggaacaaaaaaggggggtgggttaaaaggggcaaccccccaaagggcccgctatgggggggtcaaaacccccccccccccaggggtttaaacctaaacggggccctaaaaaaaagggccctggggtcccgggggcggaaattgggatttaaaggccccaagggcgggggaaaaacccggaccccaaaggccagggggtttggcacctttataaaacccattacccgggggggcaacggggggggggggggaaaaaaacttgggtacccccaggggggggctaaaacccctcggggggggccttaaagggacccccgtgggaaaaagccacgggttcagggaaggcccttgggggggg

SEQ ID NO: 106469 - DNA, 1083 bp, Glycine max
  Clone ID: PAT_MRT3847_67158C.1
ggctttttgcttgaagcactcagatctaccagaaaatagaagcatcttgccattgaaaggctctatcgcaggtacgaatgatatttcagaagccaatggctttccagtggcattgccagtgagtggtgaacagagcttgaaagattgcaggaatggaggattagcctctgatagtagtcctgacaaactgaaccataatgatgaactgccagatggaggactatctgattgcaggttaagtgctcatgacgacatgttgggatgtggtgctgtgccccaacaagatgttggagtggtagggagagccaatgagaatgttgatgcatctgactctctcagttttgcacttgttttgaagaagttgattgatcgaggaaaagttgatgtaaaagacgtggcattggaaattggcatttcaccagatacattaactgcaaataccaatgaagcttatatggcccctgatgtccaacacaaaatagtcaattggctaaaagcccatgtatatactaatgcatttcagaagggtttaaaagttaaattcaaaccagccaatgcatccaaaaacgacagtgaagccatagatggttctgacactttaccaatatcagattcgggtttgttggatcctgttgctgttaagtcagttccgcccaggagaagaaccaccagtaacattaggattttgaaggataacaaagtgatatgttcatctgagggggttattggtgagaatgggatgccggtggacatgtgcagagtaggtcagtctgactgtgacaatccaaccaattataatgaagcatccattcccaatgcaactgaaatgaacttaaccaagtctgaggatatttttcatgaagttcaaggcaatgcttctggatgtgtttcagcaggcaactctactgcttgtttgctaaatgcttctgtgctttctgatcactgtcttgttcattctgcttcagaaccacttgattttggtttcataaagaaggatgcaatctctagttacattcatccatacatcaacaagaaattgctgcagattcgtgatggggtgcccttggaggacattatatgttc

SEQ ID NO: 106470 - DNA, 241 bp, Glycine max
  Clone ID: PAT_MRT3847_67159C.1
aaaagccggggcgcaaattccaatttgcccataccttatcctgaggcggccattccccatcccttaaaaaaaaaaaaaaagaggcacccttggcctttacccccccctcccaagtccaaacccttaaatttggactaggggaagagccagcccccttcttttaaggggggggggggtacaacaaaacactaatgcgcgggagcacccatgccgggataaaacataagtcgttaggcccccc

SEQ ID NO: 106471 - DNA, 333 bp, Glycine max
  Clone ID: PAT_MRT3847_6715C.1
taccggtctcggaagacccaggccgacgcacacgtgcgcgcacacgtgtgccaaaaacaagcaagctgactcatgaggggcaaaaatgggagcatgcggctccatgggtatgtattaacgatccttgtatattaagatctttaatgtgtgaccattagacgccttattcgagaaagttagcattaggaatatccgatcatataatgcctactgcggaagacattgaccggcccataccgcattaagtacttagcactattctcttgctaatccacgtcctacctcactggcgactttctagatgactacagcttacacactggtgcactttac

SEQ ID NO: 106472 - DNA, 229 bp, Glycine max
  Clone ID: PAT_MRT3847_67160C.1
tttttgaatcaaaaatttattctcgagcatcttcatactacctcatgcttcacatgatttacaatcgaaaatatttactcaaccttccatacttaataattatgcaacgaccccaacacccatgacacttttttcttcgaatgatgatgaaatgctacgatttcttgttccattgagtaatagttaatatactcacttttgcaattaaagaaaattgtatcttatttga

SEQ ID NO: 106473 - DNA, 556 bp, Glycine max
  Clone ID: PAT_MRT3847_67161C.1
aaaaaaaaaaacaacgcctttggaaataccccaaacaattttttttaaaaaaaacccattgggccaaaaggcaaaaaacaatttttttcccccgggtttttttttggggggaccaaaaacccccccccaattttccttttaaccccaaaggggggcggaaaccccccctggggggggggggggcccctccccgggggggggggggatcccctaagaaaaactggggggcggcgggggcggttttttaaaatttttaaaaaccccccttaagtttttcccaggtctgggaacaaaaaattttttcccccgtttttaaagggggggggccttttttccccttttttagggcttttggccccccacgattgggtccctttgggttttggggggaaagcaccccattgggggggggggggggcccctcaattttaaaaattggccccgggtcccccttttttttacttttaaaagggttgggctaaaaattaaaatctttcactaaaacagggggggtaggccggaaaattttaaaaatccccccaactttccccctttt

SEQ ID NO: 106474 - DNA, 229 bp, Glycine max
  Clone ID: PAT_MRT3847_67162C.1
atccaattcaaatgctatttccaaatacactccgaaattataagaacattgaacacttttatttttaaaatatttcaaatctataaatatcatacatatattctccttaattccccttacttttgtaatcaattatccatatccacccctaccttattcggggtttcttacctcattaacaatacctttaaattacacacaaacatttataaaaaatcattatccatct

SEQ ID NO: 106475 - DNA, 282 bp, Glycine max
  unsure (1)..(282): unsure at all n locations
  Clone ID: PAT_MRT3847_67163C.1
ttcctgacgtcaggggccttcnggctcactgcgctgtcttccttgctcctggatccaganctacntngcgaggagacccagcnagcctcgganaacctcgccgcngccgggaagatcagcctcggccgatncngcggagtacgtggggnagaagacgnntncacttgtgnannagaccaagtatgtgggcaggatattcagagcaaggcanangatacnagggtaggcagctgcaaggatgnnattnatcaactgcaagggatgcaagggangctgntgcaa

SEQ ID NO: 106476 - DNA, 414 bp, Glycine max
  unsure (1)..(414): unsure at all n locations
  Clone ID: PAT_MRT3847_67164C.1
ggaaagcgtcactcgctctccccgcaactcactgagtcaactcgccgtcattgtcttcgaactccaccaatcgggggagcaaagctagatcctaggcgcgttactgagtcgtgactcgtccttaactcgggaatggcttcttcggaagctgattcccgtctgaagcaggtgctcgttcccgcgctcgagaaaatcatcaagaacgcgtcgtggcgaaagcacgcgaagctctcgcacgagtgcaagtccgtggtcgaaatcctaacctcgccgccgaagcctcaatcgcctgcctccgacgaagccgctgagccggaggcctcggtccccggcccaatccatgatggaggtcccgtggagtactcccttgccgagtcggagtcgatcctncgcccgctcattgccgccgcgtcc

SEQ ID NO: 106477 - DNA, 440 bp, Glycine max
  Clone ID: PAT_MRT3847_67165C.1
atatagaatagtattgaaatattggtgtaaaaagggtgatactgggttactgtgtgaaacggtaacccggtcacaaaacaaaaaaacagaaaacccgaagggaaaaggcggaaagcccgagggggcaagggaacgaacaaaaacagagaaaaggggaggggccaactgcccgctgggaaaccgggaaacccggcgggccaactgaattaaggaacccgccaacacagggggaaaggcggttggggaccagggggccagggcgtttcaccattgaaacggggaaacgggcaacgcctgattgcgcttgaccgcgggaccctgaaagaaagggaacaagccggccccgccggatagggcgaaaaggcgaaaagcgggggggaaggggggtaacggaagaagaaaacaggagcggacggggggatccggcgacgcgcctaccg

SEQ ID NO: 106478 - DNA, 235 bp, Glycine max
  Clone ID: PAT_MRT3847_67166C.1
cttttgctcttatcttatgcactgtacctttcctcgtctctcttctcctctctgcctatgtcccccttcactgaaaaactcgctatctttactgtcggttactttgtgctaagacattacgcggaaaaaagagacattcgcagtttcctgaccgttgcatcttctttgtgtgcacacctttgaattagggttcttctcgcactctcttcagtcttcaccaccattggtgaaacgt

SEQ ID NO: 106479 - DNA, 442 bp, Glycine max
  Clone ID: PAT_MRT3847_67167C.1
agagccttcaaacttaggtttgagtagagacagtggcgttggtccttctaaaattcctaataaagggactcctaaccaactagaaaatttgccagccttgtctggtacttctctgtacaaagggactcttggaatgaatacagttggtgatgggacaagattgaatgtcaatgttgtaccatatactaataacagccccaatgactctcggaacctttttgcagatcttaacccattccaaataaaaggaatggggaaggcccctgtgcataacaaacctgtggaaaataaacctcctgagcttaaaagtactaaaaacaatgctgtttctggtagacccccagtgccactgatgtggaagaatcgtcctgcttacaatgaagaacccaggacaactaatcataatcctaatgattacaacctcccttatgtgtttccaatg

SEQ ID NO: 106480 - DNA, 564 bp, Glycine max
  Clone ID: PAT_MRT3847_67168C.1
cttgggggggggggggggaccaatccttgcgccacccctattcaagtgaagttgcttaaaaggactgaataaggcgtgtgatagagattaatcgaacgatcgaatttacaaaagattgtttaaggaaagaccgtgaaacatttgtgatttttgtattaaagagtttggggtgagtatgataaaatgctgcctgctgggggactgtgtgcaaatacttaaaaaatacaggaagggggggagcaaaccaatagggagtaaatataacaaggctagggataagtaagggtttgtaaggaactgtggtaattgaggatccctggtggtacatacatgctaacggggcaagtggtcttgggccccgccatagcaggtaataagctgggtaagccctcataacgagatcataagtatacgcacaggagtgcagcgagggaactctaagctggttggcatgactgtgagcctataggctgcgcccgtagtagcttggtggaagttgtcatcaataacatgaatgctaatggcctgacataggatagtttaaagtttagtatagctaagcag

SEQ ID NO: 106481 - DNA, 233 bp, Glycine max
  Clone ID: PAT_MRT3847_67169C.1
atatcttattcgatccaaataatgacagcgtcttggggaaaatcctctactcctctcttaaaattataatctatgcaataagaattaaatcatatatcatctgaactctacgaactatgactaaccaccgcatttccacacaacattcgggaaccaacactacaggcaagtttttaatctacatattaaacttcatgattttgataaagttgtcactcctatcacatgcacca

SEQ ID NO: 106482 - DNA, 733 bp, Glycine max
  unsure (1)..(733): unsure at all n locations
  Clone ID: PAT_MRT3847_6716C.1
gtttcacattgggtgcacctgagctggatcgattaccaatttaagaccagaatatgaatctcgaagagatggaggtcctgggctccagcaagnaagatttcaaagtccacctttgtctatacataattcagaaacctacagacaaggtgtcagggtgcaggaaatgagacaggatcttggcattcatgaccattcagatagacttatgcgcaaagaaaatacaatccaaatgatgaaatagatgttcatgatttgagaacaataaaatcaagtaaatggggtgcaactgaagaatttcaagatgcatatgaatgtgaagagtgggtagatgaccgagatatggatatgttgtattcatctggtaatgttgaatttaaccctaagatatacaggaagtataagaaagaatatgacgagttggagaatgaagaagattttccatctgatgagtgggttatacctcaaggttctatgggacatgtacaaaggcattcatttcaatttcggaagtattccaatcaaaatataaagcatcacccaaagtctagttcttcaaactggtataaaccccagcatttttctaagagaaatgcaattcaaaagcagcctaaagtttggaaaaagtatcatggatatgatgagaataaacatgcagctaatgatgaatcatctgaagattggataagtgctgcaggtcgactctagaggatccccgggtaccgagctcgaattc

SEQ ID NO: 106483 - DNA, 606 bp, Glycine max
  Clone ID: PAT_MRT3847_67170C.1
ggtatatttacgattcttttttttttccgttcctattcctactctgcaggctcggtcctggaagtagcaagcaattagtgcgcgcgcttgctagttaaagttttagggtattgggagagagagagagagtcgaatctgaattgagctgagcagatatggtgagaaaacatggctggcaattacctgctcacacttttcaggttgttgcgatcactgtattctgcttattggtgattgctttctatgctttccttgctcccttcatcggaggaggtcatatatgggaatacaccttcattgctgtttactctcctgtggctctcattgtgttcattctttacgtcagatgcactgcaattaaccctgcagatccgggcattatgtctaaatttgaccctagagtgggaaataagttcaattctgctcacaatttatcagggaagcatcttggttctgaacatgaacacgttgctgctagagagcaatattctccatcatctgctgcttccaaaaggtctatgacaaatatcagcaagaagagctcagtggaagatcttgacagactagatagttcgaggaaagagaataaccaaaactcatgtaatg

SEQ ID NO: 106484 - DNA, 138 bp, Glycine max
  Clone ID: PAT_MRT3847_67171C.1
gacaacctcatgttatctccaatgcgaataatcatatttcatgcaattcaaaccatcttaggtttggttccatttatctcaatctcagactgtatcacttaccatctataaccactacacgctatacaactctctcat

SEQ ID NO: 106485 - DNA, 393 bp, Glycine max
  Clone ID: PAT_MRT3847_67172C.1
ccaagaattcggcaccagtggaaacaaaacgagatatacataacatgagcaagaaaaagaaacaagcaaaaatgaatttcaacatctgggtgacaaatcagtaaaatataggaaagatatcaagcagaactaataatccttatggtgcgtattcttgtgagacatttcacaattttcccaatcaatttatttaagctgaaaattttccctttgtggaaccattttgaagtctaatgttcaagtcttttctttttgtaagcagaacccagaaatagatatacaaagaattcaatgcagataggattaattgaaaaacaagtgcccatttattcaatcatttccatacagacaactttcttatgaatagaatgagtttagaagtttttttttttt

SEQ ID NO: 106486 - DNA, 194 bp, Glycine max
  Clone ID: PAT_MRT3847_67173C.1
gaattcccaaccaccacctctagtcttaccatctttcactataacccttctaattacatcttgcaatcatcatactcatagctctaccctgtaataaattaccattcccttaaaacttcccacattatactatactgaatcataatataccaatccttaatcatctaaatagctaactacttcacaaaaattgc

SEQ ID NO: 106487 - DNA, 297 bp, Glycine max
  Clone ID: PAT_MRT3847_67174C.1
ttcacttacgaaccaaggcaacacaagacaatggggtatttattgggcctgatccattaatttccatgggagtccgaaaacaggaaccgaaaatacaggatgatgaaatctcaaaaagcaaaagcagatgggaatgtattttaagcacaaacaaacaaagtggggtggcggctacaaatgctttgcaaattttatacacttagaagcctgggggcttgtgggcgatgaatctgctgcactgcacttggcgaacgttgttgaatccgatgataccgatgaagccgttggggtatgcat

SEQ ID NO: 106488 - DNA, 575 bp, Glycine max
  Clone ID: PAT_MRT3847_67175C.1
ggaaccaaacaaaccctttagggggacaaaagaaaacgggaaaagtaaaaaaaaaaaaaacaaaatcaacgggccggttatttttttggggggaaaaattaaggggggcccaacaccaaattaaaaaagacggggtcttttccccctaaaaaaaataagaccccttttttctaaacggtttaaaaaattttttatttttgggggttggaaaaaaacacttgaaaaaggggtcttttataaagttaagccctatttgggggttgaggtttggggtaaaaaaaattgttgcaccagggggggggggggggaaatttgttgttaaaaccccgggggttggggttggggttgttaagggccccaacccctaaggggggtttaagggcccaaaggggacaggccttccaacttttgaatggccgaaatgggggggacgggattttttgggtaaaaaaaagggttaagggggccaaaaaacttttttttttttggggggaaggggcaaagcttccttttataaaaaaaataaacacccttatgggctgggattgcaaaaattttcaaacccttgggggggg

SEQ ID NO: 106489 - DNA, 401 bp, Glycine max
  Clone ID: PAT_MRT3847_67176C.1
gggaaaaaacatattaaaaccctgacatatggcccagaaaaccttttttaccaaaatttacccttggaaaaaaaactggccatttaatttggccatttacatttaaactaccggttttaaaagccctggaagaaaacaaaaaatgggtttccaggaattttatgggcatgagcgccttttatttttttaacccaaatataaatggattttttagggtacctataaacacggcctaccccaaattggctttaaaaaaatggcatggattccccaatattttgggggcaaaaattttaaagggtctactggtccaaacctcaattttggggacccaaaatggcttgggacaaacccaaacccctgggggattttctggagcatcctttaccccatttacccca

SEQ ID NO: 106490 - DNA, 227 bp, Glycine max
  Clone ID: PAT_MRT3847_67177C.1
aaataaaaattaaatccttactctcatttttaccataaaaattttcggatgatatgaccatttaatcaccatttcagctggacttggattccaaccgaaattccagccttaaccctggcccactggttaaccttatgggcctttttagaccattaccggttccaggtgataggtctacccttccagaagggaaaagaaggaaatttccattctgggaaggttgaaaa

SEQ ID NO: 106491 - DNA, 873 bp, Glycine max
  unsure (1)..(873): unsure at all n locations
  Clone ID: PAT_MRT3847_67178C.1
cttatgcttagaagaactacataagaaggaagcacaatgggtaacgagacattacatagaagatagagcaaagtagctacctctagctaggttctctaccactatatatgatccttcatctttcactttgatcatatttcatatcatacatatattaagcatctacaaaagaacaccaaccttggtgcctatttattatactagaagaaagaagggtagaatggattatcattcacaatacagtagtgctagtgaatcaggttggactcattatttggaccaatcctctcttcctgaaaattactaccagaggagaggtggtgttgtggagtgtgatgaaggaaaaggagcaagaatggaagagtactctgaggaagatttgtccatggtctctgatgcttcttctggacctccatattatgataatgaatgctattgtcagaattggtatccttgcctttcttctacaaccaaagattcccaaaagaagaacaagaaggtcaaagaatatggcagaagtcaacagccttcgcctcttgatgacactgcaagctctccttttttcaactgtgccaaggagagtcacaagaagcaagacagtttctcagggaatggagcagtggagagtgcattgaatttttctcaatgtgtatctgcaacaagaataaagagaaagacaaaattccagaaagcactnttggtttcttagataggtctcttgctggaaaactaacctcaagggaacaaggtgggttttaatgaagaagggaaatgagtgattttgctgtagtccttgtcnactgtttgttggtgctgcattgctgtggaaagagaaacagaaaaagatggatgtcaaaggagagaagctactca

SEQ ID NO: 106492 - DNA, 179 bp, Glycine max
  Clone ID: PAT_MRT3847_67179C.1
gctgcgacaagaggagagaacgatatcgatgcttcaagtcgacaagtcgataccgcagctagctcactgcatctgcgtgatcaaagtgcacttctaatccaactccggggggagggaagcacagtttcagcactacaatacaagcgtgcatacgcctacaatgcggacgctcaacacga

SEQ ID NO: 106493 - DNA, 317 bp, Glycine max
  unsure (1)..(317): unsure at all n locations
  Clone ID: PAT_MRT3847_6717C.1
ggaattcggcacgaggccctgctcgatcactattctcctacttcacgcaagctctgccaagcanncttcatgctcgagggtatcccttgaagacgtatgtgaaggtagacccgaaacggaagaggcagagactaggacgaaccaaatagagtccaagaacggaaacttgaaagactcagagccggatggatgctgcaacatacgaagttctggaatttcgaggtccactcacgtgattggtccgaggagaagagaagaggcaccaacaataaaagggggcgattatcttcttgttggggggaggttcttctgggagt

SEQ ID NO: 106494 - DNA, 199 bp, Glycine max
  Clone ID: PAT_MRT3847_67180C.1
tcgtccactcgttcgttcatcgcgttcgtttttttttttttttaatttttaccaaaaagcgggggtgcaacaccggaatattcaaaaccgggacagggggggggcccaacttaacaaataaggagcggaactaaagcggggcaaaagattggcaaaaagggacccctgagaaaaatgggcccccggtgaaaactcccac

SEQ ID NO: 106495 - DNA, 891 bp, Glycine max
  Clone ID: PAT_MRT3847_67181C.1
gagcaaagtagctacctctagctaggtcctctaccactatatatgatctttcatctttcactttgatcatattttcatatcatacaatacatattgagcatctatagaaaacaccaaccttggtgcctagttaatactagaagaaagaaatggattatcatcatatatctgctgcttcacaatacagtagtgctagtgaatcaggctggacccattatttggaccaatcctctctttctgaaaattactaccagaggagaggtggtgttgtggagtgtgaaggaaaaggagcaagaatggaggagtactctgaggaagatttgtccatggtctctgatgcttcttctggacctccacattatgataatgaatgctattgtcagaattggtatccttgcctttcttctaaagccaaagaatcccaaaagaagaacaagaaggtcaaagaatatggcagaagtcaacagccttcacctcttgatgacaccgcaagctctccttttttcaactcttccaaggagagtcacaagaagcaagatagtttctcagggaatggagcagtggagagtgcattggatttttctcaatgtgtatctgcaacaagaataaagagaaagacaaaattccagaagcactttggtttcttagagtctcttggtggaaaactagcctcagaggaacaaggtggttttgatgaagggaaatgagttcactgtttattgctgcattgctgtggaaagagagaccagaagaatggatgtcaaaggagagaagctactcaatgtctgtcaaaaggaacttcttttctttttctttctttctttctttttttcccctttttctcttttcattttttccaaaatattgaaaaaagaaaagctcttatgttgt

SEQ ID NO: 106496 - DNA, 564 bp, Glycine max
  Clone ID: PAT_MRT3847_67182C.1
gaattatttctttttttctactgtctccttcatgtcatggtgtggctacgtaatatataactgacttacacttgacttttgtttaaattttttacaggaaaggtggtccttgatctttgttaacagtttttgttgaaacagaaatttctttaacaatgatcaatgcatttggataccttctactttggtttttagattttagctgtgttcactgcattctgtttgatgaacgtcattcaattaggcatttttctgttcttttagtggttttctcatcataagtgtgtgctgttcctgttagtgtcattataccccttaccttgttttagtttgtttctaggtgttattcctacctttcccttggtggagtataatatctctgtaaacatagttatgttcctcatgagaatggtctgtaattctgttgcatgcaaaattgtattgtgctttcttttttttttaagaaaaaccgatttggattgctattgtgtacaagtgactaattgaaaatattctatcttggaggttaactgactgattatacagtccactgaattatactaa

SEQ ID NO: 106497 - DNA, 281 bp, Glycine max
  unsure (1)..(281): unsure at all n locations
  Clone ID: PAT_MRT3847_67183C.1
tttaacacatattgatattttatttaaagggaggacatgtaacaactgcaacattgtgaaaaaaaaaacatacgagtaaggttgttagtcatttagccttacacgaaacctttcgatatagttgatatttgactgngagttaatattcatcatgatgagcgcttaccccaatttgtgacattgaacaagtttttactctgatatttgccttgttcgtgctcgggttcaggccaagggggcagggggactttctttttttgcgcactctctttttttggtct

SEQ ID NO: 106498 - DNA, 1352 bp, Glycine max
  Clone ID: PAT_MRT3847_67184C.1
atcaataaacatattgatagatacaagtatataaaatcagggcatgaacatgacttgataaattaagtagacttaatttcaatactataataagagggaccaattcaaattctcgccctgggggggacacccacaaaaaccacttcaagggcattaatgatctctcaaactgatcagttttgtgcaagtaaaccatgtttcttttaaaaagacttgtgcacttgcccaggctcaaggattttaaaatctagcacataaagcccattactagaggtagaaatacaggcaatatactattacggcaacaaccatcaattacagttaaaaatttttctgtaacaaccaaatggataatcaaatattgcaacaactcaagtattactgagcaaagtgcatctctacagtattcagtgttgctattcagttttctaacttaaaacagcctatggtaactggcagcaaagaaggtccttgcaatagactgcctctgcttgagaacttatgatgtaattattgcatgctgctaatatactatctaaacattaaagatactcctaaaatatttgatggtagactatgattaagacattacactacaaaaaaaccttatgcagaaggaaatcctaactgacgtgcttctgctttaaatattgtgaaaacattacagcggaatgaattttcgcagtggttaggtcaaatgcagttacatcatagcaacagtatgttttgcacaatttaaggctttggctggttctttagtcagcttcttcctctgattcttcttcttcagcagtttctaaccaggttagccactgattcacctggaacaaagccttgccttttcccggaaactcttgggttatatcttctttccaagccaagaaagcttcttcttcaataatttccatgtcatagaagtgcacaaaaaagcgaagtaacatgccttttgggaagttgctgttatagcagtgcacctggagagcatacagggcactgacttgtagatcaacgtgatcatgaagaaatttctgcattactggcttgaaagatagtagtagttgtttttcctgctctcactgttctttggaaggacgcagaggatgaatctgtttcatcgctgggggggtttacttcactagtaatgtcgtgtaagaagctagtcattaagatgttcgcgaatcctttatctacatgaagtttgggagagatgttatctttaatccatttatatatggtttgaggggatggatgcgtctttatttgcttcaacagttccttctcgatgtgaggagtgggaataagaaagcagtcccttccttccagttgctccgcatcgactcagaccccgttcg

SEQ ID NO: 106499 - DNA, 1819 bp, Glycine max
  unsure (1)..(1819): unsure at all n locations
  Clone ID: PAT_MRT3847_67185C.1
taatgactatcttttataatcatcaattaattgtattgttgtgtcagggttgatggtatattctccatgatttttttgtagatcagtaatatgccaaatacatttgttattttcttattccgcttctactcaaactaatatggttgtaccctctgttatgttgtggacagaggcattttggctgcgattgatgtgttgggagacaatgcattggttggggtaagtttcaattgcgtatatattgccttatataataaacagttggatataattattttgtaccagagggatacattctccagttataatttcacattgagatgatattagtatttgtgctgaattgcagatattctacttcattggatttggccttttctgtctcgagtcagtgcccaagcgtccgcccacgcgtgcgtacggctgagagaaaacgacagaaggggaagagtttgaagaagcagcttgaatttgtctctgtgcagagcagaaccccataacatacagtttgagagagatgggtatgaattgcggtggcgttgtggttcggtttggtttgtgggtggtggcgatgtgcattgcaggctacatagtggccccccctctctactggcacctcattgaactcctcaaccattcctctgtttcttcttcttcttcttcttgcgctccttgcgtctgcgattgctcttcccaacccatcattactattccccaaggacttagcaactcttcatttgaagaatgtgcaaagcacaatccgaaggtggatggagacactgaaaacaatgttgcggagttactgtcggaagaactaactctacgggaaactgaagctttgaaaaatcagcatcgtgctgacatggctctgctggagtccaagaagattgcatcccagtatcaaaaagaagcagacaagtgtaattcaggaatggaaacatgcgaggaagccagggaaaaggccgagatggcactagtggcacagaagaagctcactgcattgtgggaactaagagcttgtcagaaaggatggaatgaagggcttgccaaatctaaaaaacagtctaaagggaaagtacagactgcttagacttggtgtgacctccaactagttattgcatagtagtttcagcgaaatgatatttagaaattattactggtagtagcaaatcatcacatatagtctatataattaaggtattcatagaaagtcaaaattgtaaaatggcaatacagatgtcattgtttttctgacctccatttttgtggcttattacatatataagatttttgaaagcaggatagtatgaaggtgttgtgcaacttcattataaatcaagtttattgtttctttccgtggctgtggaaaggggtcagatttcaaacgtgaggctactagagtcacaatgacgacagttctattttaaagcgtgaggatgcgagagggacaatgatggcagctctataaaatggctttttcaattgtttttttaatgtatacaccttaaaaatgatttcctaaattaccattaccagttctccttacagcctttactctttgtttaatacggggaagccttttcctaggtttttgtcaaaccagataattaagatagaagcttagttgtgcatatatagaaatcattgtttgagatagccccttaacaaatgatttatttcagcaagtgttttatatttttgtttnnnnnnaaaaaaaaaaaaaaaaaaaaaaaaaaaaaaaaaaaaaaaaaaaaaaaaaaaaaaaaaaanaaananaaanaannannnnnnnnnnnnttttnnnccccccccccccggg

SEQ ID NO: 106500 - DNA, 226 bp, Glycine max
  Clone ID: PAT_MRT3847_67186C.1
tgcggcttatcgacctgttagatagctaatgcagcgtgagagaatgagtgacatgtaaaagaagaaaagagaagcagaaggccatagttctgaagatgcttcacacaatgaagatgatgaagagaaagaaattaccctgcggcctttaaacatggaatacatgagacaggctaggactcatgtggctgcaagttttgcatcagaacgatctgtactgaatgagttg

SEQ ID NO: 106501 - DNA, 238 bp, Glycine max
  Clone ID: PAT_MRT3847_67187C.1
cattgctatgatcgcaaatgaggatactgtagtcgtatttctgtggtctggactgcgaaatgcttctatacggtggaagacaaatcacctcgttgtggagtcagtcacaactgtcaagcatatcgaggatgccttacgagtattcacatcacgtaaggatgcctcactagggcttgagcgccaattactagcaaatgtgataagcgttttggttgatggctataacaagcctgtgcct

SEQ ID NO: 106502 - DNA, 258 bp, Glycine max
  Clone ID: PAT_MRT3847_67188C.1
atgaaaaactgatagcacaatgttcgtgattggcaatgacccttttttttattctcaccctttaattccaaaaaccaaatctaattgcaccgtttacaatatgtacataaaccgagatcttcgtggatggggataaagggggattggactggctttggcgcccactggctgtattagccacatcccatattaaggcgggcccaaaccaaattacgatgtttttttcttgcccaaaagataaattgcgcgcctgagaaa

SEQ ID NO: 106503 - DNA, 115 bp, Glycine max
  Clone ID: PAT_MRT3847_67189C.1
gttcaggggtaagaatccattggtatttgcactggtctatcgtaagagttgtataattactatacactatgtcaagacgttttgctatattgtagatatgagaatgcggcaagat

SEQ ID NO: 106504 - DNA, 2142 bp, Glycine max
  Clone ID: PAT_MRT3847_6718C.1
ggagaagttggacatttatggggacgcttcatatctctccagagcttcttcaggcgtgtcagatgatatggaaccctcatcaacatctcatatgccagaatctgatgagaatgcagcacttgaatccaaaaaaatgaaccataatatgcttatggctctcataaaatatttacagaagaagagatttagttttattgagaaggccactgcagaaggaactgaagaagtcgtttttgatgcagtcggggataactttgcatcttacaataggcttaagaaaacaaacaaggggcgtggtaatgtacctgttagttcaggagctcgggagatggcttcaatgttggatactgctctactcgaagctttgcttctaactggacagtcttcagtggctttagaattactgagaggagttaactactgtgatttgaaaatatgtgaggaaatacttcgaaaaggcaaccatcatgttgctttattagaactttacaagcacaactcattgcaccgggaggctcttgaacttcttcacaaattggtggatgagttgaaatctagccagtctgaaattacacaaagattcaaacctgaggatattgtggagtacctcaagccactatgtgggacagaccccatacttgttctagagttctcaatgcttgttcttgaaagctgtccatctcaaactatagacctctttctgtccggaaatattccagcagatatggtgagctcatatttgaagaagcattctccaaacatgcaagctaggtacttggagctcatgcttgcaatgaatgagaatgcagtatctggcaatttgcagaatgaaatggtgcacatctatctttctgaagtactcgattggcatgctgatttaagtgctcaacaaaaatgggatgagaaagatcattccccaacaaggaaaaaattattgactgccttagagagtatagcaggatacaatccagaggctttgctaaaacgtcttccaccagatgctttgtatgaagagcatgctatattgttggggaaaatgaaccgacatgaactggcattatctttgtatgttcttaagcttaatgctccagaattggcattgtcttattgtgatcgggtctatgagtctatgcatcagccatctgcaaaaaattccagcaacatataccttgtgcttttgcaaatttatttgaatcctcgaaggaccacagcaggtttcgaaaatagaattacaaatctattatccccacagaataagactattccaaaactcactcctacaccatccataaaaagcagaggccgagggtcaaagaaaattgctgcaatagagggtgcagaggacacaaaagttagtttaagcagcactgacagtggcaggagtgatggtgatgcagatgaatataatgatggtagtcctactatcatgcttgatgagatccttgatttgttgagccgcaggtgggatagaataaatggagctcaggcccttaaacttttaccaaaagagacaaaattacaggacctactttcatttcttggaccccttctgagaaaatctagtgaaatgtaccgaaattgttcggtgataaagagcttgagacaaagtgagaaccttcaggtgaaagatgaactctatagtcagaggaaagaagttgtgaagataactggtgatagcatgtgttctctgtgccataagaaaatagggacaagtgtttttgctgtctacccaaatggtagcactctcgtgcactttgtctgtttcagagattctcaaaatatgaaagcagtgggcaaagggtctcaattgaggaagcgattatgaagctgaaatgccataccaattggtggtccagttgtcttgttttagcgtgcttttacccacggtacctgttggtaggtgtggattatgatgaaagtggcaccgtaatttatcttcagaggtctctctttttctttttttgcttttttgcccagtcaattcgtgtgaaaagtgagatttgatatgtgaagagcgtgatgtgtctatctttttcttttttgtgatgtaaatattggcaaaacttgccacaagtaaaataagactacacgaaatttacatttttttttttttttagaaaatggcaagctatagtcatggag

SEQ ID NO: 106505 - DNA, 296 bp, Glycine max
  unsure (1)..(296): unsure at all n locations
  Clone ID: PAT_MRT3847_67190C.1
cagctcanattgcattctcatcctagagttttaaaaatggcagcaggctccttcatggctctctcttccccatccttggctggcaaggccgtgaagctgggcccatcaacccccgaattttgcaccatcaccatgacgaagaccgttacccagcaggcacccatcctgagcccaacgtaccgcccaaacccacgcaagttcttggccctcattcttggcgaacccccctcctacctcaactgcgagtttctggctatgaacgtggttacaacaaaacatcttattctagtgatgag

SEQ ID NO: 106506 - DNA, 1904 bp, Glycine max
  Clone ID: PAT_MRT3847_67191C.1
aaacaagggaaggcttgttttgagttgaaagctggttacatattatttaccatgaatagatacaaatagacattcacaaaccagtaatcacactgcactctcaaatctcaatatcaagtctccaacccaaccaaactccattgctctcaccaaaccatgaaaaactcacaagagaagaaacatgtcgcagtgtttgttttcccctttggaagccaccctgttcccctcttaaaccttgtgctcaagctagttcatgccactcccaataacttgaaattctcattcctaggcactgaacactccaacaaacctcttctctcaaaaccccacatcccagacaccatcaagttctatagtataagcgatggagtcccagagggtcatgtcccaggtggccacccagttgagagagtaaacttttttcttgaggctggtcctgagaacttgcaaaagggtatagacatggcagtggcagagactaaagagagtgtcacttgcatcatcgctgatgcttttgtcacaccttctctccttgtggctcaacacttgaacgttccatgcgttctagtttggcctcctttgtcatgttctctctctgcacattttcacaccgacttaatacgccagaaatatgataacaacagtgacaaaaacacccctttggatttcattcctgggttgtcaaagatgcgagttgaagacttgccagaagatgtgatcaacagtactgacagcgaagaggagacactgttttcaaagacactagcttcattgggaagtgtcttgccacaagctgaggcagtggttgtgaatttctttgaggaactagatccaccgttgttggttcatgacatgaggtcaaactgaaagagtcagaaaaccaacgtagagaaaactcttcagtgcctctaccacccttgcctccatcagacacagatgcaacagggtgcttgtcatggctggatcacaagcagaagcagaataatggtgttgggtcagtggcatatgttagctttgggacagtggtgaccccacctcctcatgagattgtggcagtggctgaagcattggaagcaagtggtgttccctttctttggtctctcaaggagcatctgaagggtgttctgccaagagggtttcttgagagaacaagtgagagtgggaaagttgtggcttgggccccacagactcaggttttgggacatggttctgtgggtgtgtttgtgacacactgcgggtgtaactcggtgtttgagagcatgtccaatggggtgcctatgatatgcaggcctttctttggggatcatgggttgactggaaggatggttgaggatgtttgggagattggtgtgagagtggaaggtggagtgttcaccaaagatgggttggtgaaatgcttgaggctggttctggtggaggaagaggggaaaaagatgaaggaaaatgcaatcaaggtgaaaaagacagttgtggatgcagcaggaccacaagggaaagcagcacaagatttcaacactttgctggaagtggtttctagatcttaattaattagtgagaaaaatgttttgaatatcaacttttttattggttgaagtttttagaaaactagaaaaaatgatgtgtttcatatcgtatttgatgatccaataagatgattttgtaatttttaatatatttcaaccaaccaataagagagtgtatatttcaattaatatgagtgtattagagaggatattattagtcgtggtggtcactttccgaaagtgtttggaatgttttatttttaatatccttttatccttgttttagtgctgtgaatgatatggcgaaaaataaatgtctcatgatcgttcattgctcggagcatttggtcagaaataaaaaatggagaaagttggattgta

SEQ ID NO: 106507 - DNA, 429 bp, Glycine max
  Clone ID: PAT_MRT3847_67192C.1
tttgttttggtgttgggagaaaccctaggaatgcaattgactcctctgagtaacatggttttataactaaggtggagagagtaatatgtgacattctaaattgccacacagatggagaggattcctacaaccaaactcccaaacacattctggatgaccataaccctaaccctaagcacctaacacccaaacctctcaaccttgtttataaggactcgtaactctgacccttgatgcaagctggatatccttggccattatggttacccttttagcatgaatcgtgctgaggctagtgttctttaccaacccaacaatgtatgccttaacagcctcctgaagcgcggaacacagctctgtttttgaaacgaaaataaggacttgaaatcttgcgcaatttgtctcacgagcctatataatggaagcttc

SEQ ID NO: 106508 - DNA, 324 bp, Glycine max
  Clone ID: PAT_MRT3847_67193C.1
agagggggaaccaaaccgggggtaatgaaaaagtaaaatataaataccgtttggcctttttacccgaaaaaatgtttttttttaccctgggggcttcaaaaaaaaaaccccaataaggcagaaattttacataaagttaagccagtttaaccaccgagggaaaactggggctctcaacatctcaattttaaaaacaatattttaaattccaccaagggccaaccctattttagcacaatacccaaaggggcccgtttaatttgaagccccgatcccatcattttcaggctttccaattgcgggtagcccaacccttctattttt

SEQ ID NO: 106509 - DNA, 497 bp, Glycine max
  unsure (1)..(497): unsure at all n locations
  Clone ID: PAT_MRT3847_67194C.1
gccatgccattctgctatttaacaacactggttgaagatcatcttgtatcatgttgcagaggttcttggttctcagcagatttctccattttccaagtctatcatgaatgagtatgctgataaactgcatgtgcaacctacatatgacaccgttcaggaacagctaggaggggtgcttcgtgtttttaaaacttctttagttttcaatggtacaagttacaccggtgatccagctagaacaaaaaaggaagctgagcagtcagccgcaaaggctgctattctttccattatgggtgattctacctcaggaactacactcattgagattattaagtcaaagtctacattttatgatgcaatcaaaggaaagggaccacctctgttacagcctagtgcagtgttatccacaacaaatacaggacagatctctgttacactgngtcatagagatcaggangtacagcttccgtgcttgattaataatatataataagaat

SEQ ID NO: 106510 - DNA, 393 bp, Glycine max
  Clone ID: PAT_MRT3847_67195C.1
tgccgaggtcgagttattccgctgccacgccgtaactcggaataggaataagctccagggctgccatgctcgtatcctggtacaagcattgacacaaagatggtgtcctgcaactgtgtgtagatccatactggcgtctgatataaggtcatcaaacagatcgtgagcaaggggggactcaaccactgggactgatctagtatgatatacgcccagagcatactcgacatctgggcgggacgacgtatactaatgagcgtccgcacccggtaccgaattgctgaccggcacctgcatgaggacaatgttcccctatagcgagttggatgatagcacccagtgagccttgccaatgacccaacctgtgtgactgagctatacgatcacgatctc

SEQ ID NO: 106511 - DNA, 181 bp, Glycine max
  Clone ID: PAT_MRT3847_67196C.1
gttcgcggagaccttggtttcatctttcatttgctctcctttctatgctaccttcgtgtcgtttccaaacgctgctgtcatctactccttacattgtacttattcgatgaacaatttcgatgcttccaagttctgtgtaattattgccaatttttggatgaaaatcctgttcacatatatc

SEQ ID NO: 106512 - DNA, 271 bp, Glycine max
  unsure (1)..(271): unsure at all n locations
  Clone ID: PAT_MRT3847_67197C.1
ataaataataaagaaaacaaaacaagaagaaggaaacgcgcaacgcaacacaaaaaaccacactttcaattgcatttctctctctttctcacaatttccactttccgggcaggttagnncgananncgnngnnccaangagcgancactnggcggcgngcgncgaccgncgcgcgcgcccggaccccggagagccggaggcgcagacggcgcaggcgccagccgaaccagcnccaccgccggccgccgnggangccgacgccgccgggagt

SEQ ID NO: 106513 - DNA, 290 bp, Glycine max
  Clone ID: PAT_MRT3847_67198C.1
gttgatcttctcagccctcatcatcaacagctaggcctgatggcgggtgcatagaaagtgacatggatataacaatttcttctagaccggtgtcaaaacctcaaaaatgaacttggggagggggtgggtttaggaggcacacacggcatggcagaggcaatggtagcaatagcaaaagttaccgtaggagcgcaaggctaaaaaagtcgattatctccgaaacttgaatgaaaacactgatgagtcagaagggcatctcatcctttggtctttggacaaacaaagttcac

SEQ ID NO: 106514 - DNA, 331 bp, Glycine max
  Clone ID: PAT_MRT3847_67199C.1
gtccccatatcttcttgttgacaaaaactgggtagtaaaggtatgtgattttggctcatcgcgagggaagcacagcagatttttttccttaccaaagtctgcggtgtgagagaaatgccctacctagagatgggatgaccgaccactattgcttctgctatcatggtcgaccgagttttagctggaggaggacggtattactctcatcctaaatgctgatatgtggttggatgagaggtccgctcactgaggagatcatagcaagctcactagttgggctggactgtccatgccttcctaatctcttatgttggtgtccagtgaaccacac

SEQ ID NO: 106515 - DNA, 690 bp, Glycine max
  unsure (1)..(690): unsure at all n locations
  Clone ID: PAT_MRT3847_6719C.1
atggnnccattaaaatatgtatataaatggtaaaaatattaaagaaacatacattatttttttgcaggatcaatccaataataagagagacttaaaataaatttaaaaataaaaaattttactttaaaagaaagagctatatgttggacttttttgtcaatatatttaacagccaacatatgtgacatttttatcacatgtgtagaaaaatataattatgaatttgaacaagctttgtttcaccctaggtattaatctataagggaataatctttcattgtgagcgggaattccctgtgaagtggttttggtgattgttgcatgtagtgttcttccagaggcatcatttcagagtgctctcttcacttccctttgctaaggttttttctcatgtccagctaaatatggtcctaaaatacctctaaggtgattagtaaaaattctacagattaagtttgaaaatgttgttctgataaatcaaatgattttgatcaatgaatgatgtcaaataatatgtattagtccttagatacctaataaaatgtagtagtttattagattttaatacatgctnntgacatcagatggtgaagttcatgagaatgtagncttnnntttgagtgaagaatttgagnnnacannngaagtcaagaaagnnntgacattnnntnccccnnnagnnntgtcaag

SEQ ID NO: 106516 - DNA, 953 bp, Glycine max
  Clone ID: PAT_MRT3847_671C.1
tccaaactcatatttggctgggggaagaccttttgtggggacggataacttgccaaggagagaggccgttcaagatagacattacccaatatattctgctcctgatgctttgtctgatcaccatcgaatgcggccatatcatggagacaagtttgaagcttcacgtgggccagtttcatctcgttactcttttgctggcccttcatttcaccgccaataacttattatgtgctttttttgaattccttgacttgtgttccttagtattagtatctttcaaattctggtgactgaaaaaaaaacttcataaaatcctacatacttgagcccttttggatctggaaaatcatttctgcctggtgagatttgaatgctggtcaatatgcagcagattgtcacttgaaaaattgttaacagttcatcactgtttgatgattgccagctctggaactgtagatgaggggccagtttgatatcaattggtgaatgcaggtttgaatatgcggttttgtggctagttaaaactgtgagaaatcctacatacttgagcccttctggatttggaaaatcatttctgcctggtgagatttcaatatggtcaatatgatgattggtagctctggaactttagatgagaaggctagtttgatatcaattgatgaatactggtttgaatatgcggttgtggttagttactgtatgctgctttaatggataggaagatagacaaccatcgtttcagttagtgcaaacaactcgtgttgttgtattttgtaggctggtaatttgggaaaaccatacatgaacaaataaatcccttacaaactcatgcatgcaattggataactcctggttttactgtaactgtcttaccttgtagactgaagggcttgttactgctccacatttttttttcattttttatttgtctataacttagttaactgtgaact

SEQ ID NO: 106517 - DNA, 112 bp, Glycine max
  Clone ID: PAT_MRT3847_67200C.1
ggcgagcagaaatcaaatctggatcaaacaatggtacaatgaggaagaatatgaatacagaatgaacatattaaagggagaaagctaacaattgaggggaaaagttgtaaat

SEQ ID NO: 106518 - DNA, 380 bp, Glycine max
  Clone ID: PAT_MRT3847_67201C.1
ttttttgagggtttttaaaaaaaaaaatttgaacaccaccttaacacgttttggttggttataaaaaaaaatccccccccggccaacaaaattttaaaattagcaggccgcacaaaattgttttgcttctacaaaggtgacgaacaaaatgggttttttatttttaaaaaaaaatattttttgactttgggaagctgaagggtttcaccccattaaagattgcccaaaaataaaaaaaagaaattaaagggcaaccctcccgttagggttcccattgggttgaaaaaactcaaggggtctttggaaaccgaaaaaaagcttggtccccaatccaccccttgcataaaaggtcaaacttgcttttttctttggtgggacct

SEQ ID NO: 106519 - DNA, 328 bp, Glycine max
  Clone ID: PAT_MRT3847_67202C.1
ctgtcgcatgagttggagccagacccgcacatactggagcgagcggcatagaccgcgcctgacggaatatgcaagcgctacactctctgatgagtccgacggcattaaaaaacaccagcgttcatgccttcttaacgaaccatctagtaccagatcatcacgactaatactaaccgaccaccttttgaaccttagactacgcgtatgaggtcgcatgctgcggagactgaggccccttgaggcatcctacacacgaccatatgaagccgatgaacaacgacgatgcttgccgagcgagaccgggttaaatggcgtagataccatatga

SEQ ID NO: 106520 - DNA, 1918 bp, Glycine max
  Clone ID: PAT_MRT3847_67203C.1
aacccacccctcacccgcgcgcctctccttcccgcagcctccagtactggctcacctcgcgcggtcggactcgcaccaacaccagcacttcaaagaagactgaatcaagcagaacttggcgttcgaacggtgggactcgcaccaacaccagcacttcaaagaagacagaatcaagcagaacttggagttggagagagagaattccgaccctaattgtaaaatggaggacgagacagagactatggtggagaagagggagataatcaacaacgtaatgtgtcttttgacagaccctgatggaactcctttgggtgctcctatgtacctacctcagaatgctggtcctcaacacctcatccagattgttaataagcttctaaacaatgaggagaaattgccgtattctttctatatatcagatgaggagctcctcgtgccacttgaaacatacttgttgaaaaacaaagcctcggtggagaaggcattgcctatagtttgtcaacctcaagctattttccggattcgtcctgtgaatcgctgtacggcaactatttctggtcatgctgaagctgtactaagtgttgccttcagtcctgatgggcgacaactggcaagtggttctggtgatactgctgttcgattttgggacttgaccactcagacaccattgtacacttgcacaggacacaagaactgggtcctttgtattgcatggtcaccagatggaaagtatcttgtaagtgggagcaagactggagaacttatttgttgggacccacaaactggaaagtcattaggcaatccactaatcggccacaagaaatggattactggtatctcttgggaacctgtccacctgaatgctccatgccgtcgctttgtaagtgccagcaaagatggggatgctcgtatatgggatgtttctttaaagaaatgtgttatgtgtctcagtggccacacacttgcaataacatgtgtaaaatggggtggagacggcgtgatttatactggctcgcaggattgtacaattaaagtctgggaaaccacacaagggaagctaatccgtgaattgaggggacatggccattgggttaattcgttggcattgagcactgagtatgttcttcgcactggagcttttgatcatactggaaaacagtattcatctccagaggaaatgaagaaggttgctcttgaaaggtatcaagcaatgagaggcaatgcccctgaaagattggtctctggatctgatgatttcactatgttcctttgggaacctttcatcaacaagcaccccaaaactcgcatgacaggtcatcagcagcttgtgaaccatgtctatttttcacctgatgggcaatgggtggcaagtgcatcttttgataaatctgtgaagttatggaatggcaccacagggaaatttgttactgccttccgtggtcatgttgggcctgtttaccagatcagctggtctgcggacagtagacttcttttaagcggcagcaaagattcaacacttaaggtttgggatattcgaactcgtaagttgaagcaagatcttcctggtcatgctgatgaagttttttctgtcgattggagtccagatggagagaaggtagcctctggtggtaaggataaagtgttgaagttgtggatgggctaggctaatttttggatgaatattgcatagggttcattagtatgaactcagaaatttttgggcattttgacccaggatgattttttgttgtccctgtcactatagtagtgtttaaatggagtattttaatttaagatggaagaaaattaagttgtgtctacttagttcttttcattttataaaattgtgtttggattgttatttgttaaattaaaactccatacatgaaaaataaatgtgaaaaggcttggaaatcta

SEQ ID NO: 106521 - DNA, 294 bp, Glycine max
  Clone ID: PAT_MRT3847_67204C.1
cactgagcatgcgtctagctgatctcgatcgaacctgtccaaggtccgtgtcacctataaacaccaagtaggacgtatgaccacatacgtaagtaatgaccgtgtacctgcaaagccgttgtggtacgcagccatagtgcgccttttgtaaattgcgttttgggtatgcggcacgaacgttgtacgcacaccattggtttgtgtgtgtaaccaatgtggtggtaggtacacggctccgttacgcctaacaacagtactatgcataaattggagccaaggaaccaccgtagctgg

SEQ ID NO: 106522 - DNA, 826 bp, Glycine max
  Clone ID: PAT_MRT3847_67205C.1
gtgaagttatggaatggcaccacagggaaatttgttgctgccttccgtggtcatgttgggcctgtttaccagatcagctggtctgcagacagtagacttctattaagtggcagcaaagattcaacacttaaggtttgggatattcggactcgtaagttgaagcaagatcttccaggccattctgatgaagttttttcggtcgattggagtccagatggagagaaggtagcctctggtggtaaggataaagtgttgaagttgtggatgggctaggctaatttttggatgaatattgggaatccaacgaagtgcaatctcaatggagttttgcggatgcatggatttcatggaaatcaatggttggtattatgtggatgcaaggtctttaaattatatagacagcatagaagatatgtttatgacttgtcagaaatattactctcatagcaattgagaatataggcactggaagaagttgctcaaagcgagtctcagaacagtggttgaaatgtttggaggcctatcacatgcttgcaagatgttttcttgtctgctttgaagtctttcttggtcttctcttccattaatagttgtaggtggtattgtttttcagtgacaacaatgactataatgggttgaactgtcatagggttcattggtatgaactcagaaatttttgggcagtttgacacacgatgattttttgttggccttgccactttagtagtagtgtttgaatggagtattttaatttgagatgtaagaaaaataagccgtgtccttttcattttataaaattgtgtttggattgttgaaaacttaaaaa

SEQ ID NO: 106523 - DNA, 1027 bp, Glycine max
  Clone ID: PAT_MRT3847_67206C.1
cttcttctttcagtatggcattgtttatcagctgggtattgcaggtggaaataatagtatagccgtttacttgctgtcttggatagtcatggttgtgcttgttgccatttatatcatcatggcatatgcccgggataaatttgctacaaaggagcacttatattatcgattagttcagcttcttgtgattgtagtcacagttcttgtacttttcctcctactggagttcgcccatttaaaatttcttgatcttctgtcaagcttcttggcattcgttccaacaggatggggaatgatttcaatcgccctggtgcttaggccttttctgcagacaactaaagtgtgggagactgttgtttccttggcccgtctatatgatttgctgtttggggttattgttatggctccaatggcaatgctatcatggttacctggatttcaatcaatgcaaactaggattctctttaatgaagctttcagcaggggtctccagatatctcgaatagttagtggcaagaagtctgtttaagatggtaattggaggtagtagtatcaacttgatagtggatcagtacaagttaccagtttctaacacaaggttgaggaccactaatggattcaaagctcgttaaattgccatggcaaatggatgcctacaattaaatccatgttattcaatgtgaaaacgtaaaggtttagctttctctcagtgacactggtggctcaaattttggtatttaattttaggttattcccattgacataatctatcaaggaagaagtctctgatttgtcttgtaattttcctgctacacaggttgtgaatctctagtttagtattggaggattatcagcagatgttttgcctgtgtctgtcattgacaatcgacttaatggtcttcctcgattatcagatgttttgcctgtgtctgtcattgacaattgacttaatgtacatcctctgttcatatgtagtgcaacctactctaaccaacacgacattgccactgaatcaacgttattttag

SEQ ID NO: 106524 - DNA, 156 bp, Glycine max
  unsure (1)..(156): unsure at all n locations
  Clone ID: PAT_MRT3847_67207C.1
tctaacnggtgggggaagcaaaaatttaaattgtctgataaattagcctcctcagcttaaacgctctatccaaatacacgtctaatgcgagatacaaaatcatttgctgattgcaatgaacaagactttgaaaaattggaagcagaacggggagga

SEQ ID NO: 106525 - DNA, 855 bp, Glycine max
  unsure (1)..(855): unsure at all n locations
  Clone ID: PAT_MRT3847_67208C.1
cacgaaaccctcacccgcgcgcctctccttcccgcagcctccattaccggcgcatcctgcgtctccggcgccattgaaaccctaataatctgctaaagcatcaaactcagtcgtcgttgctgtcgaactcgaaccagtgagactcgcacgagcgaacaccagtgctgcaaagaagtgagaagcaacacccactagagaaaaaaaggaaaaaccctaattgtaaaatggaggctgagacagagactatggtggagaagagggagataatcaacaatgtgatgtgccttttgacagacccagatggaactccttttggtgctcctatgtacctacctcagaatgctggtcctcaacacctcaatcagattgttaataagcttctaaacaatgaggagaaattgccgtatgctttctatatatcagatgaggagctccttgtgccacttgaaacatacttgcagaaaaacaaagtctcggtggagaaggcattgcctatagtttgtcaacctcaagctattttccggattcgtcctgtgaatcgctgtacggctactatttctggtcatgctgaagctgtactaagtgttgccttcagtcctgatgggcaacaactggcaagtggttctggtgataccactgttcgattttgggacttgaccactcagacaccattgtacacttgcacaggtcacaagaactgggtcctttgtattgcatggtcaccagatggaaagtatcttgtaagtgggagcaagactggagaacttatttttgtgggacccacanactgggaaagtcattagggcatccactaaatcggcacagaaatggattactggtatctcttgggaacct

SEQ ID NO: 106526 - DNA, 460 bp, Glycine max
  Clone ID: PAT_MRT3847_67209C.1
cggaaaccctaaacgagaatggtccctcaacgacttcgagatcggaaagcctctcggaaaaggcaaattcggcagagtctacgtcgccagagaagtcaagagtaaattcgtggttgcattgaaggttatttttaaggaacagcttgagaagtacagaattcaccaccagctgaggagggagatggagattcagttcagcctgcagcaccagaacgtgcttcgtctctacggttggtttcatgactcggagcgcgtctatttgattctcgaatatgctcacaatggggagctttacaaggagcttagcaaaaaagggcattttaatgagaagcaggctgcaacgtatattttaagcctcacaaaggcattggcatattgtcatgagaagcatgttatccacagggatatcaagcctgaaaatttgttgcttgaccatgagggtcgtcttaagattgcagac

SEQ ID NO: 106527 - DNA, 2155 bp, Glycine max
  Clone ID: PAT_MRT3847_6720C.1
atgacgtgtttgttgccgcaccttccttccctgcttcttgttcaactgacatgacacccttcactcacactcacaacctcaacctccttcctaacgttgcttttcaattaacaaagcaagtacattgttgctcgctactaaccactagaatgtcttgattattgccgcacttcaactgccacctcgacacctatcaggacttggccctatgctcctcctacccatctatctataacaagacgcaatttgtgttcctaggcacactctctgttgtaacgtttaactcataaaaattttcgaagtgatcaactggttttcttaggtttgcatcatgttcatgcgattactacgagtaaaaaggtttctgaagtcccccgtcacttacatgcaaaggtcgcatggagatattttgcagaagaagcacatacatgagctgattctatggatgtctttaattcgacctactctcattcatcctttaatgcggatgcactgcttacaaatgatgatgctgtaatagttgctcctgcgcctgctgcagtagctgaggctaaatccaacgtgaaggttgcaaaggatgaagtttttctagaaaaaaagaaacatcctgaagaagcagaagatgatgcagcagtttcttccaaatctgatggagtacttctcatgtaattttaacacctgaaagcagtcgaagatggtgtagaagaagaatcgatcgatgctgaagcttaaacactggaaggtgatgactgaagccgcagcgaaaacgaatccgatacagatccttaagaagttcatgaagaaggtccgagaagacagctttcagacagtatagccaaaagagatgcaggtcgaaaagaggaaaattggtatagatgatgaacagaagaagagcctgcaagaaatatggcagctgttgggtgtgagtacggagagagttggaagaatcgagttatgcacttttaagaagcttcagaacaacaacggtacttaagaatagcaactatagtttctatgattattataccaactgaagaaattaagttgtgcaatgtaattcaggaccttctaaagcttgaaaaaatccaggaggatcttgcagaaagatttggcagtcagcccacgtttgctcaatgggcagcagtggcaggggtagatcagaaaacacttaggaaacgtttaaattatggtatattttgcaaagacaaaatgattaaaagcaatatacgacttgtcatatccattgctaagaattatcagggatctgggatgaatctgcaagatcttgtccaggaaggatgcagaggccttgtaaaaggtgcagagaagtttgatggtaccaagggttttaaattctctacctatgctcattggtggattaaacaggctgttcggaaatcactttctgatcagtcaagaactattcgcttgccattccacatggtggaggcgacttacagagtgaaggaggccagaaaacaattgtatagtgaaaatggaagacagcctgatgatgaagaagttgctgaagcaactgggttgtcaatgaagaggcttaatgctgtacttatgaccccaaaagctcccagatctctggaacaaaagattgggatcaaccagaatcttaaaccctcagaagtaatttccgatcctgatgccgaaacagctgaagaacagctccttaagcagttcatgaagaaggacctagaagaggctctggacagtctcaatgcaagagagaggcaggtggtaagatggagatttggtatggatgatggaaggacgaagaccctgcaagagataggggagatgttgggtgtgagtagggagagaattaggcaaatcgagtcaagtgcttttaagaagcttaagaacaagaagagaaccaatcatttgcagcagtatttggtttcataaccctaccaaatattgatattgaaccattgtatgagtttgcttatttgatacttgtgaggttctaatctctgttgatcttcgtctgtatgttcttcctccattttttccccccattctccaaaagagaagagaacattatttttagtgtactaggaaatggatgtacacacaatggaataacttgactaggagtccatcatttttaacgtacgtgaatgcgaaaattgtttcagcaaaa

SEQ ID NO: 106528 - DNA, 228 bp, Glycine max
  Clone ID: PAT_MRT3847_67210C.1
gatggccaatggttctaagtggtttaccaggcatttcttacacacgccacaaccagggacaaaatggtccacttatattaaaagggtaaaagggtatttaattttggcgcaccttaaaaatattggaaaataccttttattcctttcggggaacctggaaactggcaaaaatgttgtgtgccacggggcacacccaattaatctaggaggtttgggtttggcccaaca

SEQ ID NO: 106529 - DNA, 433 bp, Glycine max
  unsure (1)..(433): unsure at all n locations
  Clone ID: PAT_MRT3847_67211C.1
acgcgcacgcgttcggtaaaataacaataacagaggaagacagacaattacacagttgcaatgggagtagcagctacactctagagaaatggctactctatcaagctgcatcgctacgccgaagaatcccaatacccactgactctcaggttcctcattgacgatggacagatgcttcttgaacatcagctccagagaacactntccaggttcctctttaaagactaaagcaacacgtaacccagcacttggtattccagcaagtggtgaaggttgaagaaccaggtagtgaagtggctttggtggtgggtttggactgggaagactaattgctggagcattgggatggccatatgcaccttaaattagcaagggactaactggagctgacaataaagacttaatgaggaaactttcaaaattcatgtatgat

SEQ ID NO: 106530 - DNA, 127 bp, Glycine max
  Clone ID: PAT_MRT3847_67212C.1
ttgctccacatgcaacccaatgttgggtatgaaataatctttgccgaacatcatagcccacccaccttcttttaacagaaaatttgctcatcattgtgcgtttattgccaatgcacccattcttatt

SEQ ID NO: 106531 - DNA, 599 bp, Glycine max
  Clone ID: PAT_MRT3847_67213C.1
attccatagtttagataaagggttgctatatagcaaatcaaaacaacatatccagatgagcaaccacaatcatcaacaacagccttcaactgctgctcctgccccacaagagtctccaacaaaggacaaggaccttgacactcgatcggcatgcccgccgccaggcggtgcagcacagttcgttcaaccccctcttactcccactgaagaaatcggttgtcttgaaaaatgtttaattgatctttgttgctgttgcaaacttgacttttgctgttaagtttcgaagagacgtatttggttgctgaatcaaagcattctagttggcatcaacagagtccttgtctatatgttctgtcaattctatactagaaaattaacatttgtttagatttttcttcagacgagtgctctttgaggatgcgaaaaatgtctcagtaaaaattatgacaattgttgtcaattctgtatcttaaatattaatgcttaattcacgtacaggtttttgtaactttgaatttgaagtgattagagctctaggttctttatgtttgatcttgaatcatacagtatacaataactaataactaaagttttagtac

SEQ ID NO: 106532 - DNA, 371 bp, Glycine max
  Clone ID: PAT_MRT3847_67214C.1
cactccttcttttcaatttacctttttatttcctctttgtccttacactcttttactttgtaatggttattataaaacccattcttacatcttcaacattatccttcaaatcctcaaaaatttaagacttacacactattaagtcataacattcaatttcaaaaacacacttcttataattacattaaatttttcaaacaattttatttataaaagattcctccaaaatgtattttatcttcattactattaaaaatataccatttataacataatcaatatccttataacttattaacttaaacaattctttataccataatttttcaatagattttattaaattattttcttcatgcattttacaaaac

SEQ ID NO: 106533 - DNA, 421 bp, Glycine max
  Clone ID: PAT_MRT3847_67215C.1
cgatgagatagctactaagatgggagattaatattgaccagctttttctcaacctgaaatatactgtcccctttcgattctgaagacacagaccggctgcgtcacccacacaccgaaacacattttgtgcattaatacaccaccacccctgtcagtatcgcacagtatatatcatatgagagatccctattcacatatgggctccccggaaaatagtctaaagttgttgtcctccaaagatatctatttcctaatcttacatttgcaaccttataagcctaaaaattctgaaatttatttgtgagtgaaccaaacttccataccacatgtagaccatttacggggcatatattatcgttttcatatccatcccaagagcatgttgtatgtgccgtgtagccctctttgaatatttacatta

SEQ ID NO: 106534 - DNA, 291 bp, Glycine max
  unsure (1)..(291): unsure at all n locations
  Clone ID: PAT_MRT3847_67216C.1
cccacacgtncggtaaaactttgtacacaatatggagtgctacacaaggccaaacatgagtgagcatcacctctcaacagaggaagaagccaccatagattcacagaccagatagtacttttattgagtcacaccacatctccacacatagcctcaacgaagtgactattcagctcaatatgtcgatgctttctacaatgcccatcactcttctttaactataccagaattaacacaattgcaactcctccagaatgatccccaagagaagaaattggtgtacaatggaag

SEQ ID NO: 106535 - DNA, 473 bp, Glycine max
  Clone ID: PAT_MRT3847_67217C.1
gtaagtttatgtgagaagggataagaagcaaactgagattcaataggcctgaattattagtgttagtgtagtaattgtgaatttggtcagctgcttaggcagttatttgagtagctatggatatcaattattatttgttgtatagtgtgtctgtctttatgcagttaggcagttatagaatggtttgctagttagtgtgcgatggcagcgatgcattatatgtatggggcttggggtggttatattcattcgatagttttactaattgctatatcttgaaggaggagactccttgtaagaggaataccctgtgttgtctatgtcttgtgcagtaattctggcctaaaaactagaatgtttccattaataaatggataaatcagtatgcttatttctgatttaacagtctctctttacagaatcagtagcttcagggtttcattactttcattcaacttgtagtcatttataat

SEQ ID NO: 106536 - DNA, 384 bp, Glycine max
  Clone ID: PAT_MRT3847_67218C.1
accagctcactagtctcgtacgcccttgtcgtcctcttttgatgcttgatcggactttaattatatgaacttattcaagttaatatattcttgcgagtcacatttttcacgctggtttccctaaccggggggttaaaaaacccaacacccattagagctgtggttatcaaaaaaactttggaatgatacctgacttacattattatcagggacgccacaggaggaataactcaatgaaaattaagcctcggtgggtatgagcagtcaggccttcggatgataaccttgtctgccttgcacccaactctaatgcattgttcagtgggcttatgcttaaccaatggtgaaagaaatcctgcaaccatagcatcccgtgtaccattt

SEQ ID NO: 106537 - DNA, 157 bp, Glycine max
  Clone ID: PAT_MRT3847_67219C.1
cgggatgaacgtggcactgcccccgaacaagaggcatagacatagcaccgtcagtagcgtcacgtgcttgaaaatgcgcccgcagccgcactatgtgaactcaatgctgaacgtggacgacagcaagcaacagcgaaaccaccgtgtgctatcagac

SEQ ID NO: 106538 - DNA, 643 bp, Glycine max
  Clone ID: PAT_MRT3847_6721C.1
tccatagcctcgctcaagctgtgcgtcctctatcactagaattaacacacatttacctccgaaatatggttgcttctcactgacgaaccaaaatgactttaaagactacctcatcccacgcattcaaggcaaacattcctcaatacaacgttgggttctacacttcaatactagaagaaagcacctgcagaaaaggacttgactctcatatctagcaaagaggagaaggccccactaatcctaagctcacggcccatgctgaaaagctttttgatttggcgcgtgactcagctggacaacttaaagcaagtgcaacagggtcgactgatgccgcacttggctctgttcatgcccaaaaaccagtcactgatcctcattccgaggcggtaaaaaaatcactgctgaaaacaataaaggcagcacttggggacaaatggaatgacaagttgacccgtgcttgggaagtaccctacgatgaattggcagcacctattaacaaggcataattagtatctattgcagtaaagtgtaataaataaatcttgtttcactataaaacttgttactattagacaagttcctgatacaaatgttggttaaaataagtgaattatatggtattggataaaaatcttaagttaac

SEQ ID NO: 106539 - DNA, 633 bp, Glycine max
  Clone ID: PAT_MRT3847_67220C.1
tttttatcagcaaagataaaactatttatatattagagaagtaccagaggtactaaatacagagttagacaccataaatatggttcctcaatcaggcagcataagtctgattaggaaccaaaatatgggaagaaaatacatgtgatatgatcccaaaaaacacccctactactgcaaaaaatgatgtttgaagttactggaccattgattgaaatgaatagttaaaatccttttccaaattatgaaagccaagtccacattaagaaagtggcgtcttcaaccaatttgtttccatcaaaagtcgctccagagaacagaattcggtttcgaagctgccaagtagaccaagtgatagccaaccaccagtattgccacctcctattccttctaccatcttcttgcaaaaatgagtactgcatgaatagctgttttgtactcaaaggcatagcacctttgagatttatccaagacatagaatcccaccataaaggttggatcttactgcagtggaaaaaagggggaagatcttctcatcttcacaaagacaattaatagattgactgttcctgagtgatttgagtgcttctagactcacaaaccttttctgatctattcataacgaacatttaattt

SEQ ID NO: 106540 - DNA, 311 bp, Glycine max
  Clone ID: PAT_MRT3847_67221C.1
cgattctcccgaaattaaggaaaaacaaacctttgtggaaattctttttccctttatatttaccttctttgtttatcaaaatcttctaaatagagttattctcaaaaaaattaatcatttaacattaacaagatacagaccacaatttttctccaagaacaacttttagtgcaaaacttttatctattccactaccaccaaaaaagttacaaacaaaagtcttttttccttaaaaaggtcattaatttttatataaaatattatttcttcccatgaccattttatattttgtatataaagaaatttttttt

SEQ ID NO: 106541 - DNA, 331 bp, Glycine max
  Clone ID: PAT_MRT3847_67222C.1
agatacattgtgtcactggcgatagatcgtgtcctagaccaatcttattaaactctctgcgatggacgatctcaaaggggctattttcttgggatgggagcggatgcgactcagcattgatcgtatcgaagcaatgcataaagcgaactcgattcatcattcaaccacgaggcctccttctcataatactaactcatcaattttcttgattctcgcattatctggttccaatcgagttaaagacaaagaccaagacctcgaaattacatatagagcatggttgcatgtagatatcgaacgacagacgctatgcaagattctcattggatta

SEQ ID NO: 106542 - DNA, 208 bp, Glycine max
  Clone ID: PAT_MRT3847_67223C.1
tccacgcgtccgcaaacttcttgtattatatccactgatcaactttcacaggctcgaagggtgtataacaaataggtggcatacaatactctaccatgaatcataaatccaattactaacctagagcatgcaccaatccatataacatgtctcttatatctgataactactttttaatcgaatcataattaaaatcaaaatttctatt

SEQ ID NO: 106543 - DNA, 262 bp, Glycine max
  unsure (1)..(262): unsure at all n locations
  Clone ID: PAT_MRT3847_67224C.1
gtgagcctcactcatctcaacttgtctggnacgtantctgaaggggatattcctngcccanntttctcancctttnccaaattagtctcactttcatctcnccatataatgggttaaagtggaaggaanacanttggaagagattgctccaaaatgnaacagttttaagggngcttgttcttggatggaaatgatatatcttncatttcnatcaggacactcaatntgtctcctcttgggttactcttagtctaggacaaac

SEQ ID NO: 106544 - DNA, 559 bp, Glycine max
  Clone ID: PAT_MRT3847_67225C.1
gcactcaaatcttggttattattatttatgaataacccatcaaattttgtctaatacattttacaaaatgacaaagtctaatcatacactacactaaataaagtacatacttactcccttgtatctattagatcatgaaaatactaataaaagcaacaaaatgagtgtctttttttatatcatatattttctgtattctcaaatttagcagatgacacagccgctaggattctcttcgtaacttgtgacatagtaactttgactatactgtggtgtcatccgataataaaggggataggattcatggtgcttgagaggaacaagtacttttgctggctcctccttttctgtctccttctcctcttttgctggtccaactgaaactatttcagtgcgacaacactttcgtagcttggacactgcactcactggatcaatgtcccccactacgatcattttcatatctttcatgtccacagaaactgattcaacccctgaaaggccagatgctgtcttcatagctttttgcttggttctatcaccatgtaagtccaccttt

SEQ ID NO: 106545 - DNA, 3575 bp, Glycine max
  Clone ID: PAT_MRT3847_67226C.1
aaggctggggatttgatacgtaagtggattgtccatccattatcatttatcaatctgcactctgcactctgcactgagaagagaagcagtgatggaaagggcggcactggttcgttgtctgccgtgctcttctgtgttgtgcagaagatatttacactctcactcacacttgtgtcgtccctcttcctctattagtattattccctctctctcccttccaaccataaggcctctctgtctgccccgccgccgctcctcctcctcctccagattgcttcccctttacttccgtaccaccatcaacaggaaacacttctcttctctcgccccgagagctgttctctccccttctccttcttcaggttttgctgaggttaatgatgaagttgcccttaaattggggtttgagaaagtttccgaggaattcattccagaatgcaaatcaaaagctgttcttttcaggcacatcaagaccggggctcaagtcatgtctgtttccaacgacgacgacaataaagtctttggaattgttttccgcactcctccgaaagactccactggtatccctcacattctggagcatagcgtattatgcggctcacgaaaataccctctcaaagagccttttgttgaattgttgaaaggaagcttgcacactttccttaatgcgttcacctatcccgataggacatgttacccagttgcttccacaaatgccaaggatttctataatttggttgatgtctacctggatgcggttttctttcccagatgtgtcgaggactttcagatttttcaacaggaaggctggcactttgagctcaacgatccttccgaagacatcacttataaaggtgtcgtgttcaatgagatgaagggtgtctactctcaaccggataatatacttgggcgagctgctcaacaggctcttttcccagacaccacctatggtgttgacagtggaggtgatcctcgagttattcccaagttgacttttgaggaatttaaggaatttcaccgcaagtattaccatcctagcaattcccgcatatggttttatggagatgatgatccaaatgagcgcctccgcatcctaagtgaatatttagacttgtttgattctagtttggcctctcatgaatcaagggttgaaccacagacactattttcaaagccagtccggattgttgagacatatcctgctggtgaagggggtgatttgaagaagaagcacatggtctgtcttaactggttgctctctgataagcccttagacctggaaactgagctaacactaggatttttgaatcaccttctgttgggcacccctgcttcaccactgaggaaaatattgctagaaagtagactgggcgatgccattgttggtggtggggttgaagatgaactactccagcctcaatttagcattggaatgaagggtgtttctgaagatgatattcataaggtagaagagctggtcacaagtacacttaaaaagttggcagaggaaggttttgatacagatgccattgaggcttctatgaatacaattgaattttctctgagagagaacaacactgggtcatttcctcgtgggttgtctctcatgctccagtccattggtaaatggatttatgatatgaatccctttgagccactgaagtatgagaagcctcttcaagacctaaaatctagaatagcaaaggagggctctaaatctgtgttttctcctctaatagagaaattcatcttgaacaaccctcatcaagttaccgtggaaatgcagcctgatcctgaaaaagctgctcgtgatgaagtcgcagagaaacagatattgcagaaagttaaagctagtatgacaacagaagatctagcagagttggcccgtgctactcatgagcttcggcttaagcaggagactcctgacccacctgaagctttgaaaactgttcctagcctttctctacaagatattcctaaagaacctattcgtgttcccactgaggttggggatatcaatggagtaaaagttttgcagcatgatctcttcaccaatgatgtcctttacactgaaatagtattcaacatgaaatcattgaagcaagagcttcttccattggtgccactgttttgccaatcattgttggagatgggaacaaaggacctgacttttgtccaattaaaccaattaattggaagaaaaactggaggaatatcagtttatccattcacatcatcagtgcggggcaaggaagatccatgtagtcacatggttattcgaggcaaagccatggctggacatattgaagacctttatgacttggttaattctgttcttcaagatgtccaatttacagatcaacagcgtttcaaacaatttgtttcccagagtagagcaagaatggagaaccggttaagaggaagtggtcacggaattgcagctgcaaggatggatgcaaaactaaatgcagcaggttggatgtcagaaaagatgggaggtctcagttaccttgaattcctccgaacacttgaagagagagttgatcaagattgggccgatatctcatcatctcttgaggagatccgcaaatctatattttccaagcaaggctgcttgataaatgtcactgctgataggaaaaaccttgcaaagacagaaaaagttctgagcaaatttgttgatctgcttcctactagctctcccattgcaacaactacttggaatgttagacttccattgacaaatgaagctatcgtgattcctactcaggttaattacattggaaaagcagccaacatttatgatactggttatcggcttaatgggagtgcatatgttatttccaaatacattagcaatacatggttgtgggatcgtgtacgtgttagtggtggagcttatggaggtttctgtgattttgatactcactcgggagtgttctccttcttatcttatcgtgatcccaatttgctgaagacacttgatgtatatgatggaactggtgacttcttaagagaactacaaatagatgacgacactttaacaaaagccataattggaaccattggggatgtagatgcgtatcaacttcctgatgccaaaggttatagtagtatgttgcggtacttactgggtatcacagaggaagaaaggcaaaggagacgtgaagagatattatctactagtttgaaggacttcaaaatttttatggatgctatggaagcagttaaggataaaggggttgtggttgcagtggcatctccagaggatgtagatacggccaacaaggaccgtcccgacttctttcaagtgaagaaagccctttagtttcagtatctattccccgcatggatttgaaattgtatcttttcttaaaatttcatacatcgaaacaaatgtttccttgattatttgtttaaataggttaactggctggagctagatacgagaatttattattactttcgtccctggaatatttttttaactaattcaaatcgtttgagaaagttggttattttagttaataacattaaatgttaacaatttgtattattttttcaaaattattttt

SEQ ID NO: 106546 - DNA, 497 bp, Glycine max
  unsure (1)..(497): unsure at all n locations
  Clone ID: PAT_MRT3847_67227C.1
gttgcttgaagatggcgcccccggcgctcacaatgctgaaaacctcagcgcttatgatttgggcnttactcgccagcccgcagtttttgattgccggtggtgtttgcctcacagccacgatcgttatgttcggcggctacaagattgtcaagcagctacaacagccttcgcgtgctctgcgtgaagaagtattcgaagaacaatccgaccccagacaaatggacgagatgattgaattcaacaccgactgcctcaactccgtggagatgtggcgacgaggtgtagcagacgcagaggccgagagcgttgcaaccgtggacggcgagttcatcacgcccagggctgccgcaatgtccggcatcgacataaccaccgcccgcatgttccgggacccccgcttcaagttcgacgatgatgattccgctgcatcttcccgccggtcccaccgttcccgccattctcgatctacgcacagtcacagccatgccccaaccaaa

SEQ ID NO: 106547 - DNA, 1494 bp, Glycine max
  Clone ID: PAT_MRT3847_67228C.1
gttacaatggtgtggtgactaataatgatgttctgccgatggcagacagttcagagtcaactgctgaacagcaaattatgcggtctaattccattgaagcatctttgaataatgaaacatcagatagatccaagtccccggttgattcaacggaaccaaataaagctcatggtaggatttcatcagcacatagtaacaatactgagaaagaccataaaaaatctacatctcaggctctttattacaaaggtgttggttatcacatggtaaactgtggcttaatattgctgaagatgttgtcggagtacattgatatgaacaaccttttgccaacactatcttcagaagttgttcaccgtgtagtagaaatcttgaagtttttcaacacaagaacatgccaacttgtgcttggggctggtgctatgcaggtgtctggtttgaagtccatcacgtctaaacacctggcgttggcaagtcaagtcattagttttgtacatgctattattccagaaagtcggaagtttctttttcttaaagtacctgagactagaaaaacactattgctttctgagatcgatcgggttgctcaggattataaagtccacagagatgaaatacatagtaaattagttcaaataatgcgagaaagattactggtacatttacgtggcttgcctcaaattgttgagagttggaatagacctgaggatgctgaccctcagcctagtcaatttgctcggtcccttacaaaggaagttggataccttcaacgtgttctatctcgaactttgaatgaagatgatgttcaagcaattttcagtcaagtggtcgttatatttcactcacaaatttctgaagcattttcaagatttgatataagcactcctcaagcacagaataggctatatcgagatgtcaaacatattcttcaatgcatacgattattgccattgggtgatttgagtaaatctgataccccaaactggggtcagctggatgaattcttggtgaaaagatttggaaatgatgctgttcagtaaactgtattgtaaagtagcaattcaattccttccgtgggaaggctaacatactttggaagatatgggggtgatttaaaccttcttcactctgcattttcgtgtaacactaaattgaggcctttggttggtctgtggtagatatacaaggtaatgtatcatttctgagcattgtgcagccgtggttggtcatttaacaagttttgtagcagtcgatgtcgatattcaaattcttggtttgtctccataattgtaatgttaagtcgaaaatatatatgatttagcgaatgaattaagttttgtcccccccaccccaatctatctatccctttgcttcttcagccatggctatcgatgcatcaatatgtacatgattcgtgaaatctatggtgatattaccgatttgtgtgttctattcaagtaaaaaaaaaaaaaaaaaaaaaaaaaaaaaaaaaaa

SEQ ID NO: 106548 - DNA, 1161 bp, Glycine max
  Clone ID: PAT_MRT3847_67229C.1
tgacgtctgcagcaacaactttcacttggccaatatgcttggcaaccaaaaacaaattaaactggaagagctgcctctatttgaatttgaaatgctagcaactgctacaaataactttcacttggccaatatgcttggcaagggaggttttggtccagtatacaaggggcaattggataacggacaagaaattgctgtaaaaagactttcaaaagcatctggacaaggattggaagaatttatgaatgaagtagtagtgatttctaaacttcaacatcgcaatcttgtaagacttcttggttgttgtatagaacgagacgaacagatgttggtatatgagtttatgccaaataaaagtttggattcgtttctctttgatccactccaaaggaaaatactagattggaaaaaacgcttcaacataattgaaggaatagctcgaggagtactttatcttcatcgagactcaagactaaggattatacatagagatcttaaagcaagcaacatcttactagatgatgagatgaatcccaaaatatcagactttggtttagctagaattgttagaggcggcgatgatgatgaagctaacacgaaaagggttgttggaacttatggttatatgccgcctgagtatgcaatggagggaattttctcagaaaaatcggatgtttatagctttggagtgttattgctagaaattgtaagcggacgaagaaacaccagcttttataacaatgagcaatcacttagccttgttggatatgcatggaaactatggaatgaagacaacattatgtctataatagatcctgagatacatgatccaatgttcgaaaagagtatattgaggtgcatacatataggacttctatgtgtgcaagaacttacaaaagaaagacccacaatatccactgtggttttgatgctcataagtgagattacacatcttcctcctccaagacaagttgcatttgttcagaaacaaaattgtcaaagttcagagtcttctcagaaaagccaatttaactcaaacaacgatgtaactataagtgaaattcaaggtagataacaacatgaatcgacactgccattgttaacaataacttgtgcttaatatataattattctctgctaaaccccctggtaccatgcact

SEQ ID NO: 106549 - DNA, 581 bp, Glycine max
  Clone ID: PAT_MRT3847_6722C.1
ctttttttttttttttttttttttttttttttttttttttttttttttttttttttttttttttttttttttttttcaaaaaatccaaccccagggggacaaggggaaaggtcctaattaaattcagggggaccccaaaacccaccccccacaaaattccttggggaaaacaaacccggggccctttctttttcaacccaaagggccaacgaattaattacttcagggggccaaacttttcaccaaaaaaaaaaattattaccaaagggggaggggcggcaaaaaggagccccaggaaaaaacccccggggaatttgggggccccccggagccccggccttaacgggtaaaaaagggggtcaaaaagcggcttaaagggccgggaaaaaactgggggggggccccccccaaaggcccccaaacaaagaatcccccccaaaaaaattaagggccccacaaataagttaaccccctttttcacccccacagggggcccattatcccccattttggcccccacccaaaaaaaaaatcccctggggagggggggggggccccatttgtaaacggtggggtcccgg

SEQ ID NO: 106550 - DNA, 492 bp, Glycine max
  Clone ID: PAT_MRT3847_67230C.1
ttttacaaataaaatatttatctatataaatacaaataaagttcctttgttaaacattaagacttctattttaacattactatttatgatgaattggtgtacttttcaattcataacaaataatcatttatacattatattcgatttgtcatttaagttcttctaaagacataatcaacaattcaatcattattatagttataccatctttgatcatggtcttcatagcatatgatggatgaccaaaaatcacgtgtgatgagtgaggaacaccctacacatgttcaactatcataacaccctttttggtagatggacatgtgacattgaatcatatttgatgtagccaaagagcattgagacgtcctaaaaaagaggtctctgatctatgtcggttacatatggcacccaccaaacatcgcttgtttgtagtatatccaacacaatgcaaattagggacatgtcacctgcatattgatacgtacccatcaa

SEQ ID NO: 106551 - DNA, 290 bp, Glycine max
  Clone ID: PAT_MRT3847_67231C.1
ctgcaagcaaacagtctgttttcataaggtcccgctcttgtttgacaggaccagaccactgggttttacaacacacactgccagaagcgttaaacccatcaggcttcagatgcatattattgcattcgagggatatttctggggcaagatgggctctttatatgacaaagcatgaaggggtcatggataaaaggtaacaactatttgaacttgttgtgaacatgaattgaagcgctctaacatatcaatgtgcacgggttctcagtacttcaaattccctttctgtgggg

SEQ ID NO: 106552 - DNA, 130 bp, Glycine max
  Clone ID: PAT_MRT3847_67232C.1
gtgtttaaggttcagacttgcgagcattctccccccggggcccatagaatttgatttctcataaggtgccagcggggtcctaaaagcaacatcctgctgatacctataacgggatggcttatgagttgag

SEQ ID NO: 106553 - DNA, 260 bp, Glycine max
  unsure (1)..(260): unsure at all n locations
  Clone ID: PAT_MRT3847_67233C.1
gnatttcgatatgcaagantgatcttgtccctggaatcgnaaaaatgtgattacctgctatgngatgaaattctatcattcatgnatttgcagaanatttcgatatgcangaatgnccctgtgccctgaaatcgaanaaatgtgattggctcnatgagatgncttcctatantcatgcatctgcnaaatgtnagtatgccngagtgacccggnnacnggaattncccaantggngngtgcctcaccngagannaaatnnc

SEQ ID NO: 106554 - DNA, 705 bp, Glycine max
  unsure (1)..(705): unsure at all n locations
  Clone ID: PAT_MRT3847_67234C.1
ttgcagcaatattagcgaaaaaacatgaccttagaaaaatgagngttccattacaataatgaaaaggggaatatcaatatagaaacactaaaaacaaagtaaactgatgtggtgactgttcctgtagctagatcgtgtctcttagaggaaggagatcatcgatgcacgcaggttcccctgcattcttcaagccgaacggcataaccttgtagcaatagttgaaactaggaatgatgaggtgtttcgtagcattgtttcaaaaggtgaattgcgggtcgaaatgcagagctcaaaggaacagcagatgcaactcttaaatgttgtgcattggcattgactggtttggataaagttatagtgaagatctctccctccagtatttcatttacagtgacccctgaaaaagggtgaagtttggcaaagtggaagaactcatcggcggagcagccgaagaggagcctggcaaccctgtcgaagcagacgacagtgagaacctgtgtgtctgtggcaaccgacatgaggatgcgaaagagtcgtttggagggagggttggaggggtggcagacgaaagtggggtcggaaatagttctttcgcaaacggcgcagactctgtaaaacatattggtgtggtctatggataaaatcgagcacgttactcttcctgtgcttccttcttctcccatctctctttctctcttgtttagg

SEQ ID NO: 106555 - DNA, 679 bp, Glycine max
  Clone ID: PAT_MRT3847_67235C.1
aacacttgtaacctgattttattcaagcaaatttcaattcttgaacaagtatatgcagcaatattagcgaaaaaacatgaccttagaaaaatgaggttccattacaataatgaaaaggggaatatcaatatagaaacactaaaaacaaagtaaactgatgtggtttttgttcctgtagctagatcgtctcttagaggaaggagatcatcgatgcacgcaggttcccctgcattcttcaagccgaacggcataaccttgtagcaatagttgaaactaggaatgatgaggtgtttcgtagcattgtttcaaaaggtgaattgcgggtcgaaatgcagagctcaaaggaacagcagatgcaactcttaaatgttgtgcattggcattgactggtttggataaagttatagtgaagatctctccctccagtatttcatttacagtgaccccttggtaaggtgaatacagaacaagtcaaaagaatatatttttattattagaaaatgcaaattcgaataaaaataagtaacagaaaatacctgaaaaagggtgaagtttggcaaagtgggagaactcatcggcggagcagccgaagaggagcctggcaaccctggcgaagcagacgacagtgagaacctgtgtgtctgtggcaaccgacattgggtatcaatatacccaatct

SEQ ID NO: 106556 - DNA, 450 bp, Glycine max
  Clone ID: PAT_MRT3847_67236C.1
ccactagtaaccgccggcagtcgtgctggaattcgcccttagcgtggtcgctgccgttttaccattggagccctcaaaagagattctggacaatttataatcattatgaatgtggcattacaagactgcataatggtataatagctcatgacaagccataaacttctttgctcaaaactcttttaccgactcgattttcaaattttgtgatatggatctttctttggcatcatcagtagaaattcgctttcaccttcttgtataattctgtagtaacaaaatcaatcatggattctaatgaaccttcacaaaattttttcttgccttcaatggctttctgttcacataacctaattgtatacttcatgatttcagcttgcatctagttacgtttaactgaaaactcatcaaagatttttgaaagatctttccatgtaaaacgtataaatc

SEQ ID NO: 106557 - DNA, 349 bp, Glycine max
  Clone ID: PAT_MRT3847_67237C.1
gctcgagcttcaattctcttctttttcttccatttttttcttcattcctctctcaaattccgtgttctaaaaccgtcgcctcgtgaaccaatatccactcacaacccccaacaaagagaacaacaacaaccctatactctctcgacctcttattctcctccttgtctccctcctcattttatatcttttccgttcacgaaatctatggattttctggttatttccactttcaccatcgacgtcgcctactcccctacttcatacaacaccaacctcccctatatcgtcacatttttctacctaccttactctctatacattaattctacttccacatcttaaattttta

SEQ ID NO: 106558 - DNA, 603 bp, Glycine max
  unsure (1)..(603): unsure at all n locations
  Clone ID: PAT_MRT3847_67238C.1
gagaaattcaaacaacacaacaaaacctcgagaagtaaaccaatttcaaaatccacaccattctcattccccttctccttctgtactttccgttacgaacttgcctaaaagcaactaaatgcttcaacttcactaacgctatagtatcgtgtcaacaatgccaatgcatcaccatcttcttcttcttccccttctcttctctcttgtttctccgatgacctccctcaactccgacggcctctccctgttagctctcaaagcggctgtggacgccgaccccaccggagttcttacttcctggtcggaaaccgatgtcaccccatgtcattggccgggaatctcctgcaccggcgacaaagtaacccaactctccctcccaagaaaaaacctcaccggttacatcccttccgagttaggcttcttaacctccctcaaaagactaagccttccgtacaacaacttttcaaacgcgattccaccatctctattcaacgccaggtcactcatcgntctcgacctctctcataactctctctccggntccctccctaaccagcttcgctctctcaagttccttcggcatttggacttatccgataactc

SEQ ID NO: 106559 - DNA, 242 bp, Glycine max
  unsure (1)..(242): unsure at all n locations
  Clone ID: PAT_MRT3847_67239C.1
ggagagaagagaancgnggngcttcagaaggtttttccatttaataccttaatgatngatcgaatttgacattataactggaggcagttcaaccacgagcctcaaccctctaaactactctgcaagcggctaatgaaagatgaaaggaattagaagattctttgaatgcagtgacagaagaaaagaaaaatttagaagatgcttctatcattctgaatgagaagcttgcttagaaagaaaac

SEQ ID NO: 106560 - DNA, 489 bp, Glycine max
  Clone ID: PAT_MRT3847_6723C.1
aattcggctcgagttttataatcttcaattccttttgcaagtaatcaatcctctccctcatctcttccatccacctttctcaaaaaggattcacccaataaaaaaattgcattttcctgcatcttgccattcaacaaagggtagtcagtttattattgaaaataaaatgggacacttaaagtattagtgtaataaaccttatatagtaaaaagaatatataatagttgggggagaagaagtagctgttgaaacccaacggttacattggtgctctaaaaaaagaaatttttttcaggctaacaaattcgaccatagaaatttcagatgacattttattctatccaagtcagcatcacacaacaaatgtcccactttttcactatcaaaataatccaatgttgccatgtagatttgaccatttgggtcaatggaagaaatagatattgagatggatttatcatactttttacaaattaaaggataaaatt

SEQ ID NO: 106561 - DNA, 264 bp, Glycine max
  Clone ID: PAT_MRT3847_67240C.1
atcacgcgtacgggtctatacaaatcatcacatctcgacaatatacgacaatagcactgcatgggcttcatggcctacaagacggtagtctgctaaatgtgaatgatccgccaagaaaaggccgcctacagaagaacccgcacattagtacttaacctacatgcgaatacgcctttgctttccgagatctcatcatacataaatatagatatatagatatagacatcaatagaaattaatggattatatctacttaattataga

SEQ ID NO: 106562 - DNA, 319 bp, Glycine max
  Clone ID: PAT_MRT3847_67241C.1
gtttaatttcattcactttcagatttgtgggttcaagtacatttatttgtttctctacttcttagacgttcttgttcttcttttgcttttggtgtttttggtttttctttttaaatcaaggtgttcctttgttctccttctaccactagtcttatttaaatatttattcattaattttttattctggggttgttttgaatttagaaagtgaaggtttgatagaagcttttcattgaatagaaaatatcagttgtgttgcggcgtgcaatcggagatcactggccttgatatttatttgatctagtggcgctctatgttt

SEQ ID NO: 106563 - DNA, 118 bp, Glycine max
  unsure (1)..(118): unsure at all n locations
  Clone ID: PAT_MRT3847_67242C.1
gatcctnnatatgtcatctccgtgccanatagngttgatattatntggannagatgntacctgtgnagaaggagcccgagactangttagcngacaagcangaaatncccaaggctcc

SEQ ID NO: 106564 - DNA, 169 bp, Glycine max
  Clone ID: PAT_MRT3847_67243C.1
gtggttgggtgttataggtaatgtaacgatctcttcaaaatctctattcgaaacgatgccctttagtttccgcaacggccggcaccgggactgcccctttccgagctaatgacgcttccgaaagtttcgtcgctggctctcaaacaggcttagatttttgaagacaagc

SEQ ID NO: 106565 - DNA, 618 bp, Glycine max
  Clone ID: PAT_MRT3847_67244C.1
ttgattacttttgtattgtatcattacaaagccgtcacataggtgattgtttctatttgtagagcaggtgtgcaccatttaggttgtgtcatatcttcttttaaacaagaaattgctatggtggtagctttcagctgacatctcgagccgaatcggctcgagggctgcgagaagacgacagatcggggggggggatcctgctggtcactattccacaaagtctgcctacaatctcctttaagatgagggtaattctattgcggaagacagcacttccaagatcatttggagactgaaaatccccccaagagcaagtgctttctcttggagaattttcaagaacagacttcctactagggataacctaaggaggagacatgtggagctgccctcttataactgccctctttgcgatcaggaagaggaaacagctggccacatcttgttttcttgtaggaaaactagacacctttggtgggagagtttgagatgggttaatagagagggtcctttctctattgaacccaaaagccattttctgcaattctctctatggagtgggaaaagcaatgtagacaagcgatgggaagttttctggatagctctatccatgtctat

SEQ ID NO: 106566 - DNA, 379 bp, Glycine max
  Clone ID: PAT_MRT3847_67245C.1
tgctcggtggtctttccaacctcgggcattgtggttacggtacgaagcttctcatggtgaccgcttacatgctctcaaaagcggccgtctggcctgtcacacttgtacaggctcgcgccctggaagcacatgccaaccacatcaaccagcgcgctgaaaactccgtcattgcctcgtaaatagcttggtccaaaacaagatagcgtcttgcaggagacgttcatccaccatactcgctgcgcccattcgaagaacacccatttcaaggtcatcaattctggaccatgagcttacgtcattcatcaaagacctgcctgctattcacgtcagcaacacacgagcgacttccggctgaattagtgtacgacgggttcttctc

SEQ ID NO: 106567 - DNA, 385 bp, Glycine max
  Clone ID: PAT_MRT3847_67246C.1
ctcgagcgaacatgctatgagcttgctgttgcgttactgagtcattagcgtaggccaccatggaggacgatgaccctatcgttcgcgagatggacgtctatgtatgcaacgagtttatgggctccagcacgcaactagcactgctacagcaccctctgcggcctccatggcgaccatacgattaccaccaggtggcggcaatgcgcatgaagccgcaggccaagcgcatagaagtagaccttccactggacacggaatctaaaaattacaatgatatcatagaagacatcaagaagataaagcactttacgctgcggtcaacccagacggaggagcgcacccacctggctgtcggcaccatccgggggggcaagcttctcatcgc

SEQ ID NO: 106568 - DNA, 312 bp, Glycine max
  Clone ID: PAT_MRT3847_67247C.1
catcaatcctctctaggaaccatctaccggcaacaggcggcgctgtacctgctcttcatgctgctgtacgtgctggccaccacgctgggggtctcttgggacgcacacgtcagtcgctactacatgtacggcgacgggtcagcgacgtctgtggcgcggattgtcctggaggcggcagtggtgctcatggatgccaagtacctgctagacgaggcgcggcagctgcagctgcacggcgttgtgcagtacatgacggggtacaactctgcatggaactggctggagctgctctctggtgttatggtgatcctg

SEQ ID NO: 106569 - DNA, 263 bp, Glycine max
  Clone ID: PAT_MRT3847_67248C.1
aaaacccgacaaaggggggcaaatttttgttgaaatacctaaacccaataatttgaaagtgaaattgctggtttgtgtttgtcgcaacattcctggaaccaaagggttgccatggtcaaacaaacaagaagttcctcctccaaatgaaacacgggtttggtgggcattacaccattaaggtggaatttgccatttggaggcttggcttggaagcaaccaacgtattcaattggcaaactgttcctgaaccttgcggaaattac

SEQ ID NO: 106570 - DNA, 501 bp, Glycine max
  Clone ID: PAT_MRT3847_67249C.1
cattctttttttttttatttttctttttttttttttttttttgggaggaaaaaaatttcactttcacattgattacaaaaaaacgctccaccgggctgcatgggtgccctgagacttttataacaaaatatttgaagtttaaaccaccccccacaggggaccaaagccaaattaagaggactcgtgcattttattatcccttatagaccagacaaaccgatttttcaagctttcctcttaattaaaacacagagcatcataatcatagtggtccataataaccggatttaccctaccaccctctgtttactttgctaacccatacacgaggacgggggatattaaatcaccaagcttcgggcccatggaacggcccacattgaaatcatcaaatgtctccgcagcttctccgctttgatgacggggtggggacgagcaatatcctcttttaccactgttttgaaatcgaacccgaccgcgtgctcctccgggtacctgggg

SEQ ID NO: 106571 - DNA, 129 bp, Glycine max
  Clone ID: PAT_MRT3847_6724C.1
ggctcgaggtttcttgaagctaaaattgacggctttttcactttcacaaaaactaaccgatggtcgggcagcttcagattaatgagatgtaggtgctgccttgggtcattatttcgtctaacaacaatc

SEQ ID NO: 106572 - DNA, 608 bp, Glycine max
  Clone ID: PAT_MRT3847_67250C.1
ctttcaccaaattaaagcttgagcatgtagtgattgagaagggccagtttcatcaagaacgtacaaaccctgccagtatggatgaaattgaggaagatgatgttttggcattgcttcgcgatgaagaaccagctgaagataaaatgatccatccagatattagtgatgaagacctggagaagctcttggatcgcagtgatcttatagtcaatgactttaacgatgataacttcaaagctccagtcagtgtgtttcctcttaaaggcccagggtgggaggtggtgattccaactgcgactgggggcatgctctctactcttaacagctagtttcatgtccctgtttatggctagagtttgaaaattttgctttttgtgggatgagatggaagggcttttctaaacagtctcatgtcacggtggtaatgccctggatggcattcattttttgtagatgcgtctaacggaactatgtttagaaatgaagctactctggccatgttttttgcgagtcggaattaaatattcaacttgttcagtggcgaaagtgattatcttatgtttgttctggaattcattttcaatgaaatgaattggtttggatatgat

SEQ ID NO: 106573 - DNA, 283 bp, Glycine max
  Clone ID: PAT_MRT3847_67251C.1
cccacacatcctaaccctcaaccacaccgttttgatcattatcaacatataactaacgagttttatttttgctttcatcccaagccgtggcgcctataatcctccataactcaaaaaccaacacaaattcttaccaaacactcatttctttcgattatgctcccctacaattttacttttccccaaattttgacatgggtgtatacaataaaactcctaaatttctaaagatctatcctattgactaggttcctttattgcaaacacatgattctccaatatt

SEQ ID NO: 106574 - DNA, 341 bp, Glycine max
  Clone ID: PAT_MRT3847_67252C.1
tttttttttttttttttttttttttttttttttttttttaaaggccaaataagcttcccaaagttgcctccaaaatgggtttttatttaacagtcccaagatatttaaaaagtaaaaaaatgtcaattccccaatttttccatttaaatagggcaatgctacataggggtcactggtacaataaacggggaaagacaataaaaatatttttttaaaaggggaggggaaggggggcaaaaaaataaacttttgggggatgctttaacaacagcactttgggggggctgggcattaccattaccatttcccgtttttttccaagggggtgtgttacccccccc

SEQ ID NO: 106575 - DNA, 2022 bp, Glycine max
  Clone ID: PAT_MRT3847_67253C.1
cccgcgtccgcctccacccacacacgcgcgcagacgcagagtgagtgggtaaagcaaaatcatgaagtgttgttcctccctgcacttgctctcttcttcttcttcttagttatcattctcttccttccttcctttcgatttccgcattcattcaatggcacttacaacactctctctgctcccaccctccactcctccctgcttctgcggcaccctccatctccgctcccacaacagcttcctttccatccattctccttcttcttcttctccctttccttccttctcctcaatttcaattcccaaccactctcccacgcgccgccgctttcacactgtcttcgccgcttcctccgactactattccactctcggaatccccaaatccgccaccggcaaggaaatcaaagccgcctatcgaaggttagctcgccagtaccatcctgacgtgaataaggagcccggggcaactgaaaagttcaaagagattagtgctgcctatgaggtgctatcagatgataaaaagagggccttatatgatcaatatggcgaggcaggagttaagagtgcagtcggaggttttctgaggcaatttttgaacaggagggtcaagtgcctatacgacaaatccatttgatttatttgagacattttttgggccaagcatgggtggctttggtggcatggatccaactggatttggaactcgtcgtcgtagtaccgttactaagggtgaagacattcggtatgattcggctcgaggaaagaattcgagctttctcatttggaaacatgtgaagtctgtactggtactggagcaaagataggctccaagatgagagtatgttcaacttgtggtgggaggggtcaagtgatgaggactgaacaaacaccttttgggttgttctcacaggtttcagtatgtccaaactgtggaggggatggtgaagtcatatctgaatattgccgtaaatgcaacggtgaaggacgaatacgggttaagaaaaatattaaagttaaagttcctcctggtgttagctcaggcagtattctaagagttacaggggagggtgatgctggaccaagagggggtcctccaggagatctttacgtatatcttgatgtgcaagtgatacctggaattcaaagagatgacattaatctcgtctcaataatatcaatcagttatctagatgctatactgggggctgttgtgaaggtaaagacagttgaaggcatttcagaactacaagtacctgctggtacccaacctggagatgtccttgtccttgcaagaaaaggtgtaccaaaattaaataaaccatcaatacgtggtgaccacttatttacagttaaagttacaataccaaaaaggattagtacaaaggagcgtgagttgcttgaagaacttgcttctctaggtgacacaagcagacgttcaaaatcccgtcctaggactcactcttccacaggtggtacggaaagtccgaaagctcaaaaggatgaaagtacaacatcaacagtcgaagaaaaaactgaaaaatcagaagatgaaaatgatgtatggaataaattgaaggactttgctggatctgtggcaaatggagctttaaagtggtttaaagataatctctagtcctatggggttgttgggtggagcagaatcttcaagatgtagtttacctaatgtgggttagagttctcatgattccaacagttactggaaggaaagggactaatgcagacattttcttgaaatgctttaactgaatttttagctacccagcgaaatcaaataagtagtgatgcagattcttttatttgtttttgatttgtaaattttggcaccagtcaatttacacagaataacttgttcaaggatctcaaattgtactccatgagcaggttgcactaagagaaagctagtgtatatctggtaggaagtctaagctcttctacacgagtgaatgaattacctaaaaatttagttattgagtgaatccttgtgtttagtttcaaaaa

SEQ ID NO: 106576 - DNA, 2458 bp, Glycine max
  Clone ID: PAT_MRT3847_67254C.1
agattgggcatccatttctgatcttccagcttctccaatcgcttgtatgagaagaatgaatttgttgaatagtaacatgagatttaggaaagccgtgaataaactttgtagcatgctcagtgaacgatatgcaaagcaactggaaaagtcccagtactcgtcattaaacaatgatcgcaaacagtttgtgcgatcccagtcctgtgaaggaatctcaagaaaatgaagaaattacatcagctattccttgtgataatattcagagtcatgggaagccccatacattttctgcccaaagatcacggcggcggcggcttgataaaaattttactaggtttctgaataatatggttaatgtttatggacaagtaaatgaatcattggctatttcaaatgttgtagagctatttaaacttgtttttttaagcacctcaacagatcctcaggcacccaaattactagatgacattcttcggcgatactcacagcatgatctatttgctgcttgcatcgacatttgacagaaagttgggggcactggcaatgaacgtttcgaactatcacaacagttcttgcagagcgtttccaagtcaccatttccatttaatactggaaagcaagctgttaaattttctgcatggttggaggaaaggggcaaagacctcacagaagtgggcactaatcttgctgaagatctacaatgtggggacatttttcatttgtttgctttagtctcttcaggtgaactttcaatttctccattcctaccagataatggtgttggagaggctgaggacttgagaagtgcaaagcgtaaatctgatactaccgagtcttcatatagtgataaagccaaaaagtcaaaatccttctttggagtagaaggtgaaattatttctcgtcgggaaaaaggttttcctggtatcatcatttctgcacaccaaacaacaatttcaagagctgatattttaaatttgttgaaggataatgataactatggccaaccttttgagggagatttccaattaaacattggccaaagcagtaattattcacttcctgaccatatcttggaaatcactaaatcttctgaccctgtacctctggaagaaaatcatagtgaatcaccctgggaagctatggcaggctaggcacgacatttgttgtcagaatattccaataaaaaacatgcatatgcaatttgtgctgaggtcttcagagttgtttatgctgccatccaaaaggctggtgaccaaggattaagcatgggagaaatttcccaggttattaacttgccaggagcagagatagatgtcttgattgttgatgctcttcaagcatttgggcaagccttaaaggttaatgcttatgatactgtccgtgttgttgatgtcttataccgtcacaagtactttttgacacctatgtctgattttcatcttcgtgttgtacaaccttcctcatcaaaaaccatcgagaaaagtgatcatacatgtgagctttatgaatcggaggaaagggatactacttctgttgatacttcgaggtaaagaaacgccgctattgatagcgtgcagacattgacaattctcaatcttccacatggggatgtggatcctgaaaatcaagcttgtgataggaatgaagcgtccgagcaaaacagacttggcttatccagagtcaatcataagaaagaaactctcgaattttcttctagtaaatcatgtgtgccaatattgccatggatccatggaagattggatcacatgatttacagggtactcagacgtcgtgttcttggaatagtgatgcaaaaccctgggatattggaggatggtattctacatcatatgcacgtgttgaatccacagaactgtagaactctcttggaattgatggttctggataaacacctaattgtgaagaagatgcatcaaaatatgttagatgggggaccctccttacttccggaacttatcggaagcaaatccagtcaaccgaagttgatatgccgagagcatttcttcgccaatcccatgagtacttccttgttgtagggaatctgtggcattgacattagacattagtacttgttatataaaaaacatatttataggcaattttggatactggtttaagttatatttggaagaagtgtaacttaggcaatcctagtaaatatgtttcaggctaggaacttaggattttggatatttgacaagtttggttgctacaatcctacttgagtatagcaggttggtgctacaaaaaaaaaaaaaaaaaaaaaaaaaaaaaaaaaaaaaaaaaaaaaaaaaaaaaaaaaaaaaaaaaaaaaaaaacaaaaaaaaaaaaaaaacaaaaaaaaaaaaaaaaaaaaaaatgggaaaaaaaaaaaatcaaatacaaagacgggacttaaacacgcctcaaaattaaataacaccgggggggcgcccct

SEQ ID NO: 106577 - DNA, 1246 bp, Glycine max
  Clone ID: PAT_MRT3847_67255C.1
ggctcgaggggacattgagttcactgataattcatgctggattcgttgccggaagttccgagtggcggtgagggtggcaccggggactaatcaaggtggtgttcggattcgtgaagccatatctgaggcgtttgctgtcaaggatcaccgtggagaattgtacaaaaaacactaccctccaatgcttcacgacgaagtgtggcgcttagagaagataggtaaagatggagctttccacaggaaattgtcatcagaggggatcaaaacagtgcaagactttctcaaactagcagtcattgatactcttaagctaagaaatatttagggatcgggatgtcagacaaaatgtgggaagtcactatcaagcacgcaatgacttgtgatactgggagcaagatgcacatttatcgtggaccagattatactatttttctggatccagtgtgcaaattaattagagcagattttaatggacatacattttccaacagagatgcgatgagccctttgaataaggcctatatagacaaattggtgaaagaagcatatgcgagatggaataacttggaggagattgacggagttctgaatgataacattgctttgttaacccaaggtgatcaaactgtggaacaatttgcaaacaatcaaccctgcagcaccatcagtagtcacatatgatcagaatcagtattacagtgacaaatcaggcagctatgtagcaaacaacaatacacaaatgggatgctgcgagtggtcactgaatcaagcctatagcccagcaccgtttgccaatggctttccttttagtttctcagtgagacaatcggatggtgacataaccgcttcaggttctagctctgtggatgttgatggagccacaaggcataattaaggtgtaccaaaagttcctataatgcaccatgtacagtacgtactataaatgtatgtaggcttgacttataaatatgtataagatctttgtgtaattcataaaatttatacatgttcgtaagtgatggtgtgcccctaaatgatgtggccatgcaaaaagggataaaaaaaggtcaaaacataggtagtaaagtactttgactttctgctgtatatactacatacaagcaagtgtaagcaatgtggaggaatcaaatttgtcttagcataggtgccaggctcattttaaggatcatgtgaatgatgggcatggctcctgcctcctggatgggctttattgctttgttaccaa

SEQ ID NO: 106578 - DNA, 859 bp, Glycine max
  Clone ID: PAT_MRT3847_67256C.1
acgagatctttaaaaatgtgaaccctgcgtagctagctctataggagttttgttggttgaaacaaatgatggacagtaaatcatttaataatttcaaaatttcttcaaagtttaagaatataacaaaatgaaagaatttattatagcaattaaaaacattaagggattaattttaaacaaaaaaaacttgaagaataaaatcgttaatcataatagaataaaatagataaataaataaatgtacttttaaaaaaatgttatatataaaaagtaaagaaaactataggtcaggaggaccctcccttgctttcttctctgaagcctctctaattttttgtatctcgctgtcatttggcttcctctctctaatgtgtctgttctccttttattttttttggcttatataaagagaggagggatagcgaggacataagtttccctagctaggtgaatacataagctatggttaatcaattgaatgtaacgagtttaatatattaccaacatgcatgagtggccagttgaatgtcttgagcaataactaacgctctagcaattagctagacctcaagcagaagtcgcaaacattgtattctgtctgcctataacgtgattatgaaaataatgtatgggtggctttattgctaggtcaaatgattatcatctctgtcccttcaaagtaagattgcttctcttatatgttaatttgggagtataaacacctatttctgtggtggtataagtagttacagaatgcatctaaattgagaaaagagtgcatctcagtgtaaacataaatatttgttctcaaattatttatatagcttgatgaatataccaatattgttttggaaaaaaa

SEQ ID NO: 106579 - DNA, 285 bp, Glycine max
  Clone ID: PAT_MRT3847_67257C.1
aataaaaaccaggtcctgagccattgattatgatttgggttttcaaagggattcaaacccaaaaatattctgggagaactattagaacaatggttttgtcccccgaaataatgagaggggcaaatgtggctagcgcccaaaccctaaattttttgccacccaaagggtcctccggggaggttacctttattttccccctttcacccgtacaaaaatgtgttgtgtacaaagaacaccctatctgatggggggaaaccttttctttcaggacggacctggaggctc

SEQ ID NO: 106580 - DNA, 653 bp, Glycine max
  Clone ID: PAT_MRT3847_67258C.1
cagagaacctcaatctctccgagcagcggtccatttttctcccggaacacgcataagatttccggctcggcgatggccgctgttcgcctccttctcttccacctcctcctcctcctcctcctcttccctttctcctctttctccctctccgaaaacgaagcccttctcaacctcaagaaatcattctccaaccccgttgctctctcttcctgggtccccaaccagagcccttgctcctcccggtggctcggcgtcatctgcttcaacaacatcgtcagcagcctccacctcgccgacctctccctctccggcaccatcgacgtcgacgccctcacccaaatccccactctccgttcaatcagcttcatcaacaactccttctccggcccgatccctcccttcaacaaactcggagccctcaaggccctctacttagcccgcaaccatttctccggccaaatcccctccgatttcttctcccaattagcttccctgaaaaaaatatggatctccgacaacaatttctccggccccatcccctcttccttaaccaacctccgcttcctcaccgaactccacctcgagaacaaccagttctcttgcccggtcccgggagctcaagcaggcataaaatcctttggacatgtcgaaca

SEQ ID NO: 106581 - DNA, 550 bp, Glycine max
  Clone ID: PAT_MRT3847_67259C.1
ccccttacaccgttgctgtgcttactcttgtggaggataggaacctgcgaaattttggtggatctctccagaggacccgactatccgaccatgttctggggggccagaggcgctgacctcttagtagatttttagatcactctgatgactgtctttgacatcacgaatttgctcattgttaaggctaagaggtgcttataggatgcacagactcactatcgggctattactttccgacacttttgggtgcagtatgtaggacgtgccaagctatgaacatactctcacagtgtgcagacgtctctgagaccactagtcaactctgctcattctaggttcgctgaagaatgctcagagatatgataactggacaggcttggatgaaggagctctgtacattaatcatatacagcctattctgcacagagtctgggacaccggacatactgagctcatggttgactaagaacttctcatggatctctcatgccacattgacactgatattatgtgacaaggcagaggcggagagtaaagaaggtgccactcc

SEQ ID NO: 106582 - DNA, 417 bp, Glycine max
  unsure (1)..(417): unsure at all n locations
  Clone ID: PAT_MRT3847_6725C.1
gcgaggggcgctggaggcgagtaacctctacaatgcagaccctatcagtgcagccagctcgtggagaatgcggaggaatgcgtgggtttggggaacgaagctctctatgagatctgcgtccgcgcgcgtaagcgcaccactccaagctttggggggctgagccagggggggcagcgcaccatgggtggggtgagcatgggtgttcgtttccctgggggactcaactcagatcttcgcgaactggcggtgagtctcattcccttccctcgtgtgcgctttttcatggggggggnttgccccactcacatctggtggggcccaacaggacagagctcttactgtacccgaatggagccaacaaaggtggggggcgaagagcatgaggggggcgggtgatcctggccatggccatacttg

SEQ ID NO: 106583 - DNA, 599 bp, Glycine max
  Clone ID: PAT_MRT3847_67260C.1
atctatcgctaccatgtgccagatactgtgcatgacagtgcacgcgatgatgaagcctccccaactaagttaaacttacaaacttccaccgcggtcccaaccctaaccgtattttgatgtacagtctgggtagtcgtcattcagattgtgctcataataatggtgtggttatgtcagttattggtacaaatcaacttgtggtttgtagtgtttaggtatttaggtagcacctattaaacatgggcggcataggcccccacagctgccagcacgagagtgctggcaaccactacaaacgcagcggccagtaccaatccctgcggcgacaataacacaacaattcccggtacagctgcggctaacctagctagaagcgaagcatgctggataagcctgacgccaaagtgtttgctattactattgctgcggaaagtgctacggcgactacggttgaaattaatagggccggataaagtgtaattacctaagttgatggtgcgctaaaagaaagtaaagctattcgtaggcttgtaagtgactaaggtagatctgcaccgccaaatggtgtaatattaatatgcaacgagtgcatacaaaca

SEQ ID NO: 106584 - DNA, 348 bp, Glycine max
  Clone ID: PAT_MRT3847_67261C.1
acgagggtttttgtctttgtacttgtttaaggatagatttaaagtttcttgtttcttgtacatatgtgtatctgtggctcatagttttttccagctaccattgtcaggtattctgagagattagccttattgcattgatgtaagtttgttgtttctcttgtgtgtctcactagcctgttacgaaaaatatatggaggatgattttttcttcctctatgtttctgacaattttatccttttatccaacaaaagggaatcctgtggtgggttctttttgtgtgcttagttaatgtttaataacagggttcttcttgataattgttctgaattattttgaataattttata

SEQ ID NO: 106585 - DNA, 361 bp, Glycine max
  Clone ID: PAT_MRT3847_67262C.1
tgaatatggcatcactttccaagacggctttatattccaaccgacgcagcccactttatttctatttttccaaaactacttccccacatgttccttttttcacatcaaatatgtcaatattgaatctgacatttatcttcatcttaacaagtacacttttactttctttcattctcaaatttcttacttgtttagtcactacaacaattacataaaatatttcaatttatatatttctactacacattctcttgttattatttatcttcccaattcacattgcatttatatatagtacattttctattttgttaaacaaaacaaattcaacctttcataattttcaaaatattcttttcac

SEQ ID NO: 106586 - DNA, 870 bp, Glycine max
  unsure (1)..(870): unsure at all n locations
  Clone ID: PAT_MRT3847_67263C.1
ggctcgagtgcgaaaatgctaaggaaagaaagcaagcaatacaaaaaaacccgggttctgcgggtcaaatcactctctttctctcatataaaccacgactagtgtttagtgtcattccgcttcttcttccgctttctccctttaactctacattctctcgacacatgctttgctagatcacaggttgttggttaatagtgttctgtgtcagaaaatgttgtgaatgagagatgtgtattgctagcagtttgactgcacagttgaattagtatgctactaaggggattctgctggatgtcaaatgatgtttaagatttgatatacagtaaaaagaaattggagactatggaagaaatacagtctcaatcagataattatagatcttcgtcatcgtcggcaagcagcccggcaagtagggtgccatcaagtaactttttctacctgcgtaaacctggttcacttaggcagcccatctcttttgaggattcacctgagtgggaggatactgatattgatgttagagttgaggaaggaggtgactctattaatgtcgcaacaacaccagcttctccctctctttcaaagctcaacagtgggtccctgccgtctccacgtctaccggagggtgcagttattccgcggaaaattgctggggcttcagttgcctggaaagatttgaccataacgataaagggaaaaaggaagtactctgataaggttattaagagttcaactggttatgcgttacctgggaccatgaccgtaattatggggcctgctaaatcagggaaatctacccttattaccgagccattgccagaagaatgcatccntctggccaggatgtatggtgaagtatttgnggaacgg

SEQ ID NO: 106587 - DNA, 600 bp, Glycine max
  Clone ID: PAT_MRT3847_67264C.1
gaaaggttgaagttaacttttatgctttattcattgccttccgtgatatttataacaaccaaaggctgctctaaactattctactatagcacatgcttatccaaaatcactaacttttctaacaactgcgcactagtgttaactttcttatcaacacacactaactttctaactacacatgcactactaacgacttttggcctatccttgcatgtaatcctgtaggtatgcaggtttgtgagttgctctcttaggttgggtttttcgtgctctatcaacaagcgtattgtatttaaaaaataactgcaattaaaattttctaataataataacaaatgtagaagtgaaaattaagaatgaagattcagagtttgaattttatatgcagagcagagcaaattactttgaatgtagtatgaaacacaacattacaatatctccaattttggtggatcaatgaagagaaagaaatggtaaatccatacaaatgctaaaattaagaattcccttcttcatgtgcaatcataagaggagtgacgacaaaaggctgaatgaatggaagagttgtgttcactaataatttaagggacgaaagaaact

SEQ ID NO: 106588 - DNA, 294 bp, Glycine max
  Clone ID: PAT_MRT3847_67265C.1
ctacccgccgctcgatgggaattgcgcttcaatgcgtctcgtagggctaatccgcctcaccagggtcactaacggcaactttctttcgcgggttgaggctcctagtgctggtcggcaaacgcgacggctggcgcaggcgtcgcttgtaccccggattctgacttagaggcgttcagtcataatccagcgcacggtagcttcgcgccactggcttttcaaccgagcgcgatgacctattgtgcgaatcaacggttcctctcgtactaggttcaattactattgcgacactgtcat

SEQ ID NO: 106589 - DNA, 398 bp, Glycine max
  unsure (1)..(398): unsure at all n locations
  Clone ID: PAT_MRT3847_67266C.1
annnnntcacnnnnnananncnnnccaccnnancacnctacnacatcacancacacactnnacnannanncanacacncnnnncaaatcncncacnncacanncanancnncacnacacantnnctnatnccactancaccnacaccncanacnaaccnnncnccacnannannancanaancctananaccnccnnnncanatcatntnncaannnnacnnccannacnanncnacacannnnnncancaancaaaccacnncaacaacnnctantctncacaccannnnnanncnccacntcaancntananananacnccnantnnacnatnacacacacacnnnnnnncccatnnnccnaacnaccaannnacaacnnnacnatacatcnaann

SEQ ID NO: 106590 - DNA, 279 bp, Glycine max
  Clone ID: PAT_MRT3847_67267C.1
gccgacaacactactatcacaccaggcagacagaatcgagcacccgaaacccctgcaccatccctctgcaacacacactaggcaaccaccaaactccacgacctgcataaaacactgtctcagcgacaacaggcccctctacaaagcaagcgagcaaacaagccgagcagccagccgataagactcagactcaggccaacagcgcggggacgatcacttccaccttgacaaggaacaaagcgcagaacatcacaagcctaagcaagcgatactcttagc

SEQ ID NO: 106591 - DNA, 274 bp, Glycine max
  Clone ID: PAT_MRT3847_67268C.1
acgcgtcagacagctgcaagaagacaacgaaaggggacagcatatataccattaaccaattttaaactatacctacattttgataattttctttgtagttgaaagccatggctacccgtgaaaagcctgaggttgacattgatcggaggtccaaggcagacaagttactggcaaacccttaggatttctactgatcgattccctaagggcttccgacatgagttaacaaaccattgatgttcttgagggtgatggcaagtctcctgggttctat

SEQ ID NO: 106592 - DNA, 1124 bp, Glycine max
  Clone ID: PAT_MRT3847_67269C.1
ggaacttgttacaaggtgttgaagagttcgtgaccaaccaatagagaaagaggttaatttctgcaggaacttattcaagattctgagtacatggttttcaacttaaatgccagaaaatggtacggtaatacatgtccttaggaacatctgaatcaagaccatttgcagagaagattatttgcactgaagattaattcaagctatcacttccactgcaatgaatctagagcttgttgatgaatctgtttgtcaccagcagccacaacattaaaacttgtggcgattgaaagtggagaagcttcccaaaacagtttatctcctttccaatcagttatgacacctccagcgccttcaataacaggaatcaatgcaagaaaatcgtatggcttcagaccagactcaacaacaagatccacaaaaccagaagacaaaagtgcatatgcatagcagtcgcagccatacaatggaattttaaccttgcttctaacacgaatgaatgcctcttctgcatctccactgaacagatgtgggcttgtggtgtacaggtatgcttgagaaaggtccgcacaagtgcgtgtagatatttcttgtccgttcagtgaggttctctttcctgctatcccgatccacctttctcttaacacaggttgatcaattatgccaaggattggtgtgccattttgtagaagagcaacgagagtaccaaatacaggtttcccagtaataaagctcttagtcccatctatgggatctaatacccaaacataatcagcattcttttcttcacacctccacccattttcctctccgtaaatggcatgagaagggaaattgtctagtatgattgaaaccatagcctcctcagcagattgatctgcaatggttactggactgagatcatgtttgtgaataacgtcgaagtattttctgaagtatttgcggataacttctccggcagcatcggcgactttgttaccgacctcggcgaagcgattgagttcaagaggcgtgctgtgaggcgccatggctctgagacgaaaggtagtattgggaattggggagtgagagagaaaatggcactgtgagaacattgcaattgccactctcaatctctttaattcgtg

SEQ ID NO: 106593 - DNA, 637 bp, Glycine max
  unsure (1)..(637): unsure at all n locations
  Clone ID: PAT_MRT3847_6726C.1
gtgtaatcaggttcaggattggatttggatcaatgggtttctataaagcttgcaattttggtgtaaggagtgctgatttcagttaaggggtggttttgaagattctttttttttatactctttttggggtttgaaggggatggattttatggaagtttcaatcttgcatcatgcggggatcgtgcttattgggctatggattctctctgcattcaactggtgtcacacggttgcttattttgtggctttgatctatctttttctggttcatgaacgttatgtcacgaggttgcggaagaagttgcagtttgaggagaggaagcaagctaatcaaagaagggtagttctcttggttttagtgtggttatttgattttgaggggaaaatagtaacttaataagttttaaaagtaaatgaactgaactggggtcaatgaaagagaaactgctaaagaataaattcctctttgaagttaaaccattcccttaacttgaaaaagaagcgggccctgagagaagagacaaatacagaagcgtttggaatggattagtacaatattacttataaataaggttctgtctcttgaatgatagtccaagattctttcttttgttctttganaacaatgttttcattt

SEQ ID NO: 106594 - DNA, 2194 bp, Glycine max
  Clone ID: PAT_MRT3847_67270C.1
caccaaccaatagagaaagaggttaatttctgcaggaacttattcaagattctgagtacatggttttcaacttaaatgccagaaaatggtacggtaatacatgtccttaggaacatctgaatcaagaccatttgcagagaagattatttgcactgaagattaattcaagctatcacttccactgcaatgaatctagagcttgttgatgaatctgtttgtcaccagcagccacaacattaaaacttggggcgattgaaaggggagaagcttcccaaaacagtttatctcctttccaatcagttatgacacccccagcacctttagtaacaggaatcaccaaggaaatcgggaaaacatgactaccaacaacaagatctacaaaaccagaaacaaaagggcatatgcatagcagtcgcagccatacaagggaattttaaccttgcttttaacacgaatgaatgccttttctgcatctccactgaacaaatgtgggcttgtggggtacaggtatgcttgagaaaggtccgcacaagtgcgtgtagatatttcttgtccgttcagtgagggtctctttcctgctatcccgatccaccttttctctctctctctcattctctcacttgagcaatcagcagcagctacaccaccacgtccaattcgcttttagtgtttgcttcctcttccctctccagtcctgccaaaaccaagttcctgccctcactttctagattttctgtcaagcgtctctgcttcctttcccaaactcgtccgcacatttccgtgaacaagccctccatgaacctgttgaacagactcgggtttggcagcgcaagagcaccagagaacatggattcatccattcctcagggtccagatgatgacataccagcaccaggccagcagtttgccgagtttggtgctggctgcttttggggtgttgagttggccttccagagggtgcctggtgtgaccaagacagaggttggttacacccaggggcttgtgcataatccaacctatgaggatgtgtgtacagggaccacaaaccactcagaggttgtaagggttcaatatgatccaaaaatttgtagctatgagactctgcttgacgtgttctgggctagacatgatcccaccactctgaatagacaggggaatgatgtgggaacacagtacagatctggaatatactactacacaccggaacaagagaaggcggccaaggagtcattggagcaacagcagaagcagttgaacaggaagattgttactgagatccttcctgccaagaagttctacagggcagaggagtaccatcagcagtaccttgagaaaggtggccgatctggtttcaagcaatctgcttctaaaggctgcaatgatccaattcggtgctatggttaactgccataaatgaattgccatcaaagatcaatgcaaccggttcttcagatattgaaagtccatagttttgtttgtatttgttaatatatcaacaaagcttgtgcacactgtatttgaggttgaagatggacatagccataaattcagttgtagagttgtatattgtcttttatatataatatggctttgctttaaaataatatcacaatacgttagtgtccgttggtgagaaatataagggggaagggaagataagtattattatctcttaacacaggttgatcaattatgccaaggattggtgtgccattttgtagaagagcaacgagagtaccaaatacaggtttcccagtaataaagctcttagtcccatctatgggatctaatacccaaacataatcagcattcttttcttcacacctccacccattttcctctccgtaaatggcatgagaagggaaattgtctagtatgattgaaaccatagcctcctcagcagattgatctgcaatggttactggactgagatcatgtttgtgaataacgtcgaagttttttctgaagtatttgcggataacttctccggcagcatcggcaactttgttaccgacctcggcgaagcgattgagttcaagaggcgtgctgtgaggcgccatggctctgagacgaaaggcatattattgggaattggggactgagagagaaaatggcactgtgagaacattgcaattgccacaacccaaaattaatcccaatctcagtcatggcaggtcgtcttctcgcggccgta

SEQ ID NO: 106595 - DNA, 2366 bp, Glycine max
  Clone ID: PAT_MRT3847_67271C.1
tttttcttagggtatatccctagagaccattttatgttttggaagtccaaatccggggccaagtgttcgaatcttattatgcaatacacatgggcgccgctcacgggccttttttattcttttaggcaccttttttgcgaacttttagaatggaagttaaataattttttgtgcagcctaatctaatgtattcatattttattcagaagttcctagatggaactaattttaccttttttatatagaaaaagtattattatgtacttaatctaacaatttgaaagggatataattaatttctgtgattggtcgttcctatagaaaagagtttttaatttgattgatggggacaacaaacaaaaattgataactatagatatctatctatctatatagatagaattatagatagatagatataatttaagaagaaaatattagaaaaataaaaaaacagggtgttcttattcaaaacgtcctgtgatcttcaaccaattctgggcttcaatataattaccaggggttagggctatagcttgtttccaatattcagcggcttgattaaaccaagactccggaattcccgggtcgaccctgcgtccgtctctcttctgctctcactctcactctctctcactggggtacgtatgttgtgttcttcattttccaattgcatgttatctctcatttctcaattcaatttctcccctttccctcttccccttaatctgtgaggaaaagggaattatgggttctctttatttcagttcaatttttccttttagtgttaaaaatattacctttattattattattattattgtgtggagattgattcatgtaatttgttgaagggttgaagatgagaatttgtggagcagcaatcagcagcagctacaccaccacgtccaattcccttttagtgtttgcttcctcttccctctccagtcctgcaaaaaccaagttcctgccctcactttctagattttctgtcaagcgtccgtacttcctttcccaaacttatccgcgcattgctgtgaacaagccctccatgaacctgttgaacagactcgggtttggcagcgcaagagcaacagagaacatggattcatccattcctcagggtccagatgatgacataccagcaccaggccagcagtttgccgagtttggtgctggctgtttttggggtgttgagttggccttccagagggtgcctggtgtgaccaagacagaggttggttacacccaggggcttgtgcataatccaacctatgaggatgtgtgtacagggaccacaaaccactcagaggttgtaagggttcaatatgatccaaaaatttgtagctatgagactctgcttgacgtgttctgggctagacatgatcccaccactctgaatagacaggggaatgatgtgggaacacagtacagatctggaatatactactacacgccggaacaagagaaggcggccaaggagtcgttggaacaacagcagaagcagttgaacaggaagattgtcactgagatccttcctgccaaaaagttctacagggcagaggagtaccatcaacagtaccttgagaagggtggccgatttggtttcaagcaatctgcttctaaaggctgcaatgatccaatccggtgctacggttaattgtcataagtgaattgccatcaaagatcaatgtgaccggttctttagacgttgaaattccatagttttgttagtaagtatttgttaatatatcaacaaagcttgtgcacattgtatttgaggttgaagatggacatagccatatattcagttgtagagttgtatattgtctttgatatataatatgactttgctttgaaatattaaaaaaaagtgtcaatgtagctgctaattggactatttgctgtcaccattgaagcaaaaaagtatcttaatttaacataaaaatcattgcagggagtatttactggtgattgtagcacggagctaaatcatggtgtagcgattgtagggtatggaacaactgttgatgggactaattactggatagtgaggaactcttggggaccagaatggggagaacagggttacatcagaatgcaaaggagcatatctaaaaaggagggactttgtggcatagctatgatggcttcctacccaatcaaaaactcctccaataatccaacaggaccctcatcatctcctaaagatgaactttgaatgcttaccccaaaatcaaactctaatcacccttggttgttgttttctattagcatctcagattctatgccagtgtatccatcaacatatttatgcttattacatcccaaagaaataaatatttcaagttggtttgagtgatagc

SEQ ID NO: 106596 - DNA, 311 bp, Glycine max
  Clone ID: PAT_MRT3847_67272C.1
acaccatctacttaaatcccatatcaacttcaaattaccatacacaccctcaaatctaacttaattaaatacaaatatatctcaataaaattttacacaacaaaacattcactacttcttaaatccaacccactccacaaaaaacttccacttcaatattcacaatcataaacccatatcataatctctcataatcactaaatacattaaacaaacattcaacatcaaccccatcaaaccttcttatccacaccaaataacctattctattaatttatccaaattcattaattataatctctctaatcttc

SEQ ID NO: 106597 - DNA, 784 bp, Glycine max
  Clone ID: PAT_MRT3847_67273C.1
ggctcgagcctgacgtccgggctcttttgtttttttcatatatacaagagcattttgaagttgattatttcatctagaaaaggactctcatgttactcaaatgcttagcagcaatcagcagcagctacaccaccacgtccaattcgcttttagtgtttgcttcctcttccctctccagtcctgccaaaaccaagttcctgccctcactttctagattttctgtcaagcgtctctgcttcctttcccaaactcgtccgcacatttccgtgaacaagccctccatgaacctgttgaacagactcgggtttggcagcgcaagagcaccagagaacatggattcatccattcctcagggtccagatgatgacataccagcaccaggccagcagtttgccgagtttggtgctggctgcttttggggtgttgagttggccttccagagggtgcctggtgtgaccaagacagaggttggttacacccaggggcttgtgcataatccaacctatgaggatgtgtgtacagggaccacaaaccactcagaggttgtaagggttcaatatgatccaaaaatttgtagctatgagactctgcttgacgtgttctgggctagacatgatcccaccactctgaatagaccaggggaatgatgtgggaacacagtacagatctggaatatactactacacaccggaacaagagaaggcggccaaggagtcattggagcacagcagaagcagttgacaggaagattgtactgagatctttctgccaagagtctacaggc

SEQ ID NO: 106598 - DNA, 265 bp, Glycine max
  Clone ID: PAT_MRT3847_67274C.1
ggaaaatgaaacctttttggaagaaatttagggaccttttttgtttcccttttattttttttttaaagggggggtttttttacaacttttttaagttaaaattttggtgcaaaatgggagccaaagagggctgtgtgctaccaaattttttggaaaatgggactgaaatttttttatagcttaatttcttgatatgaagaagggctttaacttgcagcatgagtcctcacatggcactttttccctgcaatagtttttttttgag

SEQ ID NO: 106599 - DNA, 166 bp, Glycine max
  unsure (1)..(166): unsure at all n locations
  Clone ID: PAT_MRT3847_67275C.1
gttcgtctcgctgaaggaatngcttaggatcacattctttttcaagtttagnttctgcttcnggccaacctncanaagntctctgcntangnttttagggctcctttggttctgaattggantggatngcaattgggtgcctnaccngcnttngcnaaatngctgc

SEQ ID NO: 106600 - DNA, 132 bp, Glycine max
  Clone ID: PAT_MRT3847_67276C.1
aagcatgaataatattgacactaaaaacacgaccaaagccggcccccctgagggcacaattgttgatacatttgtctgggccaacaaaagctctatcaacaccatcccactccctaaggcacccggccaaaa

SEQ ID NO: 106601 - DNA, 384 bp, Glycine max
  Clone ID: PAT_MRT3847_67277C.1
aaaaaccaaattatgcaatttttaattataaggacatggaattttattcttaaatttgggggattaaaaatttaaaacctgtttttacccccccaagcttattcaaaatttgagggacacctcaaatgaataaaagggaaaaaaaaatgatgattttacggcctaagcttaaactttactattttttccggggaggaccttgcataattttttttcccttaagctaacatttttttaaattcccccaaattggggcttcctttgttaaataccccctttatatagccagggatatccgttttttttcacctccgcaaatgactttttcaacactccatcatatttggaaaccaatctgccaaaatatttggccttgaaaaggaa

SEQ ID NO: 106602 - DNA, 267 bp, Glycine max
  unsure (1)..(267): unsure at all n locations
  Clone ID: PAT_MRT3847_67278C.1
gcgggaaccgcccgccaagaacggcgaggggagcgaagcaccgcaagcggagacggagaccgagaaggagaggccggcgcacaagcggggaaaccaacccggagcccagccgcagaggacgccaccgacgacgccggaccacgacagggacccgccccccggcaacacccggaaggacgcccgcggcggcggccgaggacccgccacggccacccccgagcccggaaagcccacaacanggggcccaacagacgacanaggccaaag

SEQ ID NO: 106603 - DNA, 164 bp, Glycine max
  Clone ID: PAT_MRT3847_67279C.1
ggctcggagctccgggcactcagacatcatgagttggtccttgcacccccggaatttaattctcaacttctatgctctgttatttctctcttcaacatgtgtagcatatgttgctaccagagacaactgctgcatcttagatgaaagattcggtagttattgtc

SEQ ID NO: 106604 - DNA, 299 bp, Glycine max
  Clone ID: PAT_MRT3847_6727C.1
ctcgaaagctactaggcggcggccgcctctaagattggagtgtgggacataaatgacgacgagcgtattgcacaaggacaaagcctacagtaccttgagactcttgttcccgaatcaaaagtgagaagctttaaggaaaaaatgcttaatttaccaacgttccccaccgtgagtttgaaccaaaactttttattggggggtgtccctaactagcacccttacaaaacaagtagaaaggaccctattctatatctgatttggaataaagggagatttgggctagacacatttatccaggg

SEQ ID NO: 106605 - DNA, 165 bp, Glycine max
  unsure (1)..(165): unsure at all n locations
  Clone ID: PAT_MRT3847_67280C.1
caatatcctctcatagtgtgcttcttctgcttcattttcattatcaggatgtctttgctttcggagctcatgaacctcaatctctcataatccacagaggatatcgggtgtgagtacanagtggggttggtggatgtggtatgcgaccgcagaagcaaagccagg

SEQ ID NO: 106606 - DNA, 378 bp, Glycine max
  unsure (1)..(378): unsure at all n locations
  Clone ID: PAT_MRT3847_67281C.1
tatcacaattttacttatatctagtttcaatttacttgggaaagacttaataatcttgatcccttccaccagcgtattccatatgatttgtcttataggttccactgaactgttatctttgtggatacaaatacgggaggctgacatctatcgactctcttttgcggtagagcttcctgaataattttatgggaggttggcgtctcgacgaactgtctatttgataataatagtaatatctcgaattatcaatgttgctctccctatccttataatattgctttgtataacatcatccgtgggacaaattgacgctattaactttgcctgnttgattcaacaattctgctcatactaaaattgcaactactgtgtgtt

SEQ ID NO: 106607 - DNA, 521 bp, Glycine max
  Clone ID: PAT_MRT3847_67282C.1
ggctcgagcactctttcagtgaagcaatatgcagaacgatgctgcaaaatcaacttcctgataataaattgagctcacaaaggatgacccaacataactccagtgttcaatacacgaagtcagcaaatgtttttagagggaaactattttgtttctcaaatttatatcctgaagaaaaggtaagtcattaggatcttaataggtttaatataattttgctgtagaattgtgagttagggatcaatgcccaggaagtttgaaagacagaagtaggataagaggaatcttgaatgttctgattgataaaaaactgtttagttggtgaactttgggattgatatagacttcatctcaaaattatttcaaaatagaaaaatcaccggcatacatggacaaagtatatttaagtttttagacatcaatatgccacaaccttattctatcaaaaccttggaacttaatcagtattagagatgtaatataaaaatcattcatgtgccttcacatcactacttaagctt

SEQ ID NO: 106608 - DNA, 673 bp, Glycine max
  Clone ID: PAT_MRT3847_67283C.1
aattcggctcgaggtactattagaaaggggtatccctgatacagctctcatggtcttgaggtgggctgggcgtgatggtggacctcacttgacttcactcagagatggtgtcactgcagtgcgggtgagggttgagtgtgggcttctgactgaagcatttatgcatcagagagtgctctgcaccagagtgaaggaaaagaatttcaataaaacagcatctgggaatacttctgagaagcaaaaaggtcaatgtaataagtgggtggagtggatggaggtcctggtgactgagatttgttgcctctgtattaggaggaacttggtggatcgaatgctagaattgccatggaattctgaggaagagaagtatatacataaatgtcttttggattatgctattgaagaccctttaaggacaacaggaaatctacttgttgtgtattattttcagcgccacagatactctgaagcatatcaagttcatattaaacttgaaaaggcggagcaagattgcatttcaaaaggttccgtaagtcaacaaaatctgccagtattagagaaggctattcacttcagagccaatttgattaatagatgcttggaattgttgccagaagttgagcagcagcaactgaagagcggaaacttgactgaaaggtgtgttacttcttgt

SEQ ID NO: 106609 - DNA, 259 bp, Glycine max
  Clone ID: PAT_MRT3847_67284C.1
atatttctccgttttttgcatcatgggtttttccctcaaaatgggttcttttgagatgatgagttggtgagtactgtggtatttattttgggttttggcttcaatttggactgcatgaaatggcttctcttgtgaggaagttaaggcctacgtctgtgcctactgttactgtggaaactttaggtagcttaagcagctatgagtactcccttgctgtggtgtagaatgggcctcctgtaagttactccattcttgaaat

SEQ ID NO: 106610 - DNA, 511 bp, Glycine max
  Clone ID: PAT_MRT3847_67285C.1
catggtaatcctatatcaatggatcaatttcagcagatggaggggtttcaagagtttgaagcaaggaggaaaaagaagtttgacaaacaaattgattcaaatgtgatgatcggttccaaaggtcttgatgagggtgttgatctatgaagtgatcttaggcttgttgatggggtctttcagttgtacatttggatgagcttttggatgtagcgtggaatacaaggtgtcttatccatgccttttatttcacagatgaaataagtttgtggggatccttgtgtcacgttgtatattattgtttttttttgttaccctatccaagtttgcctacaaatgtgctggattgtaaatgctggcattatacaggcattatacagcactagactaaatttccctatatggtatttgaagtcattttgttgataatgatatatgtatctcagcagctgtaaattaaaaaggcattgcattctttgccctgaaaaaaaaaaaaaaaaaaaaaaaacaaaaa

SEQ ID NO: 106611 - DNA, 572 bp, Glycine max
  Clone ID: PAT_MRT3847_67286C.1
acaatcttaaattcatttttatatttcgtgcccattcatattctttcttataaaaatcagtgtgattgtttaacaagttgacatttacgtccaaagtccaatgatcaataaaataaatcattaagccaaaaaatgctaacaagatataaatgaatgaattactacaaacacctctgaccaataaaacgaattggagcctgagttcaacttgaacatccacaatctacagcttccacaatcctcctgcccaattacgcaaaaagatggaaaaatgtcaaggctccgtgcaatatatacaaatacaacctgtgcctgctgaacaatccattcccacagggtgaaacataacagagtcaatccaatcattttttcagaaatggtttctggcaaacaagaagccgctgatcactgccattctgaaggtcaattatccttgcttcccaacgtacttgtgcagcaagtgtgcgagccatctctatagctcccatgttatcagaaagaatgacccatccctctggacgcagtattctgtccatctccaagaataagttcatcaagctgcacctctctga

SEQ ID NO: 106612 - DNA, 136 bp, Glycine max
  Clone ID: PAT_MRT3847_67287C.1
cttaaatacttacacttccttaatggaatatgggggagcgggttaatatctgtatttctttactttaattgcttacctttgatactgcatactttgacattaacttcagaatgcttaacatgtgccctcttaacca

SEQ ID NO: 106613 - DNA, 181 bp, Glycine max
  Clone ID: PAT_MRT3847_67288C.1
gacatctccatctcatcccgatgggatagctgataatatccacgaggttagtgaatccgaattatttatcatctactctcagcagatgtgcacaattgaagtacataactcgagccaccatatgtgtgcacaatgcacactatccctgtaatgccacaacaagccctaccctgccactgct

SEQ ID NO: 106614 - DNA, 307 bp, Glycine max
  Clone ID: PAT_MRT3847_67289C.1
ttactcttgcttggtatttcgacgtctagatcttcaggatatagcgtctcttatggaggaccggtcaaactccaaggaagctctatcaattgcgtcgcgctctcgccttacccttgactgggtgccctaattgacagcatacgatatcgtaccttttctcgaccttgttctcactccaggctatgaaacacacgccacattggctgcgtatcttgccaacgaggatgaacatgagatggaagtagacactctaacatctgctattcaaaccccagtcaaacactttatgcctgagcaagaaatatac

SEQ ID NO: 106615 - DNA, 231 bp, Glycine max
  Clone ID: PAT_MRT3847_6728C.1
tttttacataacataactgatgcgcatgcttgctggtctgcttcaacctgacactggtgggatgctttaagaggaccagaatatattggtttgtaacattaccgtgtgggaaatctatgtgggtcaaatgctcttagtgccatacgacatatttagtaagtttatggcatgttatatctcacctgcataggtgattgtatatctcaaaaggcaagctactgaaatctatgt

SEQ ID NO: 106616 - DNA, 395 bp, Glycine max
  unsure (1)..(395): unsure at all n locations
  Clone ID: PAT_MRT3847_67290C.1
ttnngcgancgcctnnccttttatggatttccgctattttattttttattgttatggtcctacaaaatttacctttccgccgtgggaaagaatcatgagttgtttcagctgttgcgaagaggatgacctccataaggctgctgaaagtggaggaccctatgttgtaaaaaatccagcagggaatgatggaaattatcatgcttctcaaactgcaaagcagggcactcagcctgttaaacctcagcccattgaagttcctaatatatcagcagatgaactgaaagaagttacggataactttggtcaagattctctgattggagagggatcctatggaagagtatattatggtgttcttaaaagtgggcaggctgcagcaatcaagaatttggatg

SEQ ID NO: 106617 - DNA, 491 bp, Glycine max
  Clone ID: PAT_MRT3847_67291C.1
aaacaaagggaaaaaaaattcccccccaataaaaaaaaaacacccaagggccctcaaacacaaaaaaggccaactttttccaaaatttcgtggggtaaaaaaaaaaccccccgggggggaaggcattaataaaaaaaaaggggggggggaaaaggaccttcgggaagttcaaacccccataaggggggaagggcaccaaaaaaaggggtttttggggggcccaaaccggacaaggggcaaaaacccccaggggggccaccgggaaaaactggtttgggcgggggaaaaacttggagggtccccccaaccccaagggaaaaaagggggaccggggggaaaaaaaaatgggcatccaggggacggaaacggggttgggggggcacaaaaaaaaaaacccccgcaccacccgggaaaaagggcggggggcccttggccttctaaaaaccgggacccacaaggggggaaacctaaaaccggccggggagctgggg

SEQ ID NO: 106618 - DNA, 2065 bp, Glycine max
  Clone ID: PAT_MRT3847_67292C.1
aattcggctcgagttttgcgatcgcctttccttttatggattaccggtattttattttttatttttatattcctggggggtttacctttccgccgtgggaaagaatcatgagttgtttcagcacgagaagacagaaggggacaatacaccatgatacttattatttgtagagataaataaagtgccacatccgactgtcacaaacctcgcatatttttcccctctctgtgcactatatcttctgctctccttccttaaaaataaaaatcattgtaactcatgtctaataatgcactaataactctgtaacaccaccttcataattccgattccagttcaaagcgactcaagcacttgttcgactcttttatcctacgcactcctccctgcttatcctgcgcatctttcacctagatcctccccttcactccttcactttccaccatttcagtgggaaagaatcatgagttgtttcagctgttgcgaagaggatgacctccacaaggctgctgaaagtggaggaccatacgtcgtaaaaaatccagcaggaaatgatggaaattatcttgcttctgaaactgcaaagcagggcactcagcctgttaaacctcagcccattgaagttcctaatatatcagcagatgaactgaaagaagttacagataactttggtcaagatgctctgattggagagggatcctatggaagagtatattatggtgttcttaaaagtgagctggctgcagcaatcaagaagttggatgccagtaaacagcctgatgaggaatttttagcccaggtttcaatggtatcaaggttgaagcatgaaaattttgttcagttgcttggatattgcattgatggaagctcccgtattcttgcttatgagtttgcatctaatgggtctcttcatgatattttacacggcagaaaaggtgttaaaggagcacagcctggcccagttttgacatgggcacaaagagtaaaaattgccgtaggggctgcaagaggacttgaatacttgcatgagaaggctgatccacacattattcaccgggacatcaagtcaagcaatgtgctaatctttgatgatgatgttgctaaaattgcagattttgatttatcaaatcaggctcccgacatggctgcacgtcttcattctactcgtgtccttggaacctttggttatcatgctccggaatatgcaatgactggacaattgaatgctaagagtgatgtatacagttttggcgttgtccttctggaacttctgactggaaggaaacccgttgatcatacactaccacgtggacagcagagtctggttacttgggctacaccaaaactcagtgaggataaagtcagacagtgtgttgatacaagactaggaggagaatacccacccaaagctgttgctaagatggccgctgttgctgcactgtgtgtgcaatatgaagctgatttcagaccaaacatgagcattgtagtcaaagctcttcaacctttgttgactgcacgacctggacctgccggtgaaacaccaaattaatctttgtatcactttctctctatatttgtgagtatgtgcacaagtgtgcatgcaaaatataagagactgcttcagaagctggtggtaaattgctcagacatgactctatatcccattgtttacactgcattcattttgttcataatccatgaggttctttgcggttttcttgcttttattcattttattgtatttgctttctctattttttcccccttctatccttttacttctgggatgattgtcatctttacgatgaagtgttgggaaaaactacaaaacagaattgtgtatactcaaagctaagagcaagtcaatggactatctctactggaaacagttattcaccaagagccgttcttatcagattgattcttttaattttttcttaaactgtttgtcaaattgagacttgtataaattactcataatttcaattccaatgttttaggacatatgctcaatgttgtggctgttgtttcgtatgcgatttaatttttttaatcgatatatgat

SEQ ID NO: 106619 - DNA, 329 bp, Glycine max
  Clone ID: PAT_MRT3847_67293C.1
cacgggtgcgataagacgacaaaaggggattcacacaactaactaataaagtcttgcatagccccccaaaaatgaagagcaccatcttctttgctctctttctcttttgagccttcaccacctcatacctaccttctagtatcgctgatttggcgctcgaaaatgaaggtaaccctcttgaaaatggtggaacatactatatcttgtgagacataacagcatatggaggaacacgagcagccccaacggtaaaagagacataccctctgactgtggagcactcacgcgatcagctcaacgcaagaatagggacagatcatatcgttccc

SEQ ID NO: 106620 - DNA, 339 bp, Glycine max
  Clone ID: PAT_MRT3847_67294C.1
aagaaagcaattttgaacttgaccctttatttggtcaccggggttggagttcaaaactgcacaaggggcacttggtctctaaaaatgacaaacggaaagctaaactcgcctttaaaggacgctcttgtgttcactggagggggctcttgttaataatagctattaacttcagcgatcaacgccttcaattttggcttccacttctgaatacaaccgcctgagcttgtaaaaattatgttccgaagggtgccaataaccccgtcacttggcttccaagaatggcgggcccattttcccaagggggtctggattagggcttatgagcgtgactgccatttg

SEQ ID NO: 106621 - DNA, 774 bp, Glycine max
  unsure (1)..(774): unsure at all n locations
  Clone ID: PAT_MRT3847_67295C.1
ttatttatgttaaaatgttcctagagttatgattcatgatacgattcgattctccgttcgaaaaaataggcgtgctggttcatgatttgaagcccattttactaccatgattaacaatatataatttggaaacttcaagcagaatgatttacgaaaaacacttggtagaaatggtgctccacatgacataggtagtacatgtgcagcaaactgacggacataaatgctggttggcaaaaatgtcaagcccatgccaccatgaatcctaacaggcagaatcagaaccatcaacctttttggcaggggcagaccaccagcgtttgcggccctggaaggcattgatgatgtatcaaaaagaaacaagcatagtacagcaaagaaaccaaacatatccagatcagaaacagcaattaagcatgtacgaatacatttactcactctgttcattttacgtttctaccatacatatacaatcgcgcaccgcattaaggaaagaccccacacattcacaatcagtaacgatcaagatcaagcacaatgtgaaactcctaagtgaattttaagtttctaacctaggattattaacaaccagagaaatttcagctgaactaaccgctaacaaggtcaaaacctaacagcaggtcagctgagtgatgcagatcgacanattgtancnnnngatcaggaatgtaagatttgctatccgaaatgaaaaacctaatannnttttgacaganncagaccnngagagggtgaggccgannaagacaatga

SEQ ID NO: 106622 - DNA, 206 bp, Glycine max
  Clone ID: PAT_MRT3847_67296C.1
gaattcgagcttgtgacccggggatcctctagagtcgacctgcagaatgaacagctacaataaaatttactttgtatggtaaattgaacattgtacaattaaatctaaactgaaataattttcccaacaatatattttttgaagtctcttaattgatgggtataaaactgaccaagcataaagaaagctttgttttatgaaagaag

SEQ ID NO: 106623 - DNA, 3258 bp, Glycine max
  Clone ID: PAT_MRT3847_67297C.1
caaaagtaagagaaaaagggattcccagttgacaccattgctcactcaggtgaagtgtttgtgtgtgtgtctgagaagagaaagaaaagaagattcttttgctgtctgtctctcatatcacaactcacacctctcttttgcttgttgtttacaagatataggatttttcttcattgctgatgagtaatgttccttcctattttccttttctctacacctctctccacgcaccccctactacctttgttttgagtttgaggaatataagaaaaatgaaaatgggtaaaggaattgtttttattgttgctctggtggccatttgccttggtgggaaatgggtggaagcgcaggtgcatcatgttgtcggagcagaccgtggttgggatcaaacctccgacctcgtttcttggtctgcaagcagagtcttcagggttggagaccaaatttggctcacttactctgtggctcagggattagtcgctgagctgaaaagcagagaggaatatgaggcatgtaatgtgagcaaccccatcaacgtgtacacagagggtttgcatactatccctcttgagagtgaaggaatgaggtattttgtgagcagcgagccagagaattgcaaaaatggtctcaagctacacgttgaggttctgcccaaggctgatgaacgtatcacagagccttccacttctaccctaacagatgaggctgtggcgcccactactccttctggttcaccacgttatgctcacaacactatgttaaagctcacggttatattgtttctcatcataggtcttgcttactgacacctgtcccaaccctatatatgtatttaagacactattttgggatttgggaccctgctatgtgccattttttttaatgtgggtatatgtctagtttaagaaggattttttttttgtcttgttttatgaatttaactgttatgtttttaagagtaagaattttaattcctgaaattacagtgactacctattgcgcaaccggttaatgtttggtttttccctccatagtccatttccttcgtctgagatataccgaacccttcctgttagggatgaacttcttagagctcttctgaattctgaccttattgggtttcatacttttgattatgccaggcatttcctctcctgttgcagcagaatgcttgggatttcttaccaatccaagcgtggctacattggccttgagtactatggaagaacagtaagcattaagattcttcctgttggtattcatataggtcagctccaatctgtcatgagtcatcccgagacagaaagcaaggttgcagagttaaaaaaacagttcagagatcaaactgtgctgctcggggtggatgacatggatatcttcaaaggaatcagcttaaaacttttggccatggaacaattgcttttacaacatcctgataagaggggcagagttgttctggtccaaattgctaaccctgcaagaggccgtggaaaggatgtgcaggaggtacaaagtgaaacttatgccacgatgaagaggataaataatgcatttggaaggcctggatacacacctgtagtcttgattgatacaccacttcagagttatgagcgaattgcttattatgtgattgcagaatgttgccttgttacagcagtgagagatgggatgaaccttataccctatgaatatatcatttgtagacaaggaaatgagaagatagatgagattttagggacagacctgcttactcaaaagaagagtatgctggtggtgtctgagtttattggctgctccccttcattaagtggggcaattcgagtgaatccatggaacattgattctgtcgctgaagctatggattctgcgttgatggtcccagaggctgaaaagcagatgcggcatgagaagcattataggtatgttagtacacatgatgttgcgtattgggcacgtagcttcttgcaggatctggaaagggcatgtagagatcatctgaggaggagatgctggggaattggttttggtttaggcttccgagtgattgctttggatccaaactttagaaagctatctgtggaacatattgtttcagcttataagaggaccaagcaccgagcaattcttttggattatgatggcactatggtgcagcctgggtcgatgagtttaacacctaatgctgaagccgttagcatcttgaacatcttgtgcagggacaccaagaattgtgttttcattgtaagtggaagggagagaaagactcttactgaatggttttcttcttgtgaaaggatgggaatcgctgcagagcatggttattttgtgaggacaaatcgaaatgcagaatgggatacttgtattccagtacctgattttgagtggaaacagattgctgagccggttatgcagttatatatggaaacaactgatggttcaaacatagaggccaaagaaagtgctctagtttggaattacgagtatgcagaccgagactttggttcatgccaagctaaggagctttttgatcatctggaaagtgttcttgccaatgagcctgtttctgttaaaagtagtccaaacattgttgaagtgaaacctcagggtgtgagtaagggtattgtagcagaacgtcttctcttaacaatgcaacaaaagggagtgtttccagattttgttctatgcattggagatgacagatcagacgaggacatgtttggggtaatcatgaatgcaaaggcaaccctatctccagttgctgaagtgttcccatgcactgttggccagaaacctagcaaggcaaagtattatttggaagacacaagtgagattttgagaatgttgcaaggccttgccaatgcttctgagcactctgctagaattttgcaaccagcttctcattaaggtctttttaatgtgtagcacacgcacacacacactatttggctacaatgtggtactatttttctatactatggtgggatatctatcttgtgttagatttcgtgatctatttttattttctggcctacttgccttcatttattgatatcccaacgatgttacaactaccaataggttgttttgaaagtagtgaattacatggggtattgtatttattgtttcttttcttgactattggtttgggccattttgatgtatgataaagtgatttttgattgggaatgaatgaatgctaggattgtgaatctactgtatcaagtaacatctcttgttggcagaaaaaaaatctagaag

SEQ ID NO: 106624 - DNA, 129 bp, Glycine max
  Clone ID: PAT_MRT3847_67298C.1
gccacccacaaatacctgttttgttattgagtgagaacgtgtgagtgaaagtaagcaccatggcttctttctcaaaacaaggactcaaccattactgtgaacagctcccgaaatgctctttgttaacca

SEQ ID NO: 106625 - DNA, 968 bp, Glycine max
  Clone ID: PAT_MRT3847_67299C.1
cccgggtcgacccacgcgtccgtacggctgcgagaagacgacagaagggggtgtgggaggagagtcacaactaccagtccttgctttgcatcgtgtgagtttgggagaggaaggaagctactcggaaagttattccttcctcagcaaaaaaaaaaccattcctttataaccataaagcgccttctttaattttcttcaccaccactccattactctctccacgcaccccctactacctttgttttgagtttgaggaatataagaaaaatgaaaatgggtaaaggaattgtttttattgttgctctggtggccatttgccttggtgggaaatgggtggaagcgcaggtgcatcatgttgtcggagcagaccgtggttgggatcaaacctccgacctcgtttcttggtctgcaagcagagtcttcagggttggagaccaaatttggctcacttactctgtggctcagggattagtcgctgagctgaaaagcagagaggaatatgaggcatgtaatgtgagcaaccccatcaacgtgtacacagagggtttgcatactatccctcttgagagtgaaggaatgaggtattttgtgagcagtgaaccagagaattgcaaaaatggtctcaagctacatattgaggttttgcccaaggctgatgaacgcatcatagagttttctaccctaacagatgaggctgtggcgcccaccactccttttggttcagcacgttatgggcacaacactatgttaatgctcacggttatattgtttgtcgtcataggccttgcttactgacacctgtcccaagcctatatgcgagaacaattggctctatatatgtatttaagacactattttgggatttgggaccctgctatgtgccattttttttaatggtgtagatgtctagtttaagaaggaaattttttgtcttgtatttatggatttacctgttatctggagtcttg

SEQ ID NO: 106626 - DNA, 292 bp, Glycine max
  Clone ID: PAT_MRT3847_6729C.1
agctcgtatgattttcctgggggcattgcaagccacggatttcctatccatggcctatgcatcgcgatcacgaatgcccacgttatggatgatagtcgttgcagccacctcatgaattcttgatcctccatttgtacaactgaaggagatgactatactcttgatgagaagctaccaccatgctatgatagggaagattcgaatgaccccaaaggactcgaagccaacttcttgagatatattaataaaattcggccacttgcaatgacacactcaccggtagaacttctga

SEQ ID NO: 106627 - DNA, 474 bp, Glycine max
  Clone ID: PAT_MRT3847_672C.1
gagacaagttggaagcttcaggtgggccagtttcatctcgttactcttttgctggcccttcatttcaccgccaataacttaatttgcattttttgaattccttgacttgtgttccttagtatctttcaaattctggtgactgaaaaaaaaactgtgagaaatcctacatacttgagcccttctggatttggaaaatcatttctgcctggtgagatttcaatatggtcaatatgatgattggtagctctggaactttagatgagaaggctagtttgatatcaattgatgaatactggtttgaatatgcggttgtggttagttactgtatgctgctttaatggataggaagatagacaaccatcgtttcagttagtgcaaacaactcgtgttgttgtattttgtaggctggtaatttgggaaaaccatacatgaacaaataaatcccttacaaactcatgcatgcaattggataac

SEQ ID NO: 106628 - DNA, 264 bp, Glycine max
  Clone ID: PAT_MRT3847_67300C.1
aaatttcaatatgattcaggccaaacttcaaatcgaggtcaaggatttatccaggtatatatattttgaggggttatctaatttttatttattgagggttatctaatttatctcaagtaattaagaataagaataaacaactccattgttgatgattggtacaatttttctatatatacttcaagatactggttggcctgtgggtattaatttaactccatttttacttaatataagttagacaatcttatattttgaaccaac

SEQ ID NO: 106629 - DNA, 354 bp, Glycine max
  Clone ID: PAT_MRT3847_67301C.1
gattgtagaatttttttgcaactatataatattggaggttaggaatgaagtcagtgtacaattatgtcacgttgagaggaagtacagaaaggagaggctgctggagccgaactggagggaaaacgaatgcttcttgtaagggagggagaaagaaaaagagagatgcgaagcatggcaagctccgcttcctcgcgaggcattgcagctatcgtcggtgtgggccccaacctcggcctctccatcgctcgcaagttcgctcacgatggctacacggttgccatcctcgctcgtgacttggggaggttgtcaagatttgctgatgaaatagcgagggaagagaaagcgcaagttttt

SEQ ID NO: 106630 - DNA, 954 bp, Glycine max
  unsure (1)..(954): unsure at all n locations
  Clone ID: PAT_MRT3847_67302C.1
tacggctgcgagaagacgacagaaggggacagtgagtgtgggaggagagtcacaactcacaactaccagtccttgctttgcatcgtgtgagtttgggagaggaaggaagctactcggaaagtgattccttcctcggcgaaaaaaaaccaaaccattcctttataaccataaagtgccttcttttttcttcaccaccactccattactctcttcacactccacacacacacacatacacacctctaccttgtgtttgagattgaggaatataagaaaatgaaaatgggtaaagggatgatttttattgttgctctggtggtcatttgccttggtgggaaatgggtggaagcgcaggtgcaccatgtggtcggagcagaccgtggttgggatcaaacctcagacctcgtttcctgggctgcaggcagggtcttcagggttggagaccaaatttggcttacctactccgtggctcagggattagtcgcagagctgaaaagcaaagaggaatatgaggcatgtgatgtgagcaaccccatcaagatgtacacagagggtttgcatactatcccacttgagagtgaaggaatgaggtattttgtgagcagtgaaccagagaattgcaaaaatggtctcaagctacatattgaggttctgcccaaggctgatgaacgcatcatagagtcttctaccctaacagatgaggctgtggcgcccaccactccttctggttcagcacgttatgggcacaacactatgttaatgctcacggttatattgtttgtcgtcataggccttgcttactgacacctgtcccaagcctatatgcgagaacaattggctctatatatgtatctaagacactattttgngatttgggaccttgctatgtgccattttttttaatggtgtagatgtctagtttaagaaggatattttttggcttggatttatgga

SEQ ID NO: 106631 - DNA, 1350 bp, Glycine max
  Clone ID: PAT_MRT3847_67303C.1
cggtcttgtgggtagatgtgttcttgatatgctctaatgcaatgcaatataattcctcagataccatttaccatcgacaggcccgagccatgcaagagattgcaaggaaggactttgagaatctgagacaagatagtgatgatgatagtgaaccacagcccaaaattgtgcagaaaggaaggccaccaggcaagcactcaagaaagtcactgggacttggtatgcctccttctgagcgtgttggtcctgaatcttcttctgatgcaactctggcttctggtgcggatattggtagtggctccaacggttataaattcagaaaagtacccagcaaatttcagcccacagattcatctgccagggcctacaacagcacttttaacagtggagggtatactggctgttctgattgggagaatgaatttccagcttctgttgttaaagctgtgctaagatatggaaagaagcagtttgcagttgatgagaccaggcgtgatacttacaaaaatccagtgactttaggaaatgaacgaccgggtgttgtccacagttgaagatgaattcaagcaacttcttgctgtaggagtacacatgaagcatagctatgcaagaagtctagcccattttgctgcaaaccttggtcctgttgtttggaagattgctgcaagtaaaatcagaggtgtgttgccagctggacatgaatttggtcctggatgggtaagtgaagatgatgggtcatcacagaggcgacacttcccagtttgtgatgagggtagaacttcagaccctcctgtaccagaggattatagaagtagattttcttctccatctggatcgctcccccttgcaaatagaccattctatcaaagtggagacatggctatagataattaccaaaatgagttgaatccagtaatcaacattcctggtgggtctgaatccataactcctatgaggattcagcaggaatccatggtgcactctgatgattttggttcacatgatcggttaggctctaattttccatcccaaatgaagatggtaagacttgctgatctaactgggacttcgagtgctggggttgttcctcaaatgtttgacatggatcccccataagcaaccccactgtgcatacaaatgttgattcttcttttcagggtcagcacttgagcaaattaagtcaattcggttctggtgatttattgtcccgcgaacctggttacagctctgataatatatcgaaagggcctgtttgcagatcatgaggccaggcatggtacttaccaacatcccgggactcttgggctcgtgcgaccgacgttgtccgaaggattggaactacaaactcac

SEQ ID NO: 106632 - DNA, 592 bp, Glycine max
  unsure (1)..(592): unsure at all n locations
  Clone ID: PAT_MRT3847_67304C.1
ctgcaaacaacatctatggcctttgtttcactacatgcttccactgtcacctgatcttggcggtcgttttgataggtccctttggcaagcttatctctctgtgaacaagatatttgcggataaagtgatggaagtcattagccctgatgatgactttgtgtgggttcatgactaccatttgatggtacttccaacatttttgagaaagagatttaacagggtgaggctaggattcttcctccatagtccatttccttcgtctgagatataccgaactcttcctgttagggatgaacttcttagagctcttctgaattcggaccttattgggtttcatacatttgattatgccaggcatttcctctcctgttgcagtagaatgcttgggatttcttaccaatccaagcgtggctacattggccttgagtactatggaagaactgtaagcattaagattcttcctgttggtattcacataggtcagctccaatcagtcatgagtcatcccgagacagaaagcaaggttgcggagttaaaaaaacagttcanagatcanactgtgctgcttggggtcgatgacatggatatattc

SEQ ID NO: 106633 - DNA, 304 bp, Glycine max
  Clone ID: PAT_MRT3847_67305C.1
gtctctcgctacataatcatatgaccacaagttcaagctccctagttatgaacagcatccatacgcatccttggaccccgcattcgtctatgactggagaatactgacgaaggccggtgcgtaacctgctgcactcacctactactggcgcatgaatatgcctgagacaccgcgttacactctcctggtggccaagactgctaaacaagctgctgcagacatgtctggagtgctgcatctggaacttgaagctgaagacgagaacgtgaagatatcgacagagaatgagagtttcacgtatggt

SEQ ID NO: 106634 - DNA, 699 bp, Glycine max
  Clone ID: PAT_MRT3847_67306C.1
aattttgcgtccacacaggaaagcattttcagtccaatgaaggggtttgggccagaaaataaaaatagatccggaattttaacacaagatagatatccccccatagtatagaaaaataggactcgagcagaaacctagcaaggcaaagtattatttggaagacacaagtgagattttgagaatgttgcaaggccttgccaatgcttctgagcactctactagaacttctttgcaaccagcttctcattaagctttttttggtcagttttcttcatatgtgcacaaatttcagtgagtggttcttttctttctttagcaacaattgctcgtacaattaattgggggccgaaagctgtggacttgtggtcatataaatgttttaccgaggtggtcatttctgaatttatagtcctaatgttgcagagaagttttgtctcagttttgtgtcaatagattgctcacagattgtgcaattcacttttaatgtaaataattattattgggtctcagatggtagttccctttcaatgcaattaattattgttgggttagttagttacgaaaatgtcggttccgaaactatacagattttaatgcaggagtctaatgtgtagcacacgcacacacacactatttggctacaatgtggtactatttttctatactatggtgggatatctaacacaagatctcgagccg

SEQ ID NO: 106635 - DNA, 531 bp, Glycine max
  Clone ID: PAT_MRT3847_67307C.1
tttgggctgattgatgtgcttgtttatgtgcttgtttatgtgcttgtttatgtgcttgtttatgtgcttgtctggctgctaacctttgggctgatttatgtgcttgtttatgtgcttgcatggtcgtgagaagatagaaggggatatcgaccgagagaaaaacaacggaggtccatatcaaggccgcccgtacctccggatccccaacccccgcaagtaccctagacacctacagagcggagggcgtaggggaacgcgggaggctcatcatcttagacaacgaagtaacaaagtccaccttccgcgctctcgttgtaaaagacgaaaacgccaaagccatcaagaaccgtcgcgtctagactgagaaatccggtaagaatttcagccgctcgcgcgtcgccacgtctcctaatatagtaaaaacgctcggagttgacttcaaggccgttacaattactctaaaatgtcgtaattccgtcaactgtttcgccggcataagcgcggattccatatctccttccaagacagcat

SEQ ID NO: 106636 - DNA, 672 bp, Glycine max
  Clone ID: PAT_MRT3847_67308C.1
tcctctagagcggccgcttttttttttttttttttttttttttttttcctgcaggaaaataaaatagttactgatagcgcaataggtagtcactgtaatttcaggaattaaaattcttacttttaaaaacataacagttaaattcataaaacaagacaaaaaaaaaaatccttcttaaactagacatatccccacattaaaaaaaaagggcacatagcagggtcccaaatcccaaaatagtgttttaattacatatatagggtggggacaggggtcagtaagcaagacctatgatgagaaacaatatacccgggagctttaacatagggtggggagcataacggggggaaccaaaaggagtagggggcgccacagcctcatctgttagggtaaaaggggaaggctctgggatacgttcatcagccttgggcaaaacctcaacgggtagctggagaccatttttgcaattctttggctcgctgctcacaaaatacctcattccttcactctcaagagggatagtatgcaaaccctctgtgtacacgttgagggggttgctcacattacaggcctaatattcctctctgcttttcagctcagcgactaatccctgagccacagagtaagtgagccaaatttggtctccaaccctgaagactctgcttgcagacc

SEQ ID NO: 106637 - DNA, 533 bp, Glycine max
  unsure (1)..(533): unsure at all n locations
  Clone ID: PAT_MRT3847_67309C.1
taggtcttggagcatcccttgccgccaaggagacgggcgaagagcgaagaactgttctgttcgtcggagatggatctttgcagcttacgctgcaagaaatcggcacgatgcttcgacgcggcgtgcacccgtacctcttcgtcttgaacaacgacggatacgagattgagcgacaaattcacggagagaaggcggagtacaacgacatccagatgtacgaccaccaggccctccttccgttcctggcgggcaagaagtcgaaggtgccgtacgagtcgatcgaggtgcacacgcccgaggagctgtcgaagctgctgaaggacgaggcattcaacaagccggacaaattgaggctcatcgaggtgtacatgccgcgaggcgacgcgccggcgggactggtcaagcaggccaagttgaccgctgaggcgaacgcgaaggtgtagagcgaaggtcaacgaaaagttcagaaagatcgattttgctgtcatactgtttcatagatgcatcccgagaatgtcaccactagctccntg

SEQ ID NO: 106638 - DNA, 373 bp, Glycine max
  Clone ID: PAT_MRT3847_6730C.1
atctattttatctagtggcaaattccttcttgaggttcagcagcatacatctgttcatgctgagcatgtcgaagctgattatctattgattgctagtggaagtagccgccagggttatactcttgcatctcagcttggtcattcagttgtagatccagtgccgagcttgcttactttcaaaatagaagatttgtgtttgcgagagttgtctggcgttacattccccaaagttaaagcgaggctaaaattggatagcgtccaaaggaatatacctcagcttactcaggttgttcccatgttagttacacattgggggcttagtgggacggttgctcttccattatctgccttggggcgctccctccctgctccc

SEQ ID NO: 106639 - DNA, 265 bp, Glycine max
  unsure (1)..(265): unsure at all n locations
  Clone ID: PAT_MRT3847_67310C.1
ggtagttcaaaccaatctggcagttttagaaattttgggtcgggtcaatctggtgcatatggtgacagaatgtcaagcnncagcagcacctttggtaatttacatggtggtggtttcggtgntttgggaataatccaaatgttgacagttacaacagaggaaaggcttttaacttcatcancttggcaccttgagatggaaaaggttatatggcnatangaatatacattctacctgnggcannccctttttnattgggacaanc

SEQ ID NO: 106640 - DNA, 658 bp, Glycine max
  unsure (1)..(658): unsure at all n locations
  Clone ID: PAT_MRT3847_67311C.1
agtttgatgtttttaacacgggattgaaaaggtgatgggaaattatttacaggaatattgggtaaatgtagtatgctctccacagtgctgcatacttcactgacattgaaaacttccattttcaggcaacacaactacaagacaatagaataggctctctgcttgcatttgttagttagacaatgcccattttactgaattcccggatatcacatatacatctgctgcaacttgaccgtcactgacattgaaacaatcacgtctcctataaaaaattgcattaaaagggcaaaggaatgagggcataaagaattggcctctactttaactccacaagggagttttccttcaatagcatcattcttgttgcgacaatcagcatatagaaaaagaccttgccatggcttccagaaggtcaagaaaatgaaacctgtgtggacagagatgccctagcttgaggcaaggccaacctggcacatannnaaatccagtgctgattggacccgagttgtcattgttgcctaatcagcagagtcatgagacctcttcccaaacaaaagagcacacaaattgttttgcttttnnnggagtggtgatgaatcnnntggaattgtatcaactgcaatgcaagttgtatcatccttcaaccattttgtcc

SEQ ID NO: 106641 - DNA, 166 bp, Glycine max
  Clone ID: PAT_MRT3847_67312C.1
ccggctcgagggctcgccgaccagctgatgagtacataaccaggaataccgacgtttggcatcatgaggcgctacaagggtcacaagataaagcgggatcgacgcgagcatgcgaaataatgtgctggatctcagcagtattaccactgccaatggtgtcatcatg

SEQ ID NO: 106642 - DNA, 348 bp, Glycine max
  unsure (1)..(348): unsure at all n locations
  Clone ID: PAT_MRT3847_67313C.1
aattatgctggtttcaggtgcaattatgtgatcgacagtagatccttacagcaaacgcaacacaacatttgttgccgcagatgcttaaaaagtacaagactcagctttgtatattcatttggatgagactatgtagtcaatcactcatcgaggcattaaatcgtacatcctcaaccaccatgntttcaatcgcgagagctactcattcatgttgtagaccatcctgcacactatcagccttccgatgtacttccaccgtacatgcaccaatgttcgctagtctagatgatgtacattctgacatgctggaaagaacatgttcgtcaatgactacagatcttttaccat

SEQ ID NO: 106643 - DNA, 263 bp, Glycine max
  unsure (1)..(263): unsure at all n locations
  Clone ID: PAT_MRT3847_67314C.1
cgcggctcgcaaccttgtagttattctcttncttctttnnnacnntatccctctcttgaaaaanncnagatctcgatcncnccttgatcnacgttacgcttttagtgaccggatcacnatggatcngaaaccagatctacacgccgatngtggntttggcctggtctttcatagatctgatgcatggaggctcagatctactgtacagaggtgngcgtncatgttcgncnctcttttggaatctgtttcnngaaagtcgtctg

SEQ ID NO: 106644 - DNA, 724 bp, Glycine max
  unsure (1)..(724): unsure at all n locations
  Clone ID: PAT_MRT3847_67315C.1
gncttcttttttttttttttttttttttttttttttgttttttttttttttttttttttttttttttttttttttttttttggaaaatgaattggctgcttttttcccaaaccttttgggaaccccccccccggggggccccccaaaagtgcccccttaaatggaaaagccttcttccccccttttttttttttttggcccatttatttgaggggaccccttgggcggggcgggccttttgcctttcactggggatttacatttaaaatttcttttccctggggggatgggggggccccttgaccccaataaaatcagggccggccagagggccctcaaacaaatagaacccccttggtgggaatccccaattttggggggcaggggtgaccccttcccactttttttcaaaaaacttgggccggaaaatagaggtttccccttcccccaaaaaagggctgccttttttcccccggaaaaacctaaacctgttttctgggggggggggcttcccccattcaaactttctttttaatagggggggggggggaaaccttttttttaacccggggggggggggatttggaaattctcctgggaaccggaacttgggaaaggggagggggggatttttaaaggttttggggagggagaaaatgaaaacgggttgttggcccccccctttgggggggggggtggggggcccccccccccgggggggggg

SEQ ID NO: 106645 - DNA, 284 bp, Glycine max
  Clone ID: PAT_MRT3847_67316C.1
gggggggccaaaaaaacttatttcaaaacctggttgggagggccccaaagcatttccatacttggtcccctttaaaggggcccccccaaaaataaaacttatacccccaggaaaaataccccgggctaaaacaaaaaacagttgttgtttgcaaaaagttccccttaaaaaaaaccccctgacccccatacctgcaaaataagcccccccccaacccagtttcccatttaacaatttgacccgggggaaaaaccgccccccctttttttttatttatttatccc

SEQ ID NO: 106646 - DNA, 144 bp, Glycine max
  Clone ID: PAT_MRT3847_67317C.1
gattaccccgccttatcaggatatagtggacctggttgccactcatcggataaacacaatccctgcagctggagatgagattcgcagaacaagataacgggcgcttgggctaacccgaagaaaggcctattttgctggctacga

SEQ ID NO: 106647 - DNA, 315 bp, Glycine max
  Clone ID: PAT_MRT3847_67318C.1
aaatgaagccggggaaaaaaaccccgggccgaaaccggaacaaattttttcccccaatactaggggagggggaatattttatttgacttgggggcttgaaaaaggggactttgaaaataacaagggcggccgacaaggggaaacacatgtaaaacaaagggccttaaaacggggggggaaaacaaaagcccaataacttttttaactggaaaaaggcctttaaacaaaaacaataatcaaacatttatccttttttggggattggaaaacggggggggccccttccccccccaggggtttaattttaacactttc

SEQ ID NO: 106648 - DNA, 553 bp, Glycine max
  Clone ID: PAT_MRT3847_67319C.1
gaaagttcctgcttaagataaagatttgcaaaagtggtccatgataggggcagtgacatcatcattgtggggcgtggcatcatcaaagcagtaaatccagaagaggcagctcgtgaataccgtcttcaaggatggaatgcgtattgggctaaatgtacttgatgcctgcattcctagaataaaagggtgagccaaaatgttgttttaatgggacaccctctcaatataaagttagtcatttttcagttggaattttgaagtgaattgtttattttctttgagggaaattaaatgaaaataaatataaaatatagaatggtaatatagaattttatataatttcctcacaatagatatgtagcagtaaggtttaagaggataaatcaactcctctgcaccaaggtttacttatattgaaacagagaacttgatcaagaatagggcaaatagagtagtcaaatagcaagctacccaagctcatctatcttgaattcgattttggattcctgtattctattttttacattgaataacatttatattctatttttgt

SEQ ID NO: 106649 - DNA, 110 bp, Glycine max
  unsure (1)..(110): unsure at all n locations
  Clone ID: PAT_MRT3847_6731C.1
ttcttttctcaacctttganaatacgcnaacgcgaatcangtctctaaacacaaacgtcttttcgcanttcatcatagtnacnnnagatggtacccgtngaattacttca

SEQ ID NO: 106650 - DNA, 255 bp, Glycine max
  Clone ID: PAT_MRT3847_67320C.1
caacaaccttagcagttaattagcacaacacaaaaggagagagagagagagagagagagagagagcgagagagagagagagatggggagaagctcacgttgtacaaaggagggtttgtatagaggtgcttagagagctcatgaagacaatatcctgagagtatatatgactgtccatggtgaatgtagatggagacaccttcccaagagagcatgtgtgaaaatatgcgggaacagttatagacctcgatggttg

SEQ ID NO: 106651 - DNA, 320 bp, Glycine max
  unsure (1)..(320): unsure at all n locations
  Clone ID: PAT_MRT3847_67321C.1
gcctcactnacgncgannatntccnctcganngnatganaaacttcctcgtcgcaaaatttttgacaaacctaagacgcgctgcttcactattctccctatggagtttaatcttgtggttcgtcagaagtttttaaattttgtgaggttcattatgaagaaaagggacaagcttagttgtcaagttggaatcaacccatactccatggaatggactggtttggccatagattactgagtaaggcaaacgatnattccgtgtgcgataatgccagtttgatgtttgataaccagccagtantganccagntgcngnatgtt

SEQ ID NO: 106652 - DNA, 517 bp, Glycine max
  Clone ID: PAT_MRT3847_67322C.1
aatagcactgtggctaataaacatagtaatacctgcaaaagaaggaatcataggtgacatactcgattacttgagatgaagcacaggtcacttaaccttgagtgaattggaccgtgtacaatgaacactttagtttaaaaatttaggcgtgcatagatcaagctgcaatacacgtacaaagatcgtaatacaaatcgaacaataggctactatatccaccatctttgtatattggaaaattaccctaaatcacaagctgaatactttgcttgaatgcgacgaacttttacaaatgacagagcactggataaaggaacatgggcgggggtccacattttgccgccgatgttgcactacatgcttacgacatatgtctgcgtctggatacctatacgtgatgaatccaacactgcctttcaaccttcacatcattctaccgagtttcacgtccacacaatacgacctatgatacttcttagcccacacatcatgctcttgcttcagcaatatatgataa

SEQ ID NO: 106653 - DNA, 323 bp, Glycine max
  Clone ID: PAT_MRT3847_67323C.1
tctggctctagggcctcgagctgtatggaggataatgcaggaggtagactatgatgggctctgaagtggcagaggaggacgatgtacaggtgcttaccggacgtcatgacacatcgtgcatcaactccaagccacttctgagagatcaaggcaggaatatacttctgtatatgacatgattgggaggatatgatgtggataaagaaaaggatcaatgaagagcttgaaagtgattaatgcaccttatgctgagagtggatgtaaaagaccgcaagataaaagagctgggctgccggcggctcgcgtgcccagcctctctgtat

SEQ ID NO: 106654 - DNA, 720 bp, Glycine max
  Clone ID: PAT_MRT3847_67324C.1
ccacgcgtccgggcactaccctgccgcacttaatgtccgaatcgcagcgcgtagtctcctgcaacgcaccctctattgcctcctctgttgacatttggaattgaccttggtaatatctctgatgttagtgggattatattgattcgtcagcccatgtggctactctatggctgatgctccaattgtgcaaatttgggcctcgagccgattacactcgagggaaagatcattaatgggaaaatgggatctgcaatctatgattaaagcttcctcagaattatatggacctgaaaagtcaggaacagagcataaagtgcctagacacgtaaagtttcccttcacgaactctgttcagtgccgcataatttggataagtttacgccttcagcgacctggttcaagttctataaatattggaaatgacttcaatctgttgtctctagatgagaacccttttgcacaagaaactcaacgggcctcattcggaggatctgctgagagcgaaccctgtcttcatgccaagaggattttagttgttggaagccccattagaaaggaatttgatcttaagccacaacaaagctctgaccagttgaccctgacagggtggttggaaagagctccacagcttagtagattcaaggttccaattgaggctgctgaaagattgatggacaatgatcttgtcctggagcagtatctgtctcctgcttctccctt

SEQ ID NO: 106655 - DNA, 319 bp, Glycine max
  unsure (1)..(319): unsure at all n locations
  Clone ID: PAT_MRT3847_67325C.1
gggaaagccgagacccgcaccggaccggaacccccgggacgacccacgcgnacgcctacgctcccgcccacgcggacgaccacgcgggcgcgggcgggtcaagaaacgcaaagcgcccaacaacccggacggcagaaagacgaacaaggaagccaaggacggcagaggaagaaaaaccagaccaacacccaggngagcacgacagagacgacaacaagacaaccagaaggcacgaagaccgcaaagggagcaaacccaggcaacgcaggaacgacgacaagggccacaagcacaacagaacgccngcagcaaaccgacc

SEQ ID NO: 106656 - DNA, 1396 bp, Glycine max
  Clone ID: PAT_MRT3847_67326C.1
ctcgagccgaggcggctcgagggaaagacattaatgggaaaatgggatctgcaatctatggataaagcttcctcagaattatatggacctgaaaagtcaggaacagagcataaagcgcctagacccgtaaagttccccttcacgaactgcggctcctgcttcagcctccgctgttggactgggtccgggttcggctgggcctgcgcagagcgggccgtgtcgtgtgggctgccccctctgctttgctgctcggtgccgcataatttggataagtttacgccttcagcgacctggttcaagttctataaatattggaaatgactttaatctgttgtctctggatgagaacccttttgcacaagaaactcgacgggcctcatttggaggatctggagacagcgaaccctgtcgttatgccaagaggattttagtcgtcggaagccccattaggaaggaagttgatcttgagccccccctctgctccctcctctgggccatgtcggggtggtccgtgggagctcctctgctgtttgggggcttggttccatttgtcgccccatgtggcttcgccaatgatcttgtcctggagcagtatctgtctcctgcttcccccttgcttgccggatttcgtcttgatgcctttagtgcaatcaagcctcgggttacccattcacctttttcggatgcacatagcaaaaattttccatcccttgtggatgacagatacatcactccagctgtattgtatattcaagtatctgttctccaggaaaaccatagcatggttaccattggtcagtaccgattaccagaggccagagctggaacaccgatgtactttgatttctctagccagatacaaactcgcagaatttgcttcaaactagttggagatgttgcagcttttacggatgacccatcagaacaagatgattctggcactagaatttctccactggcagtagggctatctttgtctaatagaattaaggtgtattactatgctgatccatatgaccttgggaaatgggctagcctgggggcagtttaattacacgtcagtacttttgtctattacattgattgattgtgtaaactgttttcacattttgttgtattatggcatgtaaagttcattcattgatgtaattgtatttataggattattctattaggaacattactaatgttatttagtttgtcaaaagggtggatttcatttttgactcatcttcaatgtatttgtttctttctttcttttctaacagatcttgtaatgtgcacaagagtcagtctctagttgaaatattttgtgttagtggttgtaattgtcgttgaaactggcaagctgaggaacacttgatcataaagcatgatttctttcaatccttctttt

SEQ ID NO: 106657 - DNA, 908 bp, Glycine max
  Clone ID: PAT_MRT3847_67327C.1
gtcaagcctctctacattagagtctcgcgccgctacggcgaaaaactcagcttaaaccccgccgcaaaagcaccgcctccgccgcccacggcggaaccagaaggtgttagtgttggtggcggcgaaacaaacgtgaagagtagtactcaaggccaaaaactaccagcagggcttagcgttgtgtgcaagcatttggggaaaagccgttcagcatcttcggcggaggcggcggcggctcctccggcggtgtttgtgtcttcgaaacgacgcgatgattcgctgttgcagcaacaggatgggattcaaggagccatcttacactgcaagagatccttcaatgcatccagacttgttgaaacagagtgcgagtcttctcagctgccgcgttctgtgagccatcaatgaagccaaagacaagcgcctttcagcatagaaaatattgcttccttccgccggtgtcagtgtgcaaaaaggataaatgtatgttattcttacttagattagactacaaggaactgaaaaagaacaagataaaaatagtaaaacttgagtcttgggccaccatcatttgttctgaactcagatgaatgaatgaagctcgtcatccattagcttagtgactcttttttttcttccttggtagtgtaaactgtaaagctctttccgataaagcgaaagaagaatcagagcttttccctatatgtttctcttggacgtgtctctatgtgtctatttctattgtgatgtagctactagccactagccactagccaggctaagatcagatagcatccttgtgtacaaattgctttgctttggttggtacttagtaccattgacttcattcattatttttattttttattttttgagatctaaataatcgatattttaaaagctggttcacg

SEQ ID NO: 106658 - DNA, 441 bp, Glycine max
  Clone ID: PAT_MRT3847_67328C.1
ctagaatccgcgtcgtccgtccatcagccgtgcgatggcgagccgcttcctctccgccggaatcagacgttttgtgttcggtgcacgaactctgtgtagctccgaagcttctcgcgcttctgcgttccctatgccgttcgcgcgaaaattcaaattctctaagcagagcccattgccggcgcttcaaaattgggtggaccaaggcaacgatgtttcacccttccagctaagaagcatcgccagaaccctcgtcaaatcgaaacgctaccaccacgccctcgaggtatttgaatggataaaaaaccagaagaatttccatatgatcccagctgatcatgctatgaaattggagttaatcattgaaaatcatggtctaatggaaagctgagaatattttatgaatctaccggactcagctgcaaagaaggctgcatgtctcat

SEQ ID NO: 106659 - DNA, 823 bp, Glycine max
  Clone ID: PAT_MRT3847_67329C.1
gcggcattatttccttgatggtaaactcaaccatatcctgaattttgtttgctaattgattggttttcccttttgggaactacgtattataataaatcccatctttactttgagattttctgtggaaggataagagccttgcatttaaatattaactttctgtttcccttgtcaagaacttcaactctgatgctgacgctcaagcaaatttggctatcaatcttgtagatggccaagtccaggaagagtgtgtgtaattcactcatggccgctgctggttatgttttgggtttgttgcagaacacgcctgcaatttacagattactcctaagaattggtgacccaattatttagcaatcaaaccctaagaatgaattattttctactggtcctggctccgtagtcataataacttttagcctcagcgttttcaatttccatgatttttttccgccatggaggattcctatcaggacttctcaacactgcagtcacatcaagttagagtttatcattttcattctttagcatatggaagacctgaatatcttacggtctatagcaaaatgatacttgttcaataacactaatattatcatacctcttagttgaaagtactgtttcattaactttttgtatccattcggactcttactgggttttaatagttacattttcaagacgcaaacttggactttagttaagttagaatatccccctgccaagtgatttacatgctcagtggtgtttcatttactgtagtattaagattttgttatctgatgcatacaactctaacctaatgaagttgatgttgggagtt

SEQ ID NO: 106660 - DNA, 597 bp, Glycine max
  Clone ID: PAT_MRT3847_6732C.1
tcttttcccaccttcttttcaccttatctctctgtataaattcgcagcatcaatccctgccaccattgaacacacacaaactctctatcattttgcttttgtgccttctctaacataaaccaagcatgagtaagatcacggtcctgttcttcactgttctgttcctctgctgcatgatcacccactccacgcgccctcaaccagcttttcacaaggaatctttggtgtcaacactccatcaggatgctgaggaagttgatgaaagctgtgaaggtattaaagaagaggagtgtttgataaggaggacacttactgcacacatcgattatatttatacgcagaagcataataacccttgaaagaattttctcccttcttgttttgatggttgttagtagtattgtactatattaggttctggtagctagtttatttggacaaagctcgagatgctctctttctttgcttttatgcttgtatttagtactatatttatatcattatgttatgaaatttaaactatcatggaaatacttgtttacttgatagtagtgtgatcagtcatcatcataatagaatcactcttctcttctcttt

SEQ ID NO: 106661 - DNA, 286 bp, Glycine max
  Clone ID: PAT_MRT3847_67330C.1
gggggggaaaaaacaaaacccccctttttttataaaaaagggttgggactttgaaccccataaattccccccctggaaggcagcccccatttttagcccggggggggggaatgttacaaccccgggggcctaaaaaaaataaaaacgtggggggggggaaagttcttttaagttttccccatcgggggggcgggctctgtaaacacttgtgggggttttttcccccccccttttggactccaacaaacgccgggtgggtttctcaaccaaagatgggtggggcaag

SEQ ID NO: 106662 - DNA, 257 bp, Glycine max
  Clone ID: PAT_MRT3847_67331C.1
gggttttgatggttagatagcaaacgtgttgatcaccaataatctagaggtacatatacttgtttaaaatataaggtaaaaaataagtagaaaaagagcgagggatttcttgctaaaaatactaaataaaccccacatttcaagacattttttaccaacggtggggaaccgccacattacataaaaacttttattccctgcctaaaaaaacaccccaagagtttggggggttgaacaaaagattttgtttgggagac

SEQ ID NO: 106663 - DNA, 408 bp, Glycine max
  Clone ID: PAT_MRT3847_67332C.1
tacggctgcgagaaacgacagaaggggttgtagcaaatggtatttcagatttacaagctcatactgataacggtgatcatgtctccttttggaatcctttgctatcagggttatcaaaactaacttctgatccaagatcagctatcagaaagagttctttggagatgctttttaacattttgaaggatcatggtcatctattctcccacacattttggaatagcattttctgttctgccattttccctgtatataactcagtatctggaaagagagagatgaatctacaagaggtccattgtccaccttcttcagtatctgtgcatactgaaggaagcacatgggattctgagacttattcagtagcagcagaatgtttaatagatttatttgtcaccttctttgatg

SEQ ID NO: 106664 - DNA, 193 bp, Glycine max
  Clone ID: PAT_MRT3847_67333C.1
ccccgcgtccgcccacgcgtccgcccacgcgtccgagttcctggagtttccagcggtggttacttcaccagacctccgacaagacctatttgctcgagggtgcaggggaaagaggatcgaggatagaggggaagttgataacactgacatacccatgatgctcctcacgatgacatctacgccagtacattcc

SEQ ID NO: 106665 - DNA, 240 bp, Glycine max
  Clone ID: PAT_MRT3847_67334C.1
atcccacggtaaagctaaactacgagagaatcataagatttaagccaacatacaattagaaacaaacacagaaaagaaatgacttatttctagctcctagttatgtgttttttttttcatttttttaagaactaagaaaactagtcctatagaggacatgtaattatgttcaagatacttatgttgaatgtggccaactcttggatgaccacgtggaataatacttttatttattttttt

SEQ ID NO: 106666 - DNA, 396 bp, Glycine max
  Clone ID: PAT_MRT3847_67335C.1
gaggaatggttttaaacaacaagctttatgagttatttctaagagggcagtttcttgagggatataccttttgctacaagccatatcagtccaaaagagggtgctagagtgtgcattactaagttgagtacagcacaaaccaagccatgtgggggaaaaaaagacatacgaccacattaactcgactcatgcgacactgtaagagggtgctctgtcgatcacaagcgagaacaatcaaatcttgcttattgaggctaaagtgacgtcttaaaaaacaggacacgtatcctccttcccacccccagcagatgaaaaccacaagcagtagatgagatgtatgaaactcgcccttcatgattgcgaacgttctctggctttagccataacagatcccgt

SEQ ID NO: 106667 - DNA, 387 bp, Glycine max
  Clone ID: PAT_MRT3847_67336C.1
gggaacaaaaaaggttaaaaaaccccttcccggggaaaaaaaaaaaatcccccccggggaaaaacttaacctttcccccacaaaattaacccttcaaaaaaaggcccttgcagaacccgccccactaactaaaaaccggggaaaaattggaagcccttttcacaaaaaaaaaaggcccgtttaatagaagccccccccaaattacctttgggattccccccctttggaacccccttagaaattcccttgggcgcccccaccgggggggggttttggtccccccctccccgggggggaaccccccccctgggggggaccaccggggaaggggtaaaaggcccccccggtggggttaaccggggggaaaatggggggtcctttttgggg

SEQ ID NO: 106668 - DNA, 493 bp, Glycine max
  Clone ID: PAT_MRT3847_67337C.1
cattgcatacactttaggaagcggcatgcactatacatagaatcaagacagctgggaattggcgcagacgtggtctgcattcaactttcagccgctcttcgcgagcttcatgttacggccggtcgaccattgatacaccgccggggcccagagcacgcgcgttggctcacttcgcgacacaccacgaaactcctgccacctcggtgcattcaattgaatcagtccttcctcgccctccacttcacccacaacggatccttgaaccagatgccgaaattcttctgtgtaccaaaccagtctttacccgacatcctcgctgcatcgagctcaaggtcgaagtcgaatagaaccttggccatgatgaggcgcatttcagcatgagccagattttgaccaatgcagttcctcgttcccattgcgaaaggctggaactcgcttctcgcatcattggcgaactcgatcggggcatccgcagcccagcgctcggggaaaa

SEQ ID NO: 106669 - DNA, 190 bp, Glycine max
  Clone ID: PAT_MRT3847_67338C.1
tgacttgggcgggtcttccccaggcaagcaggccaccagcaccataagcgtattccggagagcaccggcgacaagctccttgaccaggcagcatgccacgcacaccttcaactcatcctttggtcacagaaccttgtccgatctttaaagtgagtggcttctggtcagcatccttcgcgcgtctaagctt

SEQ ID NO: 106670 - DNA, 790 bp, Glycine max
  Clone ID: PAT_MRT3847_67339C.1
catgggtaacattgatcaaacccgcatgtgaaaggttggggagcgtgtccgatctacaaggccagcaggtgatcaaggcccattatatcctttcactgctggtgtctttgtggcattgatgatggcccagattgaaatcctgaggaagaaagggcattcctactctgaaatcattaatgagagtgtcattgaggctgttgactctttgaatcctttcatgcatgctcgtggtgtttctttcatggttgataactgttcaaccacggctaggttgggttcaaggaaatgggctcctcgatttgactacatcctaacccagcaggccatggtggcggtggacaatggaacacctattaaccgggacttaatcagcaacttcctgtcagacccagtgcatggagccattaaagtttgcgctgaactgagacccacagtagacatttctgtgccaccagatgcagactttgttcgtccagagttgcgttccagcaattagaacttaaaatcaattatggctttcacttcgaatcattttcagatttctcagaactgcagttttgttgttagtttgggttttttagttttgttttcttggttgaatgctagtatgtaagttgtattatcattttgtagtttgtactcgtctgtgttctgccactgaggaacgttacttaatgtcctatttaaatataataagtctgtaaactacgtccacagacgagtcacattagagggtgagacggattaaggattttacgatcttaatttcatgtttcttacagttccttgc

SEQ ID NO: 106671 - DNA, 236 bp, Glycine max
  Clone ID: PAT_MRT3847_6733C.1
taataaatatttttttgcgcagtaatcaatacactcatgatcctctataatttatccatgctatcaagtcatatagaggggccacgccagagaacaaatatgatcagatggggaaaactggatcttctccattgcaagtattatgtttttcccctctttcacaaaccaaaaaatattaaatgggagcaaacaaaaaaatcacatgcttcttggtaacaaatttctcacgatttttt

SEQ ID NO: 106672 - DNA, 394 bp, Glycine max
  unsure (1)..(394): unsure at all n locations
  Clone ID: PAT_MRT3847_67340C.1
ggaattcggcacgaggatagagattgcttagctgtgatggttggatgatggatctgctgagatacacagcaagatgtatggacattacttattttcactgagttcaatgtttctagacttaactataggtttttttaagttttcattctaatgcctggtttacttttcttaggccctttatgtatttagatctaatttgttcttgaattgaaaagacaatccagaccagtacaagaaaatttgctaaatacaatatgtttagcttttgcttttaaattttctgttttcatatagggtcaattagtgatttttgtttttcccttccaaaaattcatccacgaccatgtataacttgattgtttctgtggcnnaaaaaaaaaaaaaaaaaaaaaaa

SEQ ID NO: 106673 - DNA, 274 bp, Glycine max
  Clone ID: PAT_MRT3847_67341C.1
tcggctggatgagctgaggggctcaggccctagttggcgtgcgacactgacaattcaggccttggttgatttgagccgtactgagcttattgatctaatttcgatctgagttgtataatgtctatttaacgcaatcttgatgatgagacttatatctacattttcatattatcatgctgcttatgttgatggaccgactctgattgcttagactattaaaggaacaagctatgggcagatgctttagtgcattcaagcagacgtaatcggtcgt

SEQ ID NO: 106674 - DNA, 642 bp, Glycine max
  Clone ID: PAT_MRT3847_67342C.1
caaaactccataatgctattgtatataaaagtaccattccttgttgccttgaataataataacatataaatacaaaaaaaaaaaaagctaaatatttgtctactatcaaggagttcacgtgataaggtttattgataggtgccatgggtacacaaggggtaagcccttaagacaactcaacatttttcagaggttctgatggtcctaagtacaatttttggtctagctttcaactgtacaagcatctaactccagaaccaccaacctaaagtgagtgagaaacaaggaggggaataggttgtgtttgaaaatcttggaaaagagggattgatatatgttgcataaagcttcaaaaacaaattcctatcagccactgctttcaacttgcagaagccatcactgaggtctgctgatggagttagcatcagcagaccatcaaaataattaaaggtaacatgggcaagaaaaaacaatagcaactgtgtgcattctctcaggccttctgaaatgcacgggcagaaaccccatgcagaagcctaacaaaccccaagaaactaagcttcccgtctgagtgtcttatccagtcttgaagtactacatgaacaggtactgatggactaagcccaagttccgaggcaagct

SEQ ID NO: 106675 - DNA, 405 bp, Glycine max
  Clone ID: PAT_MRT3847_67343C.1
tttttgctaaacttaaacaagatcatgagctgaatcataaatccaaaacctcaacacaaaattgggatttctgcaagtatccgtatgcatgcccgaagagacacttggatctatataaaactgggatcctacacgattgttgagtgcgtggatgtctctaccaacaaaaatcttgatagcttaaaaaagaatgtgaattgaattcctacactacttgttcaagggtctgcattatttgtcatcttcacttttgctgatattctagctagtactgtttctggcctaaatcaaaacttagcaacctgaatctatgagctagttcatccatcatcaagtctaccgcagtaccgattcaattccctcttgccctttgtctgtaactttgaaattgtgaacaatattttt

SEQ ID NO: 106676 - DNA, 264 bp, Glycine max
  unsure (1)..(264): unsure at all n locations
  Clone ID: PAT_MRT3847_67344C.1
cccaaagggggagcacgagacaacggggggacagaaagaagcgcagaggacaccgacccacccgaaagagaacaacggcggccacacgggaaaaacaaagggccaaaacggccaacacggcgggcagaaggaggcccagaacaaagagagacgcaggaaacggaacaacgcacgcggggaacaagcgaaaagggacaaaacccngaccgcgacggaccaagaaaggcgcaccaaaaaagggagacgcccaaaagggaacaaggg

SEQ ID NO: 106677 - DNA, 338 bp, Glycine max
  Clone ID: PAT_MRT3847_67345C.1
cactaagcccaggtaacttagacaattttttgttgattgccgcacgctaagccgagctttcctgggccaagcttgatttgttgcggcatctgctgagctttgaaaagttggtgccactaagcgcagcctttaatgagcttagcgcatatccttgcggcagatgttcaacttagtgggcactgtccagctaagccaattctgcagaagctgaatttttgcaacttccgctaagcggctccatatgtcgctaagcggtagtgtttttttttttttttttgcaaaggccagctaagcggaccatgtcttgctatgcgggcaatgtctttttcagttttgat

SEQ ID NO: 106678 - DNA, 423 bp, Glycine max
  Clone ID: PAT_MRT3847_67346C.1
ccaaacagccgaagagatcgttccgcgatgcgtctaagcagaaggtcatggccgagaagctggatacgcgcaaggacagtccaatgatggatggtggctcaccagcgctcacctcttccatcgtgacagtcatcgttggttccgaccagcgactgttcgccgcgcatgaagatgtattaagtcactctccgtattttgctgaactgctgcggggccagttcttcgagtccgctaatcgccgcatcgatctgcccacggaggaacctgagattttcagttgtatcctcgagtatttgtacaagggcgactactacccacgccttgtccaagacaagcgccgccagacctggatgctcgaaggtgcaattgcctcacccgacccaaacaaacccggcgaccgcgcagctgctgtcgagccaactt

SEQ ID NO: 106679 - DNA, 466 bp, Glycine max
  unsure (1)..(466): unsure at all n locations
  Clone ID: PAT_MRT3847_67347C.1
agaganangnannaagaaagaagngnnngagggagaagagaagnnnngngnaaaannnnggggaanagnaangggnnnngnnannnnaaagnngggaaagaanannnaagnannnnnaagnnnnnnggnnaanaagnaagagnaanananggnggaaggagngnagaannnnggagaaaaagnattgttgtgtnatgggntaaattttagaattggagtattttattggtataaagtnngtgaanaaacagntttnatggtttnattggtggntggtgatggaannaaaantnaggganttgntgtttgnnanttagataattntggaatgaattattanatggtttatgaanttatgggagttgatnntggaantaannntgtttgnnatttttttggaagnaagggnattttatgggtacccaatttatttatggagaatggttattagaataangttgttgtt

SEQ ID NO: 106680 - DNA, 414 bp, Glycine max
  Clone ID: PAT_MRT3847_67348C.1
gtaaaacagagggagcatgtcaatttggattcccccagccacgacgttgattagttgtaacagcaattgataataatcaggatgcaacaaatacgactccgcacacccagcagttaaattcattaattattttattgttcttattttattatattgtcattctctgcctctgcatagtttctgtttacttttcgctactcaaagtctcaaaaactcatcttccccgatttagtagtcattaattattgcttcaacaacataatggtgcatagcatatcttaaagttatctatttggtttttcttattctctagcatattgggagcatgcacttcactagacagtttggcagtgagtcaatacatcctagatggtgagactttggtttcataaggtggaataacggaactgggtt

SEQ ID NO: 106681 - DNA, 306 bp, Glycine max
  Clone ID: PAT_MRT3847_67349C.1
acgaggtttgttgcttttcctgttagggttcacagcaactagtgtggatgctactcgtttcaatccaagttccttcatcaccaagggtgattctcatcactatgtcaaagtcacatacacatggtgcgacccagaatgcgaagtatgccgttgtgattttgaatggcctcctaactgtaaatgtatggataacaccggcttctctgcttaccaggaatgagccaggttcgatcaataactaagatatgtgaggcaaagccacttaggttagctagggtttattgttttcgtatatgaatgcatgga

SEQ ID NO: 106682 - DNA, 493 bp, Glycine max
  unsure (1)..(493): unsure at all n locations
  Clone ID: PAT_MRT3847_6734C.1
cnttgtgatggttttttatacatttgtattttcttacttttttttttgttgttaaaaaaaaataaccccccccaaaaagagggattttgatcaattggacttttgtttaaaaaaaagtaaaccctttttttttttgggacagtatttttgcaggttttttcagggaaactaagataaactaagctaatatggtaattgggatgggtgatacggggggggggaaaaaatctaaactaacccttttcacatgatcactaagggttaaccttccgtttacaactttggttcttaatagccgggggggaaatattaaaagggggggggcaattttttttcacaacaacatgtgtcttaatgaagttgaaaatcttcacctgcccaggaactttagagaagctgttcatagtaaaaagccccgaacctaaattcgttggaaaatccgggctaaaaacgacgcgacccatgatgacatcaattgggacattcatcctca

SEQ ID NO: 106683 - DNA, 400 bp, Glycine max
  Clone ID: PAT_MRT3847_67350C.1
tttatttgtacggaaattttgatcagccgggatcacaggatgccggacctcaaaagcggaaacaaatgcaatcgatgcttgattcaaagaatctctaaatttcggcctactattttgtgagcgaatgattaagggaatgagagttactctctgagttggccacagacttcgtgaatcattttcttttccactgttagacaatctgctgaacactctactatttgatataggacttaaagttagattgaaactttatcagtcttttgctcagttctatgttcaagttgaagaacaagctgatgaaagctcggattagtgcttctactctccgatctggtgtaggagttcgtgggtagactttcatatttccattctttgtttcacactgatcctcttactg

SEQ ID NO: 106684 - DNA, 848 bp, Glycine max
  unsure (1)..(848): unsure at all n locations
  Clone ID: PAT_MRT3847_67351C.1
ttgnacgactcctatagggcgaattgggtaccgggcccccccntgccaccgtctccactgtcggagctgtcnacagagctcttttgaacctgaatggttctggagctggagcttcagctcccagttcagccttctttgggaccancttgaataangnnattgcctnaagggtccccaacagcnnggttnccggtggaagcttcaagattgttgctgnngaanagannaagnagattgannagacccatcagaccgacaaggacagatggaanggtctngcctatgatntctcacacgaccancaagacatnacaagaggaaagggtttggttgactcccttttccaagctccacaggatgctggaactcactatgcanncntganctcctacnantacctcaacactggacttcgccagtacttggacaacaaaatggatggattctacattgctccancttttatggacaagcttgttgttcacatctccangaacttcatgaccctgcccancatcaaggttcctctcattcttggtatctggggaggcnngggacanggaaaatctttccaatgtgatcttgtctttgccaanatgggaatcanccccatcatgatgagtgctggagagttggaaantggaaatgcatgagagccagcaaaactgatcangcatnagataccgcgaanctgcagacatgatcannangggaaagatgtgcgctctcttcatcaaccgatcttgatgcaagaactggnccgncttggnggaaccccaccntaccctgtgaaccaancngatgggngaatgccacttcttatgaaacattgcttgattaaccccccc

SEQ ID NO: 106685 - DNA, 291 bp, Glycine max
  Clone ID: PAT_MRT3847_67352C.1
agctactggctgacaccatggcacccatagacaagcgatgtctattctcgcgagcagctgctgcacagagctgtgcttatccacggagagggggatgcccactgatccactctcttggtgacggccaatacagccagaatcattgctataaacaccctggaccacagagacacataagcagccaaatgaaaagaaagacgaaacgactaactatgactacaataccaatatctgagcaggctgaaacgggaaaacttacactgcaggatagctatacagactctgtgctgc

SEQ ID NO: 106686 - DNA, 1166 bp, Glycine max
  unsure (1)..(1166): unsure at all n locations
  Clone ID: PAT_MRT3847_67353C.1
gcaaaatggagaccctgtcgagagactcaagacagaatctgttgaaatggcttcaaaccaagattgcagtgctaatattcatggttcttcctctgtatgcattgataatctggatgcatcagagacctcaacatcttttgtggttcagcttggaagaaatgaagctgataacaaagatgcttgtatgagatattgggactttgagaaatggatgcgaaaggaatgtctaaatttctcagtactttctgcaatgaagtttgggaagaagtggtgccaccaactgcagtccatatgtgatttgtgccttcatgcctatttctctgggggagctccatgctcttcctgctgtagaaccttcagtgcttgtaagagcaaccctagttcttccaaacatattgttcattctgaaggcaaagtgaagattgacattgattgttttcatgcttcgtcctcattgtctttgaggatcagattgctcaaaatcttattgtcaattgttgaggtaacccttcccctagaagctctgcaacctctttggagagacagctgcaggaaatcttggagtacaaagctggatgcttcctcatcaagcgaagaccttcttcagatattgacggcattggaaggtgctataaagagggagtatttggattcaaactatgaaactacttttgagctgttgggtttgtttagtgcttctggatgtcacactaaggattccattgatggtgaaaggatgtctgtacttccatgggttccatatacatcagctgctgtagctctaaggctcctgcaacttgatgcatgtatcttttacacctcacagcagaagctggagtctgagaaggataagaaaattggaattgtgatgaagcttccatcaaaacatgcttctgccagaaaatcttacaatgctggtgcaattgaaacttcacatcaggctgaacgtgctgtagaganactgggttgatcttggagctggtcttacgagctgcagcagaggacaaaggacccaacagggccgntggccgttctcatgngtggaagaacatcatcaaaaaggaggggtgggggtagttcaagaatccggttctaaaaagagaagtactacctctagaagcaggaaaatgggaaaaatacttgaatggaaagggagaccatgcaga

SEQ ID NO: 106687 - DNA, 1430 bp, Glycine max
  Clone ID: PAT_MRT3847_67354C.1
ttgaagttgaaagataataagaaagaagaatgcccatattctctgcaagcttgggctccttcacttccatctccttcctctcaacttcacaatcacaatcacacctttctcctttcaagttaactgtgaagacaccttggcaatggcagcatcatcactatctcacttctaaagtgtagggttctgcctttggcaacacccaaattcctaattctgaacatcttcaacgccctacttcttcagaccctctagatgacgctcgtcaggctcggaagagatcgtcagattggaaagctcgtaagacatatcaagatagaagacttatctatattgtaaagtcatttataatggttgctggagaggttctaattctggattattctattatgggctttctcccattcccccaattgagtccagtgcatgcttctaaagaaccagagaaatctatgcaagaaattgcacaaggcttaattggttcaatcatgtcggtgaaggtaattctagcagatgaggataacaagaaattgatcttatctgaaaaggaagctgcctggaccaaatattcaaaacaggccaatgttaggggacatttttgaagtaagagttggttatgttgaggactatggtgcttttgttcatttgcgcttccctgacggtctttatcaccttactggactaatacacgtctcagaagtgtcatgggatctaattcaggatgtcagagatatcttaaaagtaggtgatgaagtgagggccaaagttgttggtattgattggggaaaatcaaggattaacctatcaattagacagctagaagaagatccactcttagaaactctggacaaagtaatacctcaggatggttcagctgatcctgattctatgagtggtggtgatagcggtagcattgagcctcttccagggcttgaaacaatccttgaagagctactacaggaagatggaatatatgacgtaagaatcagccgtcaagggtttgaaaaaagagtggtctcgcaagacttgcagctttggctttctaatgcacctcccacgaaccaaaggtttactctacttgcccgggctggaagacaggtgcaggagatacatctcactacatcccttgatcaggaaggtatcaggagggcattacaacgagtattggagcgtgtcccctgaatttcattcactcagacctttcttccgataatcactgcgatcgattttgtacagttacatgcatgccattatatatatatggagtgtatttattatatatccgatcttcttattcctcaaatgttcaagattaaaaaaagttcttagttgtaaaatcatgcacattactcgagttattcattcagaattgccaacacatttgtgctacaccggatatatatatatatattattcttagcaaaaaaaaaaaa

SEQ ID NO: 106688 - DNA, 311 bp, Glycine max
  Clone ID: PAT_MRT3847_67355C.1
taaaattctcaattctaacgccactaatcctatacttactctacttcttcacaactgtcaaattggtaaatatctgatttattagtgtccttttgcattactgaactagcatgtaatatcttattcacttaaataaaacgcattactatttgcaatcagtctgtttaaatataaaacaaataaaaatataattcaactacaacatcaacaattacactttatcaccaaatttaataaaaaaaaaaaataaaattgtctaccacccactaataaacttctttaccacacaattaattcctaacctatacctt

SEQ ID NO: 106689 - DNA, 489 bp, Glycine max
  Clone ID: PAT_MRT3847_67356C.1
gccgtcaagggtttgaaaaaagagtggtctcgcaagtcttgcagctttggctttctaatgcacctcccacgaaccaaaggtttactctacttgcccgggctggaagacaggtgacaaatttccttaaataattaacccaatggaatgggccactttaacctaaatatacacatttaaaaaatgtctcaaatgttttgtcccgtggtgcaggtgcaggagatacatctcactacatcccttgatcaggaaggtatcaggagggcattacaacgagtattggagcgtgtcccctgaatttcattcactcagacctttcttccgataatcactgcgatcgattttgtacagttacatgcatgccattatatatatatggagtgtatttattatatatccgatcttcttattcctcaaatgttcaagattaaaaaaagttcttagttgtaaaatcatgcacattactcgagttattcattcagaattgccaac

SEQ ID NO: 106690 - DNA, 2230 bp, Glycine max
  Clone ID: PAT_MRT3847_67357C.1
agaattgagtgaatccatcagatatgcttctggggatcccattgaaagctggcttaactctctactttgcttagatgcttcaaacaccatccctaatattagcaggttacctccacctagcgagtgcgatttatactatgttaatcgggatacgctcttctcctatcacagagatagtgaattatttttgcagcgaatgatggccttatatgttgcatctcattacaagaattctccaaatgatttgcaactgatggcggatgctccagcacaccacttatttgtactacttggacctgttgatgaatcaaagaatcaacttcctgatattttgtgtgtcatccaggtttcccttgaggggcagatttctcgtaagtcagcaatccaaagtttgaccgatggtcatcaaccttttggagatcaaattccatggaaattctgcgagcaattccgagatacagttttcccctcgctttcaggtgctcgtattgtacgcatagcgacacacccaagtgccatgaggcttggatatggttcacaagcagttgaacttttaatacgctactatgaaggacaacttattcctatttccgagattgatgttgaagataaagtgcaggctccacgagttagagtcacagaagctgcaaagcaagtttcactacttgaagaaaatataaaacctcgaacagatcttcctcatttgctagtacatctgcgtgaaaggcagccagaaaagctccattacattggtgtctcctttgggctaactttggacctttttcgcttttggaggaaacataaatttgctcctttctacattggccagattccagctctggtggatgatctcaatagtggaactaaacaaaaacccctaaacaatgatgaaattgaagctgatggatcaaatcaactgggcttttttagtccattttaccaagattttagacaaagatttgctaaacttcttgcttccacttttcgtgtcatggaatacaagcttgctttgagcataatagatcccaaaatcaatttcaagaaccaagacccaagccataagagtgacaaaaagcggagtaaagataaccacaaccataaatccaagcaaaaggaaaacattgttggattgaccatgggaagaaccacccaagataaaactatgattatttcagggattgttggtccttgagtcagaacagcaatataagagcaaagtgaacggccaaattgaaagggatcggaatccaccgacaagaagctcggttcatattcttcataaatttcaagtgcaggattctgtattattcatacattgagggacaaacgaatttggaaaggcaaacgatattgtctctatttataaaggttatgaagaagttctacaaatatctagatggccttgcatccaaggagattgaatcaaccttgccaagactgaaagaaattgtcatggaacctcatagtgtctctttggacgaagatctcaataatgcagctaaacaagttgaggatgacatgaaatcaaaagcagaagcaacctttactcccgaattgctccagcagtttgccattgaaggagaatctggctttgagactgttttacaaaataatggtggaaaaatacccataggtggtcttattagcgtgaaatccagcaaagtgaagcatgaaaaggagaagggaagtcataagagtgacaaaaagcggagtaaagataaccacaaccataaatcaagcaaaaggaaaacattgttggattgaccatgggaagaaccacccaagataaaactatgattatttcagggattgttggtccttgagtcagaacagcaatataagagcaaagtgaacggccaaattgaaggggatcggaatccaccgacaagaagctcggttcatattcttcataaatttcaagtgcaggattctgtattattgctgctatactttaatttattttgtttttattttttttaatgggaattagtgggcaacattagtataaatgagacggctgcagagaaatatgtcaatatgatataattttaccagccttttttggcggcttaagaggataagatgaccacaatttccagttttttctccttttgtggacaactacatcattactatatatgcatttttgcaagaaagtatatcttatacgatattattgtaaggtgttacacttgaaaattgaaattgcatagtataaagtgttaatacg

SEQ ID NO: 106691 - DNA, 403 bp, Glycine max
  Clone ID: PAT_MRT3847_67358C.1
cgaatagaaagacagagaagaaacgctgatcgaactagaacggaagcactgactaaactcagagcgagtgaaagtgttgctgctcgatgtctggtggtttcgcccgtggacgcctcaccgttgagctcaagttgtggcggcagaaccatacgcatggatttgatgcgctgccggagtcgctgccaggaggcaccgtgaacttgactgtgtggcattgcactcttcccgggaagactgggactgattgagagggtggctactgcccgattacgctgcactataaggacgactactgaggcacgtctttcaagtgtgcatgcccacaaggtttcttccaccctaatgtatatccttctgggactgattgctagactatacttaatgaggatagcgggtgatgacc

SEQ ID NO: 106692 - DNA, 399 bp, Glycine max
  unsure (1)..(399): unsure at all n locations
  Clone ID: PAT_MRT3847_67359C.1
acgcgtcagcccacgcgtccgcccacgcgtccgcccacgcgtccgcactttccttgcagattcttttccaaggaaaaatttgggagttttgggggaaaaattaaaagtttaattaaaaaacggaaaggttaagttgaaccggaataaaaggataatcttgttgcttcaactctgtcagtcaagtggtccgagggcgttcttcatgttactccgggcaaaggcaagagcagtcagtcctcagtcaagtatggccatagcctagttaaagggaaagcaaaccatccgatggangactaccacgtagcaaaatttgtgcagttcaaagggcgagagcttgggctttttgctatatatgatggacacctgngtgacagtgtaccagcctatttacaaaagcat

SEQ ID NO: 106693 - DNA, 459 bp, Glycine max
  Clone ID: PAT_MRT3847_6735C.1
ccacaaaaccggcagacaaaacacgcggcggggggttaaccttaaacttgccctcacgaacatccaaataacaacccccgaaatatggacagacccgatattaacaaggcaaagacaaagctacccagggcagaatacacgcaccgcagctgcaattgtgggtgggtgaagcgggaacacctccaaaacttgcggtgtatgccagggtatacccacaactaaagggttaagacaagcattgggaccaaattcactaatggtgccatggctggcagtcccaacagcaacaataaaaaaaaaaatcctggcagccattttatgagagacgcgtgccccgaccccctaagaaacgacggactcctggaggcgacacagatggcactacagagagccgcctccaaaactggccctatcaccacccgaggcgccccctgagtgaaatgggcaacaaaaaacaaa

SEQ ID NO: 106694 - DNA, 391 bp, Glycine max
  Clone ID: PAT_MRT3847_67360C.1
gtgaagttgtaaatgaagatgaatacctgagggttttccctaggggcataggtccaacactgttgggcgcaagaaccgaatcttctaggcaaacagccatagttatcatgcatcatatgaaactcgttgagatgcttatggatgtcaatcaatggtcaaacatgttttgcggcatcgtttcaagggcggtaacacacgaagtgctgtcaactggagaaactataagatacgatggtgcctgccaagtgatgtcagctgagtttcaggttccttcaccccttgttcctactcgtgacaactatttcatcaggttctgtaagaagcaccaaggacaatcgtgggcggtggttgatttttcaatggatcatctgcgacctggtgcaatcacaaa

SEQ ID NO: 106695 - DNA, 527 bp, Glycine max
  Clone ID: PAT_MRT3847_67361C.1
cttaaaaagaaaaaggaatttttttcttttttttattttgtaaaatcaaattttatatattataaaaaaacaaagtcaaggcaaatagggacactattattttaaaatttaaaaaaaaaaaaaaaaaaaaaaaaattttttatgtaaaggtacccaaaaaaaaaaaaataaattaaattgaacaaggttaaaacccgggagagaaagcccaaaattggataatcgggaccggaacggggaaaaaaaccaccttaagtgaaagggaagaaatttagagctttgcaaaagaaaaaccatatcctgtggggaagggaaattggaaaaaatttccaaaaaaaaaaaaaaaccaaacccaaaagggaaaaggcaaaagccgcgaaagaaaaagaagaaactaactcaaattcattggcttagtggccctgttcaaaatttaaaaaggagaaaaccggccatggccaatttagaaaaaaaggaaaaaggcccaacggcaaaggggaaaaaaaagctttttggggcaccgcggg

SEQ ID NO: 106696 - DNA, 177 bp, Glycine max
  Clone ID: PAT_MRT3847_67362C.1
ctatcatcgtatcgtagctgtccaaggtcctgtcactcgagctgggctgagctgctagatgtaaatggatttgtgtgatggtctgtcgtgttgtcgcctggtataaactacttgcagtcacataaggtgtcatagagtatcgttcatgacgtcggtgcgatatgagataacaatggg

SEQ ID NO: 106697 - DNA, 262 bp, Glycine max
  Clone ID: PAT_MRT3847_67363C.1
ctcaacgtccccaacactgtgttactagtacttcttcttcgatggcagcaacctcaacatcactggattctcaactctacattggcatgcgcacgccatgcctcaagctttattctttcaattctcaatctttctctgtactcgacccaatcttcgactatccctctctcctcccagacactcacgcgccatcgtcgccatggcacgcaccggcaagttctttgttcgcgcgaactggtagtgtaacgcaaccaaagactcc

SEQ ID NO: 106698 - DNA, 130 bp, Glycine max
  Clone ID: PAT_MRT3847_67364C.1
ggaatcaatatcacgaaatctatgtatctatatatggagagatggagattcatgtcttatcgtgatggcgacaaacaagaatggttgggacaatcaatatacatctcgatcatattttggatacccatat

SEQ ID NO: 106699 - DNA, 347 bp, Glycine max
  Clone ID: PAT_MRT3847_67365C.1
gcatcatagtccgcggccgagacagttgagagcttcgctgtatttgccagggccgcttgcacttcgttatcgttcttgaaacgccgggttgcttcggtttgcgaatccggatcgtcgctcttggggtcgagaggcggctggccgccttttggcgaagcgagcgtcatctcgacgcctgcgtccttgaacacgaaataaggcgcggcaaactcttcgagccagaatccggttttccggcccgtatcgccgagctggtcgtgtgaagtcagtaccaccagaatcttcatgacaacctcgcgagtccgttcaattcacgttgcaacgagccgaagagcggtgtcgtcgac

SEQ ID NO: 106700 - DNA, 531 bp, Glycine max
  Clone ID: PAT_MRT3847_67366C.1
tttattttgtgggttttattttttttgtgtggaccttttttttattgaaaaatcatgatactcgccaaaatgtgtctgtggagaaatgatatcgatttgtgtagctggttaaaaacttgaaactaaataaagcctaacctaagcatttttgtttaatcgcccttttcctacggtgactttcttgactcctatgttaccttgcacattaacactgctaggggaaagaactatgtaaaacataatcttggttttgggctaactgctgaaactgtaaagttggcgtcaaactgctaaagggcccatcgtgatctataccgaatgaacccgagatggttctcctttcattgggcctttacttctatttcttctgagaaaagaacgcttttgcattggaagaattgattgaggattcgaatacaggagaaacatgaccttcattgaaatggaaccatttattggcatcgcccaacttacaatacgcatcggaatgcccaccacctaaaccaccttaaagggtgctgattgcgtaaa

SEQ ID NO: 106701 - DNA, 678 bp, Glycine max
  Clone ID: PAT_MRT3847_67367C.1
gaacacagaagtaacaacagaccattaaaaacacaaaacgaggaaagccagccaagttccgcgtttcttcttagaattctcgcgtgtcaaccttatctgtggtgtgctccatttgtattggagctcctatataaccaactttcctgacccatcgttttcttcaattcaatccttaacttcaatttattgctctgtctttaattattatcctatcgatggcgttcaggaaaacccttgctcaacggctccttaacatcaccaaagtgtcatcacaagcgctcaccaattgtcggatttcctcttcctccgtcatcggaagagtttccccgcgggccgacgagcccgttgatcccggagaaaatggcctcttccgtgcgccgcaactcgccggaaacctcctcgacaggctcaggacgatgggtgttgcccacaaccggatccggttggatgggttgacgccgcctccgcagattaaaatggtggacacagtgaccgtcaaggacgcgagaaaattgctaaaggtggcgcaggtggacatggtgaaagcgaagctgagagagacccgaaagagttgcataacgttctcggagttcattgcgatctgcgctgagcattgttcggatcaggatcaagcggtggagattgcaaagatgttggatgattctgcggctgtgattg

SEQ ID NO: 106702 - DNA, 279 bp, Glycine max
  Clone ID: PAT_MRT3847_67368C.1
agaagacgacagaacggccgactgtcaccagcgcattatagcacaccacacaaaaaagcaaagcataaaacaactgttacttacacacgccatgcgtatgcgtaagggtatgggtattggttaatgagtggcaaatgagtggttattgagcagtatcagtcaataccactcgcgattcagcgcctatgacatcggttggtgtggcaccagcttcgggtttgagccaagccagtgggcatggaccagcaggcgtcgatagatcgccacaggagatgaacg

SEQ ID NO: 106703 - DNA, 410 bp, Glycine max
  Clone ID: PAT_MRT3847_67369C.1
cgaaaaaacccaaattcacatgcctgaactttctagacttacgtagacaaaaatcttctgaagtctaaggaatgcgatggaacaaagggttttcaactacctgatatgataagggcatcatttgctgaaaaccaaccattttcaaaagctgcagaggtgccaaagggctattttgcagactatgtcggagagagaatgacacggatcgggatcccgatatcatacgatacccaatatttatttaaagacttgttgaatcaatctgacgaagaacttggatatgatcattgaatgggtggttttacaattccgtgttgtgaacatggttttcataacataacttactccttgaatggactataaacactcggagtggtgaatactgacagattacagagacattttgtaca

SEQ ID NO: 106704 - DNA, 207 bp, Glycine max
  Clone ID: PAT_MRT3847_6736C.1
tcgaattctgctttcttctgatggagagatgttgagttctatgaaccttcttctttacatggctccgattactgtagttatgccgcttcctgctagacttataatgtaagaggatgcagcatgtattacatatgctcttgtctgatatgatgtgaagaacattaggtatctgctatttacttcagcacttggttattttgtcaacct

SEQ ID NO: 106705 - DNA, 221 bp, Glycine max
  Clone ID: PAT_MRT3847_67370C.1
ggtacagtagttcatcatacttaattgctttaaatgataaagtaggcccacactatccttctatgtaccaagacttaattaaagataatcgaacaactgaaatagattatattaatggagcagttagtaaattagggaaagagaatcatattgctacacctgtaaatgattttgtaacaaatcttgtacatgctaaagaaaatcaacgtggtgcacaatga

SEQ ID NO: 106706 - DNA, 287 bp, Glycine max
  Clone ID: PAT_MRT3847_67371C.1
cgacttcaaatatcctcatcctatcaacaaaccacgcgtaccttttaaacttccgagcgattatcttaactttttctgtccttaaactctcactctaaaacatcaaaagaccaataccctcaaatctttaatcgaacacataaaatataatttccattttcaaatttttttttcaactttcttacaaaaaaatcttcaaacaccaaaaaacatctttcacaacttctcaactttttacctttgcaactttctcactttaatttttttcacaaacaccttaccctttc

SEQ ID NO: 106707 - DNA, 233 bp, Glycine max
  Clone ID: PAT_MRT3847_67372C.1
attgatacatatttaagttcacaactcataggacaaggtaaataaagctgaaaaggagcatataaccatgaacaaaaatggactactagactctaagaacagcacataaaagacaaaaaaggcgtcaaattaatcaaacggaaacaccaactgcaactgctgaagtggcagacaaacaaggatcagaaccactgcaaacaacacagcaagaagagacctggacaaacaactcc

SEQ ID NO: 106708 - DNA, 551 bp, Glycine max
  Clone ID: PAT_MRT3847_67373C.1
cccgcgtccgggagaggggagataaaattgggggaagacatgggtatggggggattgggaaggaatattcataagcaaaatatgttatttcttccctacacctcccataccactgtttttcctctatttctcccccttcccttgctttctgctgcctttccacatctcaaccttccttctcatctcataatcgtaatggtaatgatatccctcttcttttattttttctttcactaaacatataggtttctgcatgctctctctattatgtgggattttacattttaattcactaaatttcttatacgggaaaaaaataatgaaagctaggaattatttatataatttatttttaatctcttctaaaaggtttgacaattggaagtttagtaagaactaaaaaaaaaaagtatcttccagtttacaagtttggttcaaaatcttagaacacaaactcgtcttgatctgattacattattataaccacagaacatagtaccttttcagaacatctctcttatcattaaccaacagaatctcttataaatcgt

SEQ ID NO: 106709 - DNA, 1044 bp, Glycine max
  unsure (1)..(1044): unsure at all n locations
  Clone ID: PAT_MRT3847_67374C.1
aagattcagtcagtaatcctggccatccattttcttcaggtgtgactttggctaagcttgctgctgttacaatggatgaggaggggaatgaaacttttgatacaagtggtgctttggataggctgaggaagtcagtgcaccttgagagactagctctttatcatgattctaaccagcttccttgggagattgataagagatgggcggatataaatccacaagaatggattgagatatttgaagatggcataaatgagcctactggggatcataagttggtacctaagtgggctaggaatcgcacgtacttggtttatcctatcaatgcagtcctacagtatcatcgtcttggaaaccaagaaagagttaatcctgatattccatttgagaaagttacgcttgtcctcacagatatctctctaactcttacagaggctcagtatcatgattggattaaacttttggaagctgtttcaagatacaagacatatatggaagtttctcatttacgacctgtagttcccatctccaaggctccttatttgtggtggcagtatgctgcacaggctgtactccagaagcagcagaagtggtatcttgaattttttattttgttaaataagtcatctacctttttgtaaatggtacggagagaattttgagaaaacattatagagaacactattgttattgatgtattctgtgtaattgaaacataatgagagagacatacaatcatttatttatagagctgttgacagttagcttagatcttaacagaagcttctagacacagctgtcacaataactgctgtgtaatcaactcagtaaccacccgagagagtcagttaaaaaatgctcttggtacaacactctccccctctcccacaaagaaaagaaaaaactcaagattggtgagattgaaaagggagctgaacaccttaagtttttctcctagaaacagaaatctggtgggaggggctttgatgtaagccacccctttgatatctggcaggaacatgcagtacagtngagatgtttgct

SEQ ID NO: 106710 - DNA, 399 bp, Glycine max
  Clone ID: PAT_MRT3847_67375C.1
tgtctttcggttcgctcaaaagaatcgtggacgagttcctctgatgccgctcgcacgaatttgagtaagagggcctgcaataggcttcagaaagagcttgcggagcggcgggacaatccccccactggtttgaggcacaaagtcacttacaatcgccagaggaggggggttgaagttactggacctcctcggagccctttccgcttatgagacctaccattttcaggtggattttacgggaaattacccaatggaggctcctcaggcgatatttttgtttccggttccggggatcccctatttacagtttcggcgacatttgttaagaaatatgggttgattaatggtctccggcgaggacggaaactccaatttgcgtcattggtttctcaaggcttt

SEQ ID NO: 106711 - DNA, 370 bp, Glycine max
  Clone ID: PAT_MRT3847_67376C.1
aatgatggaattcttatcctcatgtctatttgtgagctttgatcttatcctggcatacataggtgttgaactaactatgatgcacaatatgactgactatgccttcccatatctatcgcacattctaccgaagtacactgtcgaattcgttaatactaatgatggacaaaattgaatgcacttaatgaagtgaaggctaaaggagcacgaacataatgatgtcattgctctccataacatgtatgctcaattgttgcctcttgcttggcctgcaccacctatgcctgatatgggaggctttacttcttcacctccaatgtgtggactggggatgccccttatgcctccttatggtatgccacccatgggc

SEQ ID NO: 106712 - DNA, 152 bp, Glycine max
  Clone ID: PAT_MRT3847_67377C.1
gtttctcatgcttccacgcgcacggctaaaaaggggacatttgactgtcgtatgggtgtcatccaacccacttcttaacaacatcctcaagactacccgatgcacaagtaataatgggccctcaatatactgcatctataacactcccagct

SEQ ID NO: 106713 - DNA, 274 bp, Glycine max
  Clone ID: PAT_MRT3847_67378C.1
cagaagagaacttcaaaattgatgcaatcctcaaaagttcgtcaagtaatcaatggagaaaatgccaccaactccagcaatacagcagaagccaagagcccaagactacaaaagaagtttggtttggagaggcgttctccgccaactagcccatcatcagatttgagcagtaacagaagacaacagaataggcaatcggtggaattgtcttccccaagtacaacacccagacaaaaattcagtgagattagcaatcaaaggagggattttaagc

SEQ ID NO: 106714 - DNA, 255 bp, Glycine max
  Clone ID: PAT_MRT3847_67379C.1
tctctttactcatgtaatgcaataggatgaactctgtgcttattattttcacatgccctcgcccgaaactggaagaccccgccgacgagcagggtggcggagaatatgctctagtctgcactttgtgcaatgctgaggtgcgcaagttcagcaaacatttgtagacgattgtgataataatgttgtcgataggctctctgatcactcatttgtacggtggcttcaacacattgtgttgggtccacaaaaaattta

SEQ ID NO: 106715 - DNA, 234 bp, Glycine max
  Clone ID: PAT_MRT3847_6737C.1
gcctccgcacctcaggaaacccgagttccaccaccgtcgccaccggcagaaccccctccgtaaccctagacaaccaccaccaccaccaccacggctcgattcgctcaacacacaccatgcttcattttctcttaacatgcttgcggtcgcgctctgcggtttgcacgcacatccatgacctcacttcgtatcgacgctggtataggttctcgttatactcagtgttagtgtatg

SEQ ID NO: 106716 - DNA, 358 bp, Glycine max
  Clone ID: PAT_MRT3847_67380C.1
cgtcttcatccatctcctcctctccattgttttcttcctcctcctgccctttttttccggcttcactgctccagcattcgagactctcctctgcacttgctgttggcaacccctctgtccttccatatcgtctatcaccttctgtctactctacactgtctacccaactgccattgaccccaagaatggtaacttgcgaattatttctctcatcgccatctggcttcattgtttggcgctaacattccttttgtcgggcgtcttctcctccagcgtccatcaacccctcttgacattggtgcctgctgtcgacacctggatctataccaaccactggatctactgatccgggcctctc

SEQ ID NO: 106717 - DNA, 483 bp, Glycine max
  Clone ID: PAT_MRT3847_67381C.1
ccacgcgtccagggctgcgagaagacgacagaagaggattccgcaatgtttaaagatgttctcctttatcaaggcagggttggccacttaatggaaaaaaggagcatattgattaattttagttttaaaaactccaaatctccaatgttaaacacgagtaatacttgatactaatcaagtacctataacgtgtttggtttaggatataatttgaggggaaaagttgtattatattgaatcaataattacatgattaatgaatcgttaattcatgtgatattgaatttaatttttaaaataagatctttaagttttaattttataaataaaaaatgtgaataaaaagaaaaaaaattatcaaatatcatcggtgaaatttttttataaaaattaatcaataataaaatcgggttgtactctgaattaataatatatatatttatattgaagggtagtggtaaaaggttatgcacttatgcataa

SEQ ID NO: 106718 - DNA, 461 bp, Glycine max
  Clone ID: PAT_MRT3847_67382C.1
ctcgagccgaatcggctcgagagaaacccgagtcaatcaaatggacccagagccatgaatccaccgccagttggacttcaagataatcgcaatcgtaataatacaaactctcatcgacctggcaactttaatccaaatgttccgctaagtggacctgctacaaattatgttcatggcaatactgatcagttatggagcaataacagtaatctacagggcaatcatcaaattccttattcacagccattaagaccaaacaacttcccattgcaacctccttttgcacctagtaattcatatactccaaattcccatacttttccaacttctatggtgccacctaggactggtggtcccaatttcacttcagggccacataccaatgtgccagatattggtaatctgaacatttctggatatcctaatagcgttcataaccaccaactgttccacaccggagt

SEQ ID NO: 106719 - DNA, 471 bp, Glycine max
  Clone ID: PAT_MRT3847_67383C.1
gttgggaattatgatgtttcattatcacacgtttactattaaaattaaaataccttgtaatgttttaagttacttatgacattattttttttgggaccacacaaaagagtttatttctcggggcgggggggacttatcacttgacctgcttaaaggcgtatgcaaaacacaggaatgaaagatcatcttccccgtgcttggggaggcacataccaatcaagcataagggcccacgcaaaaacaaacaaggggtgggacatctttaattttaaagagcgggtaatatagttgctccctcaaagtgcttttttaacaactaaagaagctctgcatggagcttgggagccaaattattgataaaccgggggatgaaggtaacacgcgggcccttatcaaaaacaatttggttctgaagtctgaatgtccccacaatgtcaagagaggttaacagtttgcttcatcaacatccct

SEQ ID NO: 106720 - DNA, 258 bp, Glycine max
  Clone ID: PAT_MRT3847_67384C.1
atgagtgtgccaccagacactgagtgtatcaaactctagttgtgcttcacttgatctctcatatttatgtaactaagtaatgaaccaagatggaacgacactaactaactaaattccattcgattatcaaattaggaaagagagcatttttcttttagaggagggggtatagaatcttgttcacctgcggtctaaaatttggcttaaaaattagggaaacggggctccaaaatccatttgaaagcacacctactaatc

SEQ ID NO: 106721 - DNA, 842 bp, Glycine max
  unsure (1)..(842): unsure at all n locations
  Clone ID: PAT_MRT3847_67385C.1
tgcatgcctgcagtattctcagtatgtcattacccatttttgcaggtaaaacaactggattagaagcctgggtgatgaggttcccacaatttttagcattcctgaacagggaaggactcatggacctcagaaagcctccacccatagtttgaacaaatgaaccaagcccctgtccaattgaaggtaatacggaggattcttcattgggtagttcaattggacttccaaaaccaccagaataagttccctgagaattttcaaaatccttctcatttaaaccccaaagttgcatcaatgagtcagtttccaggtcttcaagaattttggccttccttctctgcatcaataactgattctcccttgcatgctcctcttcagcagcttgaataaataaagacaaatctgagtccacagtacaatccccataactatctacaactgtacctgtccccaattcctcttcatttgcaatgaaatcaaaggtgaagttacctgaagctagagcctcttcttcaaactctcttaaaagcttctctctgggagacttgggatcaccatcgcaacttgagccaaatgaaccactctccatggccagcatgtttaagaaatcatttgcaatagattcagtgataaaatccaagctacttgattttttttccattctatgtgatttataatttgatttaacattaaggtagcattcttggtcaagaaactttgatgtctcangaagtatatcagcatccttgatgcaagttatactgacacatgaactactgcgtttatgtttgctgtcatctgccatagtgtcatttaacaactagtgcatatgntatccattg

SEQ ID NO: 106722 - DNA, 1431 bp, Glycine max
  Clone ID: PAT_MRT3847_67386C.1
ttttaattaaaatattgcgtgcgaccttttcaatagcttacctttttaattatgccatcaatatacagattttaggttcaggatctctttcaaaactagaggcacggaaaggaattgcttatgaacactacatgattcaaaatacaataaagaaagtgtaacacaaacacagtacacaacaagtagtggcgcgggcacatggcatgaatatgcctaaagcttctttattggtctctaatcgcaccatttttaaagtgtaaactattcatcctaatccaattagattgagctaaccataccctcctctgatgatgattcttcggaggccacagtagcaatatcaagttcaacagatttcttgttaacaaagttacaatgttttctgatttctcctttgttcccagtgagcacaccaatgttacccatcttaatcattgaagcctcaaaggcatcaaagaagacattttggtcactgctgaacctattgacaatgggaatggtatcggcaccgggtgtcgagaacagctcttgatcactctgaagcaagcccttcttgacctgaagattggagaagtagaccctgtcaattttatcaggagtgacagggtcaaaattcacaaggttgttgggtccaccattggggcatatttggcgcaattgttgcaagtaagttgtgtcaagagttggatcgggtctgccagtaccactgaaattgtacaatcggtcaagaatgaaaaagcagtgagctctgccaaatgaatgagcacctgagagtgcaacaagatcagtagtgtcaagaccttgaacagcaaaggcagctttaagttgagtgaggttgaagaaaggagcaggaaggttttgattggcaagggttctatttgctgttaaactatctctccttcccaagggaaatttcaaataaggaccatgagccagaacagaagatacttcagctgcaagggtaagaatatcagcgcaagaaactacgccagggcaagctttttccaactctgtcttgatctggtttacaacatccaaacctcttattgagttgttgtttggcagagcttgttgctcactcactatggtggcagtgttgttcaacaaaattgatgcgtcacatccttgaacaaaacagtcatgaaagaaaagcctaacgagactggcaggcatacgtggatccgttcttgaaactttctctacgactttaaatacaataaaatgcacctggggacaagtcttcttgtaaaaacagggttctaattttgcatttgaggagaagggtaaccctccaagcacaaccactagacctatcactatgaaaccaaaacacctcattttctgcctaaattgatttgaattcactcgacacgtgtgtttgtgtttgtgtttgtgtagctcgagcccgagcccggccggctcgagcggccg

SEQ ID NO: 106723 - DNA, 510 bp, Glycine max
  unsure (1)..(510): unsure at all n locations
  Clone ID: PAT_MRT3847_67387C.1
tatacacacaatatagcagttacgtagattgcactgctggtcatgatattatnatttcgagaatggcagtgtgatccggtgatcaaatgatcgagcccgccgtcaaccacccactattcctctgcgggcatcattgactggtcatggggcaggagctccgaaccaccacgacgttactctttagtgaacttgtatgtgctgcctaagtgtctaatcatttaagagtccatacaattatttcatccagtttctgatgctgcgattcaagtgtacgtttactgaataatcgtatcttcataacttacggagatcaattggtacatatgttctaagccttcttgaaaaaaggctccgggatatactagtagactactagctctcctgatgcccctgggaccggacagccacgcatacctaaaaggcttgcttcttatgtctatactagggtagcctgtacgcatcatggccggatcaagtttggcggccgaatatctcttgaatagtctgcat

SEQ ID NO: 106724 - DNA, 1261 bp, Glycine max
  unsure (1)..(1261): unsure at all n locations
  Clone ID: PAT_MRT3847_67388C.1
ataattctgctctttcttttctctcaacatgagccggaaggagtagttgaatacctcttcaggcctagaaagcttgaagccttgattggatttcttgagaatgaagaaaatgccaatgtgcagatagctgctgctggtttactggctaacctgccaaaatccgaaagagaactcactatgaagttgattgagttgggtggactcgatgcaatcataagcattttgaaaactgggaaaatggaagcaaaagaaaatgctctcactgcactcttcaggttcacagaccctacaaatatcgagtcacaacgagatctggttaagcgcggaatataccctttgcttgtagattttctcaacactggttcagtcacagcaaaagcaagagcagcagcattcattggtgatctttctatgagcactccaaaactcacagttgttcccaaaccaactggttgctggcttttcagatcatcgcgtgttccgttatgttcagcacatgggagtgtatgcagtgtgaacaccacattttgtcttttagaagcaaaggctttacctggcttgataaagctgttacatggggaggttcatgcaactgcttgtgaagcaatacaaacactctccacattggttttggaagattttcctcaaaggggagctcgtgtcttgcatgaatataatgcaataaggtccataatggacattttgaactggggaactgattctctaaaggcagaagctctaggactgttggagaaggtgtttgtgtcaaaggaaatggtagaatactatggaacaacagctagatcacgtttaattggtctcactggcatgaatatatatggggatggacaccttaggagaaaagctgccaaggtactatcattgcttgaacgctactcaaagtcatcatcatctgcaatctcaggagttccggagtgaaattctagtccttttaagttgtaactgtttgtttcaactctattacaagttctcataggaaaagtttctgtataaataattataagagaaattagtttttgctgcacaataaaattagtttatgcataaattaaaataagtattttatacaagtttaataagctaattttagtttatgagaaaaacttatttcattttttctttctattttgttctctaataaatgcatatggagaagtttattcaaacaaataactttcttacttgtaaattaccctacttagatacatgccccgcagttttcctggctagnnnncttcga

SEQ ID NO: 106725 - DNA, 199 bp, Glycine max
  Clone ID: PAT_MRT3847_67389C.1
ctgggcattccaagtcgtctcatatggctttggttttggccttacttctgtggattctttacctatcagatcatgttatattcagttcctttcagagttctagtccatctttcctaaacctattactagaacatagaatccaacggttattcatcttttttatgcttcatacattcattatgtcatcagcaaactatac

SEQ ID NO: 106726 - DNA, 255 bp, Glycine max
  Clone ID: PAT_MRT3847_6738C.1
ctccgccgccgctcccgctccgccccagcgcatcgcccgccgccacagcgtaccgcgatcacatcgatcaccttcagctttcaatcatggccgacgtcgatgtcgaaccggaggcagccgccggcgctcccaagaagaggacgttccgcaagtacagctaccgcggcgtcgacctagatgcgcttctcgacatgtccacggacgacctcgtccagctcttccccgcgcgcgccaggagaaggttccagaggggtc

SEQ ID NO: 106727 - DNA, 420 bp, Glycine max
  Clone ID: PAT_MRT3847_67390C.1
ggtccggaattcccgcctcgacccacgcgtccggagctctgttactgctcttagcccgccatatagctatcgattgatatcactcgtgaggataaccctctgctggttcactgaggagagagctcaacgcatgaccctaggtggtatatagagggtgatagctgcatctttggttttaaggaagtgtctttggatgcctgtgaccttcttgagccagacaagggtggatgccttcataaactgcaatgccattgacacttttttttgactatgagcaggaaactcaacgccacctgtccacctaacagccgtataagcacagtactggtggacattgggggagatgggattgcgatgctactttgtgatcaccagaagtacagcggcaagtggctaacacggactagggcattgggtaag

SEQ ID NO: 106728 - DNA, 294 bp, Glycine max
  Clone ID: PAT_MRT3847_67391C.1
ggtcgttgaattttgtaatgctggtatccgaaaacggggtcagagcaggttgatggcaaacaagaattacaaaacgaaaggccggaaggagatgcctttattcaaatagaaaaacaagaacggctgaaccctagaggttattacggaccttacaatccctaaagctcctgatacgatgcgaataagtaattacatggtcaaaaggggcccggaatatacagccaataaccggatccatctgcaacccgcggccataaaagccggctcctataaccacacccttctcaagtcccc

SEQ ID NO: 106729 - DNA, 253 bp, Glycine max
  Clone ID: PAT_MRT3847_67392C.1
gtgaaaacagataataataaaaagtgagatttcataaggatgcttaaatagaagaaagaatttcctaaggggccgtttggtttgagatttcactttgttccctgttttctgatgtatatacaagaaaaagtaaaaatagaaaacaataaaaagtcatcttttactgtactaacttttgaaatcagtaaataaagtgaaaacagaaaatattttctcaaggcaaacaatactttttcaaactggttactaatgt

SEQ ID NO: 106730 - DNA, 257 bp, Glycine max
  unsure (1)..(257): unsure at all n locations
  Clone ID: PAT_MRT3847_67393C.1
tttnttttttttncgctacataaaaaacccgtaacaaaacaaaaatagacgttttttacaatacttacccaactcaatacacaacgaangcctacacttctgcgatacacaagaaatcaaataaaactgattaaagcttactattagtaattagctttaccaattttccaaccctcatatttgaaaagantataaaaataaactagtcttcactctaattaatttggattactttattattcataaaaacattttaa

SEQ ID NO: 106731 - DNA, 920 bp, Glycine max
  unsure (1)..(920): unsure at all n locations
  Clone ID: PAT_MRT3847_67394C.1
gcgggcacgcgtccgaagagtgggatttgtgattgagaatgctgaaagcaagctctctatcctttctggtagcaatgccctctgcaactgcaagcttcggattcttcttctgtcgacaacgcctttcttcttctttccccttccctccgcgtccaagactcctctccaccactcccaccccataccctctccaatacgaactcatcatcaaccgtccttcttaccccgactctccccgcccaccacctgctcgacctattgactcccctgaacccgaactcaacaaggcccagaggaagtactacaacaaacgcagaaagaggatgtacggctccgacgaagatgaatcccgacgccccgacgagaccttcgtggagttgaagcccgaggtggtggactttcccactctgcacaagagggaggaagagctttacttctatgacgcctttacttatccctgggagaaggacaagcattacaagatggtttaccagctggagaagaagtactttcctgatcaatgcctcgacaaggcgtttctccaaccgggacagtcaaatgctaatgctaatgctaatgctaatgggaagggaaagggtaggaagaaagttgttggtggtggcggtggtgaggaaaagttggtgttttttgaggaggggaatgtggaggagaaggccgaggagagtggaagtggaagcagacaacttaaggagaagaaggttgaggacttcttcaagggtttgaagaaggatcctagtcctagtcttaacaaggatgttcaagttggagagccttttctttcctcaaggaggactggtcttcctcccgtctgggatactcctcatggcactgtgctcttggtcaacaaaccanaaggttggacttcattcacggtttgtggaaagctgcgtcgccttgtc

SEQ ID NO: 106732 - DNA, 197 bp, Glycine max
  unsure (1)..(197): unsure at all n locations
  Clone ID: PAT_MRT3847_67395C.1
ngcacgcgtacgtaagctcggaattcggctcgagncaacactctcaagcntnccacntacaaactcngnaangcgcaatntgctntatcttnccgagatnnatanacacgtgnancnaaactgnngggatncaagtctgaaacaaaanctnaagaagtttgcggcagctgangccatcactttnagtatggatncgc

SEQ ID NO: 106733 - DNA, 442 bp, Glycine max
  Clone ID: PAT_MRT3847_67396C.1
ggggggagaagaagagaagagagactgagagggtaaccagaaaccagaatttttaggagtgagaaatattttttagagagagaaagaggtaacaaactgagcagtgagagaagggtcaaaagaagaaataggtttttcaggagatcgtagggttgcggattctgtgacacctattcacatccccttgtttttctctcttttatttttatacatcaaaaacaatatgtgaattgcattaaattaaatggtatttatttgtttgattgtttagtttggaacttgatattgttgtttttctggcttgtgtggatctggtatctttgtcaacgtgacatttgtgtcatcagaagatatatcatacgatgaagtgtcataaaactgtgaccattgtatttagtaagggaagaaaaatagtccgtgttttttattttttttaataata

SEQ ID NO: 106734 - DNA, 365 bp, Glycine max
  unsure (1)..(365): unsure at all n locations
  Clone ID: PAT_MRT3847_67397C.1
ctctcttttttcctaccctctttctttcagatcattgacctctacgtaatctatgccgtcttcaccgctctcatccaggttgttacatggctttggtgggatcatttccatttaactccttcctatcaggagtactttcttgtgtaggaactgctgttcttgctgcgcagcatgggacttataaacctgctacgtacataggcataaatcttgttcttgtctttctgatcattgntatcctccttcattttggaccagtctgtctcaagatccaagtgaataaagataacaaggaattcaaggatcttgcacctgagcgtgcttttgcggagtttgttctctgtaaattggggcttcatttgggg

SEQ ID NO: 106735 - DNA, 316 bp, Glycine max
  unsure (1)..(316): unsure at all n locations
  Clone ID: PAT_MRT3847_67398C.1
gtttttggccgatcctatcctatgagccgctgtcttgattcgctcctccgtactctgggttggctaccaaaaagcaaaaaatcctgtgcttctcctggccctgtccgtgagcctgccncccttgcaggccttgcctccttttacgaccttgttctttggtgcaggcttcccccgaggggcttctctgggggggccctcggcgctcgaaaacggctctaacgaagagactctttcccctcttttgtgcttccacccctgaggctccttttcttgcctcttctacggtcggaggccttggacccatcatttgttgttt

SEQ ID NO: 106736 - DNA, 235 bp, Glycine max
  unsure (1)..(235): unsure at all n locations
  Clone ID: PAT_MRT3847_67399C.1
ncnntcnaccnganatgnncgnancnccgcacnaaagcaancaccagcaagtgncanccgncnaanggctncgnnnatanngnnnnngctagccacgancgncgngnnnggnangngncaganagcngctgancaannaggnaatacgnntgngngngaanncngntgcnnancnncnnactcagaaanacnacncgannnngtnngtagngagagnnncnataatnnnntnggg

SEQ ID NO: 106737 - DNA, 344 bp, Glycine max
  Clone ID: PAT_MRT3847_6739C.1
atacgcttacgcgtggtcgcgggtggacaacgaaatttttcaaccaaggaacatggatcagaatctgttaatcacgttgtggaagatggctctcgtctacggaggatgatcaacactgtgccatagcgcccctatatacatttccgacacgtctcggccagtgtaggactcctctcctgaatggtcactgctggagacaacactgacatgggaccatgactactgactatgactgcatcacgatgaatgaaccttccatggcttagattagtgggactgcaatgatgagctttgtagcgtttcatgatatcaccattactgatggtgttgacaaaactagtgcg

SEQ ID NO: 106738 - DNA, 230 bp, Glycine max
  Clone ID: PAT_MRT3847_673C.1
caaagatggcggaactccaagagcaaacggagacggagagggcgttctactaaagcatccgcgcctgtccacccctgttgatgcatgtacaggaagaaccattggatgaagatggggaacaagaaagagagtgctcggatcactaccatatctgtggcaatctgtaatgcactatgaacagcgtggatatacttgatacaggaggaagagatgctttctgctgctaagat

SEQ ID NO: 106739 - DNA, 407 bp, Glycine max
  Clone ID: PAT_MRT3847_67400C.1
tttttgttttttttatgtttttttttttttttttatttctgttttctttttttcttttttttttttaccgacacctgtctctttatgactacaaccaagctgtccgatttaaaaaccaaacctttgggcccctgtatgattgttacaaatataaccttcctacaagccccattttttttctgtttctgcccccagtcccaaaaggttttaggccgcaaaccccacgtccccttttgagaagtgcagtccttgctgcggtggggagcaaatggaaccccttttcgcgaaatattgtaatagaagaaccgcgggatgtttcaaaagaaagctgttaccatgggggtggatctgaaagaactgtacatctcttgcatgtgcctgcaactatgattggggagggcccactg

SEQ ID NO: 106740 - DNA, 585 bp, Glycine max
  unsure (1)..(585): unsure at all n locations
  Clone ID: PAT_MRT3847_67401C.1
gccttgaggatgctaaagttctgcatcaggtggataaaaagttcattctagttgtggctggcagaacccttgctgttattgatcaggtctgtctattgtacattatagcagaaactcttgctgaatggaaatgtccatgaccagaaactcttaagaaaatatacaattccttgtatcttaatgtttgactgcctatcaatctgcttgcatatatacttttactcaggaacactttaattatattgccctagatgcatgcaattgcatctttacacatggaaaaaatcagtgttcctgtattttatttgcagcacatcctgcatgtttgttttatctgcattttgccttgngggtgtaaagaagggtgatggttttggtgagccacgaggaagacccaacttaagggagggtagggatagaaattgtgcctctacgtgccaccattatagacaatttcatcatttttaaagccccaagatttggaggacccttatacccctcaataataacaatttatgtatgacacataaatttttgcataaactacaaagcataacaggttatttgcatataaaattgattcga

SEQ ID NO: 106741 - DNA, 500 bp, Glycine max
  Clone ID: PAT_MRT3847_67402C.1
tatcaaaggtgctaataaagagtatagaataaaaaaggttatattaaattatatagcttaacagttaattataatcggtttaatatgcaattttatttgcttgtttagaatttgatacatcttttatatgtttgaaaactgtatctctatttatcggtcttgaattactctgatggcaaaaaagctacatattaacctaagagtagtacagatcacgaatatattgagtgtaacaagattgaaccatacatcttgtagatctaggaagatcaatatcttcaacattcacatttttgagctttctataaaaaacattgcagttcaattgatggttttttctctctgctagagtgtcttttaattttgagacaaaaacatttactgattctacgttagactcgtccaaaactttaaagcctaaggagacattcagcctcttaagcttacttaatttaggtatcacctccaaaaatcttagagctacgaactcactctcaagc

SEQ ID NO: 106742 - DNA, 893 bp, Glycine max
  Clone ID: PAT_MRT3847_67403C.1
gaattttgggttttgctgttttttacacctcgaaaaaacagagaaacacaaacacgagcgagagcagcgagcgaaggaaaggaaaaaacagtttgttcgagaactgaccccagagatcttctctttacgtgctcatgtgaggacccaattcttcttctccttcttccggtgcttggatctgcacttttcggtgttttctttcattctcgcaagcgaactcggtcacgggttaattccaattttgcgcgctggtttttcccgcacgacaaaaagctttcgggaagtatttgttgggtggtcgaaggtcgagaaaggttctagattgacgtggctttggttcgtttgaatcctgaaggggtttgtttgttcgaaacccacaattcgcccacttcatctcatgaaagattgactcatggatcctgaaggcaaaaagtttggaggaggaccaagggaattgactggtgctgtggatcttataagtcatttcaaattactaccccactatgaatttttctgcaagaggcctctccctgtgtcaattgcggacacacactaccttcacaatgttgtaggagacacagaaataagaaaaggagatgggatgcaattggatcaacttattcagaatacatctcattcagagatacaaatgctcgtatacagccttttgacctagatgttctcaaggaagcttttcaattacgggaaacagctcccattgatttgcctgctgcagagaaagggattccaactattgcaggaaaatcaaaaagtgagaataaagacaaggagaagaagcataaaaagcacaaagacaaggacaaggataaggatagggagcacaagaagcacaagcatcgtcataaagaccgtagcaaagacaagggacagga

SEQ ID NO: 106743 - DNA, 472 bp, Glycine max
  unsure (1)..(472): unsure at all n locations
  Clone ID: PAT_MRT3847_67404C.1
gcagtatgtctatgggaagcagactctgaattggaaagcctttggaattcctgttgtagataggctttatagtgttacaaatggatctgatctccgcaatttgtatctaaagtggttctatccatttcaaaatccaattgaagaggccttagaaaattgtctcgtgtctaaggaaactgaagaagatgcagaaacggaggtcacaactcctagtttaggttcaaatgtgaatgagttagacactccttcagatggaggaatggagttttatgttactgatgaaaagggaactataaaaaattccaagatattaatgaatgagcctctagcaataaatggagacttaaggctgctgcacgtgcttgtgtgtnggtcagaagaacagcttaagatatatgacacgcaactttgtagttcattgcctgaggttttcaagtctggctttttagcaaagagacttcaagaatcagtt

SEQ ID NO: 106744 - DNA, 445 bp, Glycine max
  unsure (1)..(445): unsure at all n locations
  Clone ID: PAT_MRT3847_67405C.1
gcacatctccattaatacactcaccttcactaccataacgctatatgagtagggctctgactccatctgatacgattatgccaagatgcaggactgtgagggtgttctgccggaccaggaatgtctcatcttcgcctgatagctgctcgaggacggacgcaccctatccgactacaacatgcagaatgaatcaacccttctcctcgtcctccgtctacgtggtggcatgcagatcttctgtaagaccctcaccggctagactattaccatataagtcgatagctccgacaccatcgacaacgtcaaggctaagattcacgacaatgagggaatccgcccagactagctgaggctgatcttngccgggtagcagctccatgacggacgcaccgctttctgactcaaccttccagaaggagtcactctccaactggtgttgcgtctt

SEQ ID NO: 106745 - DNA, 216 bp, Glycine max
  Clone ID: PAT_MRT3847_67406C.1
agacgacagaaagggagaacacttgcgcgctgcaggatccaagctcgcatcagtcatcgtgtgtcgaacatcaggcctctctgaagtgttaaaatgtcgccctgagaaaatgcgtgttcatatgcagctctcaaccttcatgaagatggtaacaatgttactgttgacgagaatcgcaccttggtgagaaatgcaaatgttcaagtcgatacctat

SEQ ID NO: 106746 - DNA, 340 bp, Glycine max
  Clone ID: PAT_MRT3847_67407C.1
ctgcgactagcaaaaagtattggccgttaccacattatttatttgggacaaccgagaattgagcgtgagagctatttcgtcacgagacattacattatacatcatcgcctcctaattaattgggaaaaaattcgccgtagtaattatttgaggaatctgcccgagaccaatcactgcccccttcatcatcattaaaggattaactctgacctccatcatcggcagcactatcctctttcttatcctcttaattatgattggcggcgtcatcattattactacattcaacccccttgtccctatttttgattggaaccttccactttggtggggggggagg

SEQ ID NO: 106747 - DNA, 705 bp, Glycine max
  unsure (1)..(705): unsure at all n locations
  Clone ID: PAT_MRT3847_67408C.1
ctgtcttttcccctgccttcctctgttccatctttgagttgaaaccaatgtcagatatttctctccgtgttactcagcagcacaagtggtgttttactcttcccgtttgattgaattgtatcatccaagtttcagtgcttatcaccttgagagtttcatagacgctgtgtcactatatggaagcagagtactctttcttctgtttctgatacgtgtgttttgggtctcttcaagttttggatttctctgtcgcgttggcttatccctcgggcttctttgattcttacactttaggaagctttccttgtttctcccttttttcaactaatttatttcttgccacccaaaaaaagttttaaggtagaaattccaaagtccaatatttcatttttaggatacaatcgttttgggcaatgtccttcaatttaatatttttgtatccattcctattctccaacttgctttggttggatattcctaactaagctaattttatgtttcatgtgttgctcttaattcatcatcttttaatttgtatttactttgtagagagagaaaaaaaggaaagaaacattttgtttccagagaaaaaaaaattcatttttgtcttccttaagttatcctctaccatgaaatttctcactttcccggtgggtttgtgatatcttttcttttacttganggttttcggtgtttgtgggtcac

SEQ ID NO: 106748 - DNA, 101 bp, Glycine max
  Clone ID: PAT_MRT3847_67409C.1
ctatcttctgcgagactctggtactacgtatcagaaatgtttccagacgggtagtaggagggaaagagctcggagaccatcatggttaaaacctagaatga

SEQ ID NO: 106749 - DNA, 412 bp, Glycine max
  Clone ID: PAT_MRT3847_6740C.1
ctgagacggcgtgttttgagcaacatcgttgaaaggagtagtatttgtgaagtgtaatagagactgagagagaaaggggggaaatgggtatgtgatgagagtgagattggcgtcgttcttcaccggggctgcagcggcgtcgtttctggggctctacaccctccacaaggattacaaggtcccgcaccaatcctttactcaacaggttgttgaaggaaacaacaagtgaaaacatgattcttctcaaagacattgtgcctgcagctcagaacaatatagacaccaaatttatcattttggacaaaggcaagaccacagtagaagggcaaaacaagatatgcctggctcttgtggcagatgcgactgcagctattcatttccagttctggggcgaccagtgcgatgcttttga

SEQ ID NO: 106750 - DNA, 615 bp, Glycine max
  unsure (1)..(615): unsure at all n locations
  Clone ID: PAT_MRT3847_67410C.1
ggctcgagcttctcgtgtcttctctctctttgcagtgcaaacgtggggcgggatcccgtttcaaaccccgtttttgatccgactccgatcccatttgaagaaataacttgattaccttgcttttctccctctcctggagatgcataaaaggaaaagctttagtttccccttttggtcacgggacacaccgtttacggcatgcctaggaactaaaggcacattgattcagaaattgtatccaagttgaacagcatgctagattagcataacacatgcaaaatcctttcgaatggctagagatagatttaaagatggatttgtgcatgatcttaaattgaagttgatcttggatagagttaaggatgatagaatatataacatgtctcaagtttatgaagtagctgcacttattgaaggtgacgcggacagagtataaaaaagatacataatcttggaatcacaaaatggacaactccaaagactagatgattttcatgcangttattcgggactctagtatctacttttattctcgtatgttaaggatgggtatagacatgatgtccctaattgagctacacatactttagaanattgcataagagaccaccttac

SEQ ID NO: 106751 - DNA, 340 bp, Glycine max
  Clone ID: PAT_MRT3847_67411C.1
gattcgaatggatcacgagtggatgggttccgctgtataagctagacctagcttacgtctctcgcagtgtgtgtgaatctgctgaatgcagaatgttccaaggttatggtctagactgtaactgatgtgtcatcacacacaattcgttaaagcgttatcctctcagcgagtctagttgagaggcatcacgctgaagtaatattctgatattatagcaactgcactatttagaggatttgctccttatgatcctgactgctactatgtcacagttgcatcgatagcgagattcatatacatgataagatgacttggtattggtacctttcagatgatttat

SEQ ID NO: 106752 - DNA, 184 bp, Glycine max
  unsure (1)..(184): unsure at all n locations
  Clone ID: PAT_MRT3847_67412C.1
ttttatttttaattttcgnatagaaagctcattgctcatttaatgtggccgttgggtacacttgcaggacaaagacccttaaataaaaattttaaacaccttctagagttcgagtccaaacaaatttcattatgaaaatgacagggaaaaccaatggggaaaaataataataaaacccctaaat

SEQ ID NO: 106753 - DNA, 2548 bp, Glycine max
  Clone ID: PAT_MRT3847_67413C.1
aatgtcgaacgggtcgctcaaactcacagatagattagcacttagcatttactaagaaaggataaaggaaggaacactttcgttacatttctccgcccattcctaccttgttcctccttttctccttttctttttcgtattcggggttgctgctttctttcgactctattgtcttcttaataaatacagaaagaaacaaaaaagaaaaaagtttataggtgcctagaagaaaagacaatatagtgtggagcaattacgtttgatcacaagggaaattaaaggtgcaacggttttgcaagatagcatagaagattttgaagaatcttagttgcaatatagttgtgcagttgttgaaatgggggctcctttatcagcatggcctttggagaactttggaacatacaagtatctattgtatgggccgtttgtgggaaaagtcctgtatgaatggttctatggtgaagaacactcctactacaacctcagctggtgccttcatttgctcatacttagtggtctcagaggcctaattcatgtgctttggggttcctacagccacatgttttttctaaccagaaatcgacggattgttcaaaagggtgttgatttcaagcagattgacaaagaatgggactgggacaatttcttgattcttcaagcactagttgcctccatggcatgctatatgtttccctttcttcagcatcttcctctctggaatgtaaaaggtcttattgttgctttggttcttcatgtgggatgggggtggaaaactttttatggagaagcaccctaaccttagggtccgtgtcgttcatccgatcatcattcgctccatcattcatctcctgtaccagagtcttttactgctggaaatgcaacacttttggagcatcttattatgacggtaatcattggaatccctatccttggggcttctttgatgggatatggatcagcaagcatgatatatggttatgttttgatttttgatttcctgagatgcttgggccacagcaatgttgaaattgttcctcatcaattgttcgagaaacttccatttcttagatatgtgatatacacaccgacatatcaccacctacaccactctgataaggacactaatttctgcctcttcatgcctctctttgattcacttggcaataccctcaacaaaaattcatggcaatcacacaaactactaagttcaggttcaggaaacggtgacatggtaccccattttgttttcctggcacatatagttgatgtgtcatccagtatgcatgctcaattcgtctatagatcctttgcttcattgccatacacaacaaggttcttcttgctcccaggcttgcccattacttttctagttttgctagcaatgtgggcttggtccaagacctttttagttagtttctactatctcagaggcagacttcaccaaacgtgggttgtacctagatgtggctttcagtatttcttgccatttgctactgagggaatcaataatcaaattgagcaagctatcctcagggctgataaaattggggttaaagtcatcagccttgctgcattgaataagaatgaatcactaaatgggggtggaaagctttttgtggacaagcaccctaaccttagggtccgagttgttcatgggaacacgttaactgctgctgtcatactcaatgagatccctcaagatgtgaaggaggtgttcctaacaggagccacatccaagcttggaagagcaattgctctctacctttgccaaaagaaagtgaaagttctgatgttaactctctcaacagatagatttcagaggattcaaaaggaagcccctccagaaaatcaaagctatcttgtccaagtgacaaaataccaagctgcacaaaactgcaagacctggatcgttggtaagtggatcacgccaagagagcaatactgggcaccacgtggaacccattttcatcaatttgttgtcccaccaattttatcatttagaaaagattgcacttatggtgacctggcagccatgagattaccagaagacgtggaaggacttgggtgttgtgagtacacgatggataggggagtggttcacgcgtgccatgcaggaggagtggtacatagccttgaaggttggtctcatcacgaagttggggccatagatgttaacagaatcgatcttgtgtgggaagcagcactcaaacatggcctaagaccagtgtcaagtttcacacagaaagaaaattaaaatcagcttcagtcaaagtatttttctcaagttgtttcttatttgttttggtgtattgcatgcacatcacagtgaccttataagtgtgattatattctttcaagtctgtgtattacatttctaatgtttcctcttgtatgttcatatgatcacattgacagtgattcattcatggtataaattaagccaaagcaagatagctttgcttcctcttgtatgttcaattcctattctgattgctttgttatttttaatatttccttatatattcatttaatgcatatattatcacag

SEQ ID NO: 106754 - DNA, 433 bp, Glycine max
  Clone ID: PAT_MRT3847_67414C.1
aacaacccaaataatgaatgggtgcgagtttgaaactatgtaatcacaataatatcacttgctaagggcaattcttcacttcaaaagatttttttttacagggccaaacgactattaagggtttattactgttctcctattcaatgaaggagtcattcccaaatcattcctcctatggggggggattgaaaactccgacacttcaaattcgagaaaggttgcccgatgttggcagcctcaaactcgagacagggtcatcgagctgaacataattctacggaagccatccttttttcctggcagcctcgagccttataaaaagtttttgacgctacattcccacctccagctatttaaggctcatgtggaagtggcgctcctgaatatctgtaaacactgcctctagcagagattgtgaacgcccaaatttttc

SEQ ID NO: 106755 - DNA, 394 bp, Glycine max
  unsure (1)..(394): unsure at all n locations
  Clone ID: PAT_MRT3847_67415C.1
cccacgcgtncgcccacgcgtncgatcccttcctatccacaggtaagtttggttgatcaatattttttttttttttgctggttagcagtgaggatcaaattcaaatggctatggccacagctgtcgngtggcctcaccctccaccggagtttcgggggctcacccaagaagagagaggngcacgcgacacgggtaaattcatttgggggactgaaggctatcaatggtggtgtctctttgggacttcctatgagcactgagaagtgctttgctaaggttgtgagttcagcgaaagcagcaacatcaaatggaaaaggaaagggtggaggggcactctcctccacgtgcaacgccgcaggtgagatattcacgattgctgctatcatcaatggac

SEQ ID NO: 106756 - DNA, 747 bp, Glycine max
  Clone ID: PAT_MRT3847_67416C.1
aactctccactctttatctcttcaatccttcttcttaaatcttttcttctcatttttaatctttactttttttcttcttttttttttctcgccgttgtaaggaatatcacgattttcgtttcgccaattcgtgaaatcgaaagattcccacagaattgtacgaattattgttcatttttttgtctctactgtcgtgctccaacttggtaaactagaagttcatttattgttttcattcttcaatgggggatgctgagaatgcccttccacctacaaagaaaagggctgctggaagggagctcactcgagacactcccattgatgatgaggaagatgcccccgagcttgagactggcactttcaagagagccagtgaagaggttctggcaaccagaaggatggtcacaattcgtcgcaaacagactaattctgctccttctgcaaatccttttgctggaatacgcctggttgctcccactgaatcatgtgataatcctgctgagattactacggaagtacaatcagctggtgagaacgctgtttcacatgattcaaaaagtgatgaaggtatagctaaggattccaagaaagctgaagatgggaaaactaagcagtcagagttcaaatctgatgaggcagaggataaacctactgaaggtaaggatgctgcggaagaaaggcatgcaaacaaagagcatactgaagaaaaggaaagttctgatgacaaatctgaggtagataaagaac

SEQ ID NO: 106757 - DNA, 315 bp, Glycine max
  unsure (1)..(315): unsure at all n locations
  Clone ID: PAT_MRT3847_67417C.1
gtcnaanaacggcgtcgttntgcgcaataccgacatnntgtgtcacantnctggaaancttgnaagctgnaaacgntgcanctgnngttgnngttcanaanngttgttggtaggcaatgggatgcagtaactanggcgaaaccgcttctggtcactgtcgtntttgcgtttggttacngtgcttttcttccgntgcggncgtcgnttaacagaanncggngagaatcggttnccatgnagccgctgggtcaatancattcatcncgnaacgtntgggcaggacctccattgggncgtcactgcccccntctncgc

SEQ ID NO: 106758 - DNA, 684 bp, Glycine max
  Clone ID: PAT_MRT3847_67418C.1
gggtagcctttttttttgatcaaaatgcttattttatttttaactttatgtttattttcagccactcgctacggatagaaaaactacaggatttttggagaaaagtttttttcttcttacaaattatagcaaaattacttaaacagagcgcacacaggaatcaacttaatccagcgcaacctagaaaaaatgaagttcagttcattgttaatatgatggcatgattttcatctgtcttagcttcttcacccagaatctgatactctttaacgtatcaacatgcccaaaaaatccatgctccctactcttgttcatggcagacacatgttgaaacttaaaatgtagcactgtttggagggcttcatagcacgttatctcctccaatttggtgttgtgaagctcgtatttctccacaatctcctcccagacgctacccttatcatgcatcagctcagccaaatcaaacttgtgactttcatcaaacgccacaaactccacgtcgaacaattcagccagaagcttccacacggtcttccacgcaaaaacgtcgccgtttgtgcagttgaatgcctgattcttagcattgggtgtaaccgcagcccacacgtgctgctgcgccaacactcccgcgtcggtcatgtcacagaaatgctcccacgtgtacctcgttccagggtaccgaaa

SEQ ID NO: 106759 - DNA, 420 bp, Glycine max
  Clone ID: PAT_MRT3847_67419C.1
gcggtctcggcctcctcgggtgttgaggtcaacgtcggagaagaagtgaaggccatcgaggaagtacggactcaaagaacggcgcgacggggatgcgctggtggcggcaggcgaggcagagcatggcagcgacggccttgcatgtgacatgcgccgacgcctgttcgaacacctcgcagagcgccacgcgcgagtggcggcgtggaccttagcattgcacgtgccgcagagaaacgttgcccaaggataagttcttacgagttattcacctgttcatgaatgaaaacaccacctctcgtccgacttgcatataagggcttcttttagtatgtttttcctcaatttttcatttgaaatatcgtaacaattgtgctagctaggtttcgaatgtttagatttttattacaacaccaacatatc

SEQ ID NO: 106760 - DNA, 1112 bp, Glycine max
  Clone ID: PAT_MRT3847_6741C.1
gcacgagcttcattcttcttcttctcctttctccgctcttcaattgtttcgttttcttctccgatttttcctttcgataagagtatctattcttttttccttttcccttttccgattccctgaacaaccatcctacgctagggttgcaactatttgttatccatcgctgctgtttgtggcttgccttttcaattattcactcaaacaatgttatatttgtctgcgacaatgaaattagctgaagttcttgagaggtgctgaaattggttaggcaataacaaaagacacattcccctgctttcatttactggaagttcaaagtcttcacttgcggctgctagagcagacaacttttactatcctttggaataggaaccgagtcagggttcgctgaacaagtttcatggtcaacatgccttgcaggagagggcgagaaaattagatcagggtatcctgattataaggttgttgaaggaaacaagtgaaaacatgattcttctcaaagacattgtgcctgcagctcagaacaatatagacaccaaatttatcattttggacaaaggcaaaaccacagtagaagggcaaaacaagatatgcctggctcttgtggcagatgcgactgcagctattcatttccagttctggggcgacgagtgtgatgcttttgattcaggtgacataatttgtcttaccaatggcatattttcgtaccagcatgggaaccttatactgagggcagggaagagagggaaactagtgaaggtaggagggttcactatggcctttgttgagacaccaaacatgagtgagattcattggattcctgacccaaacaattctaagaattatatccaacaatatgtaatatctcctgtgtcacgcatctttcctcctccttctgatatataaaagggatgtgcacttttatcagatctgcaatattttgtgataaaataacctttgttttatcactttttcacttgtttttttttcttttttgtcattgttgtgatggaagttgaggttaagttcctctgcagtaaaactatttagtaaattgcttattggttcatataagtaaataattgatgttctgatgtctttttggccat

SEQ ID NO: 106761 - DNA, 410 bp, Glycine max
  Clone ID: PAT_MRT3847_67420C.1
cgaaccgcccctcgaggacgacggcctagggtcggaattcagctcgaggcgagaggcaggcataagcatgttagaatttgttgcacttgcacgcgttgacggacaatgaaggtgccctgttgcgatacttgattgttatttcgaccttcatatgcaccttggtttgctacatcgaacgagaagggttttccatcgagaacacagttgatgatgacagtgccaaactgaatcaatcgagcaaaggtacaatactgagcactttctattacagatacgcctgttctcaaactcccggaggatgggcagctcaaaaaatcggggggaggagggtactgattctttcatttctcgggagacattaacttgggcactacttctcttggatcccaaacgcgtttagcttttagtca

SEQ ID NO: 106762 - DNA, 537 bp, Glycine max
  Clone ID: PAT_MRT3847_67421C.1
ggctcgagcccatagttcaaataccggaagcaaccttgatatttatgataattatctatgaaaatggtcataagagactgaatttgagtccgatagacaaaaatattcaacctataattcaaatgcacattaaaaaaaatgtcagaaaaagaatatgcacattaaaatattcaacctataattcaaacataatggttccttcactcataaataaaaaggaaattaaggttcttcattttttaggtagtttagattataaatttctatcaatagtgtgtatgaaaaaaaatatctattaagatatattaactttctaaataaatcttagtatgagaaaagattaatttttgactttgcaatatagcctacaagaatattttgtgttcacccaaaaattttataaaattttcaattattagaatgattcacaaagaaaaaacatttgaaataaaaattattaaatggtgtgtagcaatagacacatgggaactatatattctctctctctttgcactagaatctgcacttaaattagta

SEQ ID NO: 106763 - DNA, 370 bp, Glycine max
  Clone ID: PAT_MRT3847_67422C.1
acaggctcatgtcatgtttttgtctcttgtaagggcactttaaatgcagtttttgaacaaggcttttgaatagtcacaaaaatattcccaaaaagctgtgcatgggtacagcaatgagaggggtctcgaattaccgataactactaccctccattttgattgaataagagaccccatcccaggggtctaggcagacaatcctgctgttacaaaaattggattgaaaaagcctgcaaagatactcgcgaatcagattcaaactaaataccggaatatatttgggtcttactacattccaaaggctgtgccgacccttgccaaagatgttacataaccttatgcaccagcagaataccttagcttcctaaaa

SEQ ID NO: 106764 - DNA, 438 bp, Glycine max
  Clone ID: PAT_MRT3847_67423C.1
gcataccaaatgcttagggaggacatctcacaggagaatcaggatggggctttcgaggagctatggaaactcaaggttccataaaaaattgctgcatttgcatggaggctactcaaagacaggctaccaaccagaataaatctgtgaaagcggcaaatagagatggtagaatccagctgtccattctgtagtttggtggaggagagtgcgggtcacctgttttttcaatgcagcaagataatccaggtttggtgggaatcgttgtcatgggtgaacttggtgggagttttcccacaccatcctagacgacattttctccaacacattcatgaggtgacacggggaatgagagctaatagatggaaatggtggtggctagcaatcattggtctaccaatcttagtgcaggatttttaaatataccatgatatgtgtctt

SEQ ID NO: 106765 - DNA, 335 bp, Glycine max
  Clone ID: PAT_MRT3847_67424C.1
aggaaaaagccttaacctaaatatgcggattgaactattgaattacgtaaaaggacgggaccaacttggtttgcggatagacccagaaatgtatcactgacccaatcggacaacctctacaggattcactttaacgagaaacttaagagcttgcgttgtacatggacagagttaggaccttcctcaaaatgtatattgactctagacaatagaacatgggggaagacaacattagtttaagggccggcggaaccaaaagaaccctctagctcacattaatagagaggcgaggactagggatttacattgcatttgaccgtcagaggcaatttgaa

SEQ ID NO: 106766 - DNA, 364 bp, Glycine max
  Clone ID: PAT_MRT3847_67425C.1
aaattcgggtcgagtgataatatttataacattaggttatgaattattatctgttgataaccaaatataaaactgccaacataatgaaaaaaaaagttcgagtaagatggagacagattgtttgagaaaaatttagctgctaagatggtgtagaagtttattttagcgtgtcccaaaccaaatagtttcagttgttctcaaacgggaattgaagtttttaaagggatagaacatgaagaatattaagaaaaatatgcattataagttttttttatcactgttaggttgtaatggaaggcaacggcagacatttgattaattaattattcatgcccctttaatgctttattgggttgaggttatt

SEQ ID NO: 106767 - DNA, 364 bp, Glycine max
  Clone ID: PAT_MRT3847_67426C.1
cgaaaaaataaaaaaaaaaaaaaaaaaaaaaaaaaaaggggaaaaaaaaaaaaaaagggggaaaaaaaaaaaaaaaaaaaaaaaaaaaaaaaaaaataaaaaaaaaaaaaaaaaaaaaaggggggggccccccctttgtgggctcgtccccccgggatttttttcgggcccggtcctggggggggtcccatttttcctttttgggggccgttttagggctgggggtaatcagggtcttggctgtttcctgggggaaattgttttccgctcccatttccccccaccttccggcccgggggctttaggtgtaaaccctggggggcctattgggtggcctacctcactttatttgggtggcgctccc

SEQ ID NO: 106768 - DNA, 173 bp, Glycine max
  Clone ID: PAT_MRT3847_67427C.1
gggggtttagcataatttgttttattttttggacacggaataacatttgccctttacggggaataggttgtgttagaaatgaatacaatctggaacctgacagagcagcttcgctccccttggtgggtggcctcataaaaaaaagccacatgtttaaaaaaaggttaagctta

SEQ ID NO: 106769 - DNA, 729 bp, Glycine max
  Clone ID: PAT_MRT3847_67428C.1
ctgaattgagggatgagtgctctcaattgaaggtggacttggaagaaaagattaaatctctggaagtgattgtcagcgagaattctgaacttaaagcacaactggagcagatgactattaaaggccaataaagctgaagcagaaaataagatgttgatagaccgctggatgttagaaaagatgaaggatgctgaacgcctaaatgaggccaacgcactgtatgaagagatggttgagaaactaagggccagtgggttagaacaacttgcaaggcggcaggtggatggtatagttcgccaaagtgaagaaggtgctgagttctttttagagtcaaacatcccttccatatgtaaatacaggcttcgtgcacatgaaggtggttgtgcttccatgttgtttgaatacaattccagtaaattgattactgggggacaagatcggttagttaaaatgtgggatgcaaatacaggatccttaagttctactcttcagggctgccttggctcagtattggatctcacaatcacccatgataatcgatctgtcattgctgcaagcagctcaaacaacttgtatgtatgggatgtcaactcaggtcgtgtccgccatacccttactggccacacagataaagtttgtgctgtagatgtcagcaagatttcaagtcgtcatgttgtcagtgctgcctatgatcgtacaataaaagtttgggacttagtgaaaggttac

SEQ ID NO: 106770 - DNA, 631 bp, Glycine max
  unsure (1)..(631): unsure at all n locations
  Clone ID: PAT_MRT3847_67429C.1
atnctttcgttattgaattttgatggctgnagcgggacattatcatcttcaaaaaataaagagaaagaggatactcacatcaatcaaaacaaatattacaagcactagtgtttgtatacatacactgaagacaccttttctttcctatttttttatatatcttctggcaaaatgttctaccatgccccaagtaaaaaaatttatagatctgagcaatcctactagaccatgatctcaaccctggattttacgaaaaaagaataaacaaatgaagatatcatagctaaaagaaatcacaagaaacaataggtaagtgttgtggtaaccctgaaagcatgtcaattccaatcttgactgctttaaagacaatactgtacaatgaaaatcgtgcaccattaaacatgcagaaaatgtgcctttgtttcaggaagctccaccaggtcttaactgatatgtctgatgattcccttttgcttgaagggccatagacatagatcttaacctgccagttatctccgtgaatgatggccggctttcagggtcaggtgaccaacactcttccataagcttcctccattcagaatcacaccgttcaggcacatgaggtctaagagtgttctttacaataccc

SEQ ID NO: 106771 - DNA, 507 bp, Glycine max
  Clone ID: PAT_MRT3847_6742C.1
gcacgagattgtccccaaccttcaatccctaattccacccctcacttcctctctcttcattcttcttcttctcctttctccgctcttcaattgtttcgttttcttctccgatttttcctttcgataagagtatctattcttttttccttttcccttttccgattccctgaacaaccatcctacgctagggttgcaactatttgttatccatcgctgctgtttgtggcttgccttttcaattattcactcaaacaatgttatatttgtctgcgacaatgaaattagcttaactatttgtggaggcagaaaatgaaaggggtggaagttctgaacagagacggtcatggtggactatcaagctgaatagtggactatcgagctgaataagacttgtagctgaagttcttgagaggtgctgaaattggttaggcaataacaaaagacacattcccctgctttcatttactggaagttcaaagtcttcacttgcggctgctagagcagaca

SEQ ID NO: 106772 - DNA, 459 bp, Glycine max
  Clone ID: PAT_MRT3847_67430C.1
aattcggctcgagggagaactggtccatggaatggaagggtcttccttgggtcaccaaggatgtcaactgagtacctatatggctggcgttttgagcctaatgatagtggaacagcttatctaacctacaactttgaaaacccttctatgtttggagtcctgaccataagtccacatggaacacttaaattggtagagtttttgaacaaaaagatatttctggagcttgaggtggatcaaaataagtgtgacctttatgggacatgtgggccttttggaagctgtgataactcaacattaccaatttgcagctgttttgaggggtttgagcccagaaatccagaggaatggaacagggaaaattggactagtggatgtgtgaggaatgtgcaactgaattgtggcaagttgaataatacgagtgatgttcaacaagatcggtttcgggtgtccaaaata

SEQ ID NO: 106773 - DNA, 310 bp, Glycine max
  Clone ID: PAT_MRT3847_67431C.1
gggaccgcggggcgagtggtcacctctcatactgttattttttcctccgctttatcaggtgcgtaacctactgaaagagacgcagcctggttttacggctcgctttgatcctttcatgctctggatgcctaaccagtttttttttgtcactccgtcacataatctgagggggttgggatcacctataatggtccgtattttattcactgtatatatctgggtctaggcccgtcttgttgcttgtgaatatctctaattcgaatgttggtcttatcgctgtaagaaactacatttggggggtcgccacctt

SEQ ID NO: 106774 - DNA, 436 bp, Glycine max
  Clone ID: PAT_MRT3847_67432C.1
tttcgttctggtcggcacagaacatgacggatatgagccttcttttggtggaattcaacaatattccactcccatgatgcccctagatgaagaaattctttctaaggttgcacaaaacatggtcgaggaatggtttgatagggttgatgaggaggattcctttgcggaagtttttttaagtgcggtacttaatggtgttgagggctgggaccatatggaaagacctcctcttgccacatgtgagggttatcctcatgttctttcacgcaaaaatggcgaaaaaggcacaaggctatttgtttctggggatggagaatagatgccattgatcccaggacccagtgttgaacaggcttaccaccagcttattttcgaacttgatcaaacgtgtcctacattggattggcattgaatggttcaaggatgtgaaacttcc

SEQ ID NO: 106775 - DNA, 326 bp, Glycine max
  Clone ID: PAT_MRT3847_67433C.1
gtccaccctgaatttgattcattggaatgccgatatgaaagggtatgcgatgcatgcgatggctggggagacaatggaaatgtttcatatgatgctgctgagtgctcagaatcctgatttggttacatttacatagtgttttatcatgcgtgcgctctatacggtctgactgaacaagggcggcgatagtataatagtatgtaccaagaacatggcattgcaccttaaatggaacattatgcttgcttggcgacacttctaactcgcgatcgcaaacctgaagacgcttactgtatcattaatgaaactccttttgcacctgatgc

SEQ ID NO: 106776 - DNA, 165 bp, Glycine max
  unsure (1)..(165): unsure at all n locations
  Clone ID: PAT_MRT3847_67434C.1
cctctagagccgccgcttttttttttttttttttgnnnntnnnnncgcgaagatatggtttctgatttgaggatgaatgtggttcactccggagaggattatgcactgtangttttacctaaaaattcaagtgtcttcatctttttaaaaattagtacaactttt

SEQ ID NO: 106777 - DNA, 387 bp, Glycine max
  Clone ID: PAT_MRT3847_67435C.1
ataaggaaggagaaaacagtgcactcattatttgttctaattctgtgggaaagagaagccattccccttctgtcacagacaagtttttcatttgtcaaatctgcactttgagtctgtgggagagagaagccactcccctccctaacgcactgttgctactgtatctctttcttccatccatccatccattacactaagaaaaggtaggcaagttttctgaagttcctccttgaaggattaaatcttgatgaaatcaatatatgttttctattgcatttttaatgagtcaagttattaaatttattttcttgccctttttatttattattttttgcctaaacatatcaaacttgaagcagagatggcaagaattggacaaaacagact

SEQ ID NO: 106778 - DNA, 276 bp, Glycine max
  Clone ID: PAT_MRT3847_67436C.1
actcacgcgtccccttcaattcacaacaaagtggaccttatatttttcggtttagaacttaataacaggaacaggcattgaactggcattaaatgtattattgaattatgcatacgataggtgcattccggaattaatcacctgcgtatactcttgactctgttgatgaccttatatggtgttagctgctttaaccccggctctccaagtgactaataaagtctgacaaatccatggagtgaatgagacatagaatatcttcgatgcttgcaagca

SEQ ID NO: 106779 - DNA, 373 bp, Glycine max
  Clone ID: PAT_MRT3847_67437C.1
agcggaccctgcaggaccggccggaatcccgggcgacctttgcgccgggtgatattcgagcagggagatactcttgcaagtcccgcaatgatcttgtgccccgatatctccaccaacacttgagactacagaaataacacagctcgctttctaaactagagccccctacgtcgagaaaggaaactgcgaaaatgcagatgacacaagactgcaaagctggaataaaagagagctatacagctgcgtcatgagggacagtttctgatgcagaaaaaataaaaacaccacgaccgctcttgctcttacgagagaaaaacagaacaaaaggtgcagcaaaattcccaggaaaaatacaactcaacaaaaagaataa

SEQ ID NO: 106780 - DNA, 310 bp, Glycine max
  Clone ID: PAT_MRT3847_67438C.1
ctctagtgattcaagaacattagtaaatccatgatgatcataccgtagcaacttccactgttgctattactccggatccatcggaagcatgccatttccgcgagtgcatcacagagtcggtttatcctgatcctttcaaggttgccgaattccttgcaccataagtcagatcgtcactagtcacttgttcaactcaagctcaacgacttccacaatttgctggctgataaggtgggacttaagcggatatcccaagatgggagagatcggacaatctcgtttcactaaccatagaaggcgtttattccaa

SEQ ID NO: 106781 - DNA, 575 bp, Glycine max
  Clone ID: PAT_MRT3847_67439C.1
aaacccaaaacaaaagggtttaaaacttcaattattttttacattcatacatcatgtcatctaggtgaccacttcatatttatttattcatcttatcattaatcagggcaaccccaactttttaaaaaggtctctaccccaatatcacaaggcatgggatttagccgatcatacatattaacatcagcatcgatgcttggggattcaaacttaggagggggcatacattggaaaaaattacccctttggaaaaataatttattaaaaattatgtttattttttttacaaaaaattaaaaattatgttgttagccccccctgttacaaaattaccacttttttacataccacatcaattttccagggatcaatatcaatataaattggcaatgcaaaaagcctattttattatcgggaatatcaaacaatggaagggcccttcaattctatactagggatataaatcaactagaatcaacaaagttcggttgcacttattgagttggccggattaattcaaagcaatgaacagttcaattatgattcagttttcaaatattacaagcttatgtcat

SEQ ID NO: 106782 - DNA, 917 bp, Glycine max
  unsure (1)..(917): unsure at all n locations
  Clone ID: PAT_MRT3847_6743C.1
ggggggaaatgggtatgtgatgagagtgagattggcgtcgttcttcaccggggctgcagcggcatcgtttctggggctctacaccctccacaaggattacaaggtcccgcaccaatcctttactcaacagatcccatcatcatgatagacattgctcgtctcccacactttgtgtaaatcttctcaaaagcaaacaaaagacagaaaacatatattacaaagtgaaggaggaaggaacgaagcggaagcggaagcgaaatcgctttgtctctatattgagccactttgaatctgtcgccgcaacggtagatcaaatcgagtttcacctgaatgctctttctggatgcgatttaggttgttgaaggaaacaacaagtgaaaacatgattcttctcaaagacattgtgcctgcagctcagaacaatatagacaccaaatttatcattttggacaaaggcaagaccacagtagaagggcaaaacaagatatgcctggctcttgtggcagatgcgactgcagctattcacttccagttctggggcgacgagtgcgatgcttttgattcaggtgacataatttgtcttaccaatggcatattttcgtaccagcatgggaaccttatactgagggcagggaagagagggaaactagtgaaggtaggagggttcactatggcctttgttgagacaccaaacatgagtgagattcattggattcctgacccaaacaattctaagaattatatccaacaatatgtaatatctcctgtgtcacgcatctttcctcctccttctgatatataaaagggatgtgcacttttatcagatctgcaatattttgtgataaaataacctttgttttatcactttttcannngtttttttttcttttttnccaannngtgnnnnnnnagcagag

SEQ ID NO: 106783 - DNA, 189 bp, Glycine max
  unsure (1)..(189): unsure at all n locations
  Clone ID: PAT_MRT3847_67440C.1
ggaanncggcacgagcaaaaagcgccgaggttcttaccttaaagagaggaaacaaatgggggggggagctacaaggagggggggggggggctaacactaatacctataccaaacttgatgaatagtatataggatggagtgaaagatcggattcaagaggaggcgccatcataggaaggtaaaaaagaa

SEQ ID NO: 106784 - DNA, 369 bp, Glycine max
  Clone ID: PAT_MRT3847_67441C.1
ctagcaaagaggttgaaccagattctagctcaacatataatggctgcgctacctgggctgggagcacgtataagcacttcactagttgctgatgcgaaagagtatgctagctatggggaaatcactgagtgcaaggctggtcaggctgcacttctactgaatattctttaaaaatattgggaagctttctccttcatggttgagggaaataatgaggagatttctacatctgaactatttggtggagcacgaatccattacattcttcaatctatctttgtcagaagtttagaggaggtggatccgtgtgaagaccttgctgatgacaacattcgtactgccatacaaaatgctactggacctaaatta

SEQ ID NO: 106785 - DNA, 152 bp, Glycine max
  Clone ID: PAT_MRT3847_67442C.1
ccgggaaactgtacgtttcccttctaatatctctcatcgtggattctctctccacttgtgccaaaaactcaagcgtgggttgttgcacttcactcgcactcaaattagttccacgctttttctttttctcttccttctgtctgattctagag

SEQ ID NO: 106786 - DNA, 999 bp, Glycine max
  Clone ID: PAT_MRT3847_67443C.1
atcccataatcactaataaattaataactatgccaacagcaattagaaaacagcctctgaacaaaatcaatacaatactgccaaattaatccagacaaaacaaaatgctagttaaaccaacaaacttgaataaaagttcacaataaaaatgggtgaaaatatccatgttttagtctgaacatgttctgaataaagctaatcaatctcgtgcaaaaattgtcttgcaacaactattatatggatggactacaaacgagagacttctaaaggtcatcactttttgtcttccttttctgcttcggcagccttcttcagtctggcaccatgatggcgtttgtttgtgcgttcaagtcgaagcttgtaataagctttaaatgccttcatgtcatctgtaacctttacaagttcaacagttggcttctccctcacaataggcaagaaagaaccctggacttgcgttgcatttgcaagctcctcgggagtagaatcaccagccttaaccttgtgtgcccgtcttgggaacacaaccaatttggccttgtatgttttcagcctctgcacattagcttgcagactttccaaagaacggttcttgcggcgatgatcaacagcaataccaattgttggtgcaagctttttgggaatccctgctgccttgagttcttcaagagaaaatccccttccagctctcactttcatgttgtatttcaaagtttgaccatgtacaatgggtctaagaggtccagctgtaggtctggggaaaatcttcacagctttcttctgacgagccaaccgtctccttgtcttccgtgctggctgattgaaccaagtcttcacatagttctgccagtgcttacggaagtgtccgttggggataacattgttatgcttaaccatggctttggcttacctgaggcttgttcacgcgcaggaacagcagctacgaaaaatggcggagcccccttctgtcgtcttctcgcagccgtacggacgcgtggg

SEQ ID NO: 106787 - DNA, 761 bp, Glycine max
  unsure (1)..(761): unsure at all n locations
  Clone ID: PAT_MRT3847_67444C.1
attatggagaactaatttgcaaacacttaaatcgtccaggagttagtttttgtttccaattagagaatgaagcaaagataaattctattgagatttttaagcgtcccactgccaccagtgaagctattaatttcgtggcttcggaccaaggtggtggtgtggatgtctttgatgtagagaagacatttcagttttcacattttcaattcccatggccagtgaaacatgcttcatcgagcccagatggaagacaacttgtagtggttggagatgacccagaaggaagattagtggattctgaatcaggatcgaccatccaatcttttcgaggacactttggctgttcatgttcatcggcatggcatcctgatgggaacatgtttgctactggaaacacagacagaacatgtcgaatatgggatgttcggaatttgttacaacctgttgctgctcttgagggcaatgctacagccatttcttcaataagtttcacatctgatggaaggtttatggcaatgtgtgaagacgttgattttgtgcatgtctatgatgtgcagnacgcgtttaggagagagcaggagatcgatttgtttggacatgtgtcaggtttatctttttagtcctgacaccgaatatctttttatcattgtctccattgatactgttccaacccttntatcgtaccagcggcgaaacaggatctaccactacctggattctatgaattgataatgggatcttgaattccaaagctgcattgc

SEQ ID NO: 106788 - DNA, 376 bp, Glycine max
  Clone ID: PAT_MRT3847_67445C.1
cctgctggtgccgctgcggcataaataactgccgggtcgagctgattatttgtcggccgccgtccttttttttttttgttggttttcttatgagcataaatcgaatgtatattacttgaagctccatggcgtctaaaagggacaagaatcttctcattgttgggcctaagattagaggtcgcacaaccaccaactgataaaatgattaacagtagatcaaacctttacttaggaacgctgtacatccctgttagaaaaagctgtcctgtcattagaagaccactgattgtaatgaatacttaaattcttcttcagattgtggagccatggccttattaataagagctgtttatccagacatgtgatagcattgaat

SEQ ID NO: 106789 - DNA, 274 bp, Glycine max
  unsure (1)..(274): unsure at all n locations
  Clone ID: PAT_MRT3847_67446C.1
cttgccctgtgcccgtagcaaatttcttttatatgctaattgctaatgatcgtattttcttgtgataattgttatgtatgtgtaatttgtaaatttaaatcatataataattatctaattnttatctttttgtttttgttttttttgtgtgtttaaacattagaaatttaatgtctntttgagtttttatccggtagatattaaagttagtaaatntatagtgtttttagtaatatattttttgtaagatacacaggatacatggaagagagct

SEQ ID NO: 106790 - DNA, 295 bp, Glycine max
  unsure (1)..(295): unsure at all n locations
  Clone ID: PAT_MRT3847_67447C.1
ntcncgtgtanganntcnngnannnnngcngntngnngttgtctnttncggntagggttttagcgcagtttctttctagntttanggaagatgggtaangagatttaagacntcagtattgtggtcatggccatgtcgactntgggaaattccantaccactggtcacctgntttacaagntggaggcattgacaagcgtgttattgagaggtttgagaaggaagctgntgagatgaacaagaggtntttcaagtatgcctgggtgctggacaaattaaggctgagcgtgaaaga

SEQ ID NO: 106791 - DNA, 379 bp, Glycine max
  unsure (1)..(379): unsure at all n locations
  Clone ID: PAT_MRT3847_67448C.1
aaaacaaaagaaaacaacacccttcacatttttatattcccactctttcaattatagaattccaatgatacaaatgaaaaagtagaacataaaacacgggaatcaatacccacagtcccggggggaacaagtcatacccatcaacgggggagacaagaaccaaaattcatatttctagcaatggtcttcatggaattgctctagttgactcgctttatttgactgcatgggtgaagcaactcttttactgcatgtagggaagagaactttgcttcctcgagtctcgnaattaagaggggtttgcaaaacttcccatttggggggcttagggagggactcccgttggggcccccttaaaaaaaggaagggggagggtgtg

SEQ ID NO: 106792 - DNA, 402 bp, Glycine max
  Clone ID: PAT_MRT3847_67449C.1
gggagagcaaaagaatgaaccgtttttacattctacatttgattaaacgtactttgaaaccttgggcattaaaaaaaaacaaatgaagccgggaaacaaaaaatcacaaaattttgtggcaatgaacaaaccccaacgaaacccacacatttaagaagatatttaaacagggttccctcccagagaccaaagaagaaatcaaatagatcgatctggcccgcccacaaccaaaatcaaataatcattttttttccttcaaaggggacgaatcataaaaaaatttctcatgggaagagggttaatttattaacccaaacccccggggaggaaggttccaacaagagcaggggcggcattgcttgttttgcttatggagaaccctgcggagggaggctcggaggc

SEQ ID NO: 106793 - DNA, 572 bp, Glycine max
  Clone ID: PAT_MRT3847_6744C.1
ctcaaaaaaaaaaaaaaatttaaaaaaaaaaaaaaaaaaaaaaaaaaaaaaaaaaaaaaaaaaaaaaaaaaaaaaaaaaaaaaaaaaaaaaaaaaaaaaaaaaaaaaaaaaaaaaaaaaaagggggcgcccccttaaaagaacccaagttaacgtccccgggctggcaaggaaaaagctttttaaaggggcccccaaaataaaatccacggcccggggtttaacaccggggggacgggaaaaccccgggggtaccccaactaaatcccctggaagaaaatccccttttccccagttgggaaaaaaccaaaaagcccccacccaatcgcctttccaaaaagtggcccaccctgaagggcaaagggaaccccccctgaagcggcccataaaccccggggggggggggggttccccccaggggaaccgtaacattggcaaggccctaagcccccggtctttgggttttttccctttcttttcggccaaggtgggcgggtttcccccgaaagcttaaaagggggggcccccttaagggtcccaattaagggtttaacggcccctgacccccaaaaa

SEQ ID NO: 106794 - DNA, 143 bp, Glycine max
  Clone ID: PAT_MRT3847_67450C.1
atcttctctatataactacacttttcttttatacgcatgcccaacaatagcaattgcaaaattgaagggaatgggccccccattcaagggaaatattttccatctcaaaaccaataacttgaccagaaaattccttgttcatt

SEQ ID NO: 106795 - DNA, 553 bp, Glycine max
  Clone ID: PAT_MRT3847_67451C.1
gtgtaattaggaggggcaaagagatcgaggaaggtgataatggaattttggccagaatttcttgctagtagtacgggtaaagagtttgtggctggaggatttggaggcactgctggtataatctcaggttacccattagacacgctccgtgtgatgcaacaaagctccaacaatggctctgctgccttcaccatcctcagaaatttggtggccaaggaaggaccaactgctctgtaccgtggcatggctgcacctttggcctctgttacatttcagaacgctatggttttccaaatttacgcagttctctctagggcatttagcacgtccgtttctgtcaacgaccctccttcctacaagggtgttgctttaggaggattttgctctggcgctttgcagagcatgctgctctcccctgttgagttattaaaattcgccttcagcttcagaacacaggacaatccacagaaccacaaaagggtcccataaaggtcgccaacaacatatggaaaagagagggtcttcgtggcatttatcgaggacttggcatcac

SEQ ID NO: 106796 - DNA, 1328 bp, Glycine max
  Clone ID: PAT_MRT3847_67452C.1
tgggacggccgggcctggcggctccgcgtccgaaccgtgtatccaagcaaaagaaaagacgttacagcatagcatgggattgataagcgccagtgttcccatgaatatcgttcctcaattcgggtcgctccgaacacccattcgggtcggaaacccttccgggttgagcttccttcggaagaggaataacggctttgtttgcttcgccgtcgatgacgagctcagacagaagcagcaggacttgagtactaccgcaactgggctgggctccgcccttgaagaaaggcccggaaacacagatctttttgagagtacaactgaagaaacgcagggaaattttaggcaagatggtgacccaggtcctatctacgattttctttatcctgataaagagcttcttcccgatgataaagaaatgagcatatttgatcatcttgaagagctgcgacagagaatctttgtatcagttctggcagttggagcaagcattttgggatgctttgcattttcaaaagaactgataatgattcttgaagctcctgttaaatcacagggtgtaagatttcttcagctagctcctggtgaatttttcttcactactttaaaggtgtctggatactgtggccttctcttgggaattcctgtcatcctctatgaaatcatagcctttgtacttccaggacttacaaaagctgaaagaaggtttctagggccaattgttttaggctcatcggttcttttctatgccggaataactttctcctacttagttctgacacctgcagcattaaatttctttgttacctacgctgaaggtgctgttgaatcattatggtccattgatcaatactttgaatttgttctggtgcttatgttcagtacaggcttatctttccaggtacctgtcatacaatttctattgggacaacttggactggtgtctggagaccagatgctatcaatttggaggtatgttgtggttggtgcagtagtggcagctgctatagttacaccatctactgatcctctcactcaagttcttctagcggcacccttattgggtctttacttaggtggtgcatggatggtcaagcttactggacggtgaccctagccgcatcataataatgtgccagaattttcagtatgaacagatgttaatgtacattcacatagcaatctagcgtatatttttacacgtaccagagcactactcttctatattctaattgatttactagtcattcccattcttcgtcgtgttccgctcattcccaaaaaaaaaaaaaaaaaaaaaaaaaaaaaaaaaaaaaaaaaaaaaaaaaaaa

SEQ ID NO: 106797 - DNA, 379 bp, Glycine max
  Clone ID: PAT_MRT3847_67453C.1
agcagagaaatgagaaaggtagaggtagacattgaagatggaagagattgttttcggcacagaccttacccttcttcttcttctaacctcagtttcatgcacagagttcatctacaacaccaacttcaactccaccaacacccttctacatggcaacgccaccatagaatcttccatcctcacccttactatcagttccaccttctctgtgggtcgtgctttctacccttttaagatccccacaaaaccttccaactcttcaacccctttaccattctcagcctcattcattttctccattgcaccattcaaagaccttctccctggccatggctttgtcttcatactgacaccttctgcaggcaccactggggtgaac

SEQ ID NO: 106798 - DNA, 1423 bp, Glycine max
  Clone ID: PAT_MRT3847_67454C.1
ccacgcgtccgcataattgtgctcaaaatattcttcactttctgcccaaaagtcctcacaaaccactatcaaaccattacatatgtatcaatcgtgctaaagtgagataacttagggtctgtatttaatcattttcgggatttatggggggtaggtgtggggagaacaagaacaagacctgagttgttaaacttttttattttgagaaaaaaaaacattggacatagtaaagccatggaagagatcaccaagaacctatcagggacttctcttttggtaccatcagttcaagaattggctaaagaaaagatatctaatgttccacaaagatacattcaacctcaacatgaagaggacattgtgatcctctctgaagaagctaatagtagccttgagattccagttattgacatgcagagcttgctttctgaagaatctgggagctcagaattggataaacttcaccttgcttgcaaagaatggggattcttccagctgataaaccatggtgttagctcatccttggtggagaaagtaaagttggagattcaggatttcttcaagcttccaatgtcagagaagaaaaagttttggcagagtccacaacatatggagggttttggacaagcatttgttgtgagtgaagaccaaaaacttgattgggctgaccttttctttatgactactcttccaaaacatttaagaataccccacttatttccacagctccctcttccttttgacaacgcctttccaatttactcacagccaaacgcctttgtcgttaatgttggggatatcttggagattaatactaatgggacatatcgaagtattgaacaccgagcaacggtgaactctgaaaaggaaaggctttcaattgcaacattctatagcccaagacaagatggtgtgataggtccatggccaagtttgatcactaaacaaacaccagcacaattcaaaagaatcggagtaaaggaatactttaagaatttcttcgcccgtaaacttgaaggaaagtctaacagagatgccttgagaatagagcatcacaactgaacttattaaattagaaaaataaaatagttgcattaattataagtgtcagaaaagatataatgatgacctaaataaggttatctgaaccatgtgtgtagtgcagtaaaaaaaagtgagccatgtgtgtagtgcaccatattactctaaaattacaaagggaatgttgactacatgtattggtttttttatttttgttacaatacatgcatttttatttaggagataataaagatttgtaatccataataataataataataataataaagcaaactaaaatgaaaaaaaaaaaaaaaaaaaaaaaaaaaaaaaaaaaaaaaaaaaaaaaaaaaaaaaaaaaaaaaaaaaaaaaaaaacttgg

SEQ ID NO: 106799 - DNA, 457 bp, Glycine max
  Clone ID: PAT_MRT3847_67455C.1
ggtcctaaattaccgggtcgacccacgcgtccgaatttaacctactagacaatgatgtgagtacccaggatgatttcctggggcacagtgggtgaggagatggggacaggtgaatggaggagttaggggagaggaaaagtggatggaagtgtctggaaagggcacgagagagtcttccaggtactgatcctgtttcttgctctgagtgctagctagccagctgtgttcacactgtaaacattcatcaagctgtacatttggtgcacttttctgtgtcataccacaataaaaaaaaacctatcatcttacaaaaacaagacacccaagtccaggcccaaggagtaagtacaaatattcctgtttctgaaccattactgtaattggctcttaaggcttgaagtaaccttataggttactcataaggcatatacaaataaacttgtttgttttctttttt

SEQ ID NO: 106800 - DNA, 617 bp, Glycine max
  unsure (1)..(617): unsure at all n locations
  Clone ID: PAT_MRT3847_67456C.1
tnnnnttttttttttttttttttttttttagtccaaatgnactaaagcttcattcctcattcagaatatattaatgttacaacttcaactaccattttctttaaacactatctcaaccaacaatatgtattttcaaatggactctttaatgtccaaagatctaacgataagaacccagatcctaaatttcaccattcttttcagttccttaacagaaagcctgattcctgtagaggctataatattgctagtcaactgcaagcatgctttagtctcactctcacacaatatgtaagaatcctgcttgcttaccgaagacaaagtctggaatcagaatggaggtagaggagaagaataagccatgaagtaatagagaagtaacttgttcagcgatgcagctcatagcatctccctgccaagactacttgaatgaagtatgcattgcatttatctcccatatctggaagttatgaaaagatgcaaagttaacagcactggcatgacagcacactgtaaacagaatgcacagtaaccggacgcgtgggcggacgcgtgggcggacgcgtggcggacgcgccattcatctctttgagtgctgcacttgcagcctcctctgt

SEQ ID NO: 106801 - DNA, 219 bp, Glycine max
  Clone ID: PAT_MRT3847_67457C.1
gtaatctgcccctcttgcgtttttctttttttttctcgatgggaagaatattatgggtttgctcttgatctcggggggtgaaacaagaacttaattcctcaagctctccttctccttaccatcatccataccccactctaagcccaaagccttcttaacacctgtttcaacaattccacctcccatcacgacaccatcggttccaattacttcatctcc

SEQ ID NO: 106802 - DNA, 528 bp, Glycine max
  Clone ID: PAT_MRT3847_67458C.1
ctcgagccgaatcggctcgagcggctcgaggttcaatcatatgattttttccctcattggcttccatttggatctaattatataatcccacgctctgctttaatacaaaaatttgtgttcgaggtagccattgatattctgctaatgactatggtgttcaaaaacacaaaccagttagaggaaagtatggattccacttatgacaggaaggctgaagtgaaagcctttgatgattcaaaagctggtgttaaaggtcttgtagagtctggattgacaaagatccctcgcatgttccattctggcaggttggatatcattgaaacctcagtcagtgactctaagttcggtatccccatcatagacctccaaaatatccactcctatcctgctctgcattcagaagtaattggcaaggttcgaagtgcatgccatgactggggatttttccaggtgattaatcatggaattcctatcagtgtgttggatgagatgattgatggaattcgtagatttcatgaacaagacact

SEQ ID NO: 106803 - DNA, 515 bp, Glycine max
  Clone ID: PAT_MRT3847_67459C.1
aacaaaacttcctcataaattaaatgcatattactcacatccctgctcatcaccttaggaaatggactaaaaccctatggctgctagcgaattagaaaatctcctacttttaccatcaaaacaaagaaacaggactcatgatgcacaaaccgcaacgggaacgctaccggcgttcatgaacccaattttgaaggctacggctaacatgaaatcggcgcacactggatactataactgccctagcacacacctatgactatgtacaaataaactactgcccacgaacaagttttcttgaatccacacacatgatcacatgtgctctcataataggcaaaaagcaatcactttttcttggggaactgctttgacaccttagttccgctggtgaccatataattaacaatcttgaggactacaacacatacatgctcacgcatgtccctcacatcagagcgaccactgagaggatactcaaataaagcttcaaccaccatggactcggtagcaaccat

SEQ ID NO: 106804 - DNA, 2020 bp, Glycine max
  Clone ID: PAT_MRT3847_6745C.1
gagcttccaactttgcttcctaaagtgtctaagcttgacctttccgcacaactgaacttaatttcaaaaagtatcattcccccgctcaataaaatcaggtcacaaagtttcaaaaagattgatgatagttctgatttcttgctggatattgaaagtgatattgatgagccagctcagattgaacaagaacatgaaaaatctaattaccatgccagaaagtctgtttcatggatgaattacgggctcaaggaatttcgcttagttctttgcagaaaaatcagtgcagatgagagcaaattgaatttagaagccaagatcaagatcagtatggaatatcctctaaggcctcctctttttgcattgagcattagttgtatatcttctggggaaaaccatgatgagacaggtttggagtgatacaatgatccgcccgcaaggccggcagctggaagcgaactcaagatgttattcagagaattcgtgcaagaagaaaagctcaattggcccttctggaacagctagaatctctcacccagcttgagtggcctcgtctgccctgcaaaagtgttccatgggctttacacactcctttgtgcaatttgggcagttggtcacctgtaagacttccacctgtacttagagagtcctcatctcctgctgtcatagataaagaggagcatattcaggagccaatggatgctgatgtaatcgaacgatctggtgccacaaaagcagaaccacagagtataacagaagatggggagcttccaactttgcttcctaaagtgtctaagcttgacctttccgcacaactgaacttaatttcaaaaagtatcattcccccgctcaataaaatcaggtcacaaagtttcaaaaagattgatgatagttctgatttcttgctggatattgaaagtgatattgatgagccagctcagattgaacaagaacatgaaaaatccaattaccatgccagaaagtctgtttcatggatgaattacgggctcaaggaatttcgcttagttctttgcagaaaaatcagtgcagatgagagcaaattgaatttagaagccaagatcaagatcagtatggaatatcctctaaggcctcctctttttgcattgagcattagttgtatatcttctggggaaaaccatgatgagacaggtttggagtggtacaatgaacttcgtgcaatggaagcagctgtcaatctacacatactaaagatgttacttgtcaatcaacaaaattatgtattggctcatcaagtgaattgtcttgctatgttgttcgactattatttggacgaggcatccccatcatctgaaaggacaaattgtacttccgtggttgatattggcttatgcaagcctgttactggtagattcctgggtagatcttttagaggaagggatcgcaggaagatgatctcctggaaagacatgaaacttaattccagctgtccctaatagtggtaggttcctgtctgaatctttcagagggggaaggatcacaattgatctcatgtgaagacaaaattgtcttaagtagtaatgttcagctctggagggttggcaaatggatgctatggtatatggtatggcaaggataatgacattgtacctctgtagtatgcgttgagccaaccatgtgacatcattgttcttgactctacaaccaaaaaactggctgggatactatgatagattttgaagggatcatttcagctgttgagtgtttgttattgtgatttaatttcttatttctgccaaatgcagctagttcggttccagtataggagtaggcatcgtgggtggaattttttaagagttgtactttaccgaggtctctgcatagtgattgtttgtagatctgtattttcttttattggttatagataattctttctattctgaatccgagatttcctgtcagtggaatttttaagaataggcaaaattgtatttttggtcccctaaaaaaaaaaaaaaaaaactcgagactagttctctctctc

SEQ ID NO: 106805 - DNA, 294 bp, Glycine max
  Clone ID: PAT_MRT3847_67460C.1
acacaaaaaaaaaaaacaactgcaaaatgcaaaattttaaacgtgccccactccacaccttcatcctttaccactatctgatgcacagatctcttatgatatcaaaaaaaataaaatattattcacctcattatatatacatcctttaaaaaatcaatcaaaaacttttaacatctaaccttttcttttttattattccttcattactctctcaactctcaatataccctttttctctctttgacgccataaaccacccttcactcatttaaaaatcaaacccttgctatataa

SEQ ID NO: 106806 - DNA, 568 bp, Glycine max
  Clone ID: PAT_MRT3847_67461C.1
gttcttgttcatatttcctttggtttttctttggaaaataaaaaaactctttattattaaaattaaaattggttccctgatgattggatcggggccatccaaatttattcccaacaaattccccctcccaaatgatattgttggaaccaggggcctttcagtttttttttcgcaatggttatataaaacctcgcaacgtgtgcttcaaaccctggtcttaccatattttatataaaaaggcttacaacactttatcttatgcccttttttcaaaaccttttttttattggttgaagattttttaaatctcccaaaaatataggggtcctagaccttattctcaggatttggcaattttttattatttggaactcatggtaaaatctgggccaagaaaagggtgtcaaagagggggtgggctgcacttctctaatttatttagagccctttccctgtgactcccccttcaccacaaagggcctgtcctggtttgaaaaaggcctcgggtaaccagaggaatgcccccattgaaggcgctccccttgtttctccaatccgcccaaggggg

SEQ ID NO: 106807 - DNA, 261 bp, Glycine max
  Clone ID: PAT_MRT3847_67462C.1
agaagcgggaggactgcttacgttgcgcggacacgaagcattgacaccgggaccgtccaggagaacattatggaaccctgaccagtgaacagacataggcacatttaagttgtcagagagtgccacatgaagagcgtcttggacatgatggcacatgacgaccatactgagattgtagagcacggcatgaacctacccgagggtcagaagcagaacatacacatggtctacgctgtcgatgacgactataatctatatgtt

SEQ ID NO: 106808 - DNA, 373 bp, Glycine max
  Clone ID: PAT_MRT3847_67463C.1
caaaggtggaaattaaggaaaagtttcaaagaatggattataggctcaaccaaagaagagtgtccttttctgatccaaattcacgacaacacataccagatgatgagcgtgtaactgcagttgcagctgctgcattttccattcattcacttagaagaagcagggttacttaatttgcagaaaatgaaagaatctgccaaatttccaaggaccaaaactgtgagagaaaaagaggggaaagtatctaggcaaccaagtcatggggaaattttaacaagaaggtcattgtgacaagaactcgctagagcaacagaaagtgctattcctgctagacgcccaagtggtgtatccccggcagcagggtatcaaaatc

SEQ ID NO: 106809 - DNA, 190 bp, Glycine max
  Clone ID: PAT_MRT3847_67464C.1
cgaatttcccggttggaccaacccttccggcaattcaagggacgaaccggcgttaacttgtcctaagaataatcgggagcgacaattgaggattatgccgatcagaaccatcgccgatggaaggcctgaataggcgactaaccctgccacgttgaaggcggttttggctgacttcatgtaaaccttcatc

SEQ ID NO: 106810 - DNA, 193 bp, Glycine max
  Clone ID: PAT_MRT3847_67465C.1
aacgccatgtcagcacgttggtcccgacacagcagagggtagaaatctgcgtgaccggacctaatgtggtatccgacactggctgtaacagagaggtggaaactgatgcactacttaagggtgtgaatgggaaagcagagcctgaaatacctgctgctcaccaattacctcgatgagtgaagctattatatta

SEQ ID NO: 106811 - DNA, 362 bp, Glycine max
  Clone ID: PAT_MRT3847_67466C.1
ttcttatgtttttatttttggaggggggctacatgatagctaacatacttgtccaaaaaacagactcgcacatcttacatccaccgaacttcaatcaaccggccacctgttaacaacaaagctactgggaaacctacagcgtcacgacatctatacacaaatgacgcgcataccccttactacctgttggcttatatgtgaagaggaccaatccctactcatgttccaaaaggtgcccaacctaaatgctcaatgggacgcgcacagtaagcatcaactaagcacagggggcagcctgccccccctactaacgcccgctaaacttacgcactcaataataccctaataatggactatagtac

SEQ ID NO: 106812 - DNA, 198 bp, Glycine max
  Clone ID: PAT_MRT3847_67467C.1
aattaataattaacacatgttatgccaacaagctacgtttacaaaacttttatttgaagttgcaaggcgtccattaaaaaagcgtccctgtatctgcttttgaaaagaaaagtgagcttaaacacacgagccaggttgtagataaaattatatccgtttgggacccattctaacagaaaaaaaaaaaatgggcttgaa

SEQ ID NO: 106813 - DNA, 674 bp, Glycine max
  unsure (1)..(674): unsure at all n locations
  Clone ID: PAT_MRT3847_67468C.1
ccacgcgtccgaaatacgcacctacttctccttccatctccgcttcagagagagaaagtgaaagtgagaagaagaagccatgaacagaagaaccactttgcttgttcgaacgctattgttcctcttcgtcctcaactccttctctctcttcctctacttcatcacccacaaagcttcttcttctccttcttcttctttacaactcaaaaaacctcgcacctatctcacaccactttcccaccaaacgcacttctcaaagccatggcctattctcccctcctacctaccgtggtcgcaggctcctaccacggcccctccccgctcctgcgaggcctacttcgggaacggcttcttgcgccgccgcgacctcctcctctcccgcggcggagccgggtggttccggtgccgccacagcgatacgctccggagctcggtgtgcgagggagggaggctccgcatggtaccggagaggatcgccatggcgaagggcggggaggatttatccgcggtgatggggcggagggaggaggaggagctgcccccatttcaaaacggtgcgtttgaggttgacgggggtgaaatcgttgaccgggagtttttggttgacaaaaagtttttggatgagtatgtgcccaggngagggatcgataggcacaccatgcgagacttgatcg

SEQ ID NO: 106814 - DNA, 939 bp, Glycine max
  Clone ID: PAT_MRT3847_67469C.1
atgcagaaaggaaaacacgttgagctgatgctgaacagaagggttaagatggtaaaggcaaagactaatagtgattatgatgaaacagaagttgatatttctttgagccacagacttaatgctgtgaaaccttccaaaactctatccatatgtcatcatgccactgctcttttacaagctgattttgactcacctgatgttatagctgaggctgggatgaatgcaactcgtgaaggttacacgagatatacccccaatgctggaacattagaattgcgccatgcaatttgtcgtccagcaatctttgctcttaccattattcaagttattattcctgctccattctatacgagtgatccagaaatcgcaagattggctgatgcaacacctgtgattcttccaagccacatatctaataattttcttttggatcccaaactgctcgaagccagccttactgaaagatcaagactacttattctttgttcaccatcacataattatgcaccaacaacccatacaagcttcgcatctttacctggaatgtgggacagaactccaactgtgaatggattttccaagacatttgcaatgactggttggcggcttgggtatattgcttgtccaaaacattttgttgcagcattcggaaagattcaaagccagttcacttcaggtgcaagtagtatatctcagaaagctggagttgctgcattaggaataggctatgctggtggggaagctgtttctaccatgtatagcattgatcatcatcatctagctactttgcataaaaagtttgccttggtgctggggagtgcatttggagatgattcttgcatccgcatctcttatgatgaatcccttactaatttaaagacaaccatggagaggattaagaaagcacttatccctctaagctctgatgcacttgtttaa

SEQ ID NO: 106815 - DNA, 119 bp, Glycine max
  Clone ID: PAT_MRT3847_6746C.1
gtttgtgtggctgatccagatcagttctgaagagtgggtgtgttcttggaaataaagttttccaaatttccgggcctcaggattttaaggtttggattttcctatcccaatggtttccc

SEQ ID NO: 106816 - DNA, 1550 bp, Glycine max
  Clone ID: PAT_MRT3847_67470C.1
gtttcttttcactacttgcaattcacttagtcaactccatacccccaacacaatcttcccctacatcttggtgtttgaacgttgcatagcttctcatttaccatggccaatgcactacataacgctgccatctccagagtcatgtttggagaccaatattccatttctcgttgcgtggttccatccctatccactcttcctctcagagccatgcacaaaggaaaacacgttgagctgaacagaacggttatggtggtaaaggcaaagactaatagtgattttgatgactcagacgttgacatttctttgagccacagagttaatgctgtgaaactttccaaaactctatccatatgtgatcatgccactgctcttttacaagctggagttcccgttattcgcctatttttcggagaatctgatttcgacacacctggtgctatagctgaggctgggatgaatgcaattcgtgaaggttacacgagatatacccccaatgctggaacattagaattgcgccaagcaatttgtcataagctaaaagaggagaatggaattacgtattctcctgatcagattgtggtcagtaatggagccaagcaaagtattgttcaagcagtgcttgcagtttgttccccaggggatgaggttattattccagctccattctatgtgagttacccagaaatggcaagattggctcatgcaacacctgtgattcttccaagccacatatctagatctgtctactcgaagaaattacttgaagagatagcccaaattgtagcaaagcaccccaggcttctggttctctctgatgaaaattatgaacacataatttatgcaccggcaactcatacaagctttgcatcgttaccgggaatgtgggacagaactctaattgtgaatggactttccaagacatttgcaatgactggttggcggcttgggtatattgctggtccaaaacattttgttgctgcatgtgaaaagattcaaagccagtttacttcaggggcaagtagtatatctcagaaagctggggttgctgcattgggactaggctatgcaggtggggaagctgtttctaccatggtgaaagctttcagggaaagaagggatttcttggttgaaagctttagagaaatggatggtgtgaaaatatgtgaaccacaggggggattttatgtattccttgatttcagctcttattatggaagagaagccgaagggttcggtgtaattgagaattctgactccctctgtcgatacctgctggacaagggcctggttgccttggtgccgggggagtgcatttggagatgatacttgcatccgcatctcttttgcagaatcccttactactttaaaaacagccgttgagagaattaagaaagcacttatccctctaagctcttctgcgcttgtttaattaatggcaattgtgttctctcttcttcttatgttttactttttagttgcagtatgtagtatgtttactatgaaaatgagtaatgtggcaattggcatcctcttattatattttctta

SEQ ID NO: 106817 - DNA, 392 bp, Glycine max
  Clone ID: PAT_MRT3847_67471C.1
ataaacctacgcattctcacaatctcttcacctctgttatgaccatgggatacagaacctgatcactcatcatcatatccgcaatggacatcagtgaacgtttgtctcttctccacgatggccgtatacactgtcgctacgctctccggagaggctctcgatcctcatggcgccaccagccatgtctacaatgacgacggcagtaaccccatgtggcactaccgcgtgaaattctccgtcaacgaatcgctggccaacgagaatcgtttgtctcttgagatcaagcgcgtctcagaccgcaacctcagtgacatcgttatctgcagcgtccatgttcctctcagggaactcatggacaatcgcggagacgacagttccttccgccacatcag

SEQ ID NO: 106818 - DNA, 216 bp, Glycine max
  Clone ID: PAT_MRT3847_67472C.1
tcatcattctttagctgcatatggagcttatgtgcgccctatgccgtattcgaatgagattggtttgcgaatgctcataggtggggttgccagggaggctgcattgttggggtatcatatcactcccttgttttcatactatgcttttcatggacctgtttttcgagtcttgctcagattgaatcgtgggaagattcatgacaggaggaattatgg

SEQ ID NO: 106819 - DNA, 216 bp, Glycine max
  Clone ID: PAT_MRT3847_67473C.1
agaaggcggttcgactcgaggactatcccactgtgttagactgtactttcccttattctacctgaattgggggatgtttctcacactggaacaggggaaccttctatctctaatgcaaagaactgcgtcaagaccaccaatagctcatctgtaataccacctacccctgaaactaataccatgccacactgtgctgcttcatgcatctactatttt

SEQ ID NO: 106820 - DNA, 245 bp, Glycine max
  unsure (1)..(245): unsure at all n locations
  Clone ID: PAT_MRT3847_67474C.1
acgggnctggattcccggggccgacccacccttccgcccacccttccgcccacccttcctattttttactttgggggttttttggagggggaaaaggttaattttagaaggagggtgcctccctaaggggttgtttaaccctctgttggcttggttaacccgtaaagcccattgttggtcgccaaaatggtttccaaatggtaatgtccgttccaatcaatggggggttttttcaattattgttt

SEQ ID NO: 106821 - DNA, 728 bp, Glycine max
  unsure (1)..(728): unsure at all n locations
  Clone ID: PAT_MRT3847_67475C.1
ccacgcgtccgtggtcatcttttaaaaatgattcaattaggttcttccgtccaaattgaagttaatggtgttaatgcgatgtgtcgctctcattcactttctgataatctaataaaccctattaaatatagtggcaattaaaaaccaccactattattattgtaaatttttaaattaaaaaaaaagttatgaattattgtaaaagaaaaaacccaaatccttaattcctttatttatgttctttaaactagaacacttaaaaactaagaacccaacctagagggccagaacctagaaatcccatgcagctttaatgagattcaatgtgttggataatccatgctcccacaaataaaattatacatacctacaaatgatcgtgaaaacacaacaaagattacgccgtataaaaaataataacaaacacaaaaatttaatctggtttgacacctcttgcctacattcacgcaactgtctcagaaagtatttcactatcacaaaaatgattacaaaattataactcatcccaaatagtgtatcactctataaacccatgtaccacacttaatggttacaagaaataataacaatcttacacaaatacattgttctctcaacaaagtgactgtatttcacaatctctctctctatgaggggggggntcctccactaattctctgattatttataggggaagattgtcaccaactataataaataagctcctt

SEQ ID NO: 106822 - DNA, 410 bp, Glycine max
  Clone ID: PAT_MRT3847_67476C.1
gaacccgccaaaccttagggaaaacgcctggggaaaaggaaaaaagggcccaacttatttaagggtctcccccaaaaaaaaaaagggccccggaaacaatgccccccggggaaaattcccaaaaattaagccccccaaaattgggcccgggcctcccaaaattgcaaaaaaatttcccaaaaaaaaaacccccggaaaattggcaaaaaaatattggggtggaacaaccaaaacccccaaaaaaaaaaccccgcccaaaattcccacggaaaaaaccccccgggggtttttaaaccttttaaacccgggttcaaaagggggggaattcaatctgggttgaggcccaaccccgcccaaaggggttccgggaaattgccggaaaagggggggggaaccccgaaagggggggg

SEQ ID NO: 106823 - DNA, 836 bp, Glycine max
  Clone ID: PAT_MRT3847_67477C.1
gtgacaggtttggatttagactgtgggcctttcctagctgtgcacacgcagaatgcggtcaaaaaaggcttgctaagcgaagctgatgtcaatggtgctttggtgaatacactgacggtccaaatgaggttagggatgtttgatggagagcccacggcccatccatatggtcacttgggcccaaaagatgtgtgcaaaccggcccaccaagaactggctcttgaagctgccagacaaggaattgtactttttaagaacactggtcctgttttgccactctcctcacagcttcatcgcaccgtggctgtcatcgggcccaattctaaagctactattacaatgattggaaattatgctggtgttgcttgtggatacactagtcccttacaaggaatagggacatacaccaagacaatttatgagcatggttgtgcaaatgtggcttgtactgatgacaagcaattcgggagagccataaatgcagcccaacaagcagatgcaactgtgctagtgatgggcctagatcagtccattgaggctgaaactgtggacagggctagcctgcttcttcctggacatcagcaagaccttgtgtccaaagtagcagctgcctccaagggcccaacaattttggtcattatgtctggtgggcctgtggatataacatttgcgaagaatgatcctcgaatccaaggaatcttgtgggccggttatcccggtcaagctggtggtgccgctatagcagatatcttgtttggaacatctaaccccggaggcaagttgcctatgacatggtacccacaagggtacattaaaaacttgccaatgacaaatat

SEQ ID NO: 106824 - DNA, 235 bp, Glycine max
  Clone ID: PAT_MRT3847_67478C.1
aataaaaatataaataaaaaattaaaatataaaaaatacatatcaaactaaaaaaaacgtgataaaatctcatactcggtcttaaatatccatacttactttcacgttcataacaacatcttaactttaaactaatactaccaaatttcaatacattaccctatttctaacaacattcattctagaaaaaccctaacaattcctatctacaataaactttatactatttcatttt

SEQ ID NO: 106825 - DNA, 199 bp, Glycine max
  unsure (1)..(199): unsure at all n locations
  Clone ID: PAT_MRT3847_67479C.1
ttctcttattacgattcattctagttctggattccgactcgcagacttgtctcggtccgggttagggacgactcngatcggtattctctactctcaagaatctcatatgaaggaaaaactaagggcacatcacgctgaaagcattgataactggttggggggtatggcacgaggctgaggccactgacactcagttttc

SEQ ID NO: 106826 - DNA, 595 bp, Glycine max
  unsure (1)..(595): unsure at all n locations
  Clone ID: PAT_MRT3847_6747C.1
ctcgggaaccgaaaaatgcgttggaaagacaaacatcttgggaacataatacaaataattaattattacataattacatttacaatgaaaataaatgaataaacgcatcgtgaaccgaaggaaaaacaacgcaaaagacaaaaaatattaaatgcgcaaaaaaattaaaattaataaaaatcattaatataaatggaggttgacagggaagtttttgggcgaaaatgaggggtcttgacattggcacacgtaagcactgacgcatccacggcaacattggacaaagaaaacaaaggtttctcctattcttttcatggcgaactctatttggtggcggcggtggtgctgtcggtcacaaagatacccaatggtacatatctgaacccaaaatggaagaaaaccaagagaaagcaacggcggaaaaggctcaggaacacaaaaaaatttaagcggtgacagagaaagcaagaaaacngacctgtgttcatgaaaataaaaataatcatggggaacaaatccataagcttcgtatacaaaacgataaaggcattctagaacaaaaaaaggggcaacctttttgtactaatcataaaaa

SEQ ID NO: 106827 - DNA, 541 bp, Glycine max
  Clone ID: PAT_MRT3847_67480C.1
acgctgggggagccccctgggttcctgcactcctggtggtgcgtcttctgggacctgtactgcgcggcgcctgacagaagagaggcctgcgagcactccggcgaggccaaggccttccaggactatagtgctgcagccgcccccagccccgttatggggagtatggccccaggtgacacaatggccgcaggctccatggcggctggcttcttccagcccttcatgtcaccgcgcttcccagggggcccccggcccaccctgcggatgccgagtcagcctcccgcaggcctccctggctcccagcccctcctccctggcgccatggagccctccccacgagcccaggggcatccgagcatgggcggcccaatgcagagggtgacgcctcctcgtggcatggccagcgtggggccccagagctatggaggtggcatgcgacccccacccaacttcctcgccggcccaggcctgcctgccatgaacatgtggcccaggagttcgtggcccgtgggccagccccagtggaaacttgatcccctac

SEQ ID NO: 106828 - DNA, 535 bp, Glycine max
  Clone ID: PAT_MRT3847_67481C.1
gagctcgagccgcgttctttcatcgttctcttccctaggagttgggaactttcttccaaatactactattaaacaagactatcacttttattaaccccacaaacatttgtcacacgtcttaggcttaattcactccaatggctgttttctctaccaaacagctgagtacttcaactctgaccactacattcatcatcttctttgttcgttctgaattcacgggacacggtagcctgagagtttctccttctgaattcataggctcggtgaccacagtaggtgatgttttgcaaaacgttacctccattctcaagtctgagcttagaagtgtcaaaaatgactttcatcttcctgatgctgccgtttccacgtgtcttgatttgttagacttgtcagctgatgaactcagctggtccatttccgctgttcaaagttcccaaggaaatgataacagtacagggaatctaagctctgatttgaggacatggcgtagtgctgtacttgcgaatacagatacatgcatgagggtttggaa

SEQ ID NO: 106829 - DNA, 890 bp, Glycine max
  Clone ID: PAT_MRT3847_67482C.1
tattcgcgtccgctaataaaaaaaaagctgaagttgaatttcttatttcagtttggaattaagatgattaaaaatgtactggtagaaatggctctcatcctcaaagagtcgttgtttctttctttctaaaattgaaaatttatgatcatttagaaatgctttttttataataatcgtaatctacaatccctcactttcctttctgttgccttatgcacctctctaattttcctcgaacaactatactctctctatcgcactcactccctccgtcgcccgaacgcatctccgatcaaccaaccgccgcatttccagtgattagccactttgatcctcctgcagcgccgtcgtttcctcagatccgtggctgtaatgcgaaagtcgttggaggcgaagcagcagcatccgcggattaggaagatccttcttcccaattcgttatcctagttagggttagggtttcaataatcattcccaagaaatgttcaagcgaatcatgaagggagggcagaagaagccctccaagacggacccgagcgatccgtcgcccttggctccggcggcggcgggtgcggcagccgctccggcgctggtggttcctccgccgtcgggcaccatagagcctctgcctctcttccgcgacgtggcggtctcggagcggcagaacctcttcatccggaagctccagatatgctgccacgtgttggacttctccgacacgctgaaatccgttcgggagaaggaaatcaagagacagactctaatggagctcgtggatttcatccaatccgggtcggggaagataacggagacttgccaggaagagatgatcaaaatggtgtcggcgaacgttttccggtgcctccccgccgcttcgcacgagaacaccg

SEQ ID NO: 106830 - DNA, 257 bp, Glycine max
  Clone ID: PAT_MRT3847_67483C.1
gtcgacccacgcgtccgcttaaatgtgccaaacttagagctatctgtaggaatgggaggggtttggactatcattgcatgccttttttatgagcctattgtgtatataaaaggttcttggcatgagcatgaccatgataaatcccactactataatcaaactatctttctttcaaagagtgatattttcttttaggtaaatgtaatctcttgtactcaacgtggaaaaaaatatatataaatccatgcttttactta

SEQ ID NO: 106831 - DNA, 314 bp, Glycine max
  Clone ID: PAT_MRT3847_67484C.1
ccataaaaagtggaagttaatcttgaggaccatagttaaaagctctcatatctacatcccattgcgattcaagatcagatgttaaccctcatgctacagttaaagacctattgctggatataaacatgaaaatggaggctctttgaatccctactcgaggacccacagttgaaatcccaacttgtctacccgcaaaatcctgaaagggacctcccctgcctctagtggtgagtttcaagcgacatgtgaaggacggtcttggggagagcgtgtacaacgttggagaatcccacccgaatgaagttttgtagaaa

SEQ ID NO: 106832 - DNA, 286 bp, Glycine max
  Clone ID: PAT_MRT3847_67485C.1
ctcggatgctgtaacattcgcccatgatgtgaagctgtggagaggaccatatgccgatgaaatacatattgcatcatcatcatcatcaacaaaccgcattacaaaaaaaagatcccgccccctgtatagccccatattggttcccaaaccccccaaccaaccaaaacaaaaacaaaccaacccttggaaaattaaagaaataagaaacccccccaatagggtctcacatctctctaacctctaaaacacaccaatactaccaaaatatatcaatgttccctgaaac

SEQ ID NO: 106833 - DNA, 468 bp, Glycine max
  Clone ID: PAT_MRT3847_67486C.1
cccaaaacaaagcaaacttttttttttatttgaaaaaaatggggcaatacaaaaatctttctggatccgccaatccagagaaaccgaaaaaaaaagaccataaagataccttcccaaaaaaaaacagttcttgaagttgttctgaaaattaagggacagcctgcaaaggactcttcctcatatggaaaaggttactgctgcgactaaagcaaccccaagggacaccaacattgtcccacgaaggctaattaaatggagggaatttgcagcaaaaggggccttgttaaactctccctgaccatcatcatcggcggaggagttatccttatcagctttaggggcctttgccaacggggaaacaagacctggaggcctaggctttgaaaaatctaaaggaataagcaccttgtccacgtgatatatggcaagggtcttatcagggaacacaaggcctgtgaaaggggcatt

SEQ ID NO: 106834 - DNA, 266 bp, Glycine max
  Clone ID: PAT_MRT3847_67487C.1
agccgcccttcttttttttttcttatcattttttttttttttttcaaacaaaaaccccatagccattatcggggagactttatcttagtgcgtatgcaaatgaaccagtttatattacatttcatccagcgcataatatcctcaagccgctgatgattctgcaattgcacccaccatatgcacttcttcccaactgtggtcaataagtgcaaaacgacccactgcaacgatccaagaacaactaacgcgctcgtgaatcgtaaaaa

SEQ ID NO: 106835 - DNA, 383 bp, Glycine max
  Clone ID: PAT_MRT3847_67488C.1
gtgagtgacgatggagaagaacaagagcgatgacatattgttggacgattgggaagacgcgttactggagcagttaatccaaaccgaagagcagtttgtcctcacttccaccgcaccaaaaccacctaccaaccctacttcctcgtcgtattctttctctctcgctcttcctccaccactaccaccaccaccaccgtctccgcctacttccgccgtttccttctcgcccccgcgagagttctctcagaggcccaccacaagtatcactctggactcgccctctcccactcccattccaatctgcgataataaagacctcgaaatcgaccgcttaaagagggagctggaacatgcgacatagcagattgcaaatctggaaaaag

SEQ ID NO: 106836 - DNA, 348 bp, Glycine max
  Clone ID: PAT_MRT3847_67489C.1
gacggccactcgtccgcccacgcatacgaaaaaaatgggttcttcatgttccataaggacagagtgtgtgattttggcataaatgacctctgaagcactctgtgccaaccttctgtagactaatgtatgtacaacatggcccaaaactacgtgcccacatggtcctgtgatcacatgacatacttaagtggacgttatcacattcagcttcatctggacaagtacactgctactggcttccaatccaaaggggaatacttgtctgatcacttcacacatgacataaatatggttcctgaaaattcacctggcacatgcactgctttgtattcatcttcccaaaatgcg

SEQ ID NO: 106837 - DNA, 823 bp, Glycine max
  Clone ID: PAT_MRT3847_6748C.1
ttttcttgcccggatctttctttgcacgctcttactcgtttcctttgtctttgtctttctctttcggctttttcttctgctccactgtttctatcccttcctttctgtatgcaatgtctttttctctacttagattggcatgcttgtttggtatcagaatcgcattaactgtcatatatacttggacggagttgatcaggacttcaattagcttccatgtaaacataatattaagaatgatcacatggacatttgggcttatctccctgcctgcaagagttgtgaatgcctttcaaagggagaggcagctggaacaaaaactacatgaaatgcacatagagttggagaatctagtgtgggataagaaggaacttcaagaacattttcaaatggactgtcaaagaagcacaagaaggattgagataactactggcagagcttaaagaggagcatgatatggccattgaaaaaattgaaaagttagagggaaagttgcaggatcagacaaatgaaaatcttcggctgaaagaaattcaaggaaagagatactggagctccaaagatcaaagcaacagcgacagagtccaaaccatcaatgacagcaactacaacatttctcatcctatactctcactgaactccaactacaacgggagtggaatctctcttcaggatcttataatgtgcaaagatatttgggaagatgagagcaaaaccagaagtgagttgcttaaactcttaaaagcagtaccaaagtccgggccagtagttaagtccaaaacgagcgaagcactagactaccatcgagacgtagctctttcac

SEQ ID NO: 106838 - DNA, 183 bp, Glycine max
  Clone ID: PAT_MRT3847_67490C.1
atcattcctcctcttcctcagtactgtcattttcgattcgcttcactgtaactaggtttaattctaaggccttcatcgacaatgaccatcggacgtcatcgttcaaggcgcatcgtaatggctgtctaatcggatgtgactccgatcagcgccgagaacttccgcgcgctctgcacctgcgag

SEQ ID NO: 106839 - DNA, 346 bp, Glycine max
  unsure (1)..(346): unsure at all n locations
  Clone ID: PAT_MRT3847_67491C.1
aaataaaaattcatcagaaaaatgggactggggatgtttaaggcattgttgttgctgcagcaagccccatgaaattgacattggagactcctgggactcatctcctgatcatacccccacacaatattctaccccanagncanngacanatngtgcacctnctcantccaataataaacacccccccacntctacacatatgggagcaantctggggaacccanncgtgaacatacaccatatttncganatgaaganggatctgggnagnggngagtctngtgtcacatatctgtgtgtggagaagacgacgaacgcgagagtatattataaaaccccntctctc

SEQ ID NO: 106840 - DNA, 356 bp, Glycine max
  Clone ID: PAT_MRT3847_67492C.1
aattcccacctcgaccgacgcgaactaatttaccacattacactataaatttaacttgttacaaactgtataatgactatacaattgcgacttctaaaagtcaggtggctacaatgcaaatggttgatgatcctctatttcaagaccacgcatccttatgttgtgctcaagctacagaatcatacttcaacaaccacactaattaataccttcttaaatcctatcttaaatgacgaactgaatttcactcttacacaacccttgccagttcttaattttcaactcttaaatatatatcttctcaatgcttattacaacatggccacttcatttcttaaccttcaaccattaatctc

SEQ ID NO: 106841 - DNA, 237 bp, Glycine max
  Clone ID: PAT_MRT3847_67493C.1
cttgcggctagggttatagcgcagcttcttatatgtttaaggaagatgggtaaggaaaaggttcacatcagtattgcggtcattaggacatgtcgaagatgggatatccactaccactggtcacctgatttacaagcttggaggcattggacaagcgtgtaattgaaaggtttgagaaggaacctgctcagatgaacaagaggcctttcaaggatgcctgggtcctgaacaaactta

SEQ ID NO: 106842 - DNA, 891 bp, Glycine max
  Clone ID: PAT_MRT3847_67494C.1
aatgcctcgcgcctatgactcccgagtcgtgcggtgcgccctgcgtgcctctttggctcctggacagggttaatgctcgaccatcaggacttcaaagtattgaattgtcagagacagcagctgaagttaaaagagagcagttcaaggatgtggacattattgatgttgctaatgagtctttctgtaatggtgttgaatcatcttatatgcatgattctgaagctgtcaaagattcgggggatatagattccaacggatcaaagacatgctcttcttctttagaagagatttcagtctgcatggaagagcaagatgatagtgatatggctaagtcaagcccttcttcatgtttgcctgatggcttttctagtgttgataaggattcttctgtttcagtggattatcgaaacacaaggaaagattcagattcagaccataaagatgtggttaaatgcaaggtaacttcaaatggctttgcaaattatagcaatggatatgccagtgcaaataaatatgatgatgtcccagtggaagatggtgatggttgtttttccactgaaacaccctcagctaaaatgcatcaattgaaggagagattggcttctgaaaatgctgaagttgacaaaggaaatggagttaagagagtagaaatatcagggaataagttaataatttaggtgcagctgtttttgtcatttgttcatatcaatttgattatcccatcatcgagaagaaagtggtgaggtgggagatttttgtctggggtttcattatttgctggaatcttggatcttattgtatcatttttacgtggattatctcattttatcattgagaatatagctccttactcttgatttctctcaagtcaagcaaaattttcgcaatgtt

SEQ ID NO: 106843 - DNA, 254 bp, Glycine max
  unsure (1)..(254): unsure at all n locations
  Clone ID: PAT_MRT3847_67495C.1
caagaagcgnnnaaggtcttcctacttctttctgtgcgatttgttacgggaaagaaaatcactctctgtgctggacacagactacgtgaatcatgttcttatccactcttaggttatttgctgaacactctcctatttgttataggatttcgagtcagatttaaacttattctgcgtcttttccagttctctgcttaatatcaagttcaagctggtgaaatcttggattagtgctcccactctcctatctggtt

SEQ ID NO: 106844 - DNA, 689 bp, Glycine max
  Clone ID: PAT_MRT3847_67496C.1
gcgaatcccattcgttgcaagtgaagatgatgctcaaaatgttcatgtgatttcaaagcttcataggttggaagaattaaccattcaagtcatatcctatgaacaatggtgcaatgatgctgaaaatgttttacaacatgtggcttctttggaaaatgtaacagatctccgatgttgttttccctcctcaatcattcttagagaatttctttcaagaagtaaatcatggagttgtaagcaacaaaattcatttagattctttgtgggttgccaaaattcaaggcgacctcaaatacttgaatcttttgagtacaaaattactaattatttgaggtactgcaatggtggacaggaggatgactcggcaattattgaggtactaccaaaaactgatgcatttgaattagtttgccataaagatatcaaaaagttgtcaaattttgctggcatagtgtgtttggaacgcattcgtggtcttttgattaaaaaatgcaacaaagttttaacaattgtgtcagctgatacaagtagcaacaccatgaatggaatccaaatagaaacaagagtcatcttaccaaatttggagaaattgtatttggaaaatttgctcaatttgaaatgtgtttttagaggtcccttgcacagtggaaccttttccaaattgcatactttgtcattgaagaattgtc

SEQ ID NO: 106845 - DNA, 316 bp, Glycine max
  Clone ID: PAT_MRT3847_67497C.1
gtaaaattgtaacatgtatacgcattcggtataataggaaaattatcttatagtcatggtgcactgaaaatttgttacccattggaaattacctctccaattacaaaggtaatcatcgaaatctaaatgcttgaagaacgaacaacaggttacatcaaggggcgaacattacgatcagcacacccttgctaagagaatatccaaaacaatcattggggtcaggtttaaaaaacatgaggggctaaaatcacgacagtactcattaggtgcctctgattttgacccagagaacccaatagcttagcgctcaaactga

SEQ ID NO: 106846 - DNA, 404 bp, Glycine max
  Clone ID: PAT_MRT3847_67498C.1
tgaaatttggcatgatttggcgacctacggtgcatggatatttattggatatgtattcacacgccatatcatgggtatttattggattgggtatttggtgaatattggcatgatttggcaagctacaatgcatgggtggttaacagttgccacaaccctacattacagcctgcaatatcatagtagcgttatatcctattgcattcatgcattttctaatgcatatcatgttgcagtttatcttgtgcttaatggtcgttgcatgatgtgggagttatgtttctatttgatgtttaatttgttgtgttttttaaccactatgtgttctgtgttgaaataggtcccagtaattgttttttggtttggacctttgtgtattaatggagggttgatattgattgcat

SEQ ID NO: 106847 - DNA, 296 bp, Glycine max
  Clone ID: PAT_MRT3847_67499C.1
ataaaggacggggggctttataagagcaagccagaaggcagcgatgcacacgggaaacgccgaaggcaaaaaatggaataacagaagaacacggaacactgtaacaagaaaaacagcccggggccaatttacataaggacaaggcaagcaacgtacctaacaaaaagcgacgaaagggatgctaggctgcgaagcttgatgcaccccgaaattcagataaaggtcacagtcagggagaggaggaaagtgcccgggtacgggccacaacgattggataggatgaggggggggccgac

SEQ ID NO: 106848 - DNA, 292 bp, Glycine max
  Clone ID: PAT_MRT3847_6749C.1
tttgggctgattgatgtgcttgctggtcgtgagaagatgatagaacggggggtaactgcgcaatgtagctgcaccggatcgcaacgggtatacacagaagacttagccttaactttaattgaataaatcacaaaccaaggcctacactttacccttctagaccctactctagaccctgtaccgacccgtgccgtgcggccggccccgtggcactgaaaaacaagacggcgaactaagcccccttcgcgaaactagcgactcatgtcgtccccttcccctagtaaaagaccac

SEQ ID NO: 106849 - DNA, 426 bp, Glycine max
  unsure (1)..(426): unsure at all n locations
  Clone ID: PAT_MRT3847_674C.1
ggcacaaaatgagggattttccggggtaaaagaactacctttgtggagatgttgataaaaaaaaaaaaaacccccggggggttttttggaaaaaaaatggaagcgtgttaggaaaaaaaaccccccccctttggaaaaagtttttaaagggggaaaaaaacggggtggggggggggaaaaaaaaaaaacccgggtaaaaaaaaactttcgccccctttttaagaaggggggggggggggaaaaaaattttggggaaaaaggggataaaagccccccnggggggttttaccggggaagggacccattttggggaaaaaaacacagagttttttcccggttggaaaaaacggcgcggggcccagaaaaaaattatggggcaaattaggcggggggggggggaaaaaaagggggcttttgggggggggg

SEQ ID NO: 106850 - DNA, 407 bp, Glycine max
  Clone ID: PAT_MRT3847_67500C.1
cggggcggaccgaggcgtccgaatccctttcaagggcggccccttaatttttttttgttttaaactttttttcctccccctgggggtttttttctttggcaacgtggtcccgccgtttttttttcttgcttcaaccttaacaccaaccttccaaaccctttttcttaacccttaaatccaaaccctctgccgccatggccacatggtttttggccaggaggggtcaggtggtggtcggggttggcagggccagggaggtaattgccggggttaataggtccgccgttaatgccggggggaccatcattagggggcccatgactaaggcctctattttcccccatggggcggttggggtttttggggcggcaatggggatgtttatactggttttttccggtgtcggg

SEQ ID NO: 106851 - DNA, 1171 bp, Glycine max
  unsure (1)..(1171): unsure at all n locations
  Clone ID: PAT_MRT3847_67501C.1
cggaattcccggctcgacccacgcgtccgggtttcttctgttcacatagctcacaacaccctgtgtctctttcttccttcttcaacagtgttattctgctgtgttttttttttcttctcattttttatttttattttccccaaaaaaaccaaacctgcagtttccgaacccgaaaatcgccgtctttcgaatcacaccaccacatacccccccccccccccttctctctgtcttgacgcgcgagacccttgaaatcgtggtggtggaatcctcagattttgacccttcaatcgctaaaccgaattaccgttcagtggtggggtcgtttgggagtggttgaacgcgttggtgatgagaagaagaacttgcatgttttgggtctgtaaagagttgttataagaaggagttgttgcagcagagcttcttcttcttcttcttaatggcaccgaagcgcgtttatgaagcatggaaagtcaggcataaattcctatttaggggaaggttgatatttggaccggatgctaggtctctgcttgtcaccttgttgctgatcattgttccagttattgtcttttgtgtatttgtagcaaggcatcttcggcatgaattttcttcatataatgcaggatatgctatttttgtggtggcagttctctttaatatttatgtaagttaatagtttttccattatttgtcatttgatgcttttatacttttgcttacatgagacttgttagtgtatgccccatgtaagttaatatttatgtggacttgtcatttctttaaaataggttatttctttatacataacttacttactagttactactgtctcatctaaatattcctcttggttctccaatctccattcatatctcccattactatatttcctctcataagtagacaatntatttgtgtcagcctcatagttgtcaatcccagatagtggtgaggaagtagttgaccgcaaaaatgctagctagtgagggatggccacaatgccaaagttatggataaaagataactatttattacgtacagataaatgctcanaactaaaacaataanataaaataaaaacactacaattaatgacatttttcattaataaagtcatggtctagacacatgatcaccgtcaatctaaggcacaattaactcatagggg

SEQ ID NO: 106852 - DNA, 328 bp, Glycine max
  Clone ID: PAT_MRT3847_67502C.1
taaccctaaatttttcatttcattacctaacaaaaacaatacgggacggggttttaaatatagtattttcccccctctactaacaaccaagatatcctcgaacaaacttctacccttaccctccttccttgccaattttaacaatttttgctcgaataaacaccccccctcctcattttcattcctttgttcttaataaaaaagaaatcccttttcaaatctccaaaacttacaatcccaaaatttcatgttacacatctttgcaacacaattttttatcataatcccattacatcttgttctcctaaaatacccaatccaaaataaa

SEQ ID NO: 106853 - DNA, 372 bp, Glycine max
  Clone ID: PAT_MRT3847_67503C.1
ctctttccattttccttctccacctctcttctccggcgaccctcgccggaatctcaccagaaaatcccgccggaaaactatatttcccattttgcaaattcactttcctcaccattgttgttccaagtatcacaaagctcaaaacacacttttaaatagcttcttctcttcttcatatgtgttgatattcattcacttcagcaatgcgattgaaaacctgtgaatattagacccatttgagtgaatttcaattcaaattcataactttgcttctggggtgtaaactgtgtaagcggaaagtgaaggggaaatataaaaaggcaatgatgttgaggtgggcaaagatgtctgatggaaaaggtgatcactgtg

SEQ ID NO: 106854 - DNA, 351 bp, Glycine max
  unsure (1)..(351): unsure at all n locations
  Clone ID: PAT_MRT3847_67504C.1
cactactcccgctgcccgnnccttttttttttttttttttctcaacaatctcattcctgggagttggggtgtattatttacaataattatttcacagccgttgaattattttattaaggcacacgttaaaaaatgcaacaaagctcctgaaactccgagacatcaaacgtgggaacaacagatgaaacattgaagggacaggacacacaagggcctagaacaagaagtcctattttttaagctgaaacccaagggtaggtttcagaagctgggacagccctatattaaccaaaaaaaaagctttcataaattaatgcggccaaacgtgcataaatcaatggggcaacccaa

SEQ ID NO: 106855 - DNA, 339 bp, Glycine max
  Clone ID: PAT_MRT3847_67505C.1
acctattttctgtatttttttttttgtttgtttttttatttttttattttttatggggggtggaaaaaagcaggtaacacataattggatggggaggcacatgatacgtctgtttttctgaaacaccttggtgtaaattatatttttcgcaaaccgaacttcaaatactttaaagagccaccaagactcctttcttttgatgcccaattcccggggaccaaacttgtggcttatgaccacacattgtggctgaatgggcccgcaaggggaagggcatggtttctccaatgggcccttgccggcgtcaatggggcgtacaaagaccccatacacagggaa

SEQ ID NO: 106856 - DNA, 544 bp, Glycine max
  Clone ID: PAT_MRT3847_67506C.1
cttcccaccgacatcccaaaaataaggggtgcaaattgcaataatgatttttctaatcaatataaagaaaaagacgtgaaagaatgtttatatgtgaatttgggtgtgttagatcttataaaatcgtgtttgagaagtcacacaataaaaacaagtattattgtaataaatctaaatccttctatctatcgtattccttgttagaacctttaacgtagaacaatcttatacatttgatctatgggctaaaaggtatattattgtgcaagtatatgaatattattattattgttttttcaatgatgtgcacaatcaaagaggatagtgaatgcagaaaaaaaattaattctaagtactcacattgaatatgcaaagaatttaaccatttatttatttatttattttagaaaaaaaaataacattgtagtgtacacctttcccaagtaaactactccatttgaatgatttgattaagagtatgttactgacattttttctttaaaaaaaaggacacaagtcagtttcctgtttgattatgcctttg

SEQ ID NO: 106857 - DNA, 498 bp, Glycine max
  Clone ID: PAT_MRT3847_67507C.1
tgagagaattggtaatggcatttgatggaactgaacgggctaggacatgatagtagcgagaaagtaggagatcagcgtttccacctactctttcctcaaccgagacgggtatttcaccagggaagacttgagcttgaagcgtagaggcagcgatcaatggttaagcggcaagctcacgtcaagtgaggcctccatttttgcgatcttgctcatgcgtaaaagtaaagctccgataggccggattgtccttgtgctatggaaaatagcctcgcttttgcgccatgccaaaaccacattgaattctcatcgcagaccaccttcagacatttatctgacgatgccctcgaagcggttcttgtaccacttcacgacctcggtggagttgaccttgtgggaagcgccaaccctggtcttgcagcgcctgcggcgggcgacacgctcaccgggacgggacatgacgacgtagaagtccatgccgtaaatgccgatcgcagggtc

SEQ ID NO: 106858 - DNA, 244 bp, Glycine max
  Clone ID: PAT_MRT3847_67508C.1
tttttaagatgtggttttttttgatgtttatgaaataatcatacatgccatggaaggggcggctgttgaatcttctcacaccaacagcagtggatgaataccaacccatttttttcataccattgtaagagcgtgaaacatacataaaaaaaccctgctcatcaagaaaagacctatcggggaggacaaccaaaacaaaggggtgccaattaatgggcaccataagcagagcttgcccatgagt

SEQ ID NO: 106859 - DNA, 340 bp, Glycine max
  Clone ID: PAT_MRT3847_67509C.1
aggggggagaagggaaattatattaaaaaaaaattatactttttttaagttcattgaaaacagggggggaagaaaaaaaaaacaaattttttttggttgacacaaaattggtcaagggacaaaaacttaactcaaaaaggcaagcctgttaaaggggaaaaaccggcaaataaaggggagaatgtttccccaccctccctcacccggtaaggttacctttaggggatccattgccccataaacaaaaaaaaaagctttttttgcactcttctgggggaatatttttcaaccacgttcaccaattcatattcaaccaaaaaaagggggggggcctctttaa

SEQ ID NO: 106860 - DNA, 465 bp, Glycine max
  Clone ID: PAT_MRT3847_6750C.1
gccagacaacctatatatataataattcgcgcttctctcttctcttgaataagcgaatacctctagcgcgaaccttcgtaaagagcgatttacaagtgagagattatggccgtctccagttcacaaacctgttccactggccgtttgacttaccggaaaacaggactctgatggcaaggcaccctgctgctggttagacaaccatcgtgtgacgaatcgcatcccttgccagagatgcttgccactgtccccaccatatggtgtaatgacccgactgaggcggacatgaacatcatgttcactgtgtgggatgctggtgggcatgacaccatccgctcacttgggatgctttatctccaggacactaagatgctcgtctctgattctgatgccgatcataaagatgcattcgctgttgccaacaatgacctgaacgggatcgtctctgatgatgaacttagacat

SEQ ID NO: 106861 - DNA, 434 bp, Glycine max
  Clone ID: PAT_MRT3847_67510C.1
tacagatgacaaaagacgacagaacggggaattgatgagcaggaaataacataatgccttgaatgatataaagacttttctacaaataatcacgattggggacattgatgttgcattgggcaaattacgtgaagggtattcacagagtgttggggacaatacatcaacaacatggtttctgctctattgtcaaaaacttatctaattagtgcgggttggagcactaaaaaagactgtcaaatctggaaggatggaatagccaagattttatgatttgcctgtgtttaacgacatatttcaagactgcgtgcgtttggtggcatatgaacaggctttggaatcctgcgtaaggtgaggtctacaagactctcagcgtgaagttgtagcaggacacactaaatgccatgatattgtccacaactcttagtatgaaa

SEQ ID NO: 106862 - DNA, 345 bp, Glycine max
  Clone ID: PAT_MRT3847_67511C.1
ccggcgttgacagcgcggcacctgacggaagagcagtgggaggactactgatatatctcggagctggcgatccaaggggactatgaaacgcgcctgatggacacggaggagatgaaagagcggagcgtgtagcagaccacgcaggggacggagtgtatggaacagctggcagcgatggaagggatgagtgaatggctgaggaaggctgaaggagcggcggaatacggctcggagatatgacggagacttgtctatttgtcacgtgcggcacagacgccaggggcattgaccaggcgtaagacatgaacgccattcaccggctggaggaaaagccttcagtgaggg

SEQ ID NO: 106863 - DNA, 502 bp, Glycine max
  unsure (1)..(502): unsure at all n locations
  Clone ID: PAT_MRT3847_67512C.1
cttttgatgaaccaactcatatgactctgtacaaaaaaattggcagggcagaattctcttgtccatcatggttttcgccacaggcaaagaaattgctaaaacacatttttgacccaaaccctctaacgaggataaaaattcctgagctcttagaagatgaatggttcaaaaaaggatacaagccaacatccttccctgaggaagaggatctaaatgtagatgatgtagtcgttgctttcaatgagtctaatgtactgatttttaggcaatatttgtattcaacttctttcatcagttgcaggaaattctgttgtttattcattcactttgatttataggaaaatctagtggcagagagaaaagagaaacccgtctccatgaatgcttttgagctcatttgtaggtcaaaagtttcaatcttgacagtttgtttgagaaggcaaagtttcaatcttgacagtttgtttggggaggaaaaaaaaaaaaaaaaaaaaaaacccna

SEQ ID NO: 106864 - DNA, 257 bp, Glycine max
  Clone ID: PAT_MRT3847_67513C.1
ataatacagcttatcttgattcatatacaacttgctttatacacacacacacacacacacaacacaatccaccataaggcatagcgattttttaactttttgtgatgcacactattcatgattgataacacctaggaagcatggacacttccaatgaatgggtcccacgtttccaacaccgacactccttagacacatggcggacattgtgttggacacatttttgcagtgtccaattttcttttttggcttgacac

SEQ ID NO: 106865 - DNA, 177 bp, Glycine max
  Clone ID: PAT_MRT3847_67514C.1
cggctcgagctcattcattcattcattcattcgttcttcttcgttacaatctattctcgaatgtatattatccaaagagactattattactttggtctaggatcactcttgtcttgtttagattcctgaacttccctccttgttcttaataatatttgttatcactttgttccgcac

SEQ ID NO: 106866 - DNA, 1733 bp, Glycine max
  Clone ID: PAT_MRT3847_67515C.1
ggtcgaggacgcgtccgcacacgaatccgcttacatctagctagcaagctgagctctctgttcctctcatcttctcttttcgcccacaagtcatgggttcgtcctctagtcgacttgggtctcgcccttcttcgtcttctagtcacagtcacagggtcaaccgcttcagattatcgtctcttctatgtggcacctccacctctcgctccattcatcagatggaagaactttcagctgaacttcgggttgattcagcaagggattttgatggtgaaattctgaaagacactgaggaatcgtctttatcatatacagaagctagaattagctccagtccccctgctgaaactgtaaccccatctgatatgagaactgagttccatgggaatactagtgttgaaggttcttctagaaacgttgcaacaaatagtcagaggaactgcttgtctgaacatgaggagctagtccctccttatcaggtaagtgctggtcatactggtcatgaatcatatagtgatagtagcaacacagctagtacttcatttgtagaacagcagtcttcagatccagtctctgtaaatgtttctgctaacaaggatgtagtcaatgatgttaataatccagtggttagtgatgtctctcaagtctctcacgagacaatgcacccaagaagttcaacccctcaagagcatgggaattttggttctggtgaaatttctgttgagaatcacactagtgcattcatatctattcagaattcttccagccctgttgctcaagtttccaacttagcagcaacctctcaattgccagaagatgaacctcgtcgtgagacaataccttcgggtttaggtattcttgtgtccaatcgggaaagagggccgggaaatgatagtgtgcttcaagttgatgtggtcactatatcttccaacattttgtctggtagcagtgctgatgccaatgataatgatgccagaaggaatggtagaagattattttgggatgctttttcacgacgtagttctagaaggcttggtgattctcctaccattgtcttctctgctgggggtgctgatgattctggatctcaagatcgatggctagttgattttggtggtgatttgtcaaatgatggggttggaggtgcttccggatatatgggtagtagaattcacagattgaatgaacgaagaatgcggcactcgagatctgagatctgggaaaggcttcgtggtggctttgatgagattggtcggtggaattcatgtccactaggaattcatgcagatggcatgtgcttctgtgagtcttcgccaatggctgaggaatctagcactcgagcaagtatttcaagaatagtcatgctggctgaggctttgtttgaggttttagatgaaatccatcggcaacctggctctctgtctctatccatggtctcactccctgcacctgaatcaattgttgattccctccctctgaaatctcacaggttgatggggctgtaggcaatgatgctgaacaatgctaatatgtctgcgtgaagaaggggaccaaagcttccttgcgtcatgatcgataaatctagattttgaaaatttggagcatagaatgcctcaaattgcttaaatcacctacttggatttgttaactgggtttgtgatccctttcatcttatttatgctgtttaattactttttatagatctgggaaaggcttcgtggtggctttgatga

SEQ ID NO: 106867 - DNA, 199 bp, Glycine max
  unsure (1)..(199): unsure at all n locations
  Clone ID: PAT_MRT3847_67516C.1
gccatcggcctcccccacaaanacctgctttataatcatatccattgggaaaagtcttgactggagaagctttagccctgtgcatcgattctgcccctttttatataaagtggacaacaactgtttttgaagaggtttagtaacttgctttgcagagactacccctttagactgtttggttttatttgtggttatacat

SEQ ID NO: 106868 - DNA, 395 bp, Glycine max
  Clone ID: PAT_MRT3847_67517C.1
tttattttttttgcatattaaaacctcattgtagccaacagttaatttacggactaagaggagaagttcccacgaatcgcaacaaatcccactattatgaacattggcatgatatgactgacccttaccatttctgtggttatgtctgatgactattagaggtcttggtcccccactatacagtttgctatctcggaaaaagtcaaaatgatgatgattgattccgtgaggaacctcacctttttcatttgcttataattacgatggatttgtatttcgtctaagacacagataaccttctccttcggggctgggttaaatccacgttcctccttttcataaccagtcgcatcctttgtcccgtttgtaaacgggttaactgatcaaccgcattg

SEQ ID NO: 106869 - DNA, 403 bp, Glycine max
  Clone ID: PAT_MRT3847_67518C.1
ctgcagccggactagaacactagctcgttgctagcaccgaacatatctcacagggtggaggcactggcagcaggtccagagagaacgactgccttgctccgtactctgttttacgcgtgatagcgaccacattgagtttcgtattgaacaggccgtagatcttatagacatgtcatttgccaagtgagcagaagacattagctcatcttaaaaactatattgctgcacgagcttcggatagtgactgttgacgcctttcgacacattgataggattgaatgattgaaaaactaacaagaaaactatcttcgacatactgacctatggtatcacgacgagacaagtgtagcctcaaaaacctacagaacaagctccatctcctcaacgaaagattgatcacgtg

SEQ ID NO: 106870 - DNA, 300 bp, Glycine max
  Clone ID: PAT_MRT3847_67519C.1
gaaatttaagtgaggagctagagaatgatgatgaagtccgctaagtgtgcagtggtggttgtaccacatcttcttctggcggaggtcgggcccatggctgaggctgtgacatgcagcccaacaaagttgagtctgtgtcttccaacactcacttccggtgctataccttccaatgcgtgtagcacgaagctgaagcatcacaaatcatgcgtatatggctacctcaaaaacgctagcttgaagcagtacgtcaactctcctaatgcccgaagcaccgttgcctcctctgggattcccttt

SEQ ID NO: 106871 - DNA, 392 bp, Glycine max
  Clone ID: PAT_MRT3847_6751C.1
ttcaagtttttccgttttggacctgggtttccaataaaaaaaaaggtattggaagggccctccaaaaggttggccctggttcttctggtgtttaaccagggccaattggttgaccagaaaccggtaattaaagttgattggcttcaaatggtaagtttgggggctgaaatggttttcagttccaaggttagtccatttccagttgaagtttttgttggaataatggctaaaggagaggaggcacctgctgagctagatgccaagatgaagaaattacttgaagatgccatcaaattaaagatggttgacactgccaagttatatgattttgttgataagaaggatgaaagcagatttgatttaaaaaaaattgtgagtgagaactggattga

SEQ ID NO: 106872 - DNA, 473 bp, Glycine max
  Clone ID: PAT_MRT3847_67520C.1
tggaagttgttatgcagcatatgcggtgtatcttatggtgcctgcatccaagtaagtcatctgagttttaaattaaatagtagtttaagttggccttttcttggtcaattggcaggtaactcttgacagctgaagcaccaaatatctgttacctaatccacatcaatgatcaatcaacaaccttatgtctaaagtgacaatcaaaacatacatgaatttcactgccattttttgaaaagatttcatgtgtgtatgtggggagcataactggtgtgtgcttgagaggagctactcttaaccatacaaatatacaagaacggtcaagattatacttaagtaaaaccaatcttgaatatcaatgtttgattgtatgggtctatattagcttgtcttactctcacttgatgtgtgccatgtgtctatgtttatgcatgtataacacataattcatggggcttagctagtatttatca

SEQ ID NO: 106873 - DNA, 462 bp, Glycine max
  unsure (1)..(462): unsure at all n locations
  Clone ID: PAT_MRT3847_67521C.1
acggctgcgagaagacgacagaagggtcactatttctgaaagacagctcagtggtgcttgatgagttctttcttttcacatatcatggagggaactgcttccatgttcaaatttttggtgggaatggattggagaggctatgcctcgaagaaacaagacaagaacaagctgccatccctcaattttttgatctgcctttcagcaacaatgcctcactctttgatggatatgagataaagaaaacaagacaagaacaagcttccatcccaagtttggcaaggacaaaaaacaagagtaaacaaagaaaaacttctgctggttcattacaccaccatgaatcgaagtcttgtcaagaagatcttcctttctgcaacaaagccttactttctaaggacttcccaaagcctatgagttcaatcaaaattgaaagttcagaagcatgcanaatggtcgagtccttta

SEQ ID NO: 106874 - DNA, 404 bp, Glycine max
  Clone ID: PAT_MRT3847_67522C.1
gtcgttctttttttttttttaagccaaaatgctcatgcggagccattaaaactttacaaggatacatgttagaaaggtaatggcataccaatttacaaactcggctttagtgattattgggtacatgaggcattggcaacccaatattgcttggcagcaattactatcttatcatgaacaagcggaccgttctaatggcccacctttttaatatcccatcttactccttgggctactgtttttaccttaattaagacatccacctcggggaggattattactgcaccttatgggcttaaaattctgaccatttacacaagaatgtcttttgcaccccttatgcggtcaaacatcacacccgatttgagggacaagaatgaaaaccttgtttggttaccaggaac

SEQ ID NO: 106875 - DNA, 371 bp, Glycine max
  unsure (1)..(371): unsure at all n locations
  Clone ID: PAT_MRT3847_67523C.1
cccccctgaatanatcccccctccaaaagggaagccaagggggcttttttataggggacccggcgtttacttacacatggacggtgaccccaggggggaaaaaccggaacccccccatcaggcggggaaaaacctcaaattacccaaatcggaaggggggatttcttgggggggaaaaaaaaaagggcaaaaagggtcccccacccgggggggacccacgaaccccctttccaaaaaaaccccccaatagggggggggggggggaaaaattcccccgggaaattccaggccccaatctcggggggggggggggacacgcaaaacaaaaggggggggggggacccccttttttctgggggcccccccccccc

SEQ ID NO: 106876 - DNA, 798 bp, Glycine max
  unsure (1)..(798): unsure at all n locations
  Clone ID: PAT_MRT3847_67524C.1
ttttcttgatgcctgagtttctaatttcctgcttacttggacgtggcttacaacttgaaagatttaacacccacttactctggtcttcaatgaacaggtttaatgagtaggatagaatatagagcaattttctgtaatacttattatagttacattcttggtctaatgaatatgccaattatcatgggaccaaatatggactgtaatatgtattcctagtacccctggtactcaattaatacactatattatttttgctgcgcaaaaaaaaaaatactaaaatggtatcacttatggaatatacgatgtaaaattgagtaaatacatccaaatcaatcaaaatcaggcgttaccaaatgggaaaagagaactacaccaacctagaaatccactccaagattacttcagaataaagaagcacatggaagtactcaacaactgaggtgactgtccaactgctagaactcctcttgaccaatggacctagcaacctattcaaagaagggatataaaatattacgcataagcatgtgcaaattttgttaacaatctgatttatttctattgaaaagtctagggacaaatatccaagtaaaccaagaacaggagtaccacctcgagcaacaagatagtgcaggctagcttgccacagatattattctatgatctcctattgtataaaaatataacaaaaacagaagaacccttatgataaactgcaacatacagctaacaagtagccattcaaagaaatccaggaaaaaagaaaatactatcanaattgatgttaatacccca

SEQ ID NO: 106877 - DNA, 309 bp, Glycine max
  Clone ID: PAT_MRT3847_67525C.1
cagcctaagactcctgcaaatttcttccaacttggagaggaggattgaggctggcttgtcagatgtaaaccgttcatttctcttccaaaaggtctcctcgttcaaaccagacaagtcaatacccccggaataggagatgacgtcaaaagcatttaatttattactcggattggagtattttgccgcgtcaataggatctacatgctcacaagctccaaatactccatcagcaactagaggagccaggctttcatttttattttgagtaatgggcggttgctctaacccctttctgaaccaagaactctt

SEQ ID NO: 106878 - DNA, 1690 bp, Glycine max
  Clone ID: PAT_MRT3847_67526C.1
actcgagccgaatcggctcgcgctttcaatagatagatagagcattcattcatcaccaacatggctcttctaggcttaatgagttttgctgccttgacccttttcttggtcctaacaactgtgcctcgtcaagcacacgcttcaagccgtggcaacttaggcagaaacatcaacccttcagtgtatggcatatgtgcctcttctgtcattgtgcatggatacaagtgtcaagaacacgaggttacaactgatgatggttacattctgagcctgcaaaggatcccagaaggtcgaggtaaaagcagtgggagtgggacaaggaagcaaccagtggttatacaacatggagttcttgtagatggtatgacatggcttctaaacccaccagagcaagatctgccgttgattttagctgataatggatttgacgtgtggattgcaaacacaagaggaaccagatatagtcgccgacacatctcattggacccctctagccaggcctattggaattggtcttgggatgaacttgtctcctatgatttccctgcggtgtttaattatgtgttcagccaaacggggcagaagatcaattacgttggccattcattgggaactttggtagctttggcatccttctcggaaggaaaattggttaaccagctgaaatcagcagccttgttgagccctatagcctatttaagccacatgaatacagcacttggtgttgttgcagccaagtcctttgttggtgagatcactaccctcttcggtctagcagaatttaatccaaaagggttagctgttgatgcctttctcaagtctctctgtgctcaccctgggatagactgctatgacttgttgactgcactaactggtaaaaattgctgcctcaattcttcaactgttgatctattcttgatgaatgagcctcagtcaacatcaacaaagaacatggtgcacttggctcagactgttagacttggggcgttgacaaaattcaattatgtgagaccagactataacattatgcactatggagaaatatttcctccaatctataacctttccaacatcccccacgatctccctctcttcattagctatggtggaagagatgcactttcagatgtccgtgatgttgagaatttgcttgataaactcaagttccatgatgagaacaagcgcagcgttcagttcatccaggaatatgctcatgctgactacattatggggttcaatgccaaggacttggtgtataatgctgttctttcatttttcaatcatcaagtttaacactggatagaatgaatcaagttgtatgaaaagagtgccttcatgtattaggtagctatcattgagatcaatctaagttatctagtggagattaagtaacggctaattacaaaagtaatgaagtattatcactagtgatttgctttggtgttgcaaatggctattgcatctatctattgtgttgcattgtaatgcagaggaaagtggcttttggcttcagttatctaagatgaaaaacgtggatgagatcatttatcaaaagaattataaaaactatgtttccaaaaaatgatgaagcatatgtatatgtatgtgtgcaaagtgctcaccactgtttacattatacgtaggaaggtttccaaaaatatatgcatattggcgatggtaaactctcatc

SEQ ID NO: 106879 - DNA, 4089 bp, Glycine max
  unsure (1)..(4089): unsure at all n locations
  Clone ID: PAT_MRT3847_67527C.1
ctctctcatccgcacaacacaccacaaccttcttcttcttcttcttcaacttctggttcaaaacctcaacagtttgttgaattgcgcgttgaaatacgactcaatattctttcgcgagctctgttctcacttcaaaggttaggttcttcgacagtttctttgtttccactccgtcgcttgctgagaaggcgtgagcgagagttgtagaattacgcaagagaaactaagacagaaagagagagaaagagtggttgaaagcgtccattgaaggtatagagagagaggttttgggaattggtgctgcttcgtgtctgtttatttcctcgcgaggtttgagaacagtgaagagaaacggagtttccgatcctgcgatgtcatatatgatagatctgtgaggaaattgaactgaaaaaaaaaatggcgacgtcggaggtatccatcaagggaaattcggtgaacggaaaaggagataacagttctggtgatgctagaaacagtggaggcgagggcacaaccctagcaacgcttcttcttcatcttcatcaaaacctcaacagattgtggaatagcgcgttgaacagcgacagaattattcttccgcaaactcggttctcccttcaaagcgtcgagtttaggttattcgagagattctttatatttactccgacacttcgcgagaaaccgtgtcttgcgagagcgaggcttggagaaccacgcgaggagtgtcgcggatgagagatctctggtgaggtctgtggaaatggcatcatcggaggtgacgatgaagggaaattgcttgaaccacaacgacggcggagccacggagcctcattcgccgtccacggccaaagacgcagaagctgcacttttcagggaactatggcacgcatgtgccggtcctctagtcacggtaccgcgggaaaaagagcgcgtgttttatttccctcaaggacatattgagcaggtggaggcgtcgacgaatcaggtggcggaccagcacatgccggtttacgatctcccacccaagatcctttgtcgggtcatcaacgtgcagctgaaggcagagcccgacacggatgaggtgttttctcaggtgactttgtttcaggagccaaaccaagatgagaatgccgtggagaaagagcctcctccagcgccgcctccacggtttcatgtgcattcgttttgtaagactctgacggcgtccgatacgagtacccatggtgggttttctgtgctgagacgacatgctgatgaatgtcttcctcctctggatatgtcgaagcagccacccacacaggaattggtggctaaggatctgcatgcaaatgaatggcgatttaaacatatctttcgaggtcaaccgcgtagacacttgcttcagagtggttggagtgtttttgtcagctccaaaaggcttgttgctggggatgcatttatatttcttagaaggtgagaatggggaacttcgtgttggtgtcagacgtgcaatgagacagcagggtaatgttccatcctcagttatctcaagccacagcatgcatctcggtgttcttgcaactgcttggcatgccatcttgaccgggaccatcttcactgtttattacaagccctaggactagtcccgccgaatttattgttccgtatgatcaatatatggagtctctcaaaaataattatagcatcgggatgcggttcaaaatgaggtttgaaggtgaagaggctccagagcagaggtttactggtaccgttgttggaatagaagattctgatcccaaaaggtggagagattccaaatggagatgccttcaaggtgagatgggatgaaacatccaacacccctcggcctgagagagtttccccttggaaaatagagcctgctcttgctcctccggctctaaatcctctttcaatgcccaggcctaaaaggcctcggtctaatgcagttccttcatccccagattcttctgttcttactcgagaagcatcatctaaagtaagcatagacccttcaccggcaaatgggtttccaagggtcttgcaaggtcaagaattctcgaccttgagaggcaattttgcagaaagtaacgagtttgatactgcagagaagtctgttgtttggccacctactgcagtagatgatgaaaagatggatgtttctacttcaaggaagtatggttcagagagctggatgtcaatggggaggaatgagcctacatattcggatcttctttcaggctttgggaccagtggggatccttctcatttatccttgaaggatcaaatgagccctgcttattctgctagaaagcaatcattggatcatgaaggcaaacttcacatgccttatccatggcctgtaatgccctctagtctgtcactgaacatcttggactctaatgcaaaaggtcctacacatggtggtgatacatctttccaagctcgagggaatttgaggttcagtgcatttggtgaataccctgaactgcatggtcataaagttgaggattcacatggaaacttgatgccacccccacctgcaccccaaactcaatatcagagtccttgttcaagagagcttatgtcaaaacaagtatcagcaaaaacttgtgaggctgtgaaaccaaaagatggtgactgtaagctatttggcttctcacttatcagtggccctatcgtaccagagccttctttatcacaaagaaatgtgagtgagcctgctggtcagatgcatcttacagcacaccaacaaagaacatctgaaaatgatgagaagtcagatcactcaaagggatcaagacctgtagatgatctagttgttgatgaccatgacagaccattacggacttctcagtcgcatactaaagacgttcaagccaaacctctcagtggttctgctaggagttgcactaaagttcacaagaagggcattgcacttggtagatcagtggaccttacaaagtacagtggctatgatgaattagttgctgaattggatcagctgtttgaatttgggggtgtattagtgtcaactaaaaaagattggcttatcgtctatactgataatgatggtgatatgatgcttgtaggcgatgatccatggcatgaattctgtgccatggattgcaaaatttatatctaccctaaagaggagatcccgaaaatgagcccaggtaccatgagctcgaaaaatgaagagaaacagtcggtaatggctagtgatggtgcacgatgcaaaagttagttaaatgtcagccacatcaaaagtttccaattcagaaaatggccttgacgcctaatgattagtagattgatttccatagctttcagattctgggatggaaagtaaggaactgtcatgaagccatccatccagttggaaaacataacttgaagatgaaatcgaggctgactgctgcttatcagtgactgcttcaaatcaaatatataagatggcattaaaagagtagtatccgtccaattttggaaatcccggaattagtagtatatgcctgcccagttatacaatccctagtatttaatcaattgtgtttttgagtgaggtgatatagggtgatatcgaccttgcttttttttttttttaaaacaatcccaccttgtagttgttgctgtacatagttgtttctctcccaccctatgaacaacaacccattaatgtaatgaaagtttcgtataccaggtcgcggccttgtggttggtatccagtttatttgattttaattttgattcttattcttattagtcataatttgtgagatggaaattatcgagattccattctgcatgctgtataattaaattttgttttaagtgtacataattgttttgtaccccgtttgtaaaaaaaaaaaaaaaaaaaaaaaaaaaaaaaaaaaaaaaaaaaaaaaaaaaaaaaaagggggaaaaaaaaaaaaaaaagggggggcccccaaaaagagggcccccccccccgaaaataaancccggccccaccctcaaaaccncgggggggcccccaaaaaaaggccccttcccccccgggaatattttgccccccccccccccgggggaaaacattttttcctttaa

SEQ ID NO: 106880 - DNA, 799 bp, Glycine max
  Clone ID: PAT_MRT3847_67528C.1
accatttccaattcaaaaacatggctcgtaatttttctcttgtgttcaccttgtcctccattatttttctcgtaacaacagtactaccctccactgtttcatccacctcaacactggaaaaacaccaagttccacgcataatgtgcgatgagtgcaagcttccacctccacctcctcctcctaaaccaatagagtgtccaccgccaccgtcccctccaccaccgataccaccatcgcctccaccaccattgccgccatcacctccacctccggttattaaatgtcctccgccgccaaaaccactaccactgccgccaccaccacccgtggttgttgaatgtccaccgccgccaaaaccaccgtgcggaggcggaggtgttgactgcttgctgcccacttttccggagacaccagacggaccccattacctactatcgccacgggccttccgtcgccaggaacgctagatcttgatgacattatcaacggtgcaaacatgattaatccactgctacgctacttctcgttgcactccttcacttttcttctccttctttgccttccctatttcttgttcgtttgatatatgcatttttgtttcgcttctctcttttattacttgagcaagtggactaagatatttgaatgagaaaaataaattgttgtttagctcttcgtagaaaccaagcataagattaattgttgtttagcttcgtgtccttgactagtgttgaatttaacgatcgaataaatattattggttcaatttgttcactgattaatatgtatgcttaattcc

SEQ ID NO: 106881 - DNA, 849 bp, Glycine max
  Clone ID: PAT_MRT3847_67529C.1
ccacgcgtccgatttatcagctgagagaaaaaataaatactaaaataaaaaaagaaatccagcaagagagagaaactaagacagaaagagagagaaagagtggttgaaagcgtccattgaaggtatagagagagaggttttgtgaattggtgctgcttcgtgtctgtttatttcctcgcgaggtttgaattccggaacagtgaagagaaacggaggttccgatcctgcgatgtgatatatgagagatctgtgaggaaattgaactggaaaaaaaaaatggcgacgtcggaggtatccatcaagggaaattcggtgaacggaaaaggagataatagttctggtggctacaccaacgatgttaggaacggttctggtggaggcgaggctcggaattcttcttcttcgtcttcatccgcgagagacgcggaagctgcgctttacagggagctgtggcacgcgtgtgcaggtcctctggtgacggtgcccagagaaggagagcgcgtgttctactttcctcaaggacacatcgagcaggttgaagcgtccacaaatcaggtagcggaacagcatatgccggtttacgatctaccacccaagatcctttgtcgggttatcaacgtcatgctcaaggcggagccagacacggatgaggtgtttgctcaagtgactttacttcctgagccaaatcaagatgagaatgcggtggagaaagagggtcctccggcggcgcctcctcggtttcacgtgcattcgttttgtaaaacgctgacggcgtctgatacgagcactcacggtgggttttcggtgctgaggcgacatgccgatgaatgcctcccttcgctggacatg

SEQ ID NO: 106882 - DNA, 313 bp, Glycine max
  unsure (1)..(313): unsure at all n locations
  Clone ID: PAT_MRT3847_6752C.1
tgagtttgttgatcgagataactaggaatacagtgagatgaaaatgaaggggcttgtggtcttcgttgctacaattctggtagcattggcaatgccatgcgatacgatatgttccctctccgaatgaacactggctatggagcccgtactccggaggggataatgcacaggttgaaggctggctgggtaagcacacaacatctttgtcggggacgccgggcctgcanagtgcgttgcagcgccaaaggactacgtccagtggggggcttacagttcagactccccatcagttggccgtcgggcttgcttttat

SEQ ID NO: 106883 - DNA, 937 bp, Glycine max
  Clone ID: PAT_MRT3847_67530C.1
tcaagagagcttatgtcaaaacaagtgtcagcaaaaacttgtgaggctgtgaaaccaaaagatggtgactgtaagctatttggcttctcacttatcagtggccctactttaccagagccttctttatcacaaagaaatgtgagtgaggctgctgatcagatgcatcttacagcacaccaacaaagaacatctgaaaatgatgaaaagttagaccactcgaagggatcaagacctgtagatgatatagttgttgatgaccaggacagaccattacggacttctcagctgcatactaaagatgttcaagctaaacctctcagtggttctgctaggagttgcactaaagtaagatccttcactatttgattgaaaaatgagagctagaagtttactgggaaaattaaccacatggtatttgttttaggttcacaagaagggcattgcacttggtagatcagtggaccttacaaagtacagtggctatgatgaattagttgctgaattggatcagctgtttgaatttgggggtgaattattgtcaactaaaaaagattggcttatcgtctttactgataatgagggtgatatgatgcttgtaggcgatgatccatggcagtaaggatctgtattttaattatacatccttggttaactttctatttaaatatcttacttttccttgagaatgggacataatttatataattctatattttcaattcagggaattctgtgccatggttcgcaaaatttatatctaccctaaagaggagatccagaaaatgagcccaggtaccttgagctcgaaaaatgaagagaatcattcgtgacggctagtgaaggtgcagatcaaaagatgttaaatgtcagccgcatcaaaagttcaattcagaaaatggtcttgacgcctaatgattagtagattgattttcgtagc

SEQ ID NO: 106884 - DNA, 253 bp, Glycine max
  Clone ID: PAT_MRT3847_67531C.1
gttgaggaggcgaaaaaaacccaaaaacccacgcccaggggctacagggtttcataacattatttaaaaaagaggccccaaggctatttaatcaatgcctttgcccaaaacgccttgccatccaaaaagagatcacccagtgggctattaacgggccgccacccatacaaaaaaccaaggggggagtcgccccctttgggatgtagaaaatagaaagcgggcgaacatccttcacctgtttaccaaaaaatat

SEQ ID NO: 106885 - DNA, 1030 bp, Glycine max
  unsure (1)..(1030): unsure at all n locations
  Clone ID: PAT_MRT3847_67532C.1
caaaaaccacacacaacacaccacaaccttcttcttcttcttcttcaacttctggttcaaaacctcaacagtttgttgaattgcgcgttgaaatacgactcaatattctttcgcgagctctgttctcacttcaaaggttaggttcttcgacagtttctttgtttccactccgtcgcttgctgagaaggcgtgagcgagagttgtagaattacgcaacgagtgtcgcggatgagagatctgtggtgaggtctctggaaatgacatcattggaggtgacgatgaagggaaattgcttgaaccacaacgacggcggagccacggagcctcattccccgtccacggccaaagacgcagaagctgcacttttcagggagctatggcatgcttgtgcaggtcctctagtcacggttccgcgagaaagagagcgcgtgttttatgtttcctcagggacatactgagcaggtgggctcgaggtggaggcgtcgacgaatcaggtggcggaccagcacatgccggtttacgatctcccacccaagatcctttgtcgggtcatcaacgtgcagctgaaggccgagcccgacacggatgaggtgtttgctcaggtgactttgcttccggagccaaacgtgagtttcctctcctcgttagtgtgtgttttttagagagagacagagtaattgggtgaaaaagtggtgatgcttatgatttttttttaatgtgggtggnggatgatgatatagcaagatgagaatgccgtggagaaagagccaccaccacctccgccaccacggtttcatgttcattctttctgtaagactctgacggcgtccgatacgagtacccatggtgggttttctgtgctgagacgacatgctgatgaatgtcttcctcctctggatatgtcgaagcagccacccacacaggaattggtggctaaggatcttcatgcaaatgaatggcgatttaaacatatctttcgaggtcaaccgcgtagacacttgcttcagagtggttggagtgttttggcagc

SEQ ID NO: 106886 - DNA, 439 bp, Glycine max
  Clone ID: PAT_MRT3847_67533C.1
ggcaaattcttctgtggatagtttaacttcactgcattggctgcttccatagctttttttatttttattttttatctcaaacacctattctctttttagtaaatcttatttgagactcaatcaaacactaaatgcaaacatctctcttaaaagagatttgaatcttgattcactaggttatcagaaagtaacattttctactagacttaatcttattgattgctacttccatatagctagctgctgagagagcctcgtcacaaggtcggtcaaagtcaaaggcaagccaatcatcttgtttcacaggaaggattaagaagggtacctagatcaaattaagctagagatatatatatacattcaaatatgaatcctcatggtctagtgaaggaagagtttcttggagaaagttcttccttttgtggtggctatgatccgc

SEQ ID NO: 106887 - DNA, 848 bp, Glycine max
  Clone ID: PAT_MRT3847_67534C.1
tgcgagaagacgacagaagggggagagaaagagtggttgaaagcgtccattgaaggtagagagagagaggttttgggaattggtgctgcttcgtgtctgtttatttcctcgcgaggtttgagaattcagtgaagagaaaacggagtttccgatcctgcgatgtcctatatgatagatctgtgaggaaattgaactgaaaaaaaaaatggcgacgtcggaggtatcgatcaagggaaattcggtaaacggaaaaggagataacagttctggtgatgctagaaacagtggaggcgaggctcagaatgcttcttcatcatcatcatccgcgagaggtaacgtggtttcctctgcgtgtgccttgtggcgtgtttggcgtgacgataacaagtttttttttggtttcagacgcggaagctgcgctttacagggagctgtggcacgcgtgtgcaggtcctctggtgacggtgcccagagaaagagagcgcgtgttctactttcctcaaggacacatcgagcaggtaggtaactcataactgttcctccgaactcagattcggtggagtttctcacgaactcggacttggctgcctctataatgaaatttgatggctttctatttatgacgagtgagtgtttgtttttatggcacaaacacgcattaggtggaagcgtccacaaatcaggtagcggaacagcatatgccggtttacgatctaccacccaagatcctctgtcgggtcatcaacgtcatgctcaaggtagtaaccaacgcttaattatctctgtttttcaagagctaagtttgtaaatgaacttgttttttaatgttatggtacttcgtttttggc

SEQ ID NO: 106888 - DNA, 746 bp, Glycine max
  Clone ID: PAT_MRT3847_67535C.1
ccacgcgtccggcataagtctagagagagagagagagagagagagaggtggagcatagtatatatagtagctggaggtataatctgttgtaactatcctatagaataataaaaaagaaattggtggtggggcagttgtcggctaaggcagttggacaaggattcgtgagctttgtctcagactgttttagaaagaaaagggcttagcttaagttttgtttgctacaggtttttgattattgggtggagggtttcttcttcttgctttcagtttcttttgcttcacatcacaggataaggatattgatcgttggcacttcaatatatctaatctaagagttcactgaggagcacaatagtgtcataaaggtggtgaaggcagagatgaatttccttattatatcaatgagtggcacatttaaccttttgaaggaaatgaaacctttcttggagttatcaacataaataagtgaaaactgaaaacctgcaagtcatggaggacagtgaaaggtgtaggtttgaagaaaagtcattttcaatggggatgtctacattggtaaaatcaagggcatgcttccccatggcaaaggaaagtacacatggtcagatggagcagtatatgaaggtgattgggtaaatgggaaaaatgacggggaacggactgattacatggccaacaggagcaaagatgaggggtgattctctgggggatatcttcatggtcatggcacctttcacattctactg

SEQ ID NO: 106889 - DNA, 189 bp, Glycine max
  Clone ID: PAT_MRT3847_67536C.1
cagtaccagtccggaattcctgggtcgacccacgcgtgcggcaatacaatcatcaaaaagtgccctttcgcctctcatttccggccgggattccacgtcctggacggcgtccacgacagcaaaatcagccacgacgaccttcgtgccttttacgtcggggtgggtgtagaaggtgacgacgtgttcggg

SEQ ID NO: 106890 - DNA, 489 bp, Glycine max
  Clone ID: PAT_MRT3847_67537C.1
aattcggctcgagtaggctgcggaagacgacagaaggggtcctttaaaataatgattataaaattgaccattcataattaaattaaaatatactttttttagactatgggtattatgtattctctttaatgaaaaggatattttattatttagattttagatgaggttccgttgaagttttctcccctcgttctgttcttccgccatcgatggaacacacaagtgtagcgtgaaaaaaaaaaaaaagattacttactcagacgaaccaccactctattggataatatcaaagtgcgttcaaaatggaagaaggtgtaaggagatgggtagtggacatatcaaagtgggacccacacccctctcacttctccttcgctctctccctccttccttcccacgagcactcctcggtcaccaggttctctctatcccattcaattcattctaataatttttttgtaccactctgttagattatacaggcataag

SEQ ID NO: 106891 - DNA, 307 bp, Glycine max
  Clone ID: PAT_MRT3847_67538C.1
tctttcgttgactcgtgggtggaggcaaaggtggtggaggcggaggtggaggttctaatggttcagggtatggctcaggctctggatacggtgaaggaggtggttatggtcaaggaggtggaaatggaggacgaggcggtggcggtggtggaggaggaggtggaggtggtggcggcggcggtggtagtggaggttctggttatggtagcggctctgggtatgggtctggttggggtgggggaggaaattatgagtccctttaaactaagatatggattcagtttttaggcgtataagaatcaggatt

SEQ ID NO: 106892 - DNA, 258 bp, Glycine max
  Clone ID: PAT_MRT3847_67539C.1
gacaacaccaaaacagtgggtctaatatcccttcctggggcaatgactggtctcattatgggtggggcatcgccgttggaagcaattcaactacagattgtggtgatgaatatgatgattggtgcagcaactgttagcagcataatggctacatacctctgttggccagcattcttcaccaaggcctaccaattggaaaccaaagtcttctcaagttgattccacctaacttgaatcggtgatttcgagttcagtaga

SEQ ID NO: 106893 - DNA, 286 bp, Glycine max
  unsure (1)..(286): unsure at all n locations
  Clone ID: PAT_MRT3847_6753C.1
ctcntgnagtctactgctngctcttcaaaatctcaganccaggaagcttctgctccctccatttcccaantccgtgtgcactactttggaaacttgtgcattcatttccttcagctnaggaagggncttngcntttngccttagccattcanttncaaattngtgtgaatttgaagatgactgaggancacganantggcgccaangcaagtnaggaggagcaaccgatnggcccgggcccancnncacgggnccggcccaagngaccccttcanttngatcacgt

SEQ ID NO: 106894 - DNA, 375 bp, Glycine max
  Clone ID: PAT_MRT3847_67540C.1
ctttgggaagagaagaaggaaagtctagttattttggttcatggagtcggttttgcgaatggcgctcattctgtgtaacacgcccacaagttgactacaacttcttattcgcgttatgtacacctagagtggaatactaaaaacgcctaatcccaacagggactgctcttgatgacgcaatcttaatagcagatctctgcatcatgcatgttttgcatcaacgattcacaaccttaacaggtagcaagactccaccttgaacggtcataaagtccgaaatttcaactatatccctgttaccgacaatggacctactgctgttcatcaaaagaaaaccaagtgcatcatggaaaactgtgtgatactactatccca

SEQ ID NO: 106895 - DNA, 738 bp, Glycine max
  Clone ID: PAT_MRT3847_67541C.1
aacaaattttactgttacatcaaaggcatcagatgaggatggtgactttgccgagctttacgtgtttaaatggacatcacttctcatccctcctacaacggtgcttattgtgaatttggtagggattgttgccggggtgtcctatgccataaacagtggttaccagtcttggggtccactatttggcaagctgttcttcgctatctgggtcattgcccatctatacccattcttgaagggtctcttgggcaggcaaaatcgtaccccaaccattgttattgtttggtccgttcttcttgcttcaatattctccttgctgtgggtgaggattgatcccttcacctctgactccaacaaattaaccaatggtcaatgtggtatcaactgttagttctcttgtaagattcatgacaaggttgctgtcgtgtatatagcaagaattttcagcctatcaaggttgtctggaggattgaacccctgaaatagatgggaatgttaccctctctgtttctattatttatatttatttatctacatgttccttacaagaataatcagtcatgttgaggtgtatgttatatttttttcccactgaatataaatttgtttatgcgaatatttaatgaaagccaacaaggtcctgtgttttgttctttaaaaaaaaaaaaaaaaaaaaaaaaaaaaaaaaaaaaaaaaaaagggcaaaaaaagggcggccgagctctagggcccgtcgtt

SEQ ID NO: 106896 - DNA, 3723 bp, Glycine max
  unsure (1)..(3723): unsure at all n locations
  Clone ID: PAT_MRT3847_67542C.1
ccgccacgcgtcaagagagagagtgagagatggcgtattgaatgggcgaagattttcacgctttgcttttgcctccaaattgatctctctctctctctctcacaatctttgatctgaagcgattaagcgaagcactttttctgttaaaatggaagcaagtgcgggaatggtcgcaggttcgcataagcgaaacgagctcgttcggattcgccacgattcttctgacagcgggtctaaacccttgaagagtttgaatgggcaaatctgtcaaatatgcggtgatactgttggattaactgccaccggtgatgtgtttgttgcttgcaacgagtgtgctttccctgtgtgtcgtccttgttatgaatatgagcgaaaggatgggaaccagtcttgtccacagtgcaagactagatacaagaggcacagagggagtcctcgagtggagggtgatgaagatgaagatgactctgatgatatcgagaatgagttcaattatgcccaaggaaaagccaaggccaggcgccagtgggaagatgacgctgacctgtcgtcgtcttctagacgcgaatctcaacagccaattcccctcctcaccaatggccaaacgatgtctggtgagattccgtgtgccacacctgatactcaatctgtgcgaactacttcaggtcctttgggcccatctgaaaaggttcactcacttccctatgttgatccaaggcaaccagttccagtaagaattgtggacccatcaaaggacttgaattcttatggtctgggaaatgttgactggaaagaaagggttgaaggttggaagctcaagcaggagaaaaatatggtgcaaatgactggtagatacactgaagggaaaggtggagatgttgaaggaactggttctaatggagaagaacttcaaatggtagatgatgctcgacaacctatgagtcgtgttgtgccaattccttcatctcagctgacaccttatcgtgttgttatcatcctccggttgattattcttggcttcttcttacaatatcgtgtaactcaccctgtgaaagatgcataccccctgtggttgacatcagttatttgtgagatttggtttgccttatcctggctcttggatcagtttccaaaatggtctcccattaatcgtgagacttatcttgaacgacttgctttaaggtatgatcgtgaaggagaaccatcacagttagatcctgttgatgtgtttgttagtacagtggatcccctcaaagagccgcctcttgtaactgcaaacactgttttgtctatactttctgttgattaccctgtcgacaaagtttcctgctatgtatcagatgatggttcagctatgttgacctttgaagcactatctgaaacagctgagtttgcaaagaagtgggtgcccttttgcaaaaagcacaatattgaaccaagagccccagagttttattttgcccagaagattgattacttaaaggacaagattcagccctcgtttgtaaaagagcgacgggcaatgaagagagaatatgaagaattcaaagtacggatcaatgcccttgtagccaaagctcagaagatgccagaggaaggttggacaatgcaggatggaactccttggcctggaaataatcctagggatcatccgggaatgattcaggtgtttttaggtcatagtggggggctggatacagatggaaatgagctgcctagacttgtttatgtttctcgtgagaagcgaccaggcttccaacatcacaagaaggctggagctatgaatgctttgattcgagtttctgctgtcttgaccaatggtgcatatcttctgaatgtggattgtgatcactatttcaataatagcaaagccctcaaagaagccatgtgtttcatgatggatcctgttcttggaaagaagacatgctatgttcaatttcctcagagatttgatggcattgacttgcacgatcgatatgccaatcgcaatattgtgttctttgatatcaacatgaaaggtcaggatggtgttcagggcccagtctatgtgggaactggttgttgtttcaataggcaggctttgtatggttatgatcctgttttgactgaggaagatttggaacctaacattattgtaaagagttgttggggttctagaaagaagggaaagggtggcaataagaagtacagtgacaagaagaaagcgatgggcagaactgaatccactgtacccatatttaatatggaagacatagaggagggtgttgaaggttatgatgatgaaaggacactacttatgtctcaaaagagcttggagaagcgttttggtcagtctccagtttttattgctgccactttcatggagcagggtggcattccaccttcaacgaaccctgcaactcttcttaaggaagcaatccatgttatcagctgtggttacgaagacaagacagaatggggcaaagagattggatggatctatggctctgtgacagaagatatcttgactgggttcaagatgcatgctcgtggttggatttccatctattgcatgccacctcgcccagcatttaagggttctgctcctatcaatctttctgatcgtctcaatcaggtgcttcggtgggcccttgggttcaattgagatctttctaagcaggcattgtcccttgtggtatggctacaatgggaagttgaagcctctgatgaggcttgcttatattaacaccattgtctacccgtttacctcaatcccattgattgcttactgtacgcttcctgcattttgtcttctcacaaataaatttattattcctgagataagcaactttgccagtatgtggttcattcttctctttgtctccatttttaccacttcaattcttgagcttaggtggagtggggtcagtatagaagactggtggagaaatgaacagttctgggttatcggtgggacatctgcgcatctctttgctgtgttccaggggcttctaaaagtgcttgctgggatcgatacaaattttactgttacatcgaaggcatcggacgaggatggggactttgccgagctttatgtgtttaaatggacatcacttctcatccctcctacaacagtgcttattgtgaatttggttgggattgtggctggtgtatcctatgccataaacagtggttaccagtcttggggtccactatttggcaagctgttctttgctatctgggtcattgcccatctatacccattcttgaagggtctcttgggcaggcaaaatcgtaccccaaccattgttattgtttggtccgttcttcttgcttcaatattctccttgctgtgggtgaggattgatcccttcacctctgactccaacaaattaaccaatggtcaatgtggcatcaactgttagttctcttgtatgattcattttgtgttgttattcccttttgcttggagatacacaaggttgctgtcgtgtatatagcaagaattttcagcctatcaaagttgtctggaggattgaacccctgaaatagatgggaatgtaccctctctgtttctattatttatctacatgttccttacaagaatagtcagtagtaatgttgaggtgtatgttatattttttccccacagaatataaatttgttcatgcgaatatttaatgaaagccaacaaggtcctgtgttgttttgttctttaaaaaaaaaaaaaaaagaaattanaaa

SEQ ID NO: 106897 - DNA, 1855 bp, Glycine max
  Clone ID: PAT_MRT3847_67543C.1
ccaactcaaaagcctgattctaccaccacagaacagatgggaaatgagcctaaggtggatgaagaagatagaatactcaatgaaatggaggaattgacttatgtaatggaccgcaagaagaaacgtgcaaagaagcttcttgcaaaaagaagagccaaggacaaggcacgaaaagcaacagggatgcaaatggatgcaatagatgatggttatgtagatcaggagttgtttgctctttcctctatcaagggtaagaaggatctggtagctgttgacaacactgagtatgaaggtgatgaaggagaactagaagacagtgagaatgaagaaacccatgaaagcccagagcattcatccagtgacttagaagattctgatgaggaacgtaaaagatacaacgaacaaatggaagatttaatggataaagcttatgagcggtttgtgatcagaaaggaaggaagtgcaaaacagaggaagcgaattaaaaaatcctatgatgcaaaggcccaacttttggagggtggtgaggatgatgatattgttcaatccaagtatgattcagatgaagatcagggtgatcaagaagcaaatccattgatggtgccacttaatgatgaggcagagctcacccaggaggagatcatgaataagtggtttagtcaggatgtctttgctgaagctgcagaggaaggagactttaagaaggatgagagtaaagatgaaatggatatagatgagcctaaggagaagatatccattgccaaaaaggtaaaagaaaataaaacagcccagctgtagcaactcacctcagcctcaaccatccaaggcaggggatgattttgaaatagttcctgcacccgatactgattcaagtgatgattcttcctctgatgaatgggaagaagatattgaagccaaagctgagatattggcttatgctaagaagatgatgaggaaaaagcaacgggagcacttactggatgatgcatacaacaagtacatgtttgatgacgaaggattgcccaagtggtttctagatgaggagaggagacatcgccaaccaataaagcctattaccaaagaggaaattgctgcgatgaaagcacagtttaaagaaattgatgctcgacctgcgaagaaggtggcagaggccaaagcacggaagaagcgtgttgcaatgaggaagcttgagaaggtacggaagaaggccaatgccatatcagatcagacagagatatctgatagttcgaagaggaagcaaattgaacaactatataaaagggctgttcccaagaggcctaaaaaggagtatgtagttgcaaagaaaggtgtccaggtaagggctggcaagggaaaagtccttgttgatcgcagaatgaagaaggatgctaggaaacatggaatgggtaaggctggaaaaggaggttctaagacgaagggcaaggctccaaagggcaaaggatcttcaaaggcctctgctaagaaagggaaacagagaactaaatgaaaataggttgatacgtgaagatcgtcgaagttcaaaatcatgggctttttcttattttctgtgcccgaattttgtttgttcattttttttccggctttttattgtgcaattgatattagaaattattgaattgatctgttttgttcttcagaggcaaatagtttaaatcaaaggccttgccgcaaaaaaagggagagtaaagaaagttaagggaagatcaaaggggtttttttcagtgccgaaattttgtttgttattttttccggcgttattaattgatattataaaatgatcgaatagagctgttttgttaagaggcaaaattcaaatgaaatttgtcatcctctg

SEQ ID NO: 106898 - DNA, 386 bp, Glycine max
  Clone ID: PAT_MRT3847_67544C.1
acggcgcgtgtaactgcggacgttagattaaggcgaggtatgcacgcgcagtcttagcacggggctacataatccttaagggggctctacgaccagaccaatttgatgttatttataagcccgactgaccaacactagtggtatatatatgccgcaacctataccaaccgcacacccatataaccaagtttgagctcacgctagagaaccaacctaataccagcctcatgagcaataacgcgtagtgctagatatcgcctaccgttggagtctactgctgatactattgcaagcaattcaacggtggtaaccgtatcatacatattgacgacgaccacaacgattgccacatcgattgcgactatcgtttctgggtcttacacaac

SEQ ID NO: 106899 - DNA, 511 bp, Glycine max
  Clone ID: PAT_MRT3847_67545C.1
aaaaaaaaaaaaataaaatttaaaaaaaaaaaaaaaaaaaaaaaaaaaaaaaaaaaaaaaaaaaaaaaaaaaaaaaaaaaaaaaggggcggcctttttggaggccccaatttttttcccctttcgggccccctctgggccgccccttgggccccccaatggaaccccccggcaattttttgcccgtccttttacggggacccccttggcttaacccgggtttttcccattttagccccttcccttttcatccccttttcttttgcaaaattgttccccactaagccctctcccaatatttttcccaccatttatgaaaattgaccccccccttgtccccgccctttaccccccccttttgtgggggttacgcgcagggccccttttacattaccaaaccccttgccccccccttatttccctttcttcccacccttttgcaaaagtttctccctttttcccccccattttctttttttttttccccctgggggccccctatagggtttttt

SEQ ID NO: 106900 - DNA, 304 bp, Glycine max
  Clone ID: PAT_MRT3847_67546C.1
tttttcccaaccagagccttctttcccgttcccagcctgatggggatgatataagtcggggatccaattgtattatcccctcaatgcaagcgctttttaaaaccacccgcttgggtccgtgtgtgactgtgacaccacaagaggagtcgtgcggcttccgtttccattcattggcgcctacggaaatgggatatccttgtccctggaagccctgaaagcagttctaaccgtagtcattttacacctccttgccttgtaggaaccaactccctctatcgtacgagctatcgcactcctgacggaa

SEQ ID NO: 106901 - DNA, 2052 bp, Glycine max
  Clone ID: PAT_MRT3847_67547C.1
tcaaaacattcgccaagctgttttggaatatagaaaagtaggcaatcagcaacatgttgagcctagggtaaggagggtggcattatatcgtggtgctgagtacttggaacggtacttccgtcttattgcttttgcagcatatcttggaagtgaagcatttgatgggttttgtggacaagcagaatacaaaatggcatttaagaattggatgcatgaaaggccagaggtgcaggctatgaaatggagcatcagattgagaccagggcgattttttactgtccctgaagagttgagagcaccacaagaatctcagcatggagatgcagtaatggaggctttcgtcaaagcccggagtggttctgttcttgggaaaggctacatactgaaaacgtatttctttcctggtcagagaacttctagccacatacaaatacatggtgcaccacacgtttacaaggttgatgaattccctgtgtatagcatggcaactccaaccatctctggtgcgaaggagatactatcctatttgggtgctaagcctaaagcaaatgtctcatctgctcaaaaagtgatattgactgatctgagagaggaagcagttgtctatatcaaaggcactccctttgtcctaagggagttgaacaaacctgttgatacactcaagcatgttggaatcactggtcctgcagtggaacacatggaagcacgattgaaagaagatatactagctgagattagacagtctggtgggctgatgctgtttcatcgtgaagaatatgatccttcaacaaataagtccagcgtcgttggatactgggaaaatattttggcagatgatgtgaaaacacctgcagaagtttattccaccctgaaagatgagggatatgatattatctattcgaggataccattaacaagagagagagatgctttggcctctgacattgatgcaatacagtactgtaaagatgactctgcagagagttacctttttgtatcacacacaggttttgggggagttgcatatgcaatggccataatctgtattagactaggcgcagaggcaagctttgcgtccaaagtcccacagccattgtttggtcctcatcagtgtgctgcaaccgaagagaacttggcctctcgagcttctaatgaagcagcactcaagatgggtgactatcgtgacattttgagccttacaagagttctcatacgtggtccccaaagcaaagcagatgctgatattgtcattgaaagatgtgcaggtgcagggcatctacgagatgatattctttattatcataaagaatttgagaagtttacagatggtgatgacgaggaacgagcatatcttatggatatgggtgtcaaggctttgaggcgatattttttcctgatcacattcagatcttacctttactgcacctctcctgcgaacatgaaattttctgcatggatggatgcaagacctgagcttggtcatctatgtaacaatcttagaattgataaataatatagcaaagcttatagttatgttaataatgtacagttagcatttcgacatccacttctttcccctccccctagcctgtccaataccctaaaaatacatactagtttgcaaacttatggctcataggcaaaacaacgcatcctttagtcagcttctttctgacattgggggcaaatatggtacataactgttgaaggaggagcaatatctgttcgcgaaatcaagtagtccagagcacaagaatttagttcactggactcaatgagcattaggttacactgttaagagacgttacatatttttatatattgtattgctattttagggagatttgattataggatcggtgtagttaattagattaattacgtggtcctccatgtctttgattattactagtttcaaatccatctagtatctgtataaccattggaatatgttaggtggtaattctgccaatgaacttggatgtataaccgtatgagaagatatggccatcaatttgaatagtaaaaaaaaaatgcaaattccccttatgg

SEQ ID NO: 106902 - DNA, 485 bp, Glycine max
  Clone ID: PAT_MRT3847_67548C.1
gtcgaggcatcggttggcacgggattggtatcttacttgacggtctctatggaacagggacaggttccactgtttctgtggaaaatgtaggactccttggcctaacccgagttggaagtcgccgagttgttcaaatttctgctggttttatgatattcttctctacttttaggaaagtttggagctgtgtttgcatccatacccttcccaatatttgctgcattatactgtgttctctttggccttgttgctagcagttggcatatcatttcttcagttcacaaacatgaactctatgagaaaccttattatcacagggctcacactgttccttggaatatctgtgcctcaattttcaaatcaatattggaccagctcacaccatggtcctgttcatactaatgctggatggttcaatgctttcttgaacactatattctcatctcacagggctcacactgtgccttggactatgtgaccctcaa

SEQ ID NO: 106903 - DNA, 352 bp, Glycine max
  Clone ID: PAT_MRT3847_67549C.1
accacgcgtacgaccacgcatacgggcgactttaaggttttttttcaaaaagactacatatgggtaccgggggaagatgacttctgaagggggcacaagttagtattttgatttaaataactaaaaacagtgtcatgaaaatgaaagaccttgtattcttcaaatctacaatattcgtagcatgggaatttgatacgtacgatatgttttttttgtgaatgaatactgtatatggtgcctatactcctaaagaaaaatatgctagttggatatttgatgaacaatcacacaacatatttggctttgagaaccttacttaataatgcgttgaagcaactaaagaatacattta

SEQ ID NO: 106904 - DNA, 303 bp, Glycine max
  Clone ID: PAT_MRT3847_6754C.1
cagagaaagacatgcgctcaagctgggcaatctaacctggcacctcccagcgagtcacttcatttcactctcacgcaggaatatcacacacctggaaggatcgttgttcatgcgggatctgattgaactgtcggcgcctaccccagagccgacgcccctggaccccggagcttaaaatctatgtccaccctttcctgtttgagaaggacgccatccagacccatgcgcttgactacgttgcttagactggaagcttggggctggacccgctgctgatagggaacagagctccctgctataact

SEQ ID NO: 106905 - DNA, 299 bp, Glycine max
  Clone ID: PAT_MRT3847_67550C.1
ttcaggcttctgctaaaagctaaaaatcatgcaagtgcgcaaatttgcatggctgccacggtttcattcttgaatttaatcatcatgttttcagtaatctctacaatcaattcactgagctttatctactattcaaaaacatgccctgaccttgaatgcattgctgccaaggcaaagaaagttgccactgctatggacaaaactgttccagctgcactttttcgaatgcacttccatgactgttttattcgggagtatgatgcctctatgctgctaacttcataaagattcaacaatac

SEQ ID NO: 106906 - DNA, 310 bp, Glycine max
  Clone ID: PAT_MRT3847_67551C.1
atgaacgaaaagctcatgaatatttcacgacttcataaggtagcaaactccgaacaaggttttctaaatacaggcgaaatacttaaaattgcactagaaaagtttatacgctaacaagactcttgccaagaatgatgtcatctgatgagaaatcagcctctttccgatatggacctctaccaaagtccaggttgtactagtctggttgaccctttacaagttcaaatgcatgttccaatcgcagcacgctattaggtttgtaaactggtgcaaagaaatgctcgtcacggaacgggacagatgacttttt

SEQ ID NO: 106907 - DNA, 1667 bp, Glycine max
  Clone ID: PAT_MRT3847_67552C.1
gtcaaacatgtttaaccaaaaattcttaaacaatgaacgatcaaaaaatatatgtattttgttagtatagataatatcaattaattcttttaagatatcatcaatcgtacggtcttatacttatagtctctaaatctttctcattctaatatgattcaatcagaattttacataatgcaataatgctgagattaatttaagatgcgtaaaaagtaaaaaagaaagatattaggacagaaataaccttacaatttttctttaaatatcgactttgattttgtatgcactatgcacttaaaggtgagcgagaaacagtttgagcgtcatggggagacagagtgctttattggtgttcgtgttattactagtccaccaaatttgtgctaccaatgagcaagagcatgcttgccccccttcttcctgtggcaaaatcaccaacataacttatccatttcgattaaaaggcgacccaaaaggttgcggtgacaacaggtatgagctagcttgtgaaaataatgttacggtgttatatttgtactctggaaaatatcatgtgcaggctatcaactacaacaatttcacaatccgtgtggtggatccgggtgttcaacagccaaattgctcctcccttcctcgctactttttgtctcaatcaaatttcagtgatagtgataatttttacttggatcgatacctagcctttcaaaatcgagtttattgcttgggagcacgttttccagcatatagtgtttatgaattgtagcaatccagtgactgacaatggtaagtatgtggatactgcttcatacgtcaactgggactccaaagataagtacatatacgctattgctggtgacttaaaagcagaggacttccaagttggttgtcacgtaaagctggttgctctgacatcttggtggggtttggatacaaacaattattcctactctgccatgcacacggggctagtctatggatttgagatttcatggatgcgcctcatatgtgaccagcactgtccaagtaaacacggctgctactactacaaggtctgctttttcgactctgtcagccaggaggttcattattggaactgggaaacattatggggttggagtattctcataattttaattatgttatgggcatggaaaattttgttaacagtgccactgtttattgtgattttgacgtgtaaatggagaaaaagacatttgtcaatgtttgaaagtattgaaaattatctagaacaaaataacttgatgcctattagatattcatacaaggaagttaagaagatggcaggaggttttaaagacaagttgggtgaaggaggatatggctctgtgttcaagggaaaattgggtagcgggtcttgtgtggcaataaagatgttaggtaaatcaaaaggaaatggccaagattttattagtgaagttgcaaccattggaagaacatatcatcaaaatatagtacaattaattggattttgtgttcacgggtcaaaacgtgctcttgtctatgaattcatgcccaatggatctcttgacaaatttattttttccaaagatgaaagtatacatttaagctatgatagaatatataatatatcaattgaagtggctcgtggaattgcttatctccactatgggtgtgagatgcagatt

SEQ ID NO: 106908 - DNA, 404 bp, Glycine max
  Clone ID: PAT_MRT3847_67553C.1
tgtgtgcggtcgctttttttttttttttttcagggatcccaatggcctttgaaattcatacttatggactcaatgagcatcctgggccgggagtttactaccctcaaatatccttttgcaacgctaaccaatgcctgactcttacatccacaaccaagggggcgaccaaaaattctggatttcctaccaaatttatgtattttagtgagaaacaccccgtaaacagatgtcatccaccacaagaatttatttgtccaaattcttacaattagaaccttaccagggttttttctttgtcatccctaaagttgatgagggcaagacacagcttcattggtatcaataagcttgggttgttatgttgtaaaaaaataccaaagcttcttccctattgaaagctcacc

SEQ ID NO: 106909 - DNA, 635 bp, Glycine max
  unsure (1)..(635): unsure at all n locations
  Clone ID: PAT_MRT3847_67554C.1
cttccacttctctccaaatcatcagttttacctcaaatgaattagactcttcaattctatcatgggtgcttaatgttagcaaagtgttcacatctctggatctctctcacaattctttgcatagtgttccagatggatttgcaaacatcactctgtgtcaagtaaagaggttgtccctgagtcacaacaaattatctggccaactcagtgactacttaccagaatcatgttctgcacaacatgatttagaggagttggatctaagccacaacccatttagtagtgggccacttccggatttttcatggttttcatccttgaagagactatcgcttgaatataccaatgttgttgggcagttatcaatatcatttgatcatttgcggagtcttgaagatttggatgtttcccataatcaattgagtgggccaattccatatactattggacaacntctaatctgacgcacttgtatctatgttcgaataagttgaatggtagcattagtgaaacgcatctgtcaggcctgtcaagattgaagacattggatgtaagtcgaaattcactttcatttaactggnatccaaattgggtttcacctttccaattggggtgggtatctgcatcatcgtgca

SEQ ID NO: 106910 - DNA, 803 bp, Glycine max
  unsure (1)..(803): unsure at all n locations
  Clone ID: PAT_MRT3847_67555C.1
acatcgctcgagataaattccaatacataatatatatagggtttagcattgatcactaggtgacttgttatttctaatagcattgcatactactacaaatagaatggcatcacgtgggtatttttctgttcttgtccatgcctttgtgtttgcaagtcttgcaacctcagctttctcacaactgtcacctaattactatgattatgcgtgccctaatgctttgagcacaatcaaaagtgtcgtagaggctgcggtgcagaaagagtaccgtatgggggcttctttgctacgcttgcacttccatgattgttttgttaacggttgtgatggttcaattctactagacccttcaccaccattgacagcgaaaagaatgcatttgctaatcttcagtctgttagaggatttgaagtggttgatgacatcaagcaagctgtggacgaagcatgtggaacaccagttgtttcttgcgcagatatattggctgttgccgctcgtgactccgtggttgcgttaggtgggccaacatgggaggtgcaactggggagaagagactccaccacagcaagcaaagaagcagcagatgcaaacattccagcaccatttttcagcctctctcaacttatcaccaacttcaagaaccatggtcttgatgagaaggaccttgttgttctttctggnagccacaattggatatgcacgttgtgttacatttaanggacatatttacaatgactcaaacattgatccccactttgcacaatacctcaaccttgctcccttgnnactcacagcagcgaact

SEQ ID NO: 106911 - DNA, 272 bp, Glycine max
  Clone ID: PAT_MRT3847_67556C.1
attcatttgaccgtcttatattgcacttataataagtttgtccaaacagggcataacttagggaagcaagttcgtcagacactgtgatgaatatggctaatatgcatcagatatcctaatgtatcttccttattaggtatgctttcaaattaattggcttcaattatgaggctagattcacatatataattgtctggaaatgactaatgagagcatgtcatgctcttataccagctaaggaaggaaatgcagaagttgtttataccgagata

SEQ ID NO: 106912 - DNA, 573 bp, Glycine max
  Clone ID: PAT_MRT3847_67557C.1
ctcacgctgccgcttgagttgaatgctgagctggacatcccaaaggaaaatcctgggcttatatccttgcctgaggagttccgggattcagttctcaaccatgataggtaccatccacaagaccgtatttaatcagagtgactttcaattttttgtgaatcacactatttacttccggatgtattctgcttttggaatacttccgggggtctggatgatgatgctcgcatacaacaatacttatctgccctgctgaacacatacttgggagatgcattgaacggtgcagtgcaggtctgctcgctagagctgggtcagactgacttgttatatgagtgagaaactgttaacggcggaattcctgtgcttggatgtcacgagtgaacataatagacctgtggatgtgcacagagcttggtcttactcaaacttacatgaagtggataaactattttacaatgcgaaactgatccgtcgacggtttgggatggtgagcaaacttgctcacctgtgagaatgatatatattcgctacatgagtcgtgtgttgtgccaggactgtggcatgattata

SEQ ID NO: 106913 - DNA, 937 bp, Glycine max
  unsure (1)..(937): unsure at all n locations
  Clone ID: PAT_MRT3847_67558C.1
tcttcacataccaacatttaaaaagggttgctgaaattgctaggaaacttggaatctttgtcatttctgatgaagtttatgcccatgtaacttatggaagcaatccatttgttcccatgggggtgttttcttcaatagttccggtcattacaattggatctttatcaaagagatggttagttcctggttggagaactggttggatagccacatgtgaccctcatggaatttttcagaaaactggggttgtgaaaagtatcatcagttatttggagatcacaactgaccctccaaccttcttgcaggcagcaatacctgaaatccttggcaaaacaaaagatgatttcctttcaaaaaatcttaatatactgagggagactgcaaacatattctatgatttatgtaaggagatcccttgcttaacatgccctcacaaaccagaaggagcaatgtgtgtcatggtggagattaacttctcacaaattaaggacattgttgatgatatggatttctgtgccaagctagctgaagaggaatctgtccttcttcttccaggtgtcacggttggactgaagaattggcttcgaattagttttgctgtcgacacttctaatcttgtagaaggccttagcaggataaaagcattttgccttcgatatgcaaagatgccatgaagtcatgtcacatggtagggtgtggaagatgttgatttcttagggatatcttatcaaagaccatttatttagcaaaatttataatgtatggagatatttcttcttctcacacggtagggtgagggaggtgttgatttagaggcatgttatatcttcttttaggcattttatatcttaacaagaccatttattgacagttaaaaaggagggttcataacacttctagcggagaatatattttgtttaaaagnnatactacaaca

SEQ ID NO: 106914 - DNA, 661 bp, Glycine max
  Clone ID: PAT_MRT3847_67559C.1
aagttgagtcacatgaatatttgtgtcctttctgcagaccaatggaggagagtgcatgtcacctgttttttcattgcaggaaagaacttccagtatggtgggaatcgctgtcttgggtgaatctgccacgcgtccggaaatactggttgaccgtggtgcaattagatttgtcttggcgggtgcaaacataatgtgtcccggtcttacatctcctgggggtgtttaggatgaggatgtaggggcaaaatgccctgtggccatcatggctaaaggaaaacagcattctcttgctattggctttacaaaaatgtcaaacaatatggaggacattgctcgggatgctggcagtgtggatatcgaagatgttttgtatatcatacctttgaaagaactacaaatggagctccaacaactctgctctattaatgcctgcaatttaccaaccactatatgaaatggcccaggtaataggattgtatattgggtttgaaatgtttgacttatgagtttatcctcagtgattgtatatctttaaggagtgcggcacttgtgattttcagccctatgtcgtggaaagttaaggattttgtcaatctttatgcctcttttgaatattaatttgtgaagcattttttcatttttgtaatttggatgttgaggc

SEQ ID NO: 106915 - DNA, 723 bp, Glycine max
  unsure (1)..(723): unsure at all n locations
  Clone ID: PAT_MRT3847_6755C.1
tttctcgacgctgcccttgccgctgctcaggtcgttgttcttgaggcgggtgtgcagggcctggatctgctcgttggccagggtgtcgccagcgatgacgattttgaaaccgttgtagttcgacgggttgtggctaccggtgagcatcaccccggacttgccggccagcacgttggcggcttagtacaacgccggggtcggcaccaggccgacatcgctgacgtggcagccgctgtcgtgcaggccctggatcaactgctggaccagctccggcccggacaggcgaccgtcacggccgaccgacacgttgggctcgccctgggccaggctctgggcgccgatggcgcggccgatccagtaggcggtttcgccgttcagggtctccgggaccgtgccacggatgtcgtaggcgcggaagatgctgtcagggaagctcgggatggcaggtgcggntgctgttcatggtgtgggggtgggcttccgttcccaggaaatccctggtggttcgtcgagaatatcgatatcgagaagttccngntgtctttggaacaggcggatcggcccagacggtacttggcggtcgtggacttggatcgggcgcgggggcgctggcgatatcggcgtgccttgaatcactggccgacaggctcggggatgaccattgcgcaaggaaaagcgcgccagttcctgggccagcccattgagggcncgcaggctcaagct

SEQ ID NO: 106916 - DNA, 1691 bp, Glycine max
  Clone ID: PAT_MRT3847_67560C.1
ccacgcgtccgcccacaagtaagcactataaattttcatgatttcatatttccctgtcacaaacacagattcacttcgaaactgaacgctgcagcagaagatgttcaaaaaatttctggcgaagatgtgtctgcacagaaccaagtgaaggcatctgttcaacgaaaaatacgacatagattgctgaagagtatccgggctttgaacctgttttggatgatatacttcccaagaagtcccctcttatagttgctaaatgtcataaccatctcaatatggtttttatgaacaacgtgcctttgtttttcagtttctgtgatggaccatacatgcacacctaaaaatgaacgctatagaaaatgttcaaaaaattttctggcgaagatgtgtctgcacagaaccaagtgaaggcatctgttcaacgaaaaatacggcaaagtattgctgaagagtatccgggtcttgaacctgttttggatgatatacttcccaagaagtcccctctaatagttgctaaatgtcagaaccatctcaatctggttcttgtgaacaacgtgccactgtttttcagtgtccgtgatggaccatacatgcccaccttgcgacttctccatctatatccaaatataatgaaaaagttacaagttgaccgtggtgcaattagatttgtcttggcgggtgcaaacataatgtgtcctggtcttacatctcctgggggtgttttggatgaggatgtaggggcagaatgtcctgtggccatcatggctgaaggaaaacagcatgctcttgctattggctttacaaaaatgtcagcaaaagacataaaagcaatcaataagggcattggggttgacaacttgcattatctcaatgatggtctttggaagatggagaagcttgattaaagatgtcgtggaagcttcagtgcttactaatgattgatgaattcctgtgtttctggaccttgatccagatcttaggaatcgtatgtgaacttgtggatttgttttgttataccatgtaaacagtgaagaaatgaattttgttgcatagagtgctctcttttagtaactatgtagatttcatgtaacatggaatacacactctgcgtgttgacaaatacgaagttttgcttatttttggactccaattgaatgttggaaccatgcacggaagtttatttaaacttgattatgccattagatctggtttcataccacagaattatctttagaccttaaacactctgcgtgtttgattgggggaaaaattggacgttgaaaaaaattgcatttattaggaatatttttgtatatcatacctttgaaagaactacaaatggagctccaacaactctgctctattaatgcctgcaatttaccaaccactatatgaaatggcccaggtaataggattgtatattgggtttgaaatgtttgacttatgagtttatcctcagtgattgtatatctttaaggagtgcggcacttgtgattttcagcactatgtcgtggaaagttaaggattttgtcattctttatgcctcctctcaatattaatttgtgaagcatttttcatttttgtaatttggatgttgaggctctagaatgttctagtaatagggtttagggtaaaacaagctagaaaatgtaattttcagcactgtccaggaaatttaaggattgtaattc

SEQ ID NO: 106917 - DNA, 1021 bp, Glycine max
  Clone ID: PAT_MRT3847_67561C.1
gggaggccacgcgtccggaaagagaatgtcgtcgacggtgctggaggtgacgcgggcggcacacgaggaagtggagcggttggagcggctgatagtgaaggagctccagaatgaccctgcctccaacaaagagcgcttgtatcagagtcaccgtgtgcgaaacatgatcgacaccattacttccaccactgaaaagcttattggggtatatgaagataacgacaatgcaaggaaggacgagattgctgcactcggaggccaaaccgccactggaattaacgtttttagcgccttttatgatagacttaaagagatacgagagtatcataggaagcacccagttgctcgtgttgttgacgccaatgacgattatgaaacacttctcaatgaggaacctcaaattgagtttagtggagaggaagcacttggtcgatacctagacttgcatgaattatattatcagtatgtcaattctaagtttggagagccaattgagtattctgcataccttgatgttttctcagacacagataagattccccgcaaaatgaaaatgaccaggcagtaccgagaatatttggcgaatcttttggagtatctgttatactttttccagcgtacagagcccctgcaagatcttgatcgaatgttgtcaaaggtaacaactgaatttgaagaaagttgggctgttggaaaggtacagggatgggaaaatgacaatcaggaaaatggacatgtacttgctgagcatgctaccattgatcttgattattatagtacagttgaagagctgatggaagtcggtcctgaaaggttaaaggaggcactggctgcgttggggctgaagactggtggtactgttcagcaacgtgcagagaggctcttactgacaaagcacacacctcttgaaaagtgggacaagtcaaagcttttgcttttgcaggatgcttctagtgaaaagaggaaacgcgaggaaattagaaaacacaatgaaatgttaaaggcttctgaaactggtgct

SEQ ID NO: 106918 - DNA, 566 bp, Glycine max
  Clone ID: PAT_MRT3847_67562C.1
tttctatttaggggggtagctttttttttttgaagggaaaaacaattttgacggggaaacctcttctaccttatgtgcctcttcctatgaaacaaaattacctggtggaccccttacttgcacccatttctttattgctgcccaacatcttggacttgcactcctggagggcgtaggcaccattcccaacaccatgaataaccaatgcttatctccaacctttctaaactcattatcgaaatgaagcgctggctttttcaacgagcccctgggctttccgagagcatgacagtgtttataaatcctaccttgcctatttccaagatatacgctgccatgacccactcctgctcctatgaccccctcggccttatctcttaagggagcaggccatctcctgctgtcctggggtgcattgcacccaaaacctcttgcaagggaaacgaacctggcattaccggaggaaccttgaccaagatggatgcgcttgggaggtagcttcctgccgtggacgccaacctgagccaaagccggatccagcactggcaccggttggcttccccggg

SEQ ID NO: 106919 - DNA, 151 bp, Glycine max
  Clone ID: PAT_MRT3847_67563C.1
tttttgtttggtaaattttgttgaggggaaaggatattagatttcagtgagaaaacaggcatagggcacaccgccaaaaaatcatactatattgagcatgggttgaaatgaggtgttgaggaagaatgagtgtacatctgtggctaaacaa

SEQ ID NO: 106920 - DNA, 1214 bp, Glycine max
  unsure (1)..(1214): unsure at all n locations
  Clone ID: PAT_MRT3847_67564C.1
actcgagccgtttcaatttcaatgtctctctctcagactctcacgataagtgacaacattagacgttgaattgaattttgatggcgcaacaatcgtcacctccacggcggcaaactcctccgccatcgcagtacctggaggtcaactgcagaagctccggcaagatacggcggtttgcggcgggcaccggcgcggggtttgcggtggcgctgatcaatcggaagctgaagggaacggtggtggctgcgtcgcacatagaagcagtgaaggatgggaaagaagaagaaccaatcgcttttggccccacttcgcttctttctaacttcggcgaaggttggaaactccaaactgttaccctcactgatctttcttcagaagtggggaatggacaatttcaacagatggcaatgcagaaaccaggactagttccaggtgtcccaggtcctgcaagggtgtccaatccaatcagctttgtatatcttgttaaaataatgtttgcttttattttgatttttgtacttgttgcaatttttactttgtttctcgataaccttcctgcattcatattgtttcttaagtcaataacctagtgtctttttgcttgaaatttatatatgcataaataaattgttattaaatatatagcctttctgttaaggactagaattcaaactatggcagacactgaactgtgagagcattgtgtctctcttgaacatttcaatatttcatattttagctgcacattaattttctaggggcatgttttagagtggttgtatagaagatgtcaatttatgggaacagtaatggattccagctcttaaggcttttctatcagagtgcaaattgggcatcattccaaaggtagaactatttcctgatgggctctatgcaatggtctagaagataaactcttattatgttgctagaaaacaatcctccagatttacatgcttcaaaattatgtcctatcattggaggattttggacaacaactgttaaatcagcagatttgtgtgatcataggacaagatattgtcctccatcaggtggtggagaaagctttcgatggtcaatgtgcatgaaagtcacgatttttgttgaaaatgtgaaaatattaagagaacgtacaaaagtttcatgaacttcaaacttgatattgaaagtgcttcagtcattatatcaagaagttgtctaccaatttcnngact

SEQ ID NO: 106921 - DNA, 644 bp, Glycine max
  unsure (1)..(644): unsure at all n locations
  Clone ID: PAT_MRT3847_67565C.1
aaattcgatcatagaaaatcaatttggatttcaatgcctctggctcaccgttgaattgaattttgatggctcaacaaccgtcaccatcgtcatcgcctccacggcggaaaactcctccgccaccgcagtacgtggaggtgaattgcagaagctccggcaagacacggcggtttgcggctggcaccgacgcggggtttgcggtggcgctgatcaatcggaagctgaagggaacgctggtggctgcgtcgcacatagaagcagtgaaggatgaagaagaaccaatcgcttttggccccacttcgcttctttctaacttcggcgaaggttggaaactccaaactgttacactcacggatctttcttcagaagtgggggatggacaatttcaacagatggcaatgcatacaccaggactagtttcaggtgtcccaagtcctgcaagcaggatatccaatccaatcagctntgtatatcttgttaaaataatgtttgcttttattttgatttttgtacttggtgcaatttttactttgtttctcgataaccttcctgcattcatattgtttcttaagtcaataacctagtaccttttttattgcttgaaatgtattatgtatatatgcattaaataaaatgttcaatct

SEQ ID NO: 106922 - DNA, 101 bp, Glycine max
  Clone ID: PAT_MRT3847_67566C.1
atttcactctttcactctccaactctcaatccgacacgatggaacgttaaccgttgcagaaaatcgcgatttcgggaccaaccctagcatccctcaaccag

SEQ ID NO: 106923 - DNA, 747 bp, Glycine max
  Clone ID: PAT_MRT3847_67567C.1
gtatgtttgcatgtatctgaagaaaaaatgagaattgggagagaagaagtggtggaagaagtgaagaggctgctatggttagcagtgcctctcttctcagttggaattttacaatacattcttcaagccatctctgtcatgtttattggccatcttgttaccctccctctttccggcgcttccatggcctcttccttcgcatcggccaccggcttcaacttattgttggggctagctactgcactggacacattttgtggtcaatcaaatggagcaggacaataccatatgcttggcatacacatgcagagatccatgcttgttgctttaatgacatgatcccaagtttcgttccttacggtattcaccggtgcattctcaagttcttggcaacgcgaaagattgtgttcccaatggtgctaactttaggaactgtacatgtgcttcaggttattttctgttggcttttggtttttaagtcggggcttgcaaacagaggagcagccttggccaattccatatcttattgggtaaatgcaatcttgatttctctgtatgtcaggttatcttctgcatgcaaacactcttggacaggtttttccaagatggccctgcacaaccttcttgatttccttaaactcggtgctccttcagctgctatgcactggtaaattcccttgcaaaatgatgtgatgatgcacttaactagattttgtagagttctgatgcagcatttctttttctttt

SEQ ID NO: 106924 - DNA, 407 bp, Glycine max
  Clone ID: PAT_MRT3847_67568C.1
gaattcggcacgaggctactcgaaaccacaacaaataatcgatcttcagaaaattgaggatattttagttaccagtatgaagggtgtcaatgaggacgtgaagaaaaagcatccaaacaattggtgataggtgaccaccggatcattaccattctaatatgaatactatagataacaaaatatttgttttatttttatttttcatggtaattttgtttcatcgtggtctcaacaactgtgatcatgtaatgttgaaaggcttttcgttgcattacttatttgtatgtatattgtatattagagataagatcagttattccaaatatctatttgtaatttcaccttgactatatgttccttgaagattattgtttaagaaaaaaaaaaaaaaaaaaaaaaaaaaaaaa

SEQ ID NO: 106925 - DNA, 227 bp, Glycine max
  Clone ID: PAT_MRT3847_67569C.1
ggcaacaaaggggtaaattccctgtcattcccaacactcaatgtgcaacaatgcaataataatcctaatagcctaattggggattttaccaagaaattttatattctctcttccctctttatattcataaaccacataagagttgtctgtcccagaaccccagacatggacttttcatatacatccaaactcttgcatgcgaatgatacacctaatggactgtccct

SEQ ID NO: 106926 - DNA, 194 bp, Glycine max
  unsure (1)..(194): unsure at all n locations
  Clone ID: PAT_MRT3847_6756C.1
acgtacgttgggtcctggatcggcggtaccatttcggtggtggttggttttggataagtacggtttttggtttggatggtaaaagtctgaaatttcaaaattcacaagcagccatagggttgtagtccatttcctttgctgctgangagggatgtctaaaattgcatttaatttataaggaagttttgcaaaaa

SEQ ID NO: 106927 - DNA, 962 bp, Glycine max
  Clone ID: PAT_MRT3847_67570C.1
gcgggcgctgcgccctccgcccttcgctcgtgtggtccgcttcacgcttcaaccacaagccatcttacttgacttgtctctgtctgtccatatataacattctattcgtacttcattttcattctcactccctcaaacagtcaaactttcatctttctcattcacttaacccaagtgtaaaaatggcagcattgaatatgtccactgtgagacttccaagagcttccttgtctggaacgacaccagctaggagatcttgtgctctcatcaagaatccatcatctttgaggtctgtgaagaacgtgtctaaagtatttggattgaaatcatcttcctttagagtgtcagcgatggcggtatataaagtgaagctgattggaccagacggtgaagagaatgaatttgaagcccctgatgacacttacattctggatgcagctgaaaatgctggagtggagctaccttactcatgcagagctggagcatgctctacttgtgctggccatgttgtttcaggctctgtggatcaagcagatcaatcctttcttgatgaccatcaaatcaaaaagggttaccttctgacatgtgtttcatacccgaaatcagattgtgtgattcacacccacaaggaggaagatctcgtttaagtggtggtggtgtgtgtcttgtgttagtttttctaagcttggatatgtgtcatggtagctagacatattgtgaaactctgttggtgttggtacaactttttgaatcgttctaaatttatgtgaactttaatatgtagccattagatcgattcattcaagaataaggctatgtttcgcccaatattatgttcaaccttaaaacttattttgaagttcaaaatataagctttaaaaataaaaagatagtggtgtcgagtacaagttgtttggcgattattgcttaaaaaaaaaaaaaaaaaaaaaactcgagactag

SEQ ID NO: 106928 - DNA, 466 bp, Glycine max
  Clone ID: PAT_MRT3847_67571C.1
aaacaaaacgggaaatccgggaaaatttgggagataaacataaaaaatcaaatggaccggggcaattctgaatacatgactgggggtcgcaaacaacaggtcctaaacccccaaatagaagcataagggtggccccttcacagtttgaataagggggaactttttcccccagggggggccaaaacaaaaaaaaacgaaccattttggttcagggtaatgtaacaaaacttttccccttttaactcggaaacaatttcattggtaacaaaaaaaaagccctcaattataaaaaggcctctccttcctaataattttccggtccttaagctccaacctccttatagtccttctaaaaagcagcaaggtcctcacgagccttaaaaaactcccctttttccattccctccccaacataccagggaacaaaagcccttttgggatacattaaataaaacttgggggcaag

SEQ ID NO: 106929 - DNA, 390 bp, Glycine max
  Clone ID: PAT_MRT3847_67572C.1
cggctcgagcggctcgagcggctcgagtgctctaaaaaataagccaggaagtcaaaacagaagtagttcgagtaccgagaaagatagtttgatgtcaaatgagaaaaacaatgcaaaagcattgcacaaatgtgattgcaaaatcactgaaatagacctgacatcaattgaggatgacagctctgagcaactcctgcctggggaagaaggaaatggttccagcaaagtcaatgccaagacaaatgagaaagagctgacgaagcaatctaataatgaacagcattctaatgttgtatctaagcaaccaaaagcaattaagactgtagtgacagctttaaaagatggaaaacttaaagagacaagttctccaataagaagcaatcgcataaa

SEQ ID NO: 106930 - DNA, 155 bp, Glycine max
  unsure (1)..(155): unsure at all n locations
  Clone ID: PAT_MRT3847_67573C.1
caaaattnatcatcttncttatntattctccgaaaatggttgatttacattggaaatcaaagatgccaagttccgacatgccttccagaactctaaaactctctctctncgacaacaagtccttaccctctttgcaacnaccctnnnncacaaca

SEQ ID NO: 106931 - DNA, 203 bp, Glycine max
  unsure (1)..(203): unsure at all n locations
  Clone ID: PAT_MRT3847_67574C.1
ggaattcggcacgagggtgctctgcatggttgtggtgagaattaaaaaacngggaaatggaactacctatattttaaagaaaattgtaggcttttttcatcttagataatttaggcaccgtcggtcatcccattctaaaagtttatgtatcaaaagaaaatatgaacttttacacattcacattgttttcttttaaaagcaag

SEQ ID NO: 106932 - DNA, 402 bp, Glycine max
  Clone ID: PAT_MRT3847_67575C.1
gttatgggttgccatgaattattttttcttataagagaaaaaaaacgcaatcctctaatgcatgctggcccccaataccatgttctcacgcctttccgtgctgtctctcacaacatagtgagtcaacccacactatgttcaagattccgtcaataatttctttacaatcctattcttatgtggatgcaatttagttcacagaaccacacaaaatgtggatgcaatttggtgatttcagtgtttatatctcccaacaagagagcatagaaagtcaaaagtatttcagtttcagcagcctcagttccttgtgcgactcgtgaagatagcttgtgaatcaaaaagcaatggcattattatgttatggcccccgagacaagagcaaatctgagatcagtctatgga

SEQ ID NO: 106933 - DNA, 449 bp, Glycine max
  Clone ID: PAT_MRT3847_67576C.1
ggtgttgtacaagtacaagttcaatttcaatgtattctctatgttccttgaatactctttgctagcatttggaggtctcgtttttccatgataaactgcaaacccatttatgttgaattttaggtttatcattagtgtttgcttggttgtgaatgatttatgtgagttctcttttggttctgcttgtgaggtcttaatttgaaatttgaaccaagttatggcatcttcccactgtgttgagcgtgacttgatatttgaattgagctatttttctcttaaagtcattgatgcaatgaaattgatttgagtggctagctattagctggtttgggaataacattttgtttccactcttttaatgactaatgtcacattccttgcgtagtacctgtgctgcaccctttatttttgggtagatgctgaatgctgcagtttgttaatattacctg

SEQ ID NO: 106934 - DNA, 146 bp, Glycine max
  Clone ID: PAT_MRT3847_67577C.1
agggagtggaatagtgcattagataatctagatactaagaattatggaggagtcagtaggaacagccaggcctaagtctagatggtaattgccagaaggctattgttctcatctatatgggcgcatataacggatatatatccaag

SEQ ID NO: 106935 - DNA, 243 bp, Glycine max
  Clone ID: PAT_MRT3847_67578C.1
aattcggctcgagcacagaaataccacatcacttttggtattttcggattgccatgatgtggtcactacaacaatggccttggctgatgataaaggtggtgaacatacatcaccattaccttcagacacggtaagcagatccaccctgaccaaccagaccgaggcaggacacatgcacggggtcaaacgccaaggaggtattatttttaaaaggaacactcacattgctggtatgaataaaaa

SEQ ID NO: 106936 - DNA, 254 bp, Glycine max
  unsure (1)..(254): unsure at all n locations
  Clone ID: PAT_MRT3847_67579C.1
ggttatgctgactacctcatgtcgttttcttccgcgtccacagtgtcccctggaaccactcttgccactccagntgcccctaagatagctgccttcagcagtgcgacatccgttgtngcttcagatagcaaaagtgcctaaagatatgccagaaagataaccagtccaagagctgtatcagcaacaacatcggtgttaaaagcggtgggaaaggaagcattgttggtgatactaatactaatggcatctctact

SEQ ID NO: 106937 - DNA, 176 bp, Glycine max
  Clone ID: PAT_MRT3847_6757C.1
aatgaccccgataaatatagttgacaaattgatgattttgaattcatacatgaagaatttgtcacctggtgtccatactaaaacagctctatatagttgacaaaacaaaagccatttctgccattgtagccctgaaagttagccatgtgctaaaatattgtccaagaatgaaaacg

SEQ ID NO: 106938 - DNA, 322 bp, Glycine max
  unsure (1)..(322): unsure at all n locations
  Clone ID: PAT_MRT3847_67580C.1
agganaannnnnnnnnnnnnttcnnnttgctaatcgctctgactgttgatgtcacgcgatgcatcacgctacgtaatgctggcgtcgttgaagaatgcgtagcggggagaccgcagatttctagctgcagagatacagtaaactcttggggcctaactttgaaacttatgtgcctataacttcttcttctaccttcttaagtatcatcggcatctccgatatcaccctgacgagcaaaggatgcgagttccacagagcgaccctaccgcgcggtggagcatggcttctgagtctacgacataccacagagcacatgatcttt

SEQ ID NO: 106939 - DNA, 515 bp, Glycine max
  Clone ID: PAT_MRT3847_67581C.1
acagtttgttcctatatatgaaaccaggccaatcaagaacgtgtatgggatggattttgaccacagctttgggctttggtttattgcctgctggctgaagccagatctgatgattgagagtggtgcttttaaagaacttctagactattataatttgtttggatcaactaaaatgttgagtctcgagggaaaaaatatgactttgtcatagttaatgactattccagatatacatgggtatatttccttgcacataaacatgagtatacttactggatagctgcaggtctttgactctttattgagcagaaaatttagcaagcagaaggtactaatgatcttatttttttcagctgtaaaccatttaaatccacaacaacaaggtatctttgcaaccaccctttggtgcatttggaatactggaaacaacaaactttagagagatgaagagcaaccaccctccatggcgcatctcttgggctcttcaatatctacacgaatggaagacatgtagg

SEQ ID NO: 106940 - DNA, 199 bp, Glycine max
  unsure (1)..(199): unsure at all n locations
  Clone ID: PAT_MRT3847_67582C.1
tacctctttccaacaatgatgcacttgctgaacttagaagcgctcagacatgggtccactctcccattgagatttgtgaatttgacacaacattgacatgttaagaaataatgaatattattaattacttaaaattgaccaaaaaaaaaaaaaaaaaaaaaaccgccncagcggccgctctagaggatccnagcttacg

SEQ ID NO: 106941 - DNA, 970 bp, Glycine max
  Clone ID: PAT_MRT3847_67583C.1
cccacgcgtcccacacgaccagcacccctactcaccgccatcccaatctctccgcgccctccatgttggagcggacactctcctcccgccgcgtcaactcctacgctgacgacgacgccgacgccgatgtagacgccgacgaatccaagactaagaagaaccaacacattctcttccgcatcaccaccagagcctccaattacctctcccgaatcgccggttccggctccttctacctcccctgcgtcaccatcctccttttcatcttcttcgctttctccttcctcttcacatctcgcggcttcgtctgcatctcctcttcctacacccccgtctctggcgccggcttcttcggcttcgatggcctcgactccgatttcggatccctcggcgtgccctgctgcagatcgaaacatggtaaatctgtggaatggacatcaaaagatttactcaaggggttagaagagtttgttcctatatatgaaacccggccaatcaagaacaacatgtatgggatgggttttgaccacagctttgggctttggtttattgcccgctggctgaagccagatctgatgatcgagagtggtgctttcaaaggacattcaacttgggttttgcggcaggctatgccagatacaccaattatttctctttcacctaggcatccagaaaagtacctgaaaaagggacctgcttatgttgacggtaactgcacgtattatgctgggaaggactttgtggattttgggagcgttgattattatttgtttggatcacctaaaatgttgagtcctccagggaaaaaatatgactttgtcatagttaatgactatttccagatatacatgggtatatttccttgcacataaacatgagtatacttactggatagctggaggtctttgactctttattgagcagaaaatttagcaaaggagaagggactactgatcctatttttttaagc

SEQ ID NO: 106942 - DNA, 1674 bp, Glycine max
  Clone ID: PAT_MRT3847_67584C.1
ctcaatgaatgcctatgtcagaactgctaaatacatgatgggtgtacataatgaattataagtattgatattttctcatgtttgatagagagcatatgcagcaagcacatctaggaaatatggctgagaatccgattcgtgtaacgatgattccatggtctgcctttggccacttgataccatttttcaaactttccatagccttagccaaagctggtgttcatgtctccttcatatccactcccaaaaacattcaaaggcttcccaaaattccttcgactttatctcatttggttcattttgtggaacttcctttaccatcattggacaatgatatcttgccagaaggtgctgaggccaccgtggacattccatttgaaaaacatgagtacttaaaggcagcattagataagctccaagatgctgtgaagcaatttgtggccaatcagttaccagattggataatctgtgatttcaatcctcactgggttggagacattgcccaggagtcagaaagttagacagtcttatcttctattttgacatttcctgcaacagcattcatagtaccaccaggtacaatagcgcgtaatttatctgcagaaagtctaacagctccaccagaaagggtgacatttccatcttcagaggcttttcgaatacacgaggcaatacatttctgtgctggtttcgacaaggtaaattcttccggggtaagtgattttgaaagggttataaagatacatgatgcctctaaagctgtgatatttcgtagctgctacgagattgaaggagaatatctgaatgcgtatcagaaactatttgagaagcctatgattccaattggtttattgcctgtagagagaggagttgttgatgggtgtagtgataacatattggatcaagtttttgagatagcatctaaaattgaggagtatgaattgccatttatatgggcactcagaaaaccaagttgggcaatcaatgatgaagatggtcttccggttgctcaattgccgtggtcatcggccggcgcgataaccaagttgggaaagcaatgatgggtattctttacctgttggttttattgaaaggacatctaaccgaggaagagtttgtgagggatggataccacaactagaaatattggcacattcatctattggaggatctttgtttcactctggctggggttctgtcattgaaaaccttcagtttgggaatacacttgttttattaccctttaatatagagcaacctcttaatgcaaggtttttggtggaaaagagattagccattgaagtgaaaagaaatgaagatggatcattcactagaaatgacattgccgcatcccttagacaagccatggtattggaggaaggaaagaagatcagaaataatacaagagaagctgctgcaattgtaggaaacttgaagctgcaccaggatcactacgtagctgcatttgtacagtttcttaagaatggaatcaggaaaccaatatgatgttgaagaggatcattactgtgtcttattttaggtttatcatcagtttgttgaataaagtcctactctttaagtcgtggttcaataattgcatctgttttctatcttgtaagggtaactaaagccaactcctgtttttgaattcaataagacactctctctgaaaaa

SEQ ID NO: 106943 - DNA, 195 bp, Glycine max
  Clone ID: PAT_MRT3847_67585C.1
gcgtacggctgccagaagacgacaaaggggatctggtttaaataataccatcgagtatgaaacgggaaagatatgcatacgatggtgtcattctctattgcgttggggagaaaaaatgtatgttactcccccgagaagaccttgggagagattttggctgcaattttattgagttaaaatattggttcaagaaaa

SEQ ID NO: 106944 - DNA, 141 bp, Glycine max
  Clone ID: PAT_MRT3847_67586C.1
gcgccccagttttccctatagaaattccgataagagcctggcagaataacgagcttagcctttttgtgtgtggagaggttgactcgccaaaaaattggacacaacataataccgggaaaaataaagtgtgaagcctggggc

SEQ ID NO: 106945 - DNA, 1235 bp, Glycine max
  Clone ID: PAT_MRT3847_67587C.1
gtcgacccacgcgtccgcattgttttgttccttctctctctctctctctcttctctcgttagggttttcacttttccttcttctttctcgggaaagtttctgtttggctgcccagaaaatctgtgctccactcagaaacattcacaaaacgggttttcgaggcgagcgagtgggtccgcatcggagtcccaaaacacacacacttctgccaatttatgagcacgagatcccgtaattcgatacaggagtaggggtttcgtgtatgtatgtatgtatggatcctgctctcaagctctgcgtcttgttactcattcttctcggattagtgaatggttcttttgcggaaaatgattatggacgctgcgaaagcgttgttaagagttgggcgcgttcttcgctcgatgaggaaatgacaaaagatgataagcacacattaagagatttgctgttttttctgcatgttcctcggacgcgtgggagaacctattttcactgttttttgaagaaattgtatcccagctatctggagtgtcctcgctcgtatgataagttgcgctttgatccaagtaaaccaaaatgcaggctgttagttacacatgatgactatagtataacgtccaaacttccaagggagagaacttctgttgttaccatacttagggatccagttgaccgtgtttttagtacttatgaattctcaatagaggttgcagctagatttttggtgcatccaaacttgacgtccgcaacaaagatggctttacgcctaagctctaagactaaaggagtaagcacactggatatctggccttggaagtatctggttccatggatgagggaagacctatttgctaggagagaagctaggtacagtaggggactgaatatcattgaaagcaatgattcttatgacatggaagattttgcaatgccattacaagaatacatcaatgatcctgtggctgtggatgttgtacataatggagccacattccaggttgcaggtttgacaaacaattcttatatagcagaagcacatgaagtgcgccattgtgtacagaaatataagactcttggtaaatatgtgctacaagttgcaaagaagagactggatgagatgttatatgttggtcttactgaggagcacagaaaatctgccacaatgtttgcaaatgtggttggtgctcaagtgatatcacaacttaatgcaccaaacactagcctggaaactactg

SEQ ID NO: 106946 - DNA, 233 bp, Glycine max
  Clone ID: PAT_MRT3847_67588C.1
acccacgcgtcctcccacacttgctcccactctttcaacttaatactttaaaataatttatatacaatacgataactgtaacttttaaacccccttatccaaacaacctaaatacacaacactcaccgcccattttcacatatcttaacacactattactttacaatgtacaatacctacatttacaaatcatttacctacataaatcatcgttaatatcaacccaactatat

SEQ ID NO: 106947 - DNA, 469 bp, Glycine max
  Clone ID: PAT_MRT3847_67589C.1
accagctttttcctagtttgtgtgtgctctttggctttctggtctctctctcccaccctccaaattcgcctcttttccctcttcttttgatctcagtgcacacctaaaagaaaaacaatggtggatcttcaaaccgtttgctgcatgtgcggcgacgttggtttcccagacaagctttttcgctgcaacaaatgccgcaatcgcttccagcactcgtattgtagcaactactacggagaattaccggagatagaactgtgtgattggtgccaaagcgaggagaaaaacttgagacatattggcaccaatttgaagaaaccggtggcggccggaaacgaggccggagccacccaccgttccgcatattccggcgaaaaaatgatcaagcagcatgatcatcatcatcatcatgaagagagtggttctgagaagggtaagagtcccacaccatcgctgcgacccggcacac

SEQ ID NO: 106948 - DNA, 238 bp, Glycine max
  Clone ID: PAT_MRT3847_6758C.1
ttggaaactttgttcattctgcagtcagtctccatctgcccaacttcccaagcacacccctttatttgcatgtgctattacatgaaaccgaaacacatcaaaatcaaagatgtgatctaattgatctataaatcaaacatttttattcttcaagcgttattttttgtaggctgtgtacaatgttatttgttatgatgataatccacaggtgagaactggaatggaactgtggaaagac

SEQ ID NO: 106949 - DNA, 258 bp, Glycine max
  Clone ID: PAT_MRT3847_67590C.1
cgctacaacgacaacaacagcgtctgccatcactgaggcacccagccgtcgtgcaccctgccacgctcttgctacagcagctgcttgcatccaacccacttgctctggcgaacgtagctgcataccagcaacaacaacagctgcaacagttctatgccacggctcagtcaactagccatggtgaaccctgccgtctacctacaactactttcatctagcccgctcgcggtgggcaatgcacctacgtacctacaacaa

SEQ ID NO: 106950 - DNA, 420 bp, Glycine max
  unsure (1)..(420): unsure at all n locations
  Clone ID: PAT_MRT3847_67591C.1
ttggggggccggnaaaaaccggnncgacccacgcggccgcagagcngaaaggaacanngggggagaggagaaacgggagggacagaaaacacnggcgcaaaacnaagcggccannaacgggacancngagaaaaagagaaanggggcgncgnccgaaagggggaaaaagaaaaaaggagcaannggggggaagagaaaagnngccnccggcagagaacaaaagagaagagggcacaccgaggnncaggaaccaggcgcacagcgaccagagaggggagaagcaacgggggagaacaaggaaaagagggcaggcgggacagaccacgagagggggacgaagaaaagcancncanaaaacacagacaaaaaggaaaacggaggagagacagcgcgggggaggagcaagcaaaacagacaaag

SEQ ID NO: 106951 - DNA, 150 bp, Glycine max
  unsure (1)..(150): unsure at all n locations
  Clone ID: PAT_MRT3847_67592C.1
agattccgatgcagcagaggtgatggganggggaggaacatggtgtcacaaggtgcaaaatgtgtgcatgcttgtctacaacatgacgtccctggtatggatgttagtggaatctctggcaatgtctggtcggacaagacagtcgcagcc

SEQ ID NO: 106952 - DNA, 318 bp, Glycine max
  Clone ID: PAT_MRT3847_67593C.1
gaggcatggaggaagcaattcatgaagctcctcatggtgccatagagatatagtcagcctcagtggatggacttggcccctaatgcaggatgttctagttactattgatgcgcatgctttactcctaggaatctgtgccgatgacctattgcgttagaaacccacaatgctctctagcgctgataggtgcatgggcaacactgccttttgcttagggcacttcccggagcgagaagagagtgcctctagctataggggagaggactctggcgcaaacaatgcaatatctatgaatatgcccaatgctgatactttcat

SEQ ID NO: 106953 - DNA, 503 bp, Glycine max
  Clone ID: PAT_MRT3847_67594C.1
gggaccacttcaaaccttagcatatcctaccatattggcacaaccccatcatcatcatcatcatccatggactggttctcttggctatccagaaccactcttgaaccttccttaatctacgactatggcctcacctttgcccgcaacgagctccaattggaagatgcttgctacttcaaccacgagtttcttcagagcatgggaatctcaattgccaagcacaggctagagattctcaagcttgtgaagaaacaagaaggaggaggagcagcacggcccaataagaagctctctggggtcatcaaaaagtgcctaaggaagtgcatgaacaagtttgttgtttctcatgatcatcatgcagtcaaacacatgccatgctccatggtgaatgtgtcagtgccgtcaccactaccaccaccaccacatgagattagttggtaccatcaagggaaattaaaagggtcacttgttgaagaagcaaccagggagtgaggaacttaagg

SEQ ID NO: 106954 - DNA, 354 bp, Glycine max
  Clone ID: PAT_MRT3847_67595C.1
gcatcactttcatatgacaacccagccggcggaggctgcaatacaggatgcacaatgtcatgggctattacacacagaatcactggacgtggagggccctgaaaacaccaaatgaagggtcacagcctcaaaagggtcattcagtgacataagcgaagatgtccggaacatggggaacacacgcgcagatgcgaccatggatactgagaaattaggatgacagacagtgaccagaggacacaccaactggggaaccatactggtggagggcttaaacacgagcccgaacagtactaggggtagcaccagcacactgagggaaatcattgttcgctctaatggcagccccaaaac

SEQ ID NO: 106955 - DNA, 341 bp, Glycine max
  Clone ID: PAT_MRT3847_67596C.1
aaaaaaaaatttgagccccccctttttccttcctttatgaacccaactcaagttcagaagcaaccaaaagaaccatttgaggtgttcatggcaaggggaacacttttgggaggaaaaacccggggggggttaagccacaagggaagaggggtgcctgggttttttctatcaccagggggccccacaggaaggcattttttttatgggaccaaccctttcccgaagggttgggggtccgcttgcaccgttagcttggatattgctggagtctcaactgcactagagggggcagccaggcccaaatggccactccccatggaggaagaaaggcctggcccccg

SEQ ID NO: 106956 - DNA, 274 bp, Glycine max
  Clone ID: PAT_MRT3847_67597C.1
atataattctgatactggagacttttagagaccgacatgggatgcaaagacgggggtgcgtggcaagtgttgagcaaactgggcacatattatgacccgacaagatatatgctcttctaggaatataagctgtcatgatcccagatgccgattggtttcagcctatgatccacctaagccttgcgctggatgagaataagaactgtccatactttaattggaacggtgactgatacaacacaactggggatttagcattgaaaactctgactga

SEQ ID NO: 106957 - DNA, 224 bp, Glycine max
  unsure (1)..(224): unsure at all n locations
  Clone ID: PAT_MRT3847_67598C.1
acaaaaaaccatatttttttcaacccaaaaaaaaacaaaaggaaagttaattttctattgttggtgcggcccactcctaaaaagnnccacctgggatcttgtatatttctcaatctaaaattgcacttcccaattacacacccttgaggaaccttctctcccctcctgttccatttggcaattcttttgacataatgcaatttttataacccatcccatatttc

SEQ ID NO: 106958 - DNA, 305 bp, Glycine max
  Clone ID: PAT_MRT3847_67599C.1
ggaaaaaaatattttttccaaacctgccctcgagggattaagtcctttggggaaacacaaaattggagtcataatttgacccaaggggttaaggggttttaacaacctttggggggggcttgcattcctttttttcacataggtttaaaaaaccagggatataaaattagcgatggtaaaaaagaaatctttaccttaaacaataataaactggcccaaaattccacccgtaaaaagtattgctaatcttttggcaactataaaacagggtcaaaaggagagcctttttataatattttggagcg

SEQ ID NO: 106959 - DNA, 434 bp, Glycine max
  Clone ID: PAT_MRT3847_6759C.1
aaatccccaacaagattaaacttgccgtaaaaaaaaggaaaagaacctatattaactctaactatgaatgagtaatccatactttgggatccccaatctcaaggaccatgggttccatgtttatccattccctttttgaccttccgacttcaacttttaacaacttcccacggcctttaagattcctaccattcccaccctgggtgactttaaaacaaagagacgcgagctttatcccagaatttaaacttaaacttttgcttccccctgaccaaacaggatccaaagacaaacgacctttgtgggccaaatttttacggggtttggccaacttaaaaaaatgtgccgagaaagctcttgtaaaagaaccctaaattgtccggtcctaaattcgctagagcataactctaaagaggttttgggattaaaagaag

SEQ ID NO: 106960 - DNA, 200 bp, Glycine max
  Clone ID: PAT_MRT3847_675C.1
cttggtcttggctacagcctgagtgaagaatttcctactgaatgtaccaagttccagttattaaggggggaaaagtttcaaacagggaaaaatggaaaaaaaaaagaaaaaaaatcactaaaaactcccataaatcttgtttctggcactttagaaaaactgcaaaaaatacataataaagaatatatatatatatctac

SEQ ID NO: 106961 - DNA, 393 bp, Glycine max
  unsure (1)..(393): unsure at all n locations
  Clone ID: PAT_MRT3847_67600C.1
tntnnnnnnnnnnnnaaaaataattaaaatatggggggagggttaaccccccctgcaacccccaagggttgaaacctccaaaaggcctgcttggggttgccctttaccctcccaagggggcccaaggggttttccccctgttaaaacccccccattttttttaacaaaaaaaaaaagcggccccgtgggtccccccggaattttcggcccggtccctgggggggacccatttttcctttttggggggggttttaaagctgggggtattcttgggcataggtttttcctggggaaaattgttttcccctcaaatttccacacaaatttcgacccggaaactttaaggttaaagccgggggggccttttggggggcctccccccctttttttggg

SEQ ID NO: 106962 - DNA, 748 bp, Glycine max
  Clone ID: PAT_MRT3847_67601C.1
cagcatgtggtggcctttctggagaaaaggggttctgcattttcatcttcttccactgctgatgaagttacagaaggaatcgatggcactggcctcactgctattgttactggggctaccagtggtattggtgctgagactactcgtgtacttgccatgcgtggagtccatgtaattatgggtgtgagaaatatgaatgccgcaaaagatgttaaaggagcaatacttaaggagattcctgctgctaaagttgatgctatggaattagatcttagttcaatggcatctgttcgaaaatttgcatcagagttcatttcatctggtcttccattaaacattctcataaacaatgcaggagtttttggaacccctttcacactgtctacagacgccattgaactacaatttgccacaaatcatatgggtcatttcctattaacaaatctgttgttagatactatgaagaaaacaacacaagaaagcaagaagcaaggaagaattgttaatatctcttcaatacttcatcagttaacatttcgtggaggaatcccttttgataaaattaatgacccatcaagctaccacaattggcttgcatatggacaatcaaagcttgctaacattttacatgccaatgaacttgccagacgtcttaagcaagatggggtagatattacggctaattctcttcatccgggagctattgtcaccaatatttttcgtcacactagtgtactggctggtataa

SEQ ID NO: 106963 - DNA, 261 bp, Glycine max
  Clone ID: PAT_MRT3847_67602C.1
gccgaattcccgtgcccacgcgtcgtatcctaattgggcttgatgtctatgcattgcaacatgactacatagggtgcggaatcccaatggacggagcttacaactgctctgggtggaaaacctatataacttgagaacagctgagttgcctctggtgggttcagaggaaatagttgacttgttggaaggtgaaacatactgtgtagtgagcccttgaggtgggcaaaggtcttgtgcatagggactagggctgttgttttc

SEQ ID NO: 106964 - DNA, 316 bp, Glycine max
  unsure (1)..(316): unsure at all n locations
  Clone ID: PAT_MRT3847_67603C.1
gattgtcataatctgaagatgcgtgtaataattgttgctgtcggttcatacttgtgttgtggatgtattattgtgtatcacatgtagtcttggttattaaatgttgataagaatagtattccattcgagatggaaaagtttgtgagaaatatattaccagcaggtatttctggnaaaaaaaaaaaaaaaaaaaaaaaaaaaaaaataaaaaaaaaaaaaaaaaaaaaaaaaaaaaaaaaaaaaaaataantnnntnttttaatataaaaaaaaaaaaggggggccccccctttgggggcttttccccccggaaatt

SEQ ID NO: 106965 - DNA, 981 bp, Glycine max
  Clone ID: PAT_MRT3847_67604C.1
cctagcgctgggtgaacgcgttttaaacgtgattatttcattgcataatagatttttgatgaggcggtgaaagactgaaaggcaaaatctttttgaacagacgaaggaaaaaaacgcagtgatcacgagcagacatgtatcatccaacaagaggtggcgttcgtggtggtcgagatcaattcacttgggaggatgtgaaagctgataagcatagggagaactatcttggtcacagtatcaaggctcctgttggaagatggcagaaagggaaagatcttttctggtataccagggataaaaagtcccaaaatgcagaaatggaggctgcaaaagaagagataaaaagaattaaggaagaagaggagcaggcaatgagggaagctcttggcttagctcccaagcgttctaaccatcctcaaggtaaccgtcttgataaacatgagttttcagaactggtaaagcgggggtctacagcagaggacttaggtgcaggtcatgctgaagctgcaagggttcaaggtcttggttttgcaagagaaccacgcccttgggaagaatccggttcttctaagctttcacttagtgacacaccagctgaggtggaaaatgtatctatgccaaatcaaccagcaccaaagactgaagatgattcagaagatgaaagtagaagaaagagaagacgtgaggagaggaaggaggagaaacgtgaaaagtgtgtgaagcatccttctcgtgaggataggaagcaagagaagcgagagaaacatgagaagcggcattcgcgtgattcagatgacaggaagagacacaagaaagataaggagaggagaagacatgattcagattgaatataatactctatgggggttttctcatcacctaatgtgaattagcatgtttatttctattttcataactcaacatggatggtgtatcttggtttttcaaatttggaattagtgatgaagtgaaatgaagccc

SEQ ID NO: 106966 - DNA, 296 bp, Glycine max
  unsure (1)..(296): unsure at all n locations
  Clone ID: PAT_MRT3847_67605C.1
anaactttcggaaagattttaatccaattggaaatnttaaaaatgactngggnataaactnaagantnncaattatngaaatggaataggtaaaccaattcanttggattgggncgaatgggcatcaaaaaaatggagtactaactcccatgtctnanntattantgaattaaccgntcaacttgctntgntatcgaacatntctttttganttcaaaaattttccggaaaaaatttgaatcattntnatatgcgaatcaatccnacnacttcnggtcctgaggtttctgcgcttg

SEQ ID NO: 106967 - DNA, 371 bp, Glycine max
  Clone ID: PAT_MRT3847_67606C.1
cgaaatcccgggggcgtcacacgcgcgcgggtaggcaaccgacgacgcaaggggacgaccgaaggaggattacaggagaaggcgccggatagccacaggaacccccgaacaaacagtcggagaaacaagacagaaagcgagccgacacaaaacacgggccaacagcgatatacggtagagaaatgactgacggcggcaaaaaaagacagggggagggcgatcgagctaaagacacaaacgagggaaatataaacacggaagcttcacagacacataaagggggcaatacaaatgagaacggcgaaagcagacatctggagcaggcagtgaaaggcgaagaaacacgggccggaaagactggagagaccacg

SEQ ID NO: 106968 - DNA, 274 bp, Glycine max
  Clone ID: PAT_MRT3847_67607C.1
gttctacatgtctacaccagtagaatactaccggtctctaccacctgtgagcaaggcctatggagtggcctgtttaatgactactgctgcattttatctgcaattctatgatgcatggaacatagcacttgattatggctcagtgtttaaacgccttcaagtttggaggcttatcacaaatttcttctttcttggcccgttttcatttccatttgcaatccgtctgataataatagcaaaatatggtgtttcattggaaagagggccctttgac

SEQ ID NO: 106969 - DNA, 1040 bp, Glycine max
  Clone ID: PAT_MRT3847_67608C.1
ccacgcgtccgaaatcatttctcctcacaaacagccacgaggatcatcgattaaccaccacgcgcttcacagttcattcattgatattctctcacgatgacaacgagttcgcgaagcgcgtgggaaatttgctgagcgtggcggcacaagacttcaaacttgagttaaaactagcgtcacgttcggctcaggcggagatcactgccgtgtattctctggccaagggtttcaccgacgctctctcgccggattccgtcgcgctcggtgatctctgacgggtgggcgagcgcgaacgcggacgcgtgggcaaagtgccagctggcacagcttcgcgtgggtcccaccatcgttttatatctgtacgatgctcccaccgtgacccctttactcaagagcttgttaattccaaggagcgtgagttaattgttccaggaccccacactgttcgatcgtgtgatctcaggatcgaacagttgaggcgacgccacgtcagtgcacgcgccgtagccgagtcgagaaagtgtgtggctcgcaacgatgtgtctggcgcgcttcagttgctatcatcggctcgagcctctgtgagccgcgaacagggtgatgagtgcttgcgctggctcgaagccaaacaagccgagctgaggaaccaaaagttgagaagtagtaataataattgcttggaggaaaagggggagccgcttacgccgatgtcggcttggagagtagctgagagactggctaaagtggctattatgagaaagtctatgaacagagtcagcgatttacatggcttcgaggatgccagattttaaatgttttaagaattaagaaaggatactggatgggtgaattcacgaaacatttgggagcttgtattttgttgatgactgaattatataagcatagctatagttaccgcactttagttagcttggcatgaaaatattaagaagttatggctctaatcatgaaacctgtgcacaaaactcatcactatacctcatttcttggaaagattaagccatatctgcaggattggg

SEQ ID NO: 106970 - DNA, 2781 bp, Glycine max
  unsure (1)..(2781): unsure at all n locations
  Clone ID: PAT_MRT3847_67609C.1
tccggaattttcccgcggtcgaccccacgcccgtccaccactttcaagtgcacaagcttttccccattgcaacccgtctccacaaaacaaaaccatcaaaatcctcagctagtgagtgagaaaactcagaaatatggtttcgggatggagaaggacgtttcgcacatccaataccattccccaaaacacgcaagaaccagaaaattgtaattattgttacgacaacaacaacatcaattcaagtcccaaaatcacttccaccaatttctcatcatcaattcccaccctccattcccgaaccaattcaccactttccaaacacaataataataatgcaagaactccctctcccaccaaacgcaatacccccgtgtcgtttcatcaatccactccctcttccccaaactcaccctcaaccttctctcttctcaaatccaccttacgcttatccaaaggctcatgcgaaatctgcatgcggagtgtgaaaaccggcgaaggaaaagcgattttcactgcggagtgttctcacgtctttcacttcccatgcctagcaggtcacgtgaaaaaacaccgaatggtcacgtgccctgtgtgcaacgctaactggaaacaactgcagcaaaacgcagacgaaaacaaaggaaacgcagaactcaaaacgacgaggtcgtttaagctccacaactacgacgacgacgagcctctcatgtcgcccacgtcggtctcgcgtttcaatccgattcccgaatctagtgagaacgaagaagaagaagatgaagaacaaaacgacgaagaaacaaatttcaatgtgtcgtcgatgatcagaaccaaaaacatcgacgcgttcttctcgccggaggctgcggttgtggcttccaaccggagttccgagacgtacgttgcggtgttgaatgtgaagtctcagccgcgtaacgcggcggcgaatcggccgccggcggatctcgtcgcggtgatcgacgtcggagggagtgtttccggcgaagagtatcggatgctgaagcgctcgatgcaggttgttatctcgtcgctcggctccgctgatcgtctctctgtcgtcgcattctccggcggatcgaaacggctgtttcccctgcggaggatgaccggccgcggccagatggcggcgcggcgagtagtcgacgcgctttccaccgttgagctccgccgcgatggaacggcggcgaggaacaacgcgctgaagaaagccgcgagggttctggaagatcggcggcagaagaacaccgtcgcgaaaatcattctcctcacaaacagccacgaggatcagcgattatcctccacgcgcttcgacattcattcactgagatactcttacgatggcgcgtgtaaccacgcgcaacacgaccacgagttagcgaagcgcgtgggcaatttgttgagcgtggcggcacaggacttcaaactcgagttaaaactcacgtctcgctcggctccggcggagatctccgccgtgtattctctggccaagggttgcaccgacgctctctcgccggaatccgtcgcgctcggcgatctctacgcggcggaggggagagaaattctagtggagttgaaagtgccagctggcacagcttcgcgtgggtcccaccaacgtgttatatccgtacggtgttcccatcgtgaccccttcactcgagagcttgttatttccaaggagcgtgagttaattgttccaggaccccgcacggttcgatcatgcgaccccagaatcgaacagttgagacgttgccaggtcagcgctcgcgccgtagccgagtcgagaaggttgatggctcgtaacgacgtgtctggcgcgcttgagttgctatcctcggctcgagcatctgtgagccgcgaacagggtgatgagtgcttgcgctggctcgaatccgaacaagccgagctgaggagccaaaagttaagaagtagttgtaataataattgcttcgatgaaaagggggagccacttacgccgatgtcggcttggagagtagctgagagactggctaaagtggctattatgagaaagtctatgaacagagtcagtgacttgcatggcttcgaggatgccagattttaaatgtattttttctctttttttcagtatagttctaaattttgtagtttgtaaagggagaaaataaagtgtcaataaaatttttttccgatttatgctcaaaaaaaaaaaaaaaaaaaaaggatactgaatgggtgaattcacggcacatttgggagcttgtattttgttgatgcctgaattatgtaagcatagctatagttaccgcactttagttagctaggcatgaaaatattaagaagttatggctctaatcatgaaacctgtgcacaaaactcatcactatacctcatttcttggaaagattaagcaatatctgcaggattgggaagtctggatatctcatacttaaggaaatgaaatgcagttgcagattggttggctaacaatagaggcaaatttagtgtaggggtttgttttaaaaacaatttactaaataaggtctctttttgtaacgcgctggcaatgacgggagcgtggatgtcgctattggcagcaacggggcaaagagagaggaaagagncgcccttggtaaagaaaaaacagggagagaggagagagacccgtcattggcactggcgagacatgccaacgtggacaatcctgtcattggatttgcggcacacatgattggtgtgtgataaaattacccgcattgatagaagaattggaagcgctaattagag

SEQ ID NO: 106971 - DNA, 281 bp, Glycine max
  Clone ID: PAT_MRT3847_6760C.1
tggccagcctgctacgcatggtcaaacgaaaacccacaggagacctggagctgttgcaactggtgatattggcagagtctggcctggaactaaaatgcctggaaaaatgggaaacatatacaggacagaatatggactgaaagtgtggagaataaacacaaagcacaacataatctatgtaaatggctctgtacctggacataaaaattgcttagtaaaggtcaaagattctaaactgtctgcatataaggatctcggtaaaaatctaccattccctacat

SEQ ID NO: 106972 - DNA, 349 bp, Glycine max
  Clone ID: PAT_MRT3847_67610C.1
tgagcatcgtctagctatctcgatcgaactgtccaaggtcctgtcacttctttaacatgcaccagccccgccataagtgcaggcacaccagccacttctagccgccagctataacttttgtcggggcatcatagtatggccccgctgccacccgataatccatgcagtggataggccgaaaggcattaataactacgtacaataggcgtgcgcgccgacattaggagcgtattgtattgctattaatacgttgcggcacaacaggcattagatgtgttatattagtaacgttaaccattgttaaaacacatgcatatggtcccagcagttattccagccgtaccataaa

SEQ ID NO: 106973 - DNA, 423 bp, Glycine max
  Clone ID: PAT_MRT3847_67611C.1
agaagccagcctgcaagtaaggctggttttgttggatatataggttcccttctaagattaatatcttgttaagagaaatatattcacagaccatcgataacttctatacgcagtatctgtcatgcacatcaagaatttatagccattcatctagtaaattagaaaaaaaacgtatccctattcctccggtcgaaagtgaaaaattaatctttctcaacatatattcttttagacttgtaaatttgataattaaaccctaatcatattttagtcataaagtacttaaaagatttatgattatgtttgataagatattttattgagtttttaattttttttaagtaactgaaaaatttatttgattatttaataaataatttttttagtgacttctaacataaatactatattctaattttttta

SEQ ID NO: 106974 - DNA, 1192 bp, Glycine max
  unsure (1)..(1192): unsure at all n locations
  Clone ID: PAT_MRT3847_67612C.1
ctcacgcgtccgcccacgcgtccgggtagacacaggtcaaggagtatatctaggtctccagaggctcaaggtccctctctttctgctgaaaggattcgccgttctccacgacgacgatctatttctcctcaaaggcattccccacgacgttctcctcataggaggataccttattcaagaagatctagatctccttctcctgaacgacgtagaatgcattctccagtccatcgtagatcaccatcttttcgacgacgtagatcaccttctcctgttcgacgacatagatcgccttctcctgtgcgacgacgtagatcgccttctcctgtgcgacgacgtagatcgccttctcctgtgcgacgacgtagatcgccttctcctgtgcgacgacgtagatcgccttctcctgtgcgacgacgtagatcaccttctccagtgcgtcggcgtagatcaccttctccagtgcgccgacgtagatcaccttcccctgggcgccgacatagatcaccttcccctgggcgtcgacacagatcaccttcttctgggcgctgtcatagatcaccatcaccgcttgggcaacggaggtcactctcacctagacgacgaagatcacttgttactcggcataggtcaccttcaccagtacgccgaataccgccaaccaatgtgcagaatagatcagactcccccatgcaatccccctcccacatacgacaaagaacagaatccgtgactcgtcaaccctctagtcctctggggtcggcaataagagataaatgtggcaaagcttcacactataaatcacaagattcaatgtccacacctgagaagtctccaattcaatctgtatctcaagaagcaaggagtgagaccagcagtgaaggtcgaagtcctcatgagagccctatgaaacaaagaagagataagttgtccaatgaaataaacacgaatcctctgaagaaacaaagaacccaaagacctagccgtgacagcccagatacaagagatgaagcagaagaaacgcactattccagagaaagcagagatccaaatatgaattcatcacanaagatatcaaaacatttccctggtagtaagcgaaaaggttcacctgcataatatcgtcacgaggagttctcttcttgaagggtgtcaggtcatccagcttctgaacatcattatgataacaatg

SEQ ID NO: 106975 - DNA, 3659 bp, Glycine max
  Clone ID: PAT_MRT3847_67613C.1
gaatcatcactatgatcctcatcagaagatgcatactttttctcagaccttttatgccttttcctatcctttccctcccgtctatgcttaccactatcctcagaaacagaatcatatgaagcactgtgattgacacgatcaccttttccaactaaatcttgagtggcttcggatttgtggtgtcgaccactacttttggcatagtttgaacgggattggtccttgtcatctgattttttaacatctacagcataagattcttgaggcttcttcctggaaaaagtttctttgttgattgatgacttttgagcaggaaattcattgccctgtctggaagatttatcacgttttatctcccagcctttcttactccaatcatcgttatcataatgttcagaagctgtatgacctgacaccctttcaggagagaaatcctcatgacgaaattttgcaggtgaaccttttcgcttactgatgggggaatgttttgatatcttttgtgatgaattcatttttggatctctgctttctctggaatagtatgtttcttctgccgcggagtttagttatgattttgtgttagcgtacaggacagagccgaagaggaggataaaagaggagaagaagcggcggaaggaggagatgcgccgaagacgggaagggaagcgaggcagaagggaagaacggcgtgcagagaagctgaaaatgaagagtaaaacagacgatatttcagatgatgaggaagctaaacaaatgggttatcatcaaagtgatagtgaagatgagcaaaagaagcttgagattgaattgcggaacaaggctcttgaatccctcaaagcaaagaggggcgtgaataactacgcccgccttccgcagtcgacctctggagctggcttctcttctccaactcagtgtcgagaataagaagttcagaacccatccatcttctatcccttatatatatcgctgtatcggcgcgttccatagcttgaactaaagtgctgttccgaacctccgcgcgtagattcacacgtgcaatctccgctacacactcttctctccgttcggtaacgattggcatcagaagatgtcgggcggtttctttcgaggcacatcggcggatcaagacactcggttttcgaacaagcaagcgaagctgatgaaatcgcagaagtttgcaccggaactggagcatctggtggacatgacgaaggtgaatatggaagtaattaagccttggatcaccaggtgaccgagcttcttgggtttgaagatgaagtgcttattaacttcatacacggtcttctggatgcagtgaatgggaaagcatatactaaaaaatgcatcaaatccaagttttaagttggtaagagcaaggagcaggttttttatgctttaaaaacttattgggaaatatcttctcacattcacctgcagtttccacttcgcctcatcgaggctcaccttcaaggtcaatgagcaaatcattttcaaattctcgaagttattcatggtggtagacacaggtcaaggagttatatctagcagaggctctgaggcgctctgttcttttgaaagatgattcgtcattctccacgacgacggtctatttctcctcacaggcattcaccacgacgttctccttataggaggataccttattcaagaagatctagatctccttctcctgtacgacgtagaatgcattctccagttcatcgtagatcaccatcttttcgacgacgtagatcaccttctcttgtgcgacggcgtagaccaccttctccagtacgtcgacgtagatcaccttcccctgtgcgtcggcgtagatcaccttcccctgggcgccgacgtagatcaccttcccccgggcctcgacacagatcaccttctcccgggcctcgacacaaatcaccttctcctgggcgccatcatagatcaccatcacctcttggacaacggaggtcactctcacctagacgacgaagatcacttgttactcggcataggtcaccttcaccagtacgccgaataccaccaaccaatgtgcagaatagatcagactcccccatgcaatccccctcccccataccctgtctggaactgctaaattaagtagtgatagttttgacaaggttttttctttcaaaacagaatccgtgactcgtcaaccctctagtcctctggggtcggcaataagagataaatgtggcaaagcttcacactataaatcacaagattcaatgtccacacctgagaagtctccaattcaatctgtatctcaagaagcaaggagtgagaccagcagtgaaggtcgaagtcctcatgagagccctatgaaacaaagaagagataagttgtccaatgaaataaacacgaatcctctgaagaaacaaagaacccaaagacctagccgtgacagcccagatacaagagatgaagcagaagaaacgcactattccagagatagcagagatccaaaaatgaattcatcacaaaagatatcaaaacatttcccctgttagtaagctgaaaaggttcacctgcaaaatatcgtcacgaggagttctctcctgaaatggtttcaggttatccagcttctgaacatcattatgataataatgattggtgtaagaaatgtcaggtgataattcgtgttatatcttccggaaatggcaatgaatttcctgttcaaaagtcatcaatgaacaaagaaactttttccagggagaagcctcaagaatcttatgctgtagatattaaaaaatcagatgtcaaggaccaatcccattcaaactatgccaaaagcagttatcggcatcacaaatccgaaaccactcaagatttagttggaaaaggtgatcgtgtcaatcacaatgcttcacatgattctgtttctgaggatagtggtaagcatagacgggagggaaaggataggaaaaggcataaaaggtctgagaaaaagtatacatcttctgatgaggattatagtgatgattctgagttagaggacaggaaagaggctaagaggaggagaaaagaggagaagaagctgcagaaggaggagaagcgtcgaagatgtgaagagaagcgacgcagaagggaagaacggcgtgcggagaagctgaaaatgaagagtaaaacagatgatatttcaggtgatgaggaggctaaacgaatggattatcatcaaagtgatagtgtagttacaccatctgagcaaaagaagcttgagattgaattgcggaacaaggctcttgaatccctcaaagcaaagaagggcatgaataactaaatgcatcacatccaagttttatgttgttttatgctttaaaaacttattgagaaatatcttagcttgtttaagaaacttggttttgcaaatgttatgtttatttattcatcggtaaatgtttgatgtcatctatctttaatgctggcagcggaaatggatagatgatgctttctgagtaaatctgttgagtacaactctatgcagacattgtcctatatttactggtaatatttgtcttccccttagttgggaatttcatgttttaaaaaaaaaaaaaaaaaaaaaaaaaaaaaaaaaaaagaaaaaaaaaaaaaaaaaaaaaaaaaaaaaaaaaaaaaaaaaaaaaaaaaaaaaaaaaaaattt

SEQ ID NO: 106976 - DNA, 400 bp, Glycine max
  Clone ID: PAT_MRT3847_67614C.1
agccttataaaaaggaagttaataataaggatttcagaaggagaaagaaatcattctacttggtttcatatatagagacctatttggccctaccttttttaaacatggatcgatgttggggggggaatacctgaaaaagggcaaaattttaaaaaaggggaccccccctttgaaaggtccttctccatctcggccacttgtttaaggggccttcacctatcaaaaacccatctttcatttttatcatactagctagctattatctcctatcaaccccaaaaagggggcctagtagctagctagccctcccaagtagacaaagactagatggagggtcctttggcaggggcaattgatagagggggtcccaccagctttagaacaactagggttatttggg

SEQ ID NO: 106977 - DNA, 995 bp, Glycine max
  unsure (1)..(995): unsure at all n locations
  Clone ID: PAT_MRT3847_67615C.1
cggcgtagatcaccttcccctgggcgccgacgtagatcaccttcccccgggcctcgacacagatcaccttctggggggcctcgacacaaatcaccggctcctgggcgccatcatagatcaccatcacctcttggacaacggaggtcactctcacctagacgacgaagatcacttgttactcggcataggtcaccttcactagtacgccgaataccaccaaccaatgtgcggagaagatcagactcccccatgcaatccccctcccccatacgacaaaggtatggtagtagaactccttcactctctccatctccattgcaacgtagatcacctattcctagtaagcaaagatctcccaatatctccccacagaggtctcctcaagatgaacagagttctcaatctccaatacggtgtgtatctccatctccaattaggaaaaattctccaagacaccaaaaaagtcccttgcattcttctatggggagagtcagaacagaatccgtgactcgtcaaccctctagtcctctggggtcggcaataagagataaatgtggcaaagcttcacactataaatcacaagattcaatgtccacacctgagaagtctccaattcaatctgtatctcaagaagcaaggagtgagaccagcagtgaaggtcgaagtcctcatgagagccctatgaaacaaagaagagataagttgtccaatgaaataaacacgaatcctctgaagaaacaaagaacccaaagacctagccgtgacagcccagatacaagagatgaagcagaagaaacgcactattccagagaaagcagagatccaaaaatgaattcatcacanaagatatcaaaacatttccctgttagtaagcgaaaaggttcacctgcaaaatatcgtcacgaggagttctctcctgaagggtgtcaggcatccagcttctgacatcattatgatacaatgattggagaagaaaggcaggagatattgcgtga

SEQ ID NO: 106978 - DNA, 414 bp, Glycine max
  Clone ID: PAT_MRT3847_67616C.1
aaaaaacctccccctaattattcaagttccctaggccggggggaaaaatatttataaccggccccgcattgggggtttacaaacccggaattttttataaaagagcccccaggggccacataatcaaacaggggccttcctatgattatttccccccccctcgaacttgctccaggaaaaaaaaaggccccggaagggggtaagggatagtcaccattattgggggcccgcattttaacaacttttggatattatagccaaacaaaaaaggggggctgctttgttgaaggggggcctatttagcttggaagggaactaaaactttgcttgcaaagctatgcttttagggggagccctttggagggggaattgaacccttgataaccataaaccacaggccccctccctttaaaa

SEQ ID NO: 106979 - DNA, 603 bp, Glycine max
  unsure (1)..(603): unsure at all n locations
  Clone ID: PAT_MRT3847_67617C.1
ccacgcgtccgctcactcctccccacacttggtttctcatcttctctatttttctgctttacataacccttctcttctctgttcattgctccattgcttccctcaccagtaaccacaaccccattcccatttaaccttaaaaaaaataatctataatgcatagtttttttcttcttttcgtcacaacagatcaccatgcttctggcacgcatatcccaccgctgcatcggatccactctcacaaaacccttctccgccgtcatctccaccaccgacacccccctcaccatcgagacctccatccactccaccgcgcacaactgcgaacccccctcgcgcgccgtggcaacctcctggggggagctcctcaccttcttcctcgatatggccctgatgcggcgcatggagatcgccgcggactccctctacaaggccaagctcatccgcggcttctgccacctctacgacggccaggaggctgtcgccgtcggcatggaggccgccatcacaaaaatggactccatcatcaccgcctaccgngaccactgcacctttctcgggcgcggtggcacgctcctcgagggctccgccgagctcatgggc

SEQ ID NO: 106980 - DNA, 263 bp, Glycine max
  Clone ID: PAT_MRT3847_67618C.1
taaagtgcaccaattaggcctgcagatttcaccttctcaaggtctcgtatcctagccctttatttaagaaaaatatgttacatatcatattccaatatcttattaaaatgtttaaaagacatacaattttcagtgcatggaatgtgtaccctaaattttaaacttaattatacgatatagaaggaaagttctataatgccatgatctcatttcagctcccaaatatagctcgagaagcggagtagtatccaccagtgagtcaa

SEQ ID NO: 106981 - DNA, 470 bp, Glycine max
  Clone ID: PAT_MRT3847_67619C.1
gtgaggtatttggacatggcgtatgtggcgcacaagctggagcgtgttgggaagcctgggaaacgttcaagatgacctgacggaccttaaaaacgacgccgatcattacaacctttccgacatggccgactgactccaaaccactgcttgccaactctgaccctgtcccctacgaggagcccgagaaggactaccgactcgcatagacatagcaatcacaacgctattgcctgggaaagcatattatggagagtggtagagagcactctaccaaaccctaagcgcgagagaaccgacgagtcatgcgctacgcactggtggacatggactcgcaggagaacgaaatccggctagtgctctgtcttatggacagcgcgaaggcgacggagaacaacaacctcgtcgtggtagaggcgctcgagaaacagatcgacttgctcggcttgtcacaagtcgcagctatgaggaaa

SEQ ID NO: 106982 - DNA, 437 bp, Glycine max
  Clone ID: PAT_MRT3847_6761C.1
gttgtttattacatccaaaaggagtacactctacactggggtctttgtcttctgggagaaaaccatatctttgtctatacctttactggatatacaaccacccttgatgctgagagctacggcaccattgacaacatccaggttaatattcatgacaaagatggtattccttcacactaacattatgctgatctttgctggaaagcagattagaggaaggccgcacccttgctgattacaacattcagaaggagtctcactcttcattagggactacccctacgttggggaatgcaaatatttgtttagactcttaccgaaaagacacaaacccttgaggtgtaaagctctgacaccatatacacatttattgccaaaattcatgacaaagatggtttccgaccagatcaacagatgactatctttgctgagagcag

SEQ ID NO: 106983 - DNA, 327 bp, Glycine max
  Clone ID: PAT_MRT3847_67620C.1
aaaaaaaaaccatggtttgttaaaaattttggccccacccaattttcctttttgccccgaccgggccaaaaaaaaaaccgcaaacaaaattgggaagggggcatatggcctgaaacccgggagagccaaaaccccccttttatgggggaaatccccttgggcttatttcccccttaaaaattttttgggcttttaccgaaacccccttgggggcccccccctttccccaataccgggattcataaaactcccccaaggggtttgaggcctgcaggggctcggcttagggggggtgtgaacaaaaacaacctttcccttggacatgaa

SEQ ID NO: 106984 - DNA, 346 bp, Glycine max
  Clone ID: PAT_MRT3847_67621C.1
ggcgaaggacgttgagcaggtcacagagcagggtgaatactccgagaaggactaccataaccctcctccggcaccattaagcgacccagatgaactcacaaagtggtcattggacagagccgccagaggtgaattcatagcaacactcctttgtctttacataaccatgttgaccattattggctgcaagagactgagagactcctaaatccccggtgacgccgagtgtgacggcggcggccgtcttagcatcgcttgggccttcggtggcatgatctagatgcttgaagactgcgctgacgaattatgtgggggacacatcagccctgcggtgacattcggagtt

SEQ ID NO: 106985 - DNA, 399 bp, Glycine max
  unsure (1)..(399): unsure at all n locations
  Clone ID: PAT_MRT3847_67622C.1
tgtactaaagattcnatgattctaacgcgcnnctnnaaaggattttctcacctttttcagttnnaaanncnnntggttcaatataatgaacctatctctgtacgtccgtccccttgggagagggatcagtcgacttcactcaacaatgngcctcatnnagacatatgngttcttggaaatgccgaaccctatatcacctaacccaaatgtgcctaaacatggttgcgatatagccagaaaagaaatagcaagcgaatatatttggggcatataaatatcttaattcctttgatgtcnatctttccccttatccttggagaagggtcattttntgtaagatgcctgatcatgattgtcagggactgacattgggagacactctatgacattggacataaa

SEQ ID NO: 106986 - DNA, 304 bp, Glycine max
  Clone ID: PAT_MRT3847_67623C.1
gtaagctgggaattctgctcgaggggagagatcggcgtttctttatgcttgtaagtagacatcatgaggggattatacaccactgattgttgaacataccgaacaggaacatcgtcagcgggagggctgaagaggctactgactccaacacgatggaggctgggttcgatgatgtcatcttcacctggatcttgaagtggaccagatcaagatgcagtatcaacgacaacaaggtgaccgacaaccgagccgtcggtggcgtcggtgtaatcttcgctgccatcgccgatgctatcgccctgtt

SEQ ID NO: 106987 - DNA, 512 bp, Glycine max
  Clone ID: PAT_MRT3847_67624C.1
gcagaaatcagaatcactcgataacaatttcgggctggctaaggctaaggttactaatattgttaacactatcattacagcacaagttcttgcaacacttgggagtcacacttgtcccagacaactttgaaatatccatagacttgcccttatagccatcagactctaatgtggcaatgctagcttcttgtgtaacaatagaaccagtgtcacttttctcagtcttagattgctcttggcaacaatcagagctactattatttgttctgcatgagaagtcctcacacattttgactttgcctagaccacaaccattgcaaggtttcacaatgtgcacttcgatagataccaagttcccattgtggtttcccttcagtgagctcaactttgaaagtccagaagattcattcttgtttgtagttgcttcacgataagtgtcgtttttacaacaatctttaccacacttttcagcggagagaactgctttgttctcattgctattacttttcttc

SEQ ID NO: 106988 - DNA, 262 bp, Glycine max
  Clone ID: PAT_MRT3847_67625C.1
gagcaaacatatcgcccccttcttttgtatctgattgacatgtgtatggttgaggaatttcaatttttctgtgttgttatcgaagatgagaatcccagttcagttgcaagactgggttactatgaaatgttgatgtggttaaaagataataacgaagaaaagattcaaggtatttgtgacaatattgcagagaataaaggtgaagatacatctgatatacaagaaaattatttattagctctttgtgaaagtgaacggatgg

SEQ ID NO: 106989 - DNA, 370 bp, Glycine max
  Clone ID: PAT_MRT3847_67626C.1
tcgtttatcactctgtgtgtgggtcacagacggcgtgaatcattgtcacttacactctttgttcattgggtgaacactctcctatttgatttaggactccctgtcagatctaaacttattctgctggtttctcagctctctgttcactgatgtggtcatgccggtgaaaccttggactagtgctcttactatcatatgcgccataggacttcctaggcggactcttctattactctcctatctttcactctcttcttctcactgacccgcattgccggtcaaacagttgttatttgaaaaacacttggtcgttggggcaactgtcagctttgttaattcccgtgtgacacatcacgctcactgagaaaac

SEQ ID NO: 106990 - DNA, 347 bp, Glycine max
  Clone ID: PAT_MRT3847_67627C.1
ggcattcttaaacattctcgtatattattttttaacacaaggattacaccaaattctatttttgtgcgtttatctttggctttgtacattacatggatcaaaatctagtttaataaaacatttagtccaaataaataacagcagcaaaaaattaagtattgattatactgaaataatcgtataataactttcatggtaaaagtttaatttggtctcccaaattattaagatccagcaaatagatgctatataagaagtaagaagttaataaattaattgccatgcacatatgtataattgaatttgatacctgaggatcaaacgcaccaagccaaggcatgtaattt

SEQ ID NO: 106991 - DNA, 246 bp, Glycine max
  Clone ID: PAT_MRT3847_67628C.1
tattccatttttctctctatctctcttcaatttttctaattcttgatctatgttattgattcaacggctaggaccctcagaatcagttaatgtttcttgcttcacctcacgcacacccctctcaagagtagtttctctgccttgcatgccaagactaaccctcttggactcaccttgaccaccctcagaaccccagcaattcatcaccataaaatccaacacaatgatcgaggccgtgatacgtac

SEQ ID NO: 106992 - DNA, 393 bp, Glycine max
  Clone ID: PAT_MRT3847_67629C.1
caaggaaaacccccgggggaaaaaaagggcaaaaaaaaaaaccggacttgctgtttatccatatgggcccttcaaaaccccccccgggttttattcatgaaaaatgtttttttgaaaagccccttttgtttcccctgatagctggggcctccccccattaaaaaagaaactttttttattggaactcaaaaaaagttgcctttacgggtttccccctcctgaaaggccccccccaacccccccaaagccgggggtgttgaaccccccccccaacccagggttgttgaaccccccccccaaccccgggttggggaaccccccccccccaaaacccgggaagccgccccccccaaagccagggaagccgcccccaccaaagccagggaagccccc

SEQ ID NO: 106993 - DNA, 1064 bp, Glycine max
  Clone ID: PAT_MRT3847_6762C.1
gaaagagcaaatttcatatataatataacaattaataataataaatataaataatatatatttgtattgtattatacacaattgaaaaaaaaggtctaaacgtaatttgatctccatggatatcatttccctctttaggttgtgaaacgatggatgttccatttcttcatgggcccaaatcccgagttctaataaattcattgagcagttctaaacgtactaaagacttcaaaaacgagcaaaagctaaagactaattactgatcaaaagaagaagaagaagaaagtctgggagagcattttctttcctttgtagctgatgaaagaacaaaagagaaagagaaagaaagaaattaaaaatataataaaaatgctgcaaaagagagtgtagctgctagcccaggtaggtggtgactttagatcaaactcgtatcttcttcattattttgtttcttcatctcaatttgtttttttatcactgccggtattgcaaagaagggtccagatcaaaaagcattgaaggttcccctactcctctctgatccccaaaccttgccgatgatgacgaaagtgtatcttccctcaaaagctgaagtggtggttgtgaattggaattagccattgaagatgaggacaacaagctgaagcatttggggtcttctgatgttgaagaagcacattccatgttgaccccaaatagccttagtcttttccctgcagtgctaggactagtactagtactactaggaccactactcttgccaccatggtgttgttgatgatggaggtggtgagcaactggaacagaatcaatgatcataggggaaagagaaacattgccagctccctcttgttgttgttgttgttgttgctgctgccttgtgttcaaggtttggtggtcagccaatggcattgatattgggggtgttgacctgtggtaaaagactgagcctgcagatcctgaagtagtagtactactcatctcatgatagttgttgtagtgatgagtagtagcattaattctcgagccagggatgatacaaggtgttgttgttgtaattgagc

SEQ ID NO: 106994 - DNA, 205 bp, Glycine max
  Clone ID: PAT_MRT3847_67630C.1
gaagggcacattaccaagtcatatgatccaatgataaaaacttattaagcagcttttttttaattttgatcaactcatgaaaccccatgccagagatgctctaagtgcttgatggctctgaaatttaaataagacgagacatttttattactccctccgtccgaaagtaattgtcaccctatattattttataaaaccattagaa

SEQ ID NO: 106995 - DNA, 416 bp, Glycine max
  Clone ID: PAT_MRT3847_67631C.1
agagaatactaatatttgtttaatattgaagggcgtactggtttgatgccaataaactttcactttctcaagaggcgacttatacctggcacctatgcagctaaatcatgctggctttctgtcgtgtcctggacttaaatttgcaacttgcctgtccttttgctaaacagggaggctagatcttttgagctttagctgaaacgctggctctgaaaaggacatctactgagcatgaaataacgtctactgaagctcaacatccatggcaaatgcaccacctgctccattgctaggccaccaatttcgtactgatccattcttctgcttcagtacccccaaatgcgtgacctgaatgcgagcaccaatgcaaccgatatgatgacccagtgcaacagttccaccatgtacgttcactt

SEQ ID NO: 106996 - DNA, 467 bp, Glycine max
  Clone ID: PAT_MRT3847_67632C.1
aaataaataaatacaattattgtattgaatcatatctttggaaatccaaaatacaaactatgtctttttataggatacataaacagtatccatcaacattcaaaaagaagaaaagcccaatattctaaacttcttagaatcttatgtaaaccaaacagcatatatgtggaaaatttgcattagtatgaactaatcatggctagcagtcaaatcttgatgccttattttctcttttgcaactactatcatatagaagtccattaattattactgcattggatctaccataaccttgatgcagctcccttgtctaagaaccatttcaactctccttctctaggtgaaaccaattgagcagggagcttataatcactaggagcttcctccagtgcagagtagactgcatctgctctaccagcaccagtcaccaccattgctatgtttgaagaagcattgatcactggcaa

SEQ ID NO: 106997 - DNA, 2610 bp, Glycine max
  Clone ID: PAT_MRT3847_67633C.1
cgtgttccttgagaccatggcgcatagtcttgaaatatttcaggaggtattatagagcatatagctggagaatttgaatgcaagagttctgttcttggcacagctatatgaagatgataaatgctgttcctttcttgaagaacagtcttttccagagattttgatcaaagccatgtcctttgagaaaccaattattgcaccggaaggtctcatgaacagaaaatatgtggatgacagccggaatggtcaactttggacaaagtggttctcatacagttctgagacaaattttattagaagtgatctcaaaagggaaaatatcacccttggcttgcaacattgcctcaatagggagaagcacagcaaagaatcttatggcttcagaagcaattgatggatatgcatctttgcttcagaatattctcaggcttccatctgaggtttctccacctaaggctgtttcagaaatagcccccaattttaaagaacaatggcagtggcatttgtttgaagcttttccaaatatgacatatcaaaatagagcattaagaagcaacacatttttagataaatacgagcaccagttgaatcattctcaaaaaaatagatccactactgcagtttcagctaatgatgtatttgtatatagcttatgggaagaagaaaaatatactcaattggctattaccaaaaaaagaagagaggatgaagagttgaaggatagaatggagcagtcacatggaacatgggaggatgtatataaaagtgctaagagggctgatagatcaaagaatgatttacacgaaagagatgaaggagagcttgagcggacaggacaaccgctatgcatatatgaaccttattttggggaaggatcctggccttttctacataaaaaatctctttatcgaggaattggcctgtccggtaaaggtcgaagaccagggagagatgatgttgatgctccttctcgtcttccactgctgaataatggttactatcgagatttacttagtgattatggagccttctttgcaattgcaaacaagattgaccgtttacacagaaatgcttggattggatttcagtcttggagagcaacagcaaggaaggcatctttgtccataattgctgaaaatgctttattagatgctatccaatccaaaaggtatggggatgcactatatttttgggtgcgcatggatatggattcacgaaacccttcgcaaacggacttttggtcattttgtgatgccgttaatgcgggaaattgcaagtttgctttctcagaagccatgaggggaatgtatggggtaaaaggtgatgcggattctttgcctcccatgccggtagatggtgacacatggtctgtcatgcagagttgggctatgcctacaagatcctttatggagtttgtaatgttctccagaatgtttgtggatgcattggatgcgcaaatgtatgatgaacaccatttaacaggacactgttctttgagcttgtcaaaagataaacattgctattcacggcttctggagcttcttgtaaatgtgtggacataccacagtgccagaaggatggtgtttgtggaccctgagacaggtctaatgcaggaacaacacaagttcaagagccgcagaggtcaaatgtggatcaaatggttctcatacagcacacttaagagcatggatgaggacttggcaaagttatcagattttgaggatcctgcgagacattggttgtggccgtcaaccggcgaagtattctggcaaggtgtatttgaaagagagagaagcttaaggcagaaggagaaggaaaagaggaagcagaagagtatagagaaacaaaacagaatgaggaagcgtcatcgccaacaagtgatagggaaatacattaagcccccaccagacgaggaaagctctaattcatctatgcttgcagtaacagcatcatgatgattttaaaaccctttgttttgagtagttcctcgtataaaattcttttcttcttttgtaatttttatttgattttgcttagcatatgtgattttcgttagaaaggatgcacatttctgtggagggtcacgtatgtagaatatggcatcgttctagtcattgatgctgataaatagctagtgtgtaaagtatcttttattttgttttgacttattctgtaagtctattctttcaggataaaaaattcatttagagaggtgtggcaaaattgtaatgttggtacccctttgtcaatctaaatgaaaattaactataaaaaaaataaaaaaaaaaaagcccccattaccatcaggaggagttgtgataagcggaacaacactgttgactggctaaactatgatggtataattgtgagctctcttgaagccaagagtgccttttcttgctttttgcagggacctttcaagtctatccctcttatatggattgggcatgaaaatgctcttgcttatcgatcaagacaatatactactaatgggcagattgaacttttgaatgaaaagggaatagttttcaatcggtcaacagctgttgtctttccaaactatgccttgccgatgatttactccacatttgatgcttgaaattttaatgt

SEQ ID NO: 106998 - DNA, 1083 bp, Glycine max
  Clone ID: PAT_MRT3847_67634C.1
tttttatctaggactagtttatgcttcgtggttctgttctaatttaagttctttctaggcagcatgggcactaggagtggggcccaagtcattggccagaagcagatgggttcagagaaacaatgggctctgtgcttggatgcctaaccagtgatgactgagaacagtttcagttatgtctgtctgttttgttttatgcatgtaagttaaaactaccacccttatttttattaactaaaaagatgacttgtttgtgtcactaaaaatggaattcggctcgagcaaattgaacccacacttctagcaccccaatacaatgactttgcacctacctctctccctatttaaaacttcaatacacttcattgtgagtgtattttaatcttctttatcttcattcattggttctctctaaccaaccctctcttttcctaaatcctaattaaacacccctcaaccaaaaaaagcatgaagaagctcaatctaatactcagtaagtgcaagaacttgtcaaagcatctaggaagatcttcatcatttaatagcccaaggtccaagtttgctaaggaagacttatgggaaggaaatggcatgcaagaaggtgaacattgtgaaactgtatttgttggcagcacaaggaaacggtatgtgataagctccaagtatttgaaccatcctctcctcaaagctctcatcaacaattccaagcaaaagggcagtgatgaaagtgttttggtggtcaactgtgaggtggttctctttgatcatctactgtggatgctagaaaatgcagatcctaagtttggttctgactctttggaggaattggctgaactctatgtgttttaagagctttcaaagtgctaattgcatgcagatgcctaatgtatgaaaatatgtatgttgggttgtgcttgcatttttcagaatgttattgttaagagtcatttttgtttcctttattataccttgatctctatggtgcgttaaacgattatgtaattgcatagctggtttctgttctaactcatggttttcaagagccatatgctaaattaatgccatgaaatcattggtttaggt

SEQ ID NO: 106999 - DNA, 336 bp, Glycine max
  Clone ID: PAT_MRT3847_67635C.1
caataggggggttgggtgggtcgattaatttaaaacatatttaatgtttatacataaattacaaattaattaacttaatataaactacaattacaacattgtctaaccatcctaattttcattttttactttcaaatattactcttcccacttttttctaaatgccctcaatctttctggttccaatgttctacaatcattaaaatactccttcatataataaaacatactttaataacctattacccatcataataattttaaattcgtttaatttaaaattaccatttcccaattattcttcaaatttcctaataatatatttaacattcaaac

SEQ ID NO: 107000 - DNA, 2272 bp, Glycine max
  Clone ID: PAT_MRT3847_67636C.1
caacagaacgggattgcaaattacaaacatttccccaaccttctatactaatgccaatttgtcacacctccaccaaagcataacaatgctcaattcctctttcctctccctttctgaacacaccttttcccacacaccccatcatttcccaacaaggtctgcttctcaaaaccccaaccttcatccaaagtttcaatctttagcctttggaaaccgtggagggagtgaatttccatctgggtcttgctccaatacccccagaagaaaaggggtgttggttgtgcggtcaaagtcaacgctgggagtagaagaagtggtggtaaagggaggaggagtgaagggtaagggtgaagagtttgatgcaattgtgatagggtctgggattggagcgtccggttggttgcagggacacagctagcagtgaagggtgccagagttttggttttggagaagtatgtgattcctggtggaagctctggtttttaccagagagatggctatacttttgatgtggggtcctctgtcatgtttggtttcagtgataagggtaatctcaatttgataacacaagcgttggaagcagttggttgtcggatgcaagtggtgcctgatccaacaaccgtttacttccatctaccaaataacctttctgttcgagtgcacaaagaatatgataaatttattgaagaattgaccagttactttccccatgaaaaggagggtattctcaaattctacggtgaatgctggaagatttttgatgccctgaattcgttggaattgaagtcactagaagagccactctacctttttggacagttttttcagaagccacttgaatgcttgacactagcctattatttgcctcaaaatgctggagccatagctcggaagtacattcaagatccacagttgttgtctttcatagatgcagagtgttttatagtgagcacagtcaatgctttgcagacaccaatgatcaatgctgccatggttctatgtgacagacactttggtgggattaactaccctcttgggggtgttggtgggatagcaaagtccttagcaaaaggtctcgttgatcagggtagcgagatagtttacaaagcaaatgtcaccagtattataattgagcagggcaaagctgtaggtgtgaggctttcaaatggcagagagttctttgccaaaactataatatcaaatgctaccagatgggatacatttggaaagttactgaagggcgttccacttccgaaagaagaagagaacttccagaaagtttatgttaaagctccatcttttctttcaattcacatgggggttaaagctgaggttttgccgccagatacagactgtcaccattttgtgcttgagagcaactggtccaaattggaggagccatatggaagtatctttctaagtataccaactgttcttgattcatcattggctcctgaaggccgtcatatccttcatatattcacaacttcttccatggaggactgggagggtctctcaagagtagaatatgaggcaaagaagcagcttgtagcagatgaaatcacaagcagattagagaataaattgtttcctggtcttagatcatccattgattttatggaggtagggacacctaagacacaccggcgatacctggctcgtgatgagggaacttatggtccaatgccacgcagaatcccaaaggggttattgggaatgccattcaataccacaggcatagatggtctttactgtgttggcgatagctgcttccctggacaaggtgttattgctgtagctttctcaggagttatgtgtgctcatcgagtagctgcagatattgggctggagaagaagtcacctgtgttggattccatgctgcttcggttgcttggttggttaaggacaatggcatgagatatataggagcatttgttggatgcagtatcatcatcccttttgcataagaagctcaactttcattacagcattggttcactgcagatttcttccacaattttcaagagtcaccaaattgtcacagtatatagatgctgttagttgcaatttgatccatgcagtggcagagcttggaaaaaataattgaaggggccaaagtttgaagtgtataaatttaatgcaataattttgataatatcatgtcttataggtgttttctttccccttgctgaaggatatcatgtcttacaggtgatttaagtaattgatggtaatatttaaatattaaatatttacttaattttctttttgc

SEQ ID NO: 107001 - DNA, 348 bp, Glycine max
  Clone ID: PAT_MRT3847_67637C.1
ctgagagatcattctatgaggtaattggtgaaaagtacccttcttcgcctttagggcatccaagttctgttgatccagatgatgggggtggggtggataatttctctgaaaattatggtacttgttcttacaatgatggtgacctcagtagcatttttactaacaattctttgcgccgaaatttgggggaacttcctaaccagaattttcgaggcaatagcatttcccggtcatcttatagctctccaaatagtgtcataagtagtgtggaagggcctgtagactctccaagcagtattctccaggttcctgatctgaacagtgagactcattccattttgcaatttc

SEQ ID NO: 107002 - DNA, 225 bp, Glycine max
  Clone ID: PAT_MRT3847_67638C.1
gaggatatgggatcgaagaagtatgcgctatagatgggcggtgaggattcggagtagttggtgaagatgcgcggaggcaccgatggggtactcatgatgttgctccgtgagcaagaggatgagagggacctctatgaggtcgtccaaggagagttcccggagcagcatgacttgactgtctacgatggcaatgtgatacatggacgctgctatgagggacatgcc

SEQ ID NO: 107003 - DNA, 1360 bp, Glycine max
  unsure (1)..(1360): unsure at all n locations
  Clone ID: PAT_MRT3847_67639C.1
ggtccgtgaatnntcccgggtcgactccacgccgtnnccgaaaatttataaattggaggagacttgcgcagtttatgcctttcatcggttcagtgaaaaggggatgcctactgcgcccattgtctccttcaacgacgccaaataaatacctcaaaacgataccttgacagagttgggtattgatatttgcattaaagttcataatctggtgaattactgctaggggcaaggctctgccgtcatttgaggggtgccctgtgaaagttcctgggatgatgcgacgtggttctggtttaggttctgctgcttctcaccgttctcgggagtcccttcctcttcctcagctgttggagaataaaattgctgctcaggaatcagaaatagagcagcttgtaagtgataaccgtggtctggctagtggacatgtgaccttaagagaggcgcttgttgctgctgcgcaggatgtgcaaaagctgaagtcacacattagaagcatccagactgagagtgacattcagatcagaattctagtagataagatttccaaaggggaggttgatattagggccagtgatagtgtgaagaaggacctacaaaaggcccatattgaggcgcagagcttggcagcttccaggcaggaagtgagtgcccaaattcatcgagcgactcaggaactgaagaaggtccatggtgatgtcaagagtattccggatttgcaggctgaactggacagtttattgcaggagcaccagaggttacgtggcacatttgaatatgaaaagaacaaaaacatagagctagtggattacatgaaagcaaaagagaagaatctgatagcgatggcaagagaagttgaagtgttacgagctgagattttaaatgctgagaaaagagtaaatgctcctaatctgtttggggctgctacccctggacacagcagcggtccatttgctgatgtttatgggagagttcatggtcagatggctgctggccaagtaggagagagtatggtaccagttggtgaaagcaatggagtagcagccatcaatagtgctggtgttagtggtgctctttggtcgagtccatatgatccctcagttggtcggaggtgaagtttaataatagttaatcagatggagcttgacttcagcttttgccggtaaaatacatgggaactgctggtttttctacgtaaatttcacagattgggtggttttatctcaatagttaatacagtacaattttgtgaattgtcgaacctaatctgcaaaattgaagaggccaaaggtctatgtctcaaacaaaactattggtaaaatgaattgaaagtctggtctgacatgacctatttaatgagctc

SEQ ID NO: 107004 - DNA, 391 bp, Glycine max
  Clone ID: PAT_MRT3847_6763C.1
gttttcattccatggatggcactgggtcatggccttgcaagaaacttcagattctaaagggatgacactacagtccgacccatatgcggttggccaagaggatgctcctggaattgctgggattcaggagtggtggtgggcggattacgaaaataagaaccatgccgggaagatttttcagcttcgtgagggctttaaggctcttattgagaacatatacacaggacggggtggcctggtagatgacagagcatgccccttgcgggctggtgcttgtatggaatggtgctatgatcgatgttgctgattgtgtaaagtggtgtatagtgaacggctaaaaaactgctggaggctctatagtatgaggggagcgcttatatcttggtcagat

SEQ ID NO: 107005 - DNA, 237 bp, Glycine max
  Clone ID: PAT_MRT3847_67640C.1
ggagggggaaattaccgggtcactaaataaaccaaatgttttatttgtcccttctgtcgtcttttcgcagccgtacccttttgtcgtttttttgcagccgtacccttttgtcgttttttcgcagccgtacccttttgtcgttttttcgcagccgtacccttttgtcgttttttcgcagccgtacccttttgtcgttttctcgcagccgtacccttttgtcgttttttcgcagccgta

SEQ ID NO: 107006 - DNA, 876 bp, Glycine max
  Clone ID: PAT_MRT3847_67641C.1
cccacgcttccggtgagatttgcgaatctgagaaatggcggattcttctcggctcgagtacggctgcgagaagacgacataaggggaaggcatcagaaaaagaaaagccttcaatcatatagcattctaagaaatgaagagccctaccattttcattctctttctactttctgccttctacacctcactcctaccttcagccaccgctcaagtcgtggttgacatggaaggtaatgatcttcaaaatggtgggaaatattatgtgttgccagtaatagagtcatcatatggtggaataagagtagccgcaactggaaaagaaagatgccctctcactgttgtacaatctgccgatccgtatgataaggggattgcaacaattatttcaaccccatatcgagttcctgttatccgcgaaggctttcctttgaacattacgttcggtaattttgcagttatactgccttgtgtcccccttcgttctgagtggaccgtcgttaatggccaaccagaaggacccgcagttaaaattggttcgcccccaaatgcagaaaatggttggtttgaaattgagaaattgttaacttcgggctataagcttgtgttctgtacgcggcctgagcgtagctattgtcaggatattgggattcatgtcgatgatgaaaatcacgcgcgtttggtgttgacaaatgatgatccactagtggttgagtttctgaaatatgatcccttctggccccagaataatctagtgcttcctacaagtcaatgagagactatataaatgctttggttgtaataaattattgtcagactaaataaaataatcaaagcttatcccttcaaaaaaaaaaaaaaaaaaaaaaaaaaaggcgg

SEQ ID NO: 107007 - DNA, 509 bp, Glycine max
  unsure (1)..(509): unsure at all n locations
  Clone ID: PAT_MRT3847_67642C.1
gntgacgtcgcatgcccacgccgtaccgtaagcctgtggatcccctctagagcggcgccgcccttgttgtgtttttttttttttattattttattttattttttttttttattttttttttttttttttttttttaaaaaacaaaaaaaaaggggggcaggagttattataaccaaaaaattataaaggcatacttaatcaagggcaaggcatggctggcctaagccctaattaagggccccaacaggatgctattacattaatatattaagggggggaaacccatagatatgaaccaggaaggtgttatttatatataagaggcaactagctagctagccagggaaagcagcaccctcaatggctggagggggcctgcttgctggggccccaaaattggggaaaaccttggctgaggaaatgggggaaagcaaaacatagcaaaaccccgccccaaaggggaaacccaccgggggtgggaccctatgggaaaaccgaccaaaaagagc

SEQ ID NO: 107008 - DNA, 485 bp, Glycine max
  Clone ID: PAT_MRT3847_67643C.1
tttcgccttcgcgtccgctttctgattgccttcaaatcacacactctcttcaatttctagggttttgctattgctttgcctccgttccccctttctcacaaaaacaacgccttttctcttctccttcgtatctgcattcacagcgtaattcgttgctgcattttaatcgatttatctaaccaggactgaatgacctaatggagtctaaaggtgggaaaaagaagtctagtagtagtagtagtaaatcaattttttacgaagctcccctcggatacagcattgaagacgttagaccaaacggtggaatcaagaaattcagatctgctgcttactctaactgttctcgcaaaccatcctgatacacatccggattgatagttcgttgcatgcaaccatagttttattaggattttttcttctttgttttcaattaagtttttttgttgctctccttcaaactccatctttccaaatcctctctttgc

SEQ ID NO: 107009 - DNA, 2224 bp, Glycine max
  Clone ID: PAT_MRT3847_67644C.1
aacccctaatatttggaccagctagccttgtaaatggaaacataacaactgagagagaaagaatggcagctcaggtcttccaacctagtcataggtgcgcattatcccctttatcaataaatgcatgcaacctggctaagaaaggctttggaatagggaaatataagttttttaaacagaccatgtgcccaaaaagagatgaagttttatttccttgtagttttcagtgttatattgcctaggactccccattggttgcctatgattgagagagtagagttgtacaatattactaaggatggactttacttgcactctggttacattttttgagatgctaagctgaatttttttatgaaaggggctgcttcataatcgaatcgaaaggaagctgcagaatggaggacgtgccgttgccggcgctctttgagcaagcccgcaagatccacactttatgtagcgtgcacccttccacattctttctcgttctcgatctctctcgatttttccttcccttttctccataaacgaggtgcttcagatttgctcataataggagggaatcgaatcgaatcgaatcgaaaggaaagtgcagaatggatgacatgccgttgccggcgctctttgagcaagcccgcaagatccacgccgcagccaccgattccggcgccgaccaggaggttgtgaagaaggggtgcgaggctctgcatagatgcgaggacatggtcaataatctaggtttgttctctcccaacgagaccaaagaagatatcagcaccacgaatctcaaatacattctggtgccattttatcttgcggagttgacagaaaaaatagcacaggatgacaggatacagattctaaagtcttcccaggcaaaacttaaggagtttatctcattttgtgaagcaatggagctggtcccaaaagaggagttagaatcttacattgatggggcaccaaaaactgttgctgatcagagggccaggaagatcgctaggttcaaacgtcagagagctgcagaatcaaagttgttggaaataaaagagcgaaaggaacgacgtgggcgttctactaaggcagctgagagatgctctctgctggtaaggatagacaatccaaggatggggataaggagttctctaaggatgttcttgatgaacgtgccaagaaagcagaagcttggcatcatgattctgcagttcgtgcacggtacactaagccatcatcaccaatcacatgtgccactttcgcccaagatgttctagaaggaagagcaaaggcttcacaagcacacgatcacaagcatcaaccactaatatttggaccgggctagccttgtaaatggaaaccataacaacctgagagagaaagaatggcagctcaggtcttccaacctagtcataggatgccaactatgagcattgaggaagctgggctaaaagaaatggaaataatgaacaaatggcaagagagaaatgtcagactcatggaagaagccaattcatcttggcacaacgataggaagtcaaagccaggagaagacgatgatgaagatgatgctgcacaggagaaagcaagggcttgggatgactggaaggatgataatccacgaggtgcaggaaataagagacttaccccttgtgggtaaagtgggttcttccctggcttaggagtaacgggctgagaataaaactgtttttaacgaaatctcgtaatttgtagttagattgcgttaagattatgtgtataccaggattttcatttgattacatgtgcatattcatggagtgcaagtagggtcctaccccacccggttttgcatgctctccttcccaaggatgtttgtggaattagtagcttgctttgcaatttgcaccagaggttgcattatactaaattttctagaaattattgatgctatctattatgtgtacagaaaatgcgtgtgtttgcatttctctaccatcaatagaatgaacaaagccaggcgtgcacaaagatttgtgtattttgctcactgtgcaactgtgcatgaaggatgatgtatttgagttgataggtagtgactagttttctttttggaaaccgaaatagtttttttttaaaaaaattattatgcaagaatatacaatcaattcattattctgagttacattttcattttgtagtatgtatacatataataattcagttgattgaggagcccaagcgagtttttgtt

SEQ ID NO: 107010 - DNA, 478 bp, Glycine max
  Clone ID: PAT_MRT3847_67645C.1
acattctttctcgttctcgatctctctcgatttttccttcccttttctccataaacgaggtgcttcagatttgctcataataggagggaatcgaatcgaatcgaatcgaaaggaaagtgcagaatggatgacatgccgttgccggcgctctttgagcaagcccgcaagatccacgccgcagccaccgattccggcgccgaccaggaggttgtgaattacaccaggggaagtttcattttccccagtgctcagccatatccccatcgcaacttttctgaggaagttgctattcttgatggctactttggcaaacttggtgcaggaagcaatgcttatattttgggtggccaagacaaagcacagaactggcatgtctactctgcttctgcagattctgtaactcaatgtgactgttaattccggcattagaaaaattcttccagattccgagatttgtgactttgactttgaaccatgt

SEQ ID NO: 107011 - DNA, 503 bp, Glycine max
  unsure (1)..(503): unsure at all n locations
  Clone ID: PAT_MRT3847_67646C.1
cccacgcgtccgtgcatattcatggagtgcaagtagggtcctaccccacccggttttgcatgctctccttcccaaggatgtttgtggaattagtagcttgctttgcaatttgcaccagaggttgcattatactaaattttctagaaattattgatgctatctattatgtgtacagaaaatgcgtgtgtttgcatttctctaccatcaatagaatgaacaaagccaggcgtgcacaaagatttgtgtattttgctctgtgcaactgtgcatgaaggatgatgtatttgagttgataggtagtgactagttttctttttggaaaccgaaatagttttttttttaaaattattatgcaagaatatacaatcaattcattattctgagttacattttcattttgtagtatgtatacatataataattcagttgattgaggagcacaagcgagttattgtaaannaaaaaaaaaaaaaaaaaaaaaaaaaaaaaaaaaaaannanngg

SEQ ID NO: 107012 - DNA, 1896 bp, Glycine max
  Clone ID: PAT_MRT3847_67647C.1
cttctgtttctggattcatttgggtgtttggacacaattgcttaattatactttctgttgattgtgttgacgcaggactgaatgaactaatggagtctaaaggtgggaaaaagaagtctagtagtagtagtagtaaatcattgttctacgaagctcccctcggatacagcattgaagacgttagaccaaacggtggaatcaagaaattcagatctgctgcttactccaacgtatattttctttctgatgcagtgaattcttgtatttgctttgtttgattcaatacccagtctaacactgtttatcatgttttgtatgcagtgcgctcgcaaaccttcctgatatccatccagattgatagttcattgcatgcaaccatagttttattaggttttttcttctttgttttcaattaggtttttgctgctctccttcaaactccgtctttccgaatcctctctttgtgattgtgttctgttctgcttcctaccgcgatagtttctcttctgaagcatggccatggcggtttctgcaattggttttgaaggtttcgagaagaggctggaaatatcctttttccagccgggactttttgctgaccctgagggaatgggtttaagagctcttgcaaagtcccagttggatgagatacttacaccggctgcttgcaccattgtttcatctctcagaaatgatcatgtcgactcctatgttctgtctgagtccagtctctttgtttatgcctacaagatcatcatcaaaacctgtggtactacaaagctactgcttgcaatcccacccatattgaaatttgctgaaatgctttccctcaatgttagatctgtgaattacaccaggggaagtttcatctttcccggtgctcagccctatccccatcgcaacttttctgaggaagttgctattcttgatggctactttggcaagcttagtgcaggaagcaatgcttatattttgggtggccaagacaaatcacagaactggcatgtctactctgcttctgcagattctgtaactccatgcgacaatgtttacactctagagatgtgcatgactggcctggatagagagaaagcacaggttttctacaaagaacaatctgcttcagctgccattatgactgttaattctggcattagaaaaattcttccagattctgagatttgtgactttgactttgagccatgtggttattcaatgaactctgttgaaggtgctgctgtttctaccattcatgttaccccagaagatggtttcagttatgcaagctttgagactgttgggtatgacttcaaagtggtgaatctgaacgaaatggttaagagggtattggcatgttttctcccaactgagttctctgttgcagttcatgtggatggtgcaagcaagttgtttgatcagacgtgttttctggatgttaagggatactgtcgcgaagagaggagccacgaagggcttggaatgggtggttctcttgtctaccaaaaatttgccaagacttgtgactgtggttcacctagatcaactctgaagtgctggaaagaggaagatgaagaagagtagttttcttaagtgtctttattatgtccttgcgaaaataagtccggttttccagacagtgattgtttttctttggtgttttttcccttttatgttagaccattgttagggcgtttggaccttttattgttctactattaccatttgaacatcgaatggattttaataaatcactttgtatgcgtgcaaaatttgtgtgatgttgtctatgttaaaactaatcttgcgctgtgtttgctatttcaagcgtgttttattcttcagaccaatggacgtgtttttcactttttgtaaagcaaaaaactagtttctgtgttt

SEQ ID NO: 107013 - DNA, 2164 bp, Glycine max
  Clone ID: PAT_MRT3847_67648C.1
cgcacctctttctgattgccttcaaatcacacactctcttcaatttctagggttttgctattgctttgcctccgttccccctttctcacaaaaacaacgccttttctcttctccttcgtatctattctttgcgtttggtttttggttgattgaaggcattcacagcgtaattcgttgctgcattttaatcgatttatctaaccaggactgaatgacctaatggagtctaaaggtgggaaaaagaagtctagtagtagtagtagtaaatcaattttttacgaagctcccctcggatacagcattgaagacgttagaccaaacggtggaatcaagaaattcagatctgctgcttactctaactgttctcgcaaaccatcctgatacacatccggattgatagttcgttgcatgcaaccatagttttattaggattttttcttctttgttttcaattaggtttttttgttgctctccttcaaactccatctttccaaatcctctctttgcgattgtgttttgatctgcttcctactgcgatagtttctctactgttacatggccatggcggtttccgcaattggttttgaaggtttcgagaaaaggttggaaatatcctttttccagccgggactttttgctgaccctgaaggaaggggtctaagggctcttacaaaatcccagttgggtgagattctaacaccagctgcttgcaccattgtttcttcgctcaaaaacgataatgtcgactcctatgttctatctgagtccagcctctttgtttatgcctacaagatcatcatcaaaacctgtggtactactaagctattgcttgcaatcccacccatattgaagttcgctgaaatgctttcccttaatgttaagtctgtgaattacaccaggggaagtttcattttccccagtgctcagccatatccccatcgcaacttttctgaggaagttgctattcttgatggctactttggcaaacttggtgcaggaagcaatgcttatattttgggtggccaagacaaagcacagaactggcatgtctactctgcttctgcagattctgtaactcaatgtgacaatgtttacactcttgagatgtgcatgactggcctggatagagagaaagcacaggttttctacaaagaacaatctgcttcagctgccatgatgactgttaattccggcattagaaaaattcttccagattccgagatttgtgactttgactttgaaccatgtggttattcaatgaactctgttgaaggcgctgctgtttctacgattcatgttaccccagaagatggtttcagttatgcaagcttcgaaactgttggttatgacttcaaagcggtgaatctgaacgaaatggttcagagggtattggcatgtttcctcccaactgagttttctgttgcagttcatgtggatggtgcaagcaagtcgtttgagcagacctgctttctggatgttaagggatactgtcgtgaagagaggagccacgaagggcttggaatgggtggttctgttgtctaccaaaaattcgggaagactagtgactgtggttcacctagatcaactctaaagtgctggaatgaggaagatgaggaagagtagtttccttaagtgtctttattattctgtccttgtgaaaataagtctggttttccagatacgttattgtttttctttgttgtcttttttagcttctgttagagaccatttgggcatttagacctttattgtttctattaccatttgaacatcgaatggattaataaatcactttgtttgcgtgcaaaaaaaacggctcgaggtcattctactgatggccagaacaccggcaacttcatcacggaccgaccctcaaccaaggtccatgctgcccctggtggtggttcttccctaggttatctctttggtgaacctggggaggggaaatgataccttgtttgcaaagcttttgctcgatgatgaatgatttattttgaaattcaggtcgtggaaacataatggaagatatggtgtattataggttatggttgctacgataagtgagtcaagagtgctatattttggatgtgctaaacatctattacagaactgtgtttgacagaaacaaatatctctattaagtattaagtgcacatttgcttcc

SEQ ID NO: 107014 - DNA, 251 bp, Glycine max
  Clone ID: PAT_MRT3847_67649C.1
ggccctaacacgggcatgtttatatgctaacctctcaggcaggccaacaatatcagtaattagcccttggtggaaaaaaacccccctctgctaaaaaaggaaaaaaccctacccaacccccaccctcccgggatttccctagccctaaaaaaaaagcaaaaaccacagcaaggtacgggaagagcccttaaaatatgcccctaagtttagtaagatccctaaacagagcttttagaaaagttaatcgggtc

SEQ ID NO: 107015 - DNA, 526 bp, Glycine max
  Clone ID: PAT_MRT3847_6764C.1
ctcctagggcacaaaatcgtcattctagactcattttgaatttcaaaattttgcagttgacatgaacatagtaccgaagggttaacttagttttaagcaaactactgtactaaagcaaacccagtaataaaaatctgtcagcaatggaggggatggggagtgtatatgacaattaatttggaaagggggtaactttaggctagtcccctcaccacaaagaatgcagatgactcttaaatcttaataagggaacataataacaaatggcaggaactaggtagggtccaggttggttcttgttctctgacattttccattaggggggaaggactgtgaactagtgggagtcagtgagtgtggaagggatggtggaaaaggatttatcactcttttcccaattttccctaacccaaagaaagcagttctaccattttttttttacaatctattactgcaagagaaaatggtaggtggaaagccttaaacagattggggtctaaataacaacattgattaagtttttcaa

SEQ ID NO: 107016 - DNA, 1893 bp, Glycine max
  Clone ID: PAT_MRT3847_67650C.1
cccacgcgtccgctttgataaataaaataaaaaacagttttttgaaggtgatatttttggctgcgaagtggcaacatgtgaggggagggcgcatgtgtatgtagcgtgcacccttccacattctttctcgttctcgatctctctcgatttttccttcccttttctccataaacgaggtgcttcagatttgctcataatcggagggaatcgaatcgaatcgaatcgaaaggaaagtgcagaatggatgacatgccgttgccggcgctctttgagcaagcccgcaagatccacgccgcagccaccgattccggcgccgaccaggaggttgtgaagaaggggtgcgaggctctgcatagatgcgaggacatggtcaataatctaggtttgttctctcccaacgagaccaaagaagatatcagcaccacgaatctcaaatacattctggtgccattttatcttgcggagttgacagaaaaaatagcacaggatgacaggatacagattctaaagtcttcccaggcaaaacttaaggagtttatctcattttgtgaagcaatggagctggtcccaaaagaggagttagaatcttacattgatggggcaccaaaaactgttgctgatcagagggccaggaagatcgctaggttcaaacgtcagagagctgcagaatcaaagttgttggaaataaaagagcgaaaggaacgacgtgggcgttctactaaagcagctgccctgtccacccctgttgaggcaggagaggaagaagtattggatgatgatggggaagaagaaagagaggcttggatcactaccatatctttggcaatctgtaaggcactagatatgctggatatgttgaagaaagaggaagagatgctttctgctgtaaaggatagacaatccaaggatggggataaggagttctctaaggatgttcttgatgaacgtgccaagaaagcagaagcttggcatcgtgattctgcagttcgtgcacagtacactaggccatcaccaccaatcacatgtgccactttcgcccaagatgttctagaaggaagagcaaaggcttcacaagaacacgatcacaagcatcaacccctaatatttggaccagctagccttgtaaatggaaacataacaactgagagagaaagaatggcagctcaggtcttccaacctagtcataggatgccaactatgagcattgaggaggccgggctaaaagaaatggaaataatgaacaaatggcaagagagaaatgtcaaactcatggaagaagtcaattcatcttggcacaatgataggaagtcaaagctaggagaagacgatgatgatgaagatgatgatgctgcacaggagaaagcaagggcttgggatgactggaaggatgataatccacgtggtgctggaaataagaaacttaccccttgtgggtaaactgaggtcttccctggcttaagtaacgggcttaggataaaactgtttttaacgaaatcccgtaatttggagttgatatactacttgtagttagattgtgttaagattatatgtataccaggattttcatttgatttacatgtgtttttcttgtgagtgctagtagggtcctaccctaccccacccggttttgcatgctctttcccaagtatatttgtggaatttgtagcttgctttgcaatttacaccagaggttgcatcatactaaattttctagaaagacaaatagcttttgaataattttgagggaatagttacatctcttttagaaagtttttcagtaaaatctttgattatccagtttagttgcccctcaaattttaccctttagagtcatgtctgtaaaaaactgttttcaatgaaggttttaaatgaataccctgtgaaccttggtgg

SEQ ID NO: 107017 - DNA, 1914 bp, Glycine max
  unsure (1)..(1914): unsure at all n locations
  Clone ID: PAT_MRT3847_67651C.1
tacggctgcgagaagacgacagaaggggacacgcaactatttctgactacgttttgctctacgcctctccctctctctcaaaaatcgttctcttcgattttagggttttgttttgctgctgcctccgttccccccttctcataaacaacgcgttttctcttctgcttcgtatctattctttgcttttggttttggttgattcaaggccttcacagcattcgttgcggcattttaatcgatttatccaagcaggactgaatgaactaatggagtctaaaggtgggaaaaagaagtctagtagtagtagtagtaaatcattgttctacgaagctcccctcggatacagcattgaagacgttagaccaaacggtggaatcaagaaattcagatctgctgcttactccaactgcgctcgcaaaccttcctgatatccatccagattgatagttcattgcatgcaaccatagttttattaggttttttcttctttgttttcaattaggtttttgctgctctccttcaaactccgtctttccgaatcctctctttgtgattgtgttctgttctgcttcctaccgcgatagtttctcttctgaagcatggccatggcggtttctgcaattggttttgaaggtttcgagaagaggctggaaatatcctttttccagccgggactttttgctgaccctgagggaatgggtttaagagctcttgcaaagtcccagttggatgagatacttacaccggctgcttgcaccattgtttcatctctcagaaatgatcatgtcgactcctatgttctgtctgagtccagtctctttgtttatgcctacaagatcatcatcaaaacctgtggtactacaaagctactgcttgcaatcccacccatattgaaatttgctgaaatgctttccctcaatgttagatctgtgaattacaccaggggaagtttcatctttcccggtgctcagccctatccccatcgcaacttttctgaggaagttgctattcttgatggctactttggcaagcttagtgcaggaagcaatgcttatattttgggtggccaagacaaatcacagaactggcatgtctactctgcttctgcagattctgtaactccatgcgacaatgtttacactctagagatgtgcatgactggcctggatagagagaaagcacaggttttctacaaagaacaatctgcttcagctgccattatgactgttaattctggcattagaaaaattcttccagattctgagatttgtgactttgactttgagccatgtggttattcaatgaactctgttgaaggtgctgctgtttctaccattcatgttaccccagaagatggtttcagttatgcaagctttgagactgttgggtatgacttcaaagtggtgaatctgaacgaaatggttaagagggtattggcatgttttctcccaactgagttctctgttgcagttcatgtggatggtgcaagcaagttgtttgatcagacgtgttttctggatgttaagggatactgtcgcgaagagaggagccacgaagggcttggaatgggtggttctcttgtctaccaaaaatttgccaagacttgtgactgtggttcacctagatcaactctgaagtgctggaaagaggaagatgaagaagagtagttttcttaagtgtctttattatgtccttgcgaaaataagtccggttttccagacagtgattgtttttctttggtgttttttcccttttatgttagaccattgttagggcgtttggaccttttattgttctactattaccatttgaacatcgaatggattttaataaatcactttgtatgcgtgcaaaaaaaaaaaaaaaaaaaaaaaaaaaaaaaaaaaaannaaggncgagtgagctgtagtgagc

SEQ ID NO: 107018 - DNA, 370 bp, Glycine max
  Clone ID: PAT_MRT3847_67652C.1
ggcacaagtttgttgagatatctataagcagttagatgaaaatgaaagtgcttgttttgtttgttgcgacagttttggcagcataggaatgccatggctcacactaccataagttccctctccaaatgacaaccgggtttggtgggcaatacagcaatgacgtggcatgtgccagttggacgcttggcgtggaagcacacaacgtactcacgtggccaactgttcctgcagcatgcggagagtatatatctgactacgttctaggagacccctagacatcagattccaaatcagttcaccaacagtcttacttctatgctacatctctcacactcaccatcaaatatgtccttgtcatggacgttgatga

SEQ ID NO: 107019 - DNA, 202 bp, Glycine max
  Clone ID: PAT_MRT3847_67653C.1
ctcgatttttcaatacaacactacataatggggcacggggtcgttataaaggatctaatcttacatattctttcattcgacgctagacctcatttatatctaaacctaaatctaattgagttgatactactttcaaatatgataattataaaatcattggctttctcactattaaacgttttgacagttattcttattttta

SEQ ID NO: 107020 - DNA, 301 bp, Glycine max
  unsure (1)..(301): unsure at all n locations
  Clone ID: PAT_MRT3847_67654C.1
acgtcgcangcacgcgtacgtaagctcggaattcggctcgagataattttgagttaaagtgtccacttaaattgaaaaaaaaaaaaaaaangggnggcngcngannagtnagctcgtcgaccngggaatnaattcnggaccggnaccnncaggngnacnantttccccnanagngagtngtntnagantttggngaaancanggncanagcngttnccnnngngaaattgttatcngctcanaattccacacnacatagnnnnccncgnagcaggcatntnncctttatcacncttgttcc

SEQ ID NO: 107021 - DNA, 488 bp, Glycine max
  Clone ID: PAT_MRT3847_67655C.1
aattcggctcgagcaagtttgacagcaacacaacaagctgtaattctggcatattgtcttctaattgaaaagagctcccgacatgatgaattgcaacgatgggacatggccccttacattgaggcaattgattcccagcatttgttttacttcactatacggtgtttatgcgatgttttacgtattcgatgggagttatctcgtagccgaactaaggagcgtgccttactgatgatggataacttggttaaacatgtttatgaatcttctccagcaatagcagaaagaattgcttttagttatgctgtttatatgcctagtattcctgcattaaggaaggaatatgggttacttttagtgcgatgtggtttgataggggtagcagtgaaggagtttgaagatttagaattatgggataatcttatatactgctacagtctgttggagaagaaagctattgttgttgaacttatcaggaaacgtctttt

SEQ ID NO: 107022 - DNA, 106 bp, Glycine max
  Clone ID: PAT_MRT3847_67656C.1
cgaaaatctcagattaataacactggcgatacccgtgaacaagcctggtagagttgagagtgtctgcctatctaggattgttgagcgtcagtgctagataggaaga

SEQ ID NO: 107023 - DNA, 348 bp, Glycine max
  Clone ID: PAT_MRT3847_67657C.1
tttttaggaaataatgctcccttttatgaatataatgatcattcttagcacaaggaatatacctatccttacaaaagggggaataaaatacaacagtctacagtttataacgcacaaataaattaatctttttctaaaggaaaaaaaattgacacaccacgcaagagccttggaacgctgtttacttggttgtactacgcgtcacagacttatacatgccaaagtgttttattaacatttctaccacaaaaaaaaacgggttcagcattcacacaccactgagcgaataatatactatggccccaccactgttacagttgcaggtaaccacctatgggagccccagcg

SEQ ID NO: 107024 - DNA, 405 bp, Glycine max
  Clone ID: PAT_MRT3847_67658C.1
gtccgcgtcaagatatccaatttcattcgtctggccttttactctttcttgatttactccttaatatacctggctttttctttaccattaatacgtgatacatttgacatattttggtctctaacctgttggtgggtgacgacatatccaatctttatggtgttgttattaaatgaaatgttcttgctgcaccaattattgtcatgcaaacttcacgctgtattttacgtataatttttgtacggacccgtgttttgcctatacgtttatggtaaggaagccgtgctatttcaacacgggggggatggtgttggacgtagacacttgttggaaggattggtacacggatattgtttttgttctgattgcggtgcattaacagccttaaatggtctatcttttttg

SEQ ID NO: 107025 - DNA, 462 bp, Glycine max
  Clone ID: PAT_MRT3847_67659C.1
cgtaagcccggaatccggctcgagaaaggcttctaagcttggtgatgagagcgatctttgcgatttgagctattagtggagatctccatgcggcgcattggtggcgacgacgcatgaggatgtcgacgaaaaagagcggcgtgggcatgaggattgtcgatgggaaaggtgtgaacgacgaagaaaagatcaaaccatcgcgagctgacgaaagagatgacttagctgtagtagatcttctaagggagctcaaggagacatgttcaaatcaggaaggatcagtttttgtaatttttttcttaaggcaagcattttcctcagcacatgttgtacaaccaccttgagcagcgtggaagcagcttgttattattccataaagttggcaaattaaaaaattgtttgatttgcccgaattagattgtagcgggtttagcgactttgaccaggtcgaaagcatgctcg

SEQ ID NO: 107026 - DNA, 254 bp, Glycine max
  Clone ID: PAT_MRT3847_6765C.1
cccacgcgtacgcacacgcgtccgaaaaattaatattaaatacaaaaaataaaaacaacagcggtgtaaaaaaaaaactatctgagccccatctattcgttcaataattttgactatactcctaaataaaaaatgcttcatcagaccacctatcttcaacatctcaagcatcttctctctcttatcttgatcatatcactcctgcaagacccaatgactctctgctctaatatctactacattcctcacattat

SEQ ID NO: 107027 - DNA, 225 bp, Glycine max
  Clone ID: PAT_MRT3847_67660C.1
aaatgttgtttcgttgaaagttaccttatgttgaaagagtaaattgtttagagaacatgcatgtcgggataaagagctatcaatgcctcccacttatgcagcaaatcatttgtattaatcctgttgagtattgttgcccccaaacaaaggacttgaccttagagagagttatcaatttctatctgtatttttcaagagggaacttttgggggttaagagactatt

SEQ ID NO: 107028 - DNA, 746 bp, Glycine max
  Clone ID: PAT_MRT3847_67661C.1
gagaacagaaacagaacaaaacacaacaataaaattaaatcttatttttctaaaaaaaagagaaaagaaaatgcaaaaagtagaagagagtgtgatggagtcgttggtgtgtccaagcttcagcgcctattcctccaacacgctcgacgacatcgcggatcaggtcattcgaaacgacgtgcgtttccaagaaaacgacaccgacttcgaattcgtcgcgtttcgcaaggtcgccgacggagtttttgtggacaacaacgccactccggcgttcccgatcttcgaccgcgacctcgccaccgcggcggcggaggacagcggagaaggaaaacggcgagcttccggcgaggaggatgacgtggcggcgattcagatcacgctcgggaagctgctgatggacgattcttcagcgtcgtgctcgtcgtccgaggtggaggacgagctggagaatgttccgccggggacgtactgcgtgtggacgccgaggaaggcgtcgccggcgcctgcgtcgccgtgccggaagagcaaatcgacgggatcgtcgttgtcgaagcggtggaagcttctggatttgctgcggcgaagcaacagcgaggggaaggagtcggtggtgttcctgacgccatcgtcagtgaattcggcgaagaagggaacgaaatcggagaccggaaaaaaatctctggcgagtagcggcggcggcgagaaagagattgcggcggttccggcggtgtcggcgcacgaagcgc

SEQ ID NO: 107029 - DNA, 518 bp, Glycine max
  Clone ID: PAT_MRT3847_67662C.1
gtgttggagcagatcttgctttcttggttccaatgccaaatgttggaggtggaacaacctgtcttattctactataacaaggaaaacaggtgcaaaagctggcgttttccctcatacaacttcagtatgtcacttatttggtcaccattccttgtggaagctgctatttttgaagacgaaaatggtgtttcaagttctaatgttgagctacatctcgacaaactggatagtaaatggactgatcagtaccttgactttgattacattattttttcaactgggaaatggtttctcaaatctgcaatctactatgagaatgacaccatattgggctgccacttctgtcctaagaggaacctgacagagctggggtttaacctggcttatcggaaagccttgaaattagtgatgaacttcatagtgtcttcaaatcacaaaagggtgatttttttccggacattcacacctgatcattttgaaaatatggagtcggttaatgggggaacttgcaatagaac

SEQ ID NO: 107030 - DNA, 597 bp, Glycine max
  unsure (1)..(597): unsure at all n locations
  Clone ID: PAT_MRT3847_67663C.1
aattcggctcgagggttcgaaggtgcaaagcaaggaagctgaaataactaaatgattctgaattcttgttccatgagtccacaacctctgtcacctcacaatttcagagacctcttcgattccgtcgaagcttttctcttcgactgcgacggtgtgatttggaagggcgacgaactcatcgatggtgttccgcaaactctggacatgcttcgcgccaagggcaagaagctcgtcttcgtcaccaacaattcctggaagtcgcgttctcagtacgccgacaagttccgatcgttgggaatttcggtttccgcaggatgagatattctcctcgtcttttgcggctgctatgtacttgaaggtcaacaatttcccatcacaaaacaaggtttatgtaattggtggagagggtatactggaggagttgcagcttgcaggcattacagcttttggtggtccagacgatgcaaataaaacaatagacctgaagcagaactgctttgttgaacatgataagagtgttggagctgtcgtggntggtatagatccaaacattaactattataagcttcagtatggaacccctttgcatacgtgaaa

SEQ ID NO: 107031 - DNA, 242 bp, Glycine max
  unsure (1)..(242): unsure at all n locations
  Clone ID: PAT_MRT3847_67664C.1
ggganaaaacanntnactgctcaacaatcaatnattcannanaanaaaacaaattggcanattttgctgaagctggttctagctaattcctcaacacaccttaattttgtgatnagttcttcagtgctctttcatgcttnnaanggatganaaaatgtngaagttcnaatngtannatgtcanacgatggancnaatactttnnaacaaaaaaaantccgtnntntagttatatattaaata

SEQ ID NO: 107032 - DNA, 250 bp, Glycine max
  Clone ID: PAT_MRT3847_67665C.1
aggaattgctgtaacatcttgattcctaaattctctacaattcgaaattctgatttcgttaaacggatagatattgtttgtgtgccagtgattattgctggaaaacgcgaaggtcctgctatcggaatcgatttgggaacgatgtactcttacgttcgcctgttgcaacacgatcgcgtagatatcatcgccatcgatcatggtgacattactacaccatcctacgtggctttcaacgacgcagttctgt

SEQ ID NO: 107033 - DNA, 448 bp, Glycine max
  Clone ID: PAT_MRT3847_67666C.1
aatcataaagaaaaaaaaaaaaaaaaaaaaaaccaaaaaaaaaaaaaaaaagaaaaaaagaaaaaaaaagaaaaaaaaataacggacgcggcgcttgagaggtccacaactttactatagcgtccccttcaatgcaatacactgtgctgtcgtgttacctcgatttcaattgggtgaaaccctggcgttccccgacttaatgggctttttttttcttgcccctttcctcagttgccttgctacccatcaggctctccccgttcgcccttcccaccagttggcccgcccgaatggccattgccacccgccctgtagccggactttaaacggggccgctccctgggttacccccttagtgaccgctgcactggccgttcccctaccgccccccccttcccttgccttccctctcttgctcgccacgtttcgcctggctttcccttctctt

SEQ ID NO: 107034 - DNA, 2056 bp, Glycine max
  Clone ID: PAT_MRT3847_67667C.1
acgtattctaaagtgtggggctatagcagaaatgcattaatacttggtgcataatacattttcactttcttgtcctaataagataaaaaaaaaaataaaaaaatgaaaccaagagtggaaagggcttgtgtggggagtatgaatgccacgctttccacgtaggaatcagacacaagccgattccacgttcacagaatcaccagtttcacaacctttttcttatcatcaattgtctctttttattctcacttccttaactcagtatctgccaactgagatacattaggaatagcaaagggaaaatggccatgcatatgcaagcacccacaatcagtcttaacactgcaaggtccccatcttcattagctccagctgccaatgctggcctgcgaccacacctcaaccctttggctttaaagtcatctttcttctctggttcccttaacctcttacttcatccaatgcaacagtatcttacttctggagctcccaggatttccatgcgtgtggcctccaagcaagcctatatctgtcgtgattgcgggtatatttacaacgacaggatcccctttgagaaattgcctgataaattcttctgtcctgtttgtggtgctccaaaacgaaggtttaggccctacgctccaactgttgcaagaaatgcaaatgataaagatgttagaaaggcacgaaaatccgaaatcaagaaagaagaagcaattgggaacgcacttcctattgcagctgccgtgggaattgcagtgcttgcgggaatatacttctatctgaacaacaaattttaggctggttgtttggttccattaccctttacgtcagaagaaatgaacctctaatttattcctattcatttgtttatttaggtcaactttcgcatggttctattctatcttattccttctgttaaattaccaacatatttgaatagtatcacctaagaagcgggcagctctttgactattgcttttaatacctagaatgaaatcaaaatattgaaagataatgctgattaacgagagaaaaaaaaaagcactatattgaaagacaaaaacggtagcagaattacacattgtggttatatggaacgctttcattcttgttcttgcaaaacaaatgaaccctctattcttctctccatggatggtggaggggggaaattcaagggagaaaacatatcactaaaactggaggttggtgcaggcttgaactcgtaagggccttctttttgcccccaaacttgatttccatcatcatcataacccctatcccaggtatgtatctcattgttctttaaaattgcaagttctgaagtacagtaggttgccccattccatgaattaggaaatccaccaggtggggttgaaccttcatataagcaacgttttccacgtggacaacgcttaagatgtactgttgtcaaatgttcagcaatatctccaatgacttcttccggctgtggacgctgatcccttggtcgatcacagaaatttttgtactcctccatgtctctaatggcatatgtacttaactcaacatcacatttcaactctttaggacaaggtttcaccataaaaagcctctgccgaaagggtttttgtggagtcctccaaaaagcctgttcaaaatacaagaccttggaaccatccactagctccgctgcggggcatgtaagcattctaatgttgaaatagttatccgggtctctggaagcttgctccttggaatacttttcgccggtgagggagttggagacgaaatgagcgtggtcccaacgcgtggtggacttgcggaggcgcttaacgagaagtgcgccaccaattagtagcagagtcttaagcgccaacccacgagcacggttccatccattcgattccgaatccgaatccccggtacccatctttctatggaattggagttactgtgaatggaagaagcgccacaaccagaagaagaagaaagttattggtctctggcctgtgaatcgttcatcatccagagcccggttccaattttcattccaccccttttggtttgcttctac

SEQ ID NO: 107035 - DNA, 138 bp, Glycine max
  Clone ID: PAT_MRT3847_67668C.1
atggttatgagatacctcatcatcagcgatggggtgactcgaagtgacgtgaaatgtctctcgaggtttcaggctgtcggcgtgaagctcctaacttccgagaacctactaacttccgagaggctccttaggttgtag

SEQ ID NO: 107036 - DNA, 274 bp, Glycine max
  Clone ID: PAT_MRT3847_67669C.1
cgagaacccaaaccttttcctccacttggctttcactgctacgttctttgctggagttttgcaggcatcactcggtctcttcaggttagggtttatcgtggattttctgtcacatgcaaccatagtagggttcatgggtggagcagctacagtggtttgtctgcaacagctgaaatcaatccttggccttgagcattttacccacgaggccgatctcgtgtcagttatgcgctctgttttttcccaaacgcatgagtggaggtgggaaagcgct

SEQ ID NO: 107037 - DNA, 782 bp, Glycine max
  unsure (1)..(782): unsure at all n locations
  Clone ID: PAT_MRT3847_6766C.1
cccacgcgtccgcacacattattctgatttctgatcaagtttgcttccacttttgctaattgcatggcttccaagaccacaattcattgctgcttccgcggtgaagacacacgcaatagcttcactggttttctttttcaagctcttagtagaaaaggcaccattgatgcattcaaagatggtaaagatctcaagaaaggcgaatccatagcgccagagctgatccaagccattcaagggtctcgccttttcttcattgtggtgttttcaaacaactatgctttctcaactatccgaaaaaagcaggtatattgttcgagaaaaatcacctaagaagccaagaaaatggagtagattatgggatttcaaaaagatctccacaaaggcagcagattatcttgaagccatggttattaaaaataaagcaactttcctcaaacaacaataagggcagatgctctatcaaaaatgattcaccttaagttgctcgtacttgaaaaaatgaatttttcaggaagacttggtaatctttccaatgaattaggatatcttacttggaatgaatatccttttgagtgtttgccacctagttttgagctggacaatcctgttaggttgcttttgcctaatagcaacatcaaaaacccaaacaacccttttaaatttggggggnggnnnaanaaggggggggcncccccaaaaacttttggacatggagcctctacagtctacacaatttgagacatttgattctctcattttccaaaaatcgaattgagatg

SEQ ID NO: 107038 - DNA, 427 bp, Glycine max
  Clone ID: PAT_MRT3847_67670C.1
aaaaaaaggttaaacctgtgggctgaatgctctttgagagggaaaaaaaaatcccaaaccttgctacctttttcctgaaatttttcagtccctttaaaggacgtttgaaaatcccaataaaaacactcatcactaaacgggtctttaaatgggaacatggaaaaacaaaactgtgttcccattctttttgaaaaacaagttgccaataacgtaaaaatgggggggggaaactttaatttgggataaatttcttttaaatggaacatagctcatccttgcttgaaacatcttcccccattagttcttcaagaaaaaactcaccctcccaaattttttctccattttttccctcccatgggtctgtttttacaattgggggagtcccttcaaggggaaaattccctttgccttccagtacaggtttttt

SEQ ID NO: 107039 - DNA, 217 bp, Glycine max
  Clone ID: PAT_MRT3847_67671C.1
agcaaggcccccctatctttattagggggcacatatttttctttcaaactataattttttacggggctacacccttacgtgggcctctgggtataaatccaaaaaacctttgcaaacataacggcctcattaatgggaaaatgcggaaaattcaaaattggccgtttattaattgggcagaaattcccccaaaaaatttgtggcaacatgctaacaa

SEQ ID NO: 107040 - DNA, 314 bp, Glycine max
  Clone ID: PAT_MRT3847_67672C.1
aaatgaaacaaaatactttttcagaaaataaaataaacagtaacgcggtgggcataacccctggtacgaatttgcacggaggcaaaatatacctggttcaatatattataagtcttgtagtgagaaagttaaaggatgatgatctgccagacaccatattcatatgcacctcttgacctgttttctaaggaagatacatcctacgaagtatacattaatcaggtgtaattcattccctggcttttgaaatgtatatacttgcttataatgatggtttaagatctgcatataattctgataaattattgctttga

SEQ ID NO: 107041 - DNA, 2345 bp, Glycine max
  unsure (1)..(2345): unsure at all n locations
  Clone ID: PAT_MRT3847_67673C.1
tacggctgcgagaagaagacagaagggggggtgaagcttgtctagcaagtcgcattgaaaattgtaagctgcactgcagagagtgagagcgaatggtaagagtatcagcggttcgattaagcgccaccatgttctcctcaacctctctcagaaaccctaacttcctcctccttccaactcgcttcgacgcacccgttcttcgctcccacacgctttccttctccaatcgcctctcgcttcgatgctacgctgctcgcgccgccttcgacagagttcccgttctcaatcccatcgtcgaaatggacggtgatgaaatgacgaggattatatggaggatgatcaaggataaacttatatttccttacctggatttgaacataaagtactttgatttggggcttcaaaatcgtgatgctactgatgacagagttactgtggaaagtgctgaagccactctcaagtataacgtcgctgtgaaatgtgcaacaataactcctgatgagacccgagtgaaagaatttggactgaagtctatgtggagaagccccaatggcacaattaggaatattttaaatggtactgttttccgtgaacccataatatgctgcaacataccgagaattgtttccggatggaaaaaacccatttgtattggtaggcatgcttttggtgaccagtatcgggccactgatgcaataattacaggaccagggaagcttaagttggtatttgtcccagaagatggtgatgctccaatggagcttgatgtttacaatttcaaaggcccaggtgtagcacttgctatgtataatgttgatgagtctattcgagcatttgctgaatcatcaatgtcacttgcatttgcaaagaaatggccactttacttgagcaccaaaaacacaattctaaagaaatatgatggcagatttaaggacatattccaggacgtgtatcgaatcggctcgaggcaaaagtttgaagaacactcaatatggtatgagcataggctaattgatgacatggtagcatatgcactcaaaagtgaaggtggatatgtttgggcttgcaagaattatgatggtgatgtccaaagtgatttacttgctcaaggttttggctcattgggtctcatgacttctgtgctgttatcttctgatggcaagacattagaagctgaggcagctcatggaactgtaactcgacattttcggtttcatcagaagggacaagaaactagtacaaacagtattgcttccatatttgcatggacaagaggactggaacatagagcgaagctggataataatgaaaaattacgggattttactcaaaatttggaggctgcatgtgttgagacagtggaatcaggaaagatgactaaagatcttgcaattctgattcatggacctaaggtatcaagggaattttacttgaacacggaggaatttattgatgctgtggcacataatcttcagaaaaagctccgagagcctgcagtggtctagacattatttttgcaggggggaagaggaacataagttggaaaagctaaaaagtggtttgatgggtgcttaattttttggcctgtgatgctgcttttggttggaatcatgggaccctaggatctgaggaaaattttaattggtggttgggtggataattgattcttggatttttggccactgactgtcccattcttacacacaccaccattacagttatttaaaacggtaaaaatccgtcagtacggaccagcagaattaggaaagtacaaaattttgatgtgaataatgcagatgatggatcatgtttttattgtaatttgattggtttatatatatatatatatatccaaacatatatctagttactcttatatctcctttccttaagcttgtttctctaaattcacgttgacttcagattaattctataaattcacgttgatttcaaatcaattttacaaatgctagttggtacacatattaagaaatctaatcttttcgtattgtgaatatttccaacaacttaaaaattcctcgcgtggaggaaatgaacataaggaagaagccaaggagagacactcagacacttcaggacagtcattggcatgcggtgaaccattcacattagcagctgattggtatgttgggaggagaaaaggagcaacgcggcatactcaatgggttgaagaaagaaaaaaagaagagcaattttggatttttcatgcaataaactatattttttaatattaataaatagcttttggtatataaaaaaaatttgannnnaattcaactcactttaactcatgggttaagtgggtcaactctatgtaatcctgc

SEQ ID NO: 107042 - DNA, 373 bp, Glycine max
  Clone ID: PAT_MRT3847_67674C.1
ctctctctcttctctcctctctcctctctcctctctcctcgcctttctctttctctctcggtcaaatttctgtctctctcatctttctctctccggaagggcaaaccctaaagaccgtttgcacccaccagtaagttttctctctcctatctcttctctctctctctctctctgcgctttctccttctctctctctctcccttcctcttttcccttctcttcctctctttccttaaaaatttgaaattgatggggtccttcttctaccgctgagcctcaatataaatcatttgtgctgggaatttggttttcttcgccataacgagcgaaaactaatcccaaattttggaaccctaaaatgggaattggggat

SEQ ID NO: 107043 - DNA, 577 bp, Glycine max
  Clone ID: PAT_MRT3847_67675C.1
agagccacaacttaaatctcgccctacaaaaaggggaaaaactattgagcttgatgatgccccttcccatcagggggaaaatttgacaaggttcaactcaaaaaaaacagttatttttgccccccctgagggtgaatttaaactaatgaaatatcgtatcccggggggtgttattctccccttcaaagtatcgccacccataaaggatcttggccaaacccggatgaaaaaaaatgttaaggaaaagagtgtttttggcgaaaaaatgtttccactaggggttgttataaaatttccggtgcaaaaacatactgccaaaacgattttcacaaaaacttctggccaagaaaagtataaggcgtctattgtttgtgtgttttgaaaaaaaaaaaattttcgtgggaaatctgacccccccttgagtgaaaaaattgatttttttcccacaaggacaaaaaaaaattcttcgactacaccaccaattcagagggagtttcaggttcccatgcccacggtatgtgtttcacgacccctttttctaagggggggagaaaagagggaacacactctggtagag

SEQ ID NO: 107044 - DNA, 459 bp, Glycine max
  Clone ID: PAT_MRT3847_67676C.1
agactcaatttaccagtttcgatagggggacccagatttttcagtgattacttttttgaatctaaagaagggaaaaaaaaatgcattcaaaaaatcaccaaaacttatgggatcttacactaaccccaaaatttacagctccaacaaaattggccttaacccctaataaaagggaagaaataaacttgcaaaacgcctaccccttatataaaaacccaaccccatgcttacaaccctgaaaaaaatcacaatcttctatttcggaaccatgggttacacctataatctcgaaccggcaccgggcggcctaccaactttacctaaacagaggggtgaaaaaaaatggcgtaaccaagggtaaaaccgatgtcatagtgaaattgtattccattcaaaagctctcaaaaaaaatcaaccggaagaataaaatgaaaagcacggggcggcccaggagggaac

SEQ ID NO: 107045 - DNA, 675 bp, Glycine max
  Clone ID: PAT_MRT3847_67677C.1
tattaaagtcagctgcagctcctggccagccttcagggcaagttttgcatggtgctgctggtgggatgtctccacaagttcaagcacgtactcaacaattaccagggtctactctggatattaagggtgagattagtcctgttttaaatcccacagctgctggtcctgaaggatcattgatgggaatgcctggatcaaatcaaggtagcaataatttgactttgaaagggtggcctctcacaggtttgggagcaactgcgctctggtctactccagcaacaaaaacctttcatgcaggctccttaaccttttcatcaacttcaaatgttgacaccacagcatcagcaacagcttatgctggcgcaacaaaatctggcatcaccatctgccagtgaagaaagtagaagattgagaacgctattgtataataggaatattggtctaaataaggacagtctttcaaatcctgttggcgacgtggtatgaaatgtcggatcccctcttcaagggtgggggcctgcttttgctcgtggagatacagatatgctaatgaagttgaagctggctaagtacagcaacagcaacaacagtcaagtactaatgcacagcagcagcagcttctacaacatgtgctttcaagaccagcatctcagacttctaatcatagcatgcatc

SEQ ID NO: 107046 - DNA, 273 bp, Glycine max
  Clone ID: PAT_MRT3847_67678C.1
aactgaaccaaatcatcacacacacatactaagttgcaacaattcttctactatggatctcctccttctggtatagaccctcataggtctcttcttcgctgtggtggtcgccatcgtcgtctccaccctccgcggccggtaattctagctctcaccgggcccacctcgagccgctcgagccgcaaagtggtcttatttgttaaacacttgggcgttggagcaaatgtttgcttcatacattttctctggtatcaacatgctcactgtagaaaa

SEQ ID NO: 107047 - DNA, 288 bp, Glycine max
  Clone ID: PAT_MRT3847_67679C.1
aggcggctcgaggaaaagagatgttcttttctctttctgcaatttttgttttgaatttaaggatggctaccatcaattcggaggtgtgttagtctgtattggggaaatgggaatttaattttactttcaacctaactacccttcttactctcgtaacaatggtggcatgatatttcccttaaacgaatatgttctcaagctatttcaatcttataggaagtaagagtctgtttattaatgagtttatggttaaaattataaaaagggtttttgtttcttactcaagct

SEQ ID NO: 107048 - DNA, 398 bp, Glycine max
  Clone ID: PAT_MRT3847_6767C.1
gaagagaaaaaaaccgaagagaagaaatcggaagataaaaaggcagaagagaaagctccgaaagaggtgcgtagtttcgaattttctcaccttcgtcaataagcagaacgcgaattaattgaaacttaaattttaccgtgttgatcgagttattttagttaattaattagagtgacttgttcaatttttatattaattaattttggttgattcagagcacggtggtgttgaagatcagattgcactgtgacggttgcattcagaagattcgaaagattctcctcaaaagcgaaagttaggcgtgcgtgtattctgacctacattattaatcgtcttactaactattttaattaaaacatacaagttaagtataattggatgatgataccggagcccac

SEQ ID NO: 107049 - DNA, 127 bp, Glycine max
  Clone ID: PAT_MRT3847_67680C.1
gaaccttatttttcttttcacaggcacgaccttaaacacaacatgtgctgggttactcaattgacccatcagcgcaaaatgctctattacaaaaaacattcagcgagtggtattgtacaggtgtctt

SEQ ID NO: 107050 - DNA, 319 bp, Glycine max
  Clone ID: PAT_MRT3847_67681C.1
gtggcaattattgtatcattgtaccaatccgcatgcctctatgcgctgaaacatagtacaccaggggaatcacagttacaagacggtcacctaaaggatcacatgctaactgttgaggcacagatagaaccaccgacatcgacaatatatacaggttaaaggacagggtgtgtagggagcgacaataacacggtacgctataattgtgagggggttaattgccatgacccttggatgcaaggacaccagagattccacactgacaatgcgtaaatacacacgtggcttaaatttgcttggctccctttgattcgtggtt

SEQ ID NO: 107051 - DNA, 331 bp, Glycine max
  unsure (1)..(331): unsure at all n locations
  Clone ID: PAT_MRT3847_67682C.1
aaaaaaaaaccgacccacgcgtacaaacacgcattcnatatatttatacactcatttatttttaaaaaaaacacatacccaaatcccgccgttttataacaactaccaacatccataatataatctacttcaacaagaaatttcattataaatttcatccccattcaaacacaactcactactaaactcccactaaaaatctaacattatctacaaccaatcttctacccatcacttaaaaccccgacacaaccccacatttaaatacaaataatttcataacaacccttacctcaacatcaacccccacccccatcacaaattctaccat

SEQ ID NO: 107052 - DNA, 291 bp, Glycine max
  Clone ID: PAT_MRT3847_67683C.1
gctcgagctcagtgaaagagaatccgaggcgaagagaagagaaaaattaagatggaggggaaggagcaggatgtgtcgctgggagcgaacaagttcccggagagacagccgattgggacggcggcgcagagccaagacgacgggaaggactaccaatagccggcgccggcgccactggttgacccgacggggcttacgacatgggacttgtacagagcaaggatagcataacttggggcccattttctggttataatacatgactgtttaaccgtcatgggagtcgacggg

SEQ ID NO: 107053 - DNA, 541 bp, Glycine max
  Clone ID: PAT_MRT3847_67684C.1
cttggggggggggggggggggggggggggggggggggggaacaatataatggagggcagtgtggaaaggagggcaactagaggaggatggctaaaagggttaactagatagaacaaaaaataaaataagaaggtagtaatggggtggggtggggaaggggttacgcacaatgtcaaagttcaatttataatgagtgcggaccttaagccgtactacaacaattagggtaatgtgcaagtggaacggttggtggcgatttttatggagggaagtcgggtgggctgccagggattgtgggaggttaagtacgctcaacgccaagttagaagaaaagaacccgtgctaataggcggtttttcagtagcttacattagaggtttgccatattgaccttcaatcgcaactttaaaatatacgttaatccaaggttaagtttcggagaatactttatcgggatagaacttaataacctggcttgagtcgatttaatacttatgttacagaatattccgggccagggtaggaacaagcacacgcatcc

SEQ ID NO: 107054 - DNA, 533 bp, Glycine max
  Clone ID: PAT_MRT3847_67685C.1
atggcataatacgagatgttatcaactatctccgactaatttaatttaaacttcaatctcaatataaaataagtaaatttgtaccttcacttgatggattcaaggtcaactttagaaataattcattgatactttatgctgcacctttcccttgtcaacgggcccgtagtgttcctcctccacaacgtgctttatcctttttctacaaaggatttgagtattgatcattgacaacaagtgtgctttttctggcatccttgacaaataggcacgttagggccctttttcctggtatcacctttttttggcacgcttcatttttcatatcttcaccaaacatggctctaaactatctttatataagtccattacttcattagtggtgaccttcattcacctcgctggtggataaaatgctcttggcctccaacaaagtccttcttaattcctcatcctcccggtgtctctttaagcaatatttcatagtgcttgtgcttgaagtttcccatcttttcaacttggcattacaatct

SEQ ID NO: 107055 - DNA, 269 bp, Glycine max
  unsure (1)..(269): unsure at all n locations
  Clone ID: PAT_MRT3847_67686C.1
ccgcggacgcagggagcgctccgagcggccgccccccaaattttctacacccnnncgaaaagaaaggaaagagaaagggtagaaaaaaggccagggcataaaacacaggagcaatacacgcggagatgcaacgggagagagcacgaaggcaaaaacacgtggaaacgacaagcccacaaacggcggaaggcagagggaggcccaacgcccaaaggacgaccaataaacacggccacaggcagtggggcagcagccaaacaacggggagg

SEQ ID NO: 107056 - DNA, 294 bp, Glycine max
  Clone ID: PAT_MRT3847_67687C.1
gtttgtataaattggattaaatccaggatcctgacagtttcactgttcccattcatgtgctttgtaattggttttattttaaacacaattgctatattctatggatctctatctgcaattcacttaggtactattgatgatgtctttgttatatgtgcttttatctctttccctttatcacttctagacacagctgttttaataaactcgaatgatgctctaatatatccatgctgttttaagaccatactttggttcataccttatattaattcatatctcacaccattttta

SEQ ID NO: 107057 - DNA, 402 bp, Glycine max
  Clone ID: PAT_MRT3847_67688C.1
aacaaacactggtatcaaaggaggcagatctataagccccttgcaagcgttactatagagaagttggcagcgtgtacactcataggcgtctctacatatatctatatctctctctacgtgtagctcggattgcactcgggcagatgatcatcacttacatctctataaggagagttggtagaccctgctattatattcgagacattgttctcacaataagaaacgattttgaactccttaatgatcaatgggcgaacgatatatccaggagttgatcttattatatagattgctgcttaagcttatccctaaaggaggattaacccctttaccttcttagtgggtcatatatgtctatagaacgcagaatatacgagctttctaactatctaagaaaataac

SEQ ID NO: 107058 - DNA, 447 bp, Glycine max
  Clone ID: PAT_MRT3847_67689C.1
gtccttgaagcttcccaatatcattagatgtaaagagctacatacttgagagttgtggttgctgaggttcttcaatcaccttgctagctactgcatctactgttagggcaagtgaagcattcaattgaataacagagttggctggatccatttttcttttgctaatagagtaccttgaagcatagcaaggattgattcatgatgggcaagtgggggattttgtggttaactataccgtctgactattcacctgttaaatatgaagaaaagaaaaaccaacttgactggaaattaagacgacagaaccaggcaaatacaaaaagatgaagttcgggttgaaggattggagaccctgggttatcttgataactagcagagcaaggagcactctaccgaggaggggatgctctaaagtttgaatcagaagtaagaataaattttcccttc

SEQ ID NO: 107059 - DNA, 247 bp, Glycine max
  Clone ID: PAT_MRT3847_6768C.1
cattgtccccatgcattggccatttttctctgtgtgacgtgtgcgatgatgctacctgcaaacattcctctacggttgcggctctaaaagaaaacaagcatttgtcatgtctctttgtataacccgtgagactagaatctagaccttgtgttattggagttcatttttgcattctcaaaccaaggagaaatcctagagtttctcctttggttgagacatagggacctgtgagtgtcataaacatggg

SEQ ID NO: 107060 - DNA, 355 bp, Glycine max
  Clone ID: PAT_MRT3847_67690C.1
gaactaaaattgaatttcatgtttcattactactactaattgcatacacaacaccggggtacaccacagaaatgccccaattgatataaaagcatatactcaaccatatactaatggttgaacacatcacttactgagatcacctggactggactgctctttaacaatttcttaggaagccacacccaaaatttctacttgcctgtatgaaaatgtggggaccacgttcacaaattgatctggagcttgcacagggtgataagctaaatcaaacgcactagtgggggaatacaattcttgttgtgcagaaacgaggcactatgacttttatctacagaacatggacaggaatgat

SEQ ID NO: 107061 - DNA, 514 bp, Glycine max
  Clone ID: PAT_MRT3847_67691C.1
aattcggcaccagcaacaaaaaatcaatattcatcaaatgatcaacaacctaaattttaaaacttaaaacctcaaatgctcaaacttccatttttaacaacatgattcatttttaagtaacctcgaaaccaattcaaaacaaccgaagcattgaaaaggataaagtttttcgtatctataaaacccaaggaacttgctttgagatgaaacaaaggaagaaaagagggaactttggatccaaggaggaagttttcttcaactccactaacaattcaaactataagggcattatccatacccaaaatcaacccaaagtcagattcaaaactaaaaactaagtcttttccatgaaaccttcgtgggtgccctagtgaaaaacgaaaatggaatataaaagaggaaggaagggtgtttatcacaaaaaggaacaaccaatgaacactaaatagagaaggaaaagatctcctttgagcaagaaaaccaagttctcaattcttcaaagaatttgttttct

SEQ ID NO: 107062 - DNA, 298 bp, Glycine max
  Clone ID: PAT_MRT3847_67692C.1
tcaacggggacattgatacgggtgtgaaaatactcttctgaggcattaacgcgaggagctctgttgttgctcaagtgatcccatcaggatttccatggattcgcaaaccccaaaaccacgttctcaccctccttcggcagcgggcaatctcatcatcgcaatgttcaaaacgtcccaaacatatatcccgacatcactcccatgttcatcgacaagtcttgctcttcgccgaaacaagatttcaacaacaaggtcacgaatctcaaagacgagctcattagaaattcctgcgactctg

SEQ ID NO: 107063 - DNA, 606 bp, Glycine max
  Clone ID: PAT_MRT3847_67693C.1
cccacgcgtccgcccacgcgtccgcccacgcgtccgggagactgttcctgattggatagcaattgtaggaagtggttatattggtcttgaattcagtgatgtatatacagcacttggaagtgaggttacttttatagaagctttagatcaacttatgcctggatttgatcctgaaattagcaagttggctcagagggtccttataaatccccggaatattgactatcatactggagtttttgcaaccaagatcactcctgcaagggatggaaaacctgtcttgattgaacttattgatgcgaaaaccaaggagccgaaagacacgctggaggtggatgctgcactaatagcaactggaagggctccgttcacacaaggtcttggattggagaatattgatgtggtaacacagcgtggttttgttccagtggatgagcacatgcgagtaattgatgcgaatggcaagctggtgcctcatttatattgtattggtgatgcaaatggcaagatgatgcttgctcatgctgccagtgcacaaggaatttcagtggttgaacaagtcactggaaaagatcacgtgctcaatcatttaagcatcccagctgc

SEQ ID NO: 107064 - DNA, 295 bp, Glycine max
  Clone ID: PAT_MRT3847_67694C.1
ctttcaagatgcagatcttcgtcaagacccttaccggaaagaccatcacccttgatgtgggaagctcttacaccatcgacaacgttaaggccaagatccatgacatggaaggaattcccccagatcagcaacgttttatatttgccagaaagcctctcgaggactgtcgtactctctcctactacaacatccagaaggagtcaacccttcaccttgtacttcgtattccgagctgcatgcagatcattatcaagactctcactggcaaaaccataacactagaagtcgaaagctc

SEQ ID NO: 107065 - DNA, 1437 bp, Glycine max
  Clone ID: PAT_MRT3847_67695C.1
ggctcgagcattttccatttccctctccctccaaaaatgcattcctcgctctctctctcgttctccgccacttcctcctccgtcgccactgtttccagatcacgccactcattccactctcccgccgccgccatgcctctcaatctccgcttctgcggcttgaggcgcgatgcatttggttcaggtctcgctgcttctctcaaccgctaccactcccacctccctcgccgccctcactccgccgcagtctctgccgcgctatctagcaatggaagccctcccaaatcgtttgactacgatttgctgataatcggcgccggcgttggcggccacggcgccgcgcttcatgccgttgagaagggtttgaaaacagccattgtggaaggagccacgcgtccggggacatgtgtgaaccgaggctgtgttccttccaaagctcttttggccgtgagtggtcgtatgcgagaactaaagagcgatcatcacttgaagtcctttggcttacaggtttctgctgccggctatgacagacaaggagtcgctgatcatgctaataatcttgcttcgaaaatccgtaataacttgaccaactcaatgaaagcgcttggagtagacatacttactggttttggaactattctgggtcctcaaaaggtgaaagttggctcctcagacaaaatagtaactgcaaaagatatcatcattgctactggttctgttccatttgttcctaagggcattgaaattgatgggaagactgtgattaccagtgatcacgcactcaaactggaatctgttcctgattggatagcaattgtaggaagtggatatattggtcttgaattcagtgatgtatatacagcacttggaagtgaggttacttttatagaagctttagatcaacttatgcctggatttgatcctgaaattagcaagttggctcagagggttctcataaatccccggaatattgactatcatactggagtttttgcatccaagatcactcctgcaagagacggaaaacctgtcacaattgagctcattgatgcaaagaccaaggaacagaaggacactttagaggtggatgctgcactaatagcaacaggaagggctccattcacacaaggtcttggattggagaatattgatgttgtaacgcagcgtggttttgttcctgtcgatgagcgcatgagagtacttgatgcaaatggaaacctggttcctcatttgtattgtattggtgatgcaaatggcaagatgatgcttgctcatgctgccagcgcacaaggaatttcaagtaagaagcaggtaatgtaattttgctactaatttttgagtcatttgcttccatttacttaatgaaaagattgttggatagtggttgaacaagtgacctgaagagatcacgtgctcaatcatttaagcataccagct

SEQ ID NO: 107066 - DNA, 391 bp, Glycine max
  Clone ID: PAT_MRT3847_67696C.1
gcgtcacatcagactaggattttggcctccctattgacacattttgtttagggacaccgttcgacgagcgttcatgtaatatcttccctcgaacatcaagttcttacggggacaagccgccggcataatttgagcaaccttttgctgccccacccaacaaatgtgagcgttacccctgttgctagggggcctgtttctgacgtcacgcacaacatgtgcatcgcgcgcctggggtcacatcatcatagggattaaacatcacaagcttgcagcttcatttgtgacatgtaaacgagcgagcactctcgtgccattagacctctaattttatttctttctcggggcgcatgtcctatgtgtgccgcttgactttacccataacttaagcatg

SEQ ID NO: 107067 - DNA, 780 bp, Glycine max
  Clone ID: PAT_MRT3847_67697C.1
aatctcctgaggataccttagcattttttctttataatatatttgcaccatataattatatgtacgcatcaacatacacagagactcattccacatactagttatggctcctataacctctatatttcaccaaaccaaccttgttgtgcaaacttaaccacagactcgtacaaaaccacgcgtccggggaactggtcacagtactcacactaaccttggaagcgaatgcacttcctatgatgctggtgccacaggcaccatagcacgttggggagaatcttttgaagtttccatgggcaatagcaaagaaaacaatgatcacacagaagtttggggtgtgaaatacaaaccaagtcagaaaaactacacttgtggctttcaccttagggcaagccgtgacaataacaaaagtgttgagagcatatatttcggattaggcgatttttccaacaacaaaactgaatttgctttgaagattacaagaatcggtcgcgatagtctccgaggagggataaccggcatcgactcttccaccgcaccaatgtacttcacaagagcaaagcaagatcacacaatagagacaactattgttccatatggttgttcattcagagatggtctttttgttatggaaatgaagaagaaggttaatgctgagaatgcttatatggttaccataggacactattatgttaccaacgttggtggtcttttctgttgaggccaaaatccttcgcagtaaaaactgtttttggtgtttcagtggaggggtcctttcag

SEQ ID NO: 107068 - DNA, 1175 bp, Glycine max
  Clone ID: PAT_MRT3847_67698C.1
cttaaaaggattccaatgagcctttttacatatatgcaacttcccttgatcaccggaactcagaagagaacttaggggagaaaatgatgatcacagaagatgaaacgactcttacagcaagcaaagaacaacaaagtgaaatgatgaacggagacaaggacaatcatggaagcgaagatgacaactccaaagagtggttgaacctgagcataggtggaacttcttcactatcaacatctggagacactgattcacagctgtaccaccagccactgccaaagttttttcatgcaacttctgcatgaggaagttctttagctcacaggcactaggaggccatcagaacgctcacaagagggaaaggggtgctgccagaagataccaatctcagaggtcgatggcaataatgggattctccatgaacacactaactatgtgtcgatcacttggtgttcagccacactcacttgtgcacaagccatgcagagatggtatcatggtggcaccgagctttcatgatgcatatgcaaggattgggatggcatggacacctttctggaccgaggatcaagcggatatggtgtggccaggcagctttcgcttggttccaaaacagccacagtcaccacaggagccactcaagcttgatttagacctcagactctgacaagaggtttggtctcagcttggagccttatcctcctttttagccaaaagagcttgttcgttagtgagctgggagagtcaataactcagatgctgctgctactgcatagtaaatggtaggagatttttgtttttcattgtctatatgactacatgtttagcaccagaaaacccaagttataactccctggctatctattttagttccttcaagtttgatataactcctgatatgcagtgctcacttgacaatgttactgacttggggagatttagcttttcgacattaaagtcctgattttcttcctgcatgtactttagaacatcttattcgattgacagaagattaaaaaagttaagagcaaggactacagaaaacaatttgtggatgctaggtacgttcaagatggaatgcttccaacatgtgtaaagcctcaattctaatactagattttaattaaagacaacatacgaatgaaactttccagtatgacaattgatgctatgcc

SEQ ID NO: 107069 - DNA, 123 bp, Glycine max
  Clone ID: PAT_MRT3847_67699C.1
gcgtccgccatactcaacctcctactgagggatggggccccacttcttgccaacgtgtaaccataccttgcttatgcaaatgatcaaagcagtcctcgtgactatgctcggtttaaccaacaa

SEQ ID NO: 107070 - DNA, 722 bp, Glycine max
  unsure (1)..(722): unsure at all n locations
  Clone ID: PAT_MRT3847_6769C.1
agaaagtcttccatagccccccaaaaatgaagagcaccatcttctttgctctctttctcttttgtgccttcaccacctcatacctaccttcagccatcgctgatttcgtgctcgataatgaaggtaaccctcttgaaaatggtggcacatattatatcttgtcagacataacagcatttggtggaataagagcagccccaacgggaaatgaaagatgccctctcactgtggtgcaatctcgcaatgagctcgacaaagggattggaacaatcatctcgtccccatatcgaatccgttttatcgccgaaggccatcctttgagccttaagttcgattcatttgcagttataatgctgtgtgttggaattcctaccgagtggtctggtgtggaggatctaccagaaggacctgctgttaaaattgcaagctgaggatgacaaatgtggggatattgggattagtattgatcatgatgatggaaccccggcgtttcgtggtgtctaagaacatacggttagtgtggcagtttcagatccttgataagggactagctgccaggaagatcgttgccgtttctgcagtgagtcatacaccgtcggagtatactacgatgaatcatccgtggtacgaatcttgcactcaataatgatagtagagttaatttgtgcattcagtcgtggcgatgtctaggactatgatgtagantantgagattaatatat

SEQ ID NO: 107071 - DNA, 170 bp, Glycine max
  Clone ID: PAT_MRT3847_676C.1
ccatatttattggaccggaaaagaggttacaggtactaagggtcatgctctagccggggtgagggtgggagtttaatgtgagaatgagggatcaacccagactttagccgctagcttgaattatcccaagagcgacattctaggcagagccccacaggtcaacgcgcgag

SEQ ID NO: 107072 - DNA, 670 bp, Glycine max
  unsure (1)..(670): unsure at all n locations
  Clone ID: PAT_MRT3847_67700C.1
ccacgcgtccgcctaaaccttctctctttctttttcaaaaccctcgctctcaccgtcgcgccggaatcttccccggcaatgtcggcgccggcggaggctccttccttcactgcctctcctccgtcagagactactccctcacctaactccactgccctctctcctccgcctccctccaccatcaatgccaccgtttctcctccgccgccggaggcggcctcccctccgaccagtaccgttaacagcgggttgtcgacgggtacagtgagcggaatagttataggggccgtgttaggttcggtgggtatgcttatcattgggggcattttcttctgcttctataggaattggaaaaggaagaagaaccactcgcagccgccacaaccaaaagctgacatagctggtggcacacttcagaattggcaggacagtgttcctccaacaacagatggtaaagtgggcttctcacccaagcctcctcctgggggtttagtgaatcagcaacagtcatccgctgctctcctcacacttgttgtcaattcttcgaacaccagcagcagttttgggtccgagaaggcgaagtcatacatttctccatctcctgncacttccttggcactatctcanagcacttttacgtatgacgaattatctatggcgacagatggat

SEQ ID NO: 107073 - DNA, 270 bp, Glycine max
  Clone ID: PAT_MRT3847_67701C.1
tacggctgcgagaagacgacgaagggtgagagacaaaccttcctatcactcactttctcttcaacgacacaaaaaaaaaaaaaaaaacctaaacccaaacccaaattctccgaaattagattcctttggggaaagtttttcccaaaatcaaggcttccttaagaccgggatcgcttttctcccttcaatcaaattctccgcaacaaattttgcgatctttccgtggttccgaatcgtggaatttggggggaaacgcccccatttttaaaa

SEQ ID NO: 107074 - DNA, 206 bp, Glycine max
  unsure (1)..(206): unsure at all n locations
  Clone ID: PAT_MRT3847_67702C.1
agctggatcctctagagcggnnnccttttttgtttntntntnnnnnnnnnccgctgaattgtgtcttattttattcgcaaggaatatacagctttgttatagctgataatttatttgcttctcataaaggatatcaatttatttgcttctcataaaggatatcataacctacactgctcgtgagcataatgaaaaagactatgttc

SEQ ID NO: 107075 - DNA, 688 bp, Glycine max
  Clone ID: PAT_MRT3847_67703C.1
gtttttccacgcgtccggagaaagattacactcctaccttaataggtgggagaagaaagaaagagaaggggccaaaggagaaggtgtatgatatttatatggtccaaagttgaatcttctgccacaacatacaccatcatcctcctccaatccatcatcaatggccgtgaccactccctgtatcaatgccacagaaaagaagcactggtggctcaccaaccgaaagatcgtagagaaatacatgagagacgctcggagtctgatagcgacgcaggaacagagcgagatcggttcggcgctgaaccttctcgacgcggctctggcgatctatccgcggctggacgaagcgctggagctgagagcgaggtgtctgctatatctgagaaggttcaaggacgtggcggatatgcttcaggactacattccgagcctgagaatggcgaacaacgacgactctggttcttctgtttcttcggatagttcgctttcgagggaaggtgtcaagcttctccctacctccgattccgatcagagtttcaagtgcttctctgtctctgacttgaataagatcgttatggcagggctgtgtaatacttgcaacaacgaatggtattggagattcttggttctggtgaaagcatgttgccacctatgccttatggaagacgccatggtccttcttcaaacc

SEQ ID NO: 107076 - DNA, 1597 bp, Glycine max
  Clone ID: PAT_MRT3847_67704C.1
gtctatcttggagtgtgaaagtaacgcaactaacaccacacctatatattaatttaccgtgaactcgtttgaaagatttgctgctgacccaaagtggttgcgcgttgcgttaatgctactactctccttcagcttcttaatcactctctcaaccctttcttcttcttcttcttaccagcgtcaacaatgtcagatccgtaccagatttcgttcgctcaagccttcttgtgcagcgctttcgccgcgtgtttcgccgagttttgtaccattcctctggacacagctaaggtcaggcttcaactccaaaagaaggtaggggttgatgatggagtgggtttacctaaatacaagggtttgctgggcacagttaagaccattgctagagaagagggtatatcagccctgtggaaaggcattgttcctggtttacaccgccaatgtttatattaggacttaagaattgggtgatatgatcctgtttgtgtatacaaggattcttcctcgttgactacgctcatcttcatacgggggcttgtgcatttggttttactgtccttattggttctcctgttgatgtggtgaaatccaggatgatgggggattcaacctacaaaagcacatttgactgctttctcaagactttgcttaatgagggatttttgtccttctataaaggtttcctacctaattttggtcgagtgggaatctggaatgtaattttgtttcttacccttgaacaagcaaagagagctgtaagaggataattcttgtttctattcatgattaagattcaccaagcagatatagtgttctttctccggtgattgctatcagatgaacaacagatttgttagaggagaaaggtggttggtctttctacatttacttctgccgtgtggatggacgtcacgcttcatatattcttagtcgaagaataaacagtcaaattagctttgtctcctacttgtgctatgtggacgccacaattcaaacattcttagccacaatgaacagaccatgaaaattacatttacttgaaaggcattcactgtgctggattgaatagacaaatgtttttctgggaaataagttgcgtatttcccggctcattgaatagacaaatgaaatgaaacatgtatgaatacttaagagtaatagggtctattgtcattttagaatgaatattgaattttgttggttcgttctttttccggtgagtgctactgctatcagatgaacaacagatttgttagcagaaaggtggtttttctacatttacttctgccgtgtggatggccgtcacgcttcatatattcttagtcgatgaataaaccgtcaaattaccattgtctcctacttgggccatgtggacgccacaattaaaacattcttggctacaatgaatagaccgtgaaattacatttacttgaaaggcattcactgtactggatcgatatgtaatgtatttttgggaaataagttgcgtatttcccaactcattgaatagacaaatgaaatgaaacatgtatgaatactttagagtatagcttattacttcattcaaaaatcatggggtctattgccatttttgaatggg

SEQ ID NO: 107077 - DNA, 702 bp, Glycine max
  Clone ID: PAT_MRT3847_67705C.1
caaaaaattattaacaggagacacattttgggcatagattattcgggatagatacaaagctcaccataatagtatagtacattggacataacacctctattttgcatataataataaacaaattttaggcatagaggcaaacgactatggaagaaaaccttggaaacacccgacataaaagttcaacacaggagttaggccaagtagacactgagacaccactaatcaattgaagttcttggggacttttactgtttcaatcattcaatcaaagattgcatgattcttaagcctaaatagagtaaataaatgagggttatgaatgaaaaatgggtactagatctctcacactatggcttttgctccaccttggctcgaatcttctgctccaaaacagatatttcagtctcaaggttgaacattctattcaaagcatgcatgttctcaagggtctcacttaaagtcctgctgtcactgccatcacacctcaagtgttgcattggcccatgaagcaacttattcactatacccctgctaagatcatccacagctctttgagtcttcttgttgatatcatcacccatcttacctaggcacttctcaagctcagccaaccttattctttcagcatatgccctcaactttttaatggtaggggacagtttccaatgagtccctccagcctcaaattgttttgattct

SEQ ID NO: 107078 - DNA, 309 bp, Glycine max
  Clone ID: PAT_MRT3847_67706C.1
aactaaccctttacattttttttcctcctgtatgaataaaggagggcaaaaacgccttttaggggagggaacaatgagcctagtacattagtttggaatataattattcaaagtctccatcccctacacagaatagacaccagaaaaaggcctaatgctactaacatggttaaaactccggtttccgaaaccgattaatacatactacatatttgtgcccgagcgggaagtacactttaaacctagcttgacaccagtacattttgtttagacaagctacttttttttatgagcaacctttaaaaagac

SEQ ID NO: 107079 - DNA, 428 bp, Glycine max
  Clone ID: PAT_MRT3847_67707C.1
gtttccgtcatcactgtatgacgtcctccttctttgggggggggggggggggggggggggggggggggggggggagggggcagagtgtagcgtgtgaggtggagtatgtaaagttattataaaccccgctattggcacgcgggaggtggtaggggaattggtgaggggctagtgtatacggtttttgaataggccgcgataatatggaatacttatgcggttcgggaagggaaggactagccccggcgatgggacgtagcttaattgttttcgcaaacggtaatatggtacagcggttaggttaggtttatgtttgcttcttccaaaagtcgcctaaaaccaaaaatatcgcaggatataaccctgactgaaaaacggtaagcacgtacaaatataaacggcatagggttaatattttaagaggttta

SEQ ID NO: 107080 - DNA, 164 bp, Glycine max
  Clone ID: PAT_MRT3847_67708C.1
tttgtgggggcacaaatggccaacaagcgcgctactaatgaattaactcatgtattcccatccatcctcaaaggtaacagatcaaatactggtgcctaaggacactcagttaaaaatgtatctgctttatgaataaatcgagaagaatcgactggtggttgcaa

SEQ ID NO: 107081 - DNA, 248 bp, Glycine max
  Clone ID: PAT_MRT3847_67709C.1
ccagccaaaaaaaataaaatttttttaatacttttaaaaactggtccaggactcattatttacctttcatgaaaacaattaatcttaacaacacacaccagaacaaaaattgcgttaacatctgatggtgaaaacaaaagcaattgattgcaaacagcgacaaaagatggccaccagctatttggatatattccacttgagaagcttcaaaatccaatttgactgccccctgcttttttattccactc

SEQ ID NO: 107082 - DNA, 392 bp, Glycine max
  unsure (1)..(392): unsure at all n locations
  Clone ID: PAT_MRT3847_6770C.1
ctgtgtgttggaattcctaccgagtggtctgttgtggaggatctaccagaaggacctgctgttaaaattggtgagaacaaagatgcaatggatggttggtttagacttgagagagtttctgatgatgaattcaataactataagcttgtgttctgtccacagcaagctgaggatgacaaatgtggggatattgggattagtattgatcatgatgatggaaccagacgtttggtggtgtctaagaacaaaccgatagtggttcattttataaaacttgataaagattcggttgtgaagaagaatcatggccttttttgcagtgagtgataaacaagtgtgagaggtactaaataaatggcttcgtttgtacggaatcatttccactaaataan

SEQ ID NO: 107083 - DNA, 156 bp, Glycine max
  Clone ID: PAT_MRT3847_67710C.1
agaatatagtagttgtgtgattcttttctgtcattaaaaccaaattgatgctcataatattgtgaagagattgaggtgggacaagagtcaatatacttttttttgatttagggttctttagagctagacaaagactccactgagtttggaatggga

SEQ ID NO: 107084 - DNA, 514 bp, Glycine max
  unsure (1)..(514): unsure at all n locations
  Clone ID: PAT_MRT3847_67711C.1
gagcaaggaagaattaatgcatgtattgtattcattaagaagttacacctacgtacacttgatcacaatcttccaattagtaacatatatatgctaatatggcataaaagatagctatatctggcaccacttttatttcttagtgggagcttagaatcgaagttgccattacatatatacatacaagatatttcagtgatcaatgtctgcaaattttcaataccttatatatgcacttactatatattcatacagctccaaactccaagccacgcgcagcaaacgtgtatctcacacaaatcattcactacccttaatcagatcatcaacactcaaagctttatccctcagacggggacaagaagataaaattaaagttatgcacaaaaaaaaaagttggaaaattttcactctaaacacaacctgatgaaacgttgaaaggcttcataatcacgatagccatgtttgtaccnatctatttgaaggactgagcacaccagcttttttttttttg

SEQ ID NO: 107085 - DNA, 672 bp, Glycine max
  unsure (1)..(672): unsure at all n locations
  Clone ID: PAT_MRT3847_67712C.1
gtccggaattcccgcgtcgaccacgcgtccgaatagatttttgtattcgctgttattttcctacgagttgttctctgcttgatttaattttaaaactgcattttttaggaagctactaaaaacctcggacttttttttcatccaaacttcaattagacttgcaaatgaaacatgactagtaacagccagaaccaaattggttctatagaacaagatgggctaccactttgaaattttatggctggtagcacaggcccatcatctactatagtaacggtaattacttttgagatgtgaagctacacctactgaggcagccctacgggctacaagaacagagaaagggtccatagaaaaatcttggggcatagagaccagaagaaatagttttcttggaagaagtaaaaaacaaaaaaaagtgtcccatccagaattcaacttcaaataggtgatggcacaggctggtggtttggaattattattagagctatttaatgtgtttggtggcttctatctggatgatgaaattcagatcacagaatcctcagctctaacacccatcttgcctgtccctgtcccatctccnaccccttcaacttcaattgtaatagcaccactccatcattttcatcttcttttccgtcttttcctcctttttctggtttttgggat

SEQ ID NO: 107086 - DNA, 984 bp, Glycine max
  Clone ID: PAT_MRT3847_67713C.1
gcgagaagacgacagaaggacacggctgcgagaacttcacagaaggggagagatatccttgtccccattaatacattgaagcccaaaatgaactgagccaaacacgaacacccattctaccaaaacagccaccatcggacatcgaggccagcaaaaacagttttaggagcaaagaactcaggaacagatatgactactagacgtgttcgttattcccctcttgccacagatgaggatgattatatcggtgataggaatagaccttttgacccaagatttgattatacaccaaaagccttggataaagttccctggaaatccattgcccttgcactgttcctgttattccttggtacaggacttctgtttctttcatactttatcttcactggtcatatggggggagaacgatctcaagcatatggccttttagccctagggttccttagctttctcccaggcttttacgagactcgaattgcatattatgcatggaggggtgctaaaggataccgcttttctgccatccctgattattagagtgttataataaatgaacaatagagctataccttgaaaacttaaattatcaaatttggttgcaacttgtatgcttcaatggcacagatcgaagtaaatggtagaaaagtgtaatcgtactactactcgatacttaagtaattaattcggtgacaaaatttataaaaattatgcattgaagtttgagtttaacttgtatgcttcaatggcaaagatggaacaaaatggtagaaaagtgtaatcgtacttgatacttaagtagttaattaggtaacaaaatttagaaaaatgatgcattaaagtttgaggttagaaaaataagcttaaattgtatcgtgaaattgtttcttttaggcaatattattgcctttgtgcctgttttgttcccttaaactcgtgattgacgtttggttgtaacaaggtttgccaaggatagttttttag

SEQ ID NO: 107087 - DNA, 686 bp, Glycine max
  Clone ID: PAT_MRT3847_67714C.1
attccctcgtatttctggaggtatctttattggcctcgaatttaggaaaataacgttcttctttggccttgttgtagtacatacaaaaccctatcagatcaataattttacctatgaaaagaaaataaaatgagaaaaaataacatctaatccaataaaatatattggtttaattttcaataaataaaatgatggaggggagaactaaaatatcaaatgcctagctagatatgcttgatctactgtttgattcttcgttctccgtcgtcactgcccatttgttaacacgatttcgagctatctctacctgcttgtcccaatcagttttaaatgtgattgtaataagcattacggtttgaacaaatgttccaaacaacattccaatccaaatacccttaacttccaaatggaaaagattatcaagcagcactccaacaggaataccaataagataatagcagcctatgtttacatatgctacaacgctttgccacccagcacccacagaaactccagaaagcacaggttggacactgttcaacaagaaggaaaatgagagcaatggtgataaatcgccaacagctttagcaacctcagggtctggagtgaaaatgtaagcaagttttcccctcagaaataggaacaccaagaataacacgaatccatggaaaatgatgtgaggactg

SEQ ID NO: 107088 - DNA, 519 bp, Glycine max
  Clone ID: PAT_MRT3847_67715C.1
tagcaaatcaattagaaccttttatagttctctgaagtacttaacccgaaatatattacaatgcttgctaccttggttttgatttgctgtttatttacggcatttctattcctctccttacctgttatgtctcaagaagttgaagatgagagcgagtttagttacgacgaaaagagcgagaatggaccatctaattggggagacatacaccccgaatggagtttgtgcaacaatggatccatgcaatcgcctattgatctattgaatgagagggttcaaatagtatcccatctagggaggcttcagatgaactaccaaccctctaatgccactattaagaataggggccacgacatcaagctagaatgggttgctggcgcaggctatcttcaaattaatgaaactgagtacgtactcaaacaatgtcattggcattctccctctgaacacaccatagatggcaaaaggcttgatctagaagtacacatggtgcatgatacctcatcaggacaatctgct

SEQ ID NO: 107089 - DNA, 399 bp, Glycine max
  Clone ID: PAT_MRT3847_67716C.1
cccacgcgtccgcccacgcgtccgcccacgcgtccgcccacgcgtgcgctgttttgcaagattttgttggctggctttattttagatgacgctagaaaatataacttattgattattcttgctttggatatgtattcagcattcttacaaaataatcatattcaggaatcgtttgttaatgctttcctcatatgttaggttatttattgtgaatgacaacatcaaattcatagcaagtggggagagaatataaatatagcaagttcttaggttcatttgtgttataggtatgttttttgtgaagaacttgagtatagatattataacactactacacttagggcaattcttttatcttctcatgaccatcccttctatccttctaatgttttccctggt

SEQ ID NO: 107090 - DNA, 1175 bp, Glycine max
  Clone ID: PAT_MRT3847_67717C.1
accaaatccccccgagcaccaacttcaaattcaattatcataacaaaatataattaatttaggcacagaaacatggtggtgaaggtctatggtcctgcaagtgcagcctgccctcaaagggtgttggtttgcctcttagagaaaggggtagagtttgaacttgtgcatgttgatcttgatcaaggagagcataagacacctgaatttcttctcagacagccctttggtcaagttccagctgtagaggatggtgatttcaggctctttgaatccagggctattataaggtattttgcatcaaaatatgctgaccgtggccctgacctattgggtaaaaccttagaggagagggcactggtggagcagtggcttgaagtagaggcaagcaacttcaacaatttgtgcttcaatatcatgtttcagttggtgatcctaccaaagatgggtaagcctggggacttggccttggctcacaaatgtgagcaagatatagaaaaggtgcttgatgtgtatgaaactaggctctctcaaagcacatatcttgctggagataatttcactttggctgatcttagccaccttccagggcttgaacatctcattgaggaagctaaattgggacacttggtcactgagaggaagaatgtgaatgcttggtgggagaaaatttcaagtagaccagcttggaagaagttaaaggatttgattcactaattaagagagtgaccaaataataattaaagaatggaggtgtttaataattaaaaaaccaaaacctctattttagtttaggctgcaacaaatacatggcgtggagaaaaataatttatcttttttttatgtatgaggaaaaaaaattcttatgtaacttttttgaataaaagttactccttccttccgtttctttttatgtgtcatttaagtaaaaacataaaaggccaataaattttatatatttagaacttcaataatttacaactttattatgaaaaagtcagtacgtattttgtcgcaagtttcacatctcaaagaaaaatcagtctactgtatcttttgtttaattattgaaagagttaaatgtataacactaggtgtttggaacttttgtatttggaatttcggatttaagagaagcatgaccttttctttgttaatttaagaaaacctttatataa

SEQ ID NO: 107091 - DNA, 199 bp, Glycine max
  Clone ID: PAT_MRT3847_67718C.1
ttcggctctaggagactatgtggagctcgttgccgttaccgaccctttcgataccaccggttgactgacatagaagggttcatactcccggttcacggacactggaaccctcacgatgtcacgttaagggccatcagaccttctctcggtgacaagccagtcacgcttttggacagagagccctggagcctcccagggg

SEQ ID NO: 107092 - DNA, 538 bp, Glycine max
  Clone ID: PAT_MRT3847_67719C.1
catggtcttctctctgttctccataaggtcgcagatttctctatctctctttgtgcttcacaacaacaacaacaacaacaaattcattgtgtactattttctatatatgttggccttgtggtcagatggtagcatgcccctgtaggtgaatagttaattaaaatgagaggaacaatgtcaatgggaacttctcctcttgccgttgaagctagacaccgtttgcctgcatccattgaagatttatacaaacgaagacttccaagaaacaaagcaaaagatgcagagaagcctttccacttatctgtccaagataggagctcaagatgcaaattgtctttcttaaaacttatcctattgataaccatatgcggcatttttgtaaccctcctatactctccggaagtttacaataccaaccatttatcaagctctggcactcggtggatatggggtggttcaaatcctcgttacatgtccaatgtagccactgactgggatgacatactggaaattacggagaaactgacaggggaagatg

SEQ ID NO: 107093 - DNA, 509 bp, Glycine max
  Clone ID: PAT_MRT3847_6771C.1
cgttcgcgtgttggcaaaaggagatttgatcctggggatggtgaatagatgacattgattccaggaaccagtgttgaagaggcttacatcaagctaatagttgaacttgagaaaagtgttcctacattgattggcattaatggtcccaaggatgataaacttactcggagcaaaatttttgacaaacctaagacgcgctgcttcactattatccccatggagtttaatcatgtggttcgttagaaggttttaaattttgtgaggttcattatgaagaaaaggaacaagctctgctgataagttggaatcaaccgatactgcatggaatggactggtttgtccaatagattactgagtaagggcaccgatattctgcgttgcgactatgctagatgtgatggtgtgattaccaaacaagatatgtgcacgatggcagaaatgataaatagactttgtggtggtgatgaaaaattgatgcgtgacaggacacacctgctgctagcttgttg

SEQ ID NO: 107094 - DNA, 402 bp, Glycine max
  Clone ID: PAT_MRT3847_67720C.1
accgctccagaacaattcccgagtcatccagcgtgactactcgctcactactcttcttcctcccttttttttttcttttaaaatacaactttcaaagcctactaagtaaccatttatcaaaggagacgattcccacctattccccattaaaactttttactcattccttaaatctatccaccccattatccttaccctatagctatttctcaatttatcataactcttcacatcataccatctttatccctcttaaaatcttataaaatcctccattacattcttaaaaaacttttacctcccaaactttttacaaatcctaaaatatctaactctttcatttttacataaatcaattttcaatcctactcccaatatatattattatatactcctcctctt

SEQ ID NO: 107095 - DNA, 176 bp, Glycine max
  Clone ID: PAT_MRT3847_67721C.1
tccacgttttgttcttcccataaagcacccttttttttaccgttgcaagctgacggtagtgcctttatgatggatcgttgaggaacaaataccacaaaataacggcaactcacacttagaggcggaattttcgaagggctccctcttcatcatctcacaccctgtcctaaaggtgt

SEQ ID NO: 107096 - DNA, 269 bp, Glycine max
  unsure (1)..(269): unsure at all n locations
  Clone ID: PAT_MRT3847_67722C.1
gtactggataaggaaatcaattttnagagtggtgntncgatatgctcgaggaattgtaattcctgtatgttcctgatacaaccatgggtgancnattacgtgagcctttagtaacgaaggcaaccaaggaaggtgggggcgtgtttacgtgaggaaaggacattagaagggtgatttggtcataattgttagtgaaggggtattttggggtgtggagttagatattttgccttttgttatctttacggttattagtaacagattggggg

SEQ ID NO: 107097 - DNA, 116 bp, Glycine max
  unsure (1)..(116): unsure at all n locations
  Clone ID: PAT_MRT3847_67723C.1
gggtaggcgacgcgttcgaccacgcctgcgnccacgcaagcttaagtattatcttttgccacctaaataccttctcactatggtgccgagagcttctagctgtgcgaactccctct

SEQ ID NO: 107098 - DNA, 517 bp, Glycine max
  Clone ID: PAT_MRT3847_67724C.1
gcttggcaaaatgattgataatgggacaacaagcacatcgattaaaggggtaattacataatgggacaggaactttaagtttttgaccctttttagcaattacataccatacattggatttggaacaacaaaacaccttttttttttttttttcccgggaggacccttaattaattcctggtgattttttttctttaagaaccccactggattgggtttgcttggcactggtaccaagaacttggacccctttgagggcaaaggaaataaagcctttacaaagtggttttgactggacctttaaaggagcaattttactggcacttttaaagtttttggaaaacataaacccttaaataacttaagagcccaatggatgggacacacagaatattaattaaaccctggggaaacttgactggcccaagggaaaacccaaacttgggtgaaagcacgggctttaaaaaaaggtttgttttgccaaaatctgagaactggttggagaattacacaaagg

SEQ ID NO: 107099 - DNA, 127 bp, Glycine max
  unsure (1)..(127): unsure at all n locations
  Clone ID: PAT_MRT3847_67725C.1
gnaatcctcaccctatgagcnagtntttggggttcagttaggcccaaatccacattcntaaatgatatccgagactatcgtagatccantaaacnagcnacccancatattattatccacacaacag

SEQ ID NO: 107100 - DNA, 279 bp, Glycine max
  unsure (1)..(279): unsure at all n locations
  Clone ID: PAT_MRT3847_67726C.1
anttnggccacgttttgnacccatattnanctctcaccccnactttacacgacgcggttctttctcannnctcttangcnaaacacctgtcgaancatnattcgcgtngcgatcttcangnagcttannccaagngnttcntacagcncgcangtcggcatcgaagtttctcntnnnntnatttggaacnangggatcctctacaantgtngnatgcctagcntagccacaaattagnangntnccnattnaagttngccnngncangggttccaaagn

SEQ ID NO: 107101 - DNA, 484 bp, Glycine max
  Clone ID: PAT_MRT3847_67727C.1
gaagagaagtggttgattacctcaccggcatcatgctccaacgtgacctccgatgatacggacagtttgaagctgagaagtttatggattctatatgtcatctcaggtgccacttccaccatttgtgtgctactatcagccatccagtctctagtaaaatcctgtcactcaattgtcaggcaagtggcaccagaaggcaatgacacaccaagtgatcataaagtgtgggaaaaggtgattacacatgcaaaacagatttttaacaaaaagatcaataattcaagtgaggcacaggaacaggttgtgactgattgttctttgagatgggatcgcgtgaacatgactgtttcccctgagcatcagcaggaaatggcttctccgctacccggaatgttaatgctaccttctccacccccagaggttcagatgacaactcatgatttaggaatcaccaacacttcaaagtagttgcaatagtagacac

SEQ ID NO: 107102 - DNA, 546 bp, Glycine max
  Clone ID: PAT_MRT3847_67728C.1
gacaagggatggcttttctagtgtggcccttgataagccaacacatccataggtttgtggagttctcgcattcttccatttcaggccacctgtgagcctcagatatctgttttgcggaggaatgcatgctcagagtcttgtagctacaatatggtgacttgatatgtgaatgtctaattgataatttcaccttattagcttattcaattgtgatatcttctgcatgctgatgcatggctcactatcaatgtgttgctaatgaaatgatcactgatattttctttgcacacatacaaaggttgtttacatgtcaaagcctagctaatggtaaaaatgttgaatgtccaactttggaatgttaatttaattataactagagggtagaagaagcttgcactaggtatgaatttaattggccattttctgtataactgaacaactgatgaccacatatattaactaattaactaatagtaacatcattaagctgcctgaatgcttaaagaagcatctgtttttcagacaattttaacagaaccttagaac

SEQ ID NO: 107103 - DNA, 325 bp, Glycine max
  Clone ID: PAT_MRT3847_67729C.1
gggctgctaccctccggctcgtgtcggatgcgtgccaagaatggggttttttacacgtggcgaaccatgtagtgagccatgagttgatgaaaacgccaaggctggtgtggagggacttctttcaccagccactggatgtgaactaagtgtatgctaatacaccgctgacttatgaagggtatggaagcacgttgagagtgaaaaactggaccattttcatattggagtgaatacttctttctgcattacatgcctaggtccgtaagggaccaatccacatggactgcccttccaacatgctttaggagcatcagctatgaatatg

SEQ ID NO: 107104 - DNA, 908 bp, Glycine max
  Clone ID: PAT_MRT3847_6772C.1
cccacgcgtccgtgtgcattcactaattgatgatgatgaccgtgtttattgtgacaactgcaatacatcaattgtcaatttccacagaagttgtcccaatcctaattgtcagtatgatctctgtctcacttgttgcatggaactaagaaatgaacttcattgtgaagaaattcctgctagtggaaatgaaagaacagatgatacaccacctgttactgcttggagagcagagctaaatggtgggattccttgccctccaaaagctagggggggttgcggtactactattctttctctgaggcgtctttttgaagctaattgggttcacaaattgattaagaacgtggaggaacttactgtcaaatatcaaccacctaatattgatctatctctaggatgttcaatgtgccatagttttgaggaagatgcagtacagaattctgtaaggaaggcagcttcgagagagaccagtcatggtaactttttgtactgcccagatgctatcaaaatggaagacacagaatttgagcattttcaaagacactggataagaggtgaacctgttatagttaggaatgtttttgaaaagggtagcggcctaagctggcatccaatggggatggggagggctcttttttctcttttgggccttcaccacctcatacctaccttcagccatcgctgatttcgtgctcgataatgaaggtaaccctcttgaaaatggtggcacatattatatcttgtcagacataacagcatttggtggaataagagcagccccaacgggaaatgaatgatgccctctcactgtggtgctatctcgcactgagctcgacaaaggcattggaacaatcatctcgtcctcatatcgaatacgttttatcgccgaatgccatgctttgagccta

SEQ ID NO: 107105 - DNA, 335 bp, Glycine max
  Clone ID: PAT_MRT3847_67730C.1
cggctgggagacgacaacaggaggggcattttgggaaaaaaaaatctacaactcaatgaggggaggcggcctttatataggatacaagattacgttcgcattcatgcgaaatgaaaactattttatattgtcacctatatacactgcacagtttgttgtttaacaacctgtcgactgaaaaaacgcctgttcgataacccaacattagatcaggttgtaggacataaaactttcggcagctggcgtattaacgattaggacaagaacgatcgttctttacaacagttgcacctcctgaatggctaataagaccccccctgtagcggatcattaat

SEQ ID NO: 107106 - DNA, 364 bp, Glycine max
  Clone ID: PAT_MRT3847_67731C.1
catgcaccgcacgtgcacgctagagggtcctgtcaatgaatctcaagcgcatatttttaagagctatagagtcaaaactgtgcatagattaattggaatgatagggtgtcatattaagcctatcctgaagcccaaataaatgagatcggaatccatgaccgaactccaataccacatctataataactaaagcaccatacatgactcatatactcaatatccaattatgacgagatcctattacgccaatcatgaagcctacttaccttatatcgcgatactgatgctattaagaatttcacatatacaggacatgctgatacacaaacctccatagttgaaatggaatgaacccatacttaac

SEQ ID NO: 107107 - DNA, 401 bp, Glycine max
  Clone ID: PAT_MRT3847_67732C.1
ccacttcaggccgcccttgatgccggggcagcatcatgggctgctgcttgcacaagacttctgacctggggaggcagaccaacaacagggagtggctcatataggtggaaagaaatgaggcgtacctgatccaatggctacaacaactgagtcgctggaagctccgacagcccagtgcatgatgctcacgtgacacatgattgctagattctctactacgactgaggagagaggacctatggcataacaagacacatattactcttgtgttgaaggagtggatagataagccagtttcatgatgccgctctatgaagaaatgttaactaatgcctctctctatatggggagggactggtgcgaatgaggctatgctgatgaatactccgagggcggttctt

SEQ ID NO: 107108 - DNA, 292 bp, Glycine max
  Clone ID: PAT_MRT3847_67733C.1
ctttggtcacgcttccggctgcattgccagacccggcgcttgcaaccaccacaacaagaggacataatcaggaacaggctgcggctgttaatggttcttttgctgctacagtcatatctgctgcttctgcaccaccaaagcaggaaggtggacaagcaaacgctcaggcggtcaatacgaagatagatgccataaagaaaaggttgtaaagattgtaataaaaatcttcaatcattgaaggtttttatttgtcatttagatttacatttagatagagaaaaggtggagggag

SEQ ID NO: 107109 - DNA, 448 bp, Glycine max
  Clone ID: PAT_MRT3847_67734C.1
gggtcgacccacgcgtccgaagaagttaacctttttgcattaggccagtttacgttaggcaaaatgctaagaaaattaatctgtacaataccaaaggcattattatattccaaatcccaaaagtctttcttgcttcttgtagcaaggtgcattagctgactaacagtatttccaggtagaaaaatggaaaggaaaatgctgagcctgttatagagaagagcttaatagactcgtgtgcatacattagccttctgactctggattgatttgcagagtgccactgccaactccatctcagggagtccatcattaacacttccactgacccctccagccctgccaccctgccccaaattattttgcaagttttccaaattgatactttaacttaatatttccttaaagatgagaaagtttaagcagattcaagactagtagaattgatgtc

SEQ ID NO: 107110 - DNA, 209 bp, Glycine max
  unsure (1)..(209): unsure at all n locations
  Clone ID: PAT_MRT3847_67735C.1
anaaacacaggnnngaggtatatatananttatatattgatggaagananncatactcntcattgaaacaangtggcaaaagagnaganacnctttntcttcatntatgaacagcaggaaagttgangcaggnacgtaancanccacntcaggtagtgntcttccncntcccgctaggacanacacataacaatnttggtttncgncag

SEQ ID NO: 107111 - DNA, 309 bp, Glycine max
  Clone ID: PAT_MRT3847_67736C.1
accactcgtacatgccgatggaaggagactgctgatgggctagcaatcttaaatatatgtgtgtgggtgggccatacagtgagcctcgtccgtataaaaataacttgttggtttccaaaggggaacatggtggcgacaaaaaggcagtaagttgctatacgctggtgcggtctattgggccccaaactctcctccccttttaaaggggcttaatgcttttttttaggcggccctaatttaagctttgtgccgactttttttccaaacttttgaaggataaagcctggggtttcccaatgtatactcttt

SEQ ID NO: 107112 - DNA, 654 bp, Glycine max
  Clone ID: PAT_MRT3847_67737C.1
gtgaaccatggattcctctttgcaattaactatcatagccatattggtgtccttgttagtgtttctctggcacactaagagaaatagaggaggtagcaagaacaagagtaaagaggctcctatcccagctggtgcatggccactaattggtcacctccaccttctgggtggcgatgatcaacttctctaccgaacacttggaacaatggctgaccaatatggaccagcattcaacatctggctcggcactcgccgcgcatttgtggtgagtagctgggaagtggcaaaagaatgtttcacatccaatgacaaggcacttgcctcacgccccactacggttgccgcaaagcacatgggctacaactacgctgtgtttggttttgctccttatagtcccttctggcgcgagatgagaaagattgcaactcttgaacttctctccaaccgcaggctcgaaatgctcaaacatgtgatggtgtccgaactcaacatggtgatgagggatttgtacaactcttgggtccaaaataggtctcggcctgtgctggttgaactgaaccgctggttggaggatttgactctgaacatggtggttagaatggtggcggggaaacgctactttggtgcctcggctagctgtgataatgatgatga

SEQ ID NO: 107113 - DNA, 810 bp, Glycine max
  Clone ID: PAT_MRT3847_67738C.1
gcccacgcgtccgccccaccttcccttacttctccacaatattttatgtattttcgtaacaaaccaaacccaacaaaaacttcttcactcttagtttctcatggcatcatctcagaacgtagccagcattgagccatggatgcttcgcccacctgtcaccgattcatggctcgcagagttcttcgctcgcgacgccgataccctaaccagggctcttcagaagtctctctccggcgctgttctgccgcaggacaaccacctttctccgtttctgcaccagcccgccgccgccgccgccacccccaccgtgtccagcctctccggctccgatcaggagtcggcgccgcgccgccgtgcggcgcctccgccctctgggaagatctccaagaggaagtcgcgcgcctcgaagcgctcgcagacgacgttcatcaccgcggaccccgccaacttccggcagatggtccagcaggttaccggcgtgcggttcggcggcgcgccaattgcgccggcggcggtggtgaagcccgagccgcagcgcgcctcgggcctcgccaggttccccgccggcgtggggtgccttccgacgctcgacacgtcggccttcctgctggaccatcaccagcagcaggtggtgcccgcctctgttaactctgggcctggcaccgggctttctgggcccggccactccccttcgcccaacccctccttgacgctcacgacattgcagttggagatcgtcgatgaccatcaggtagatggaatgagactacactactgaggttgatcccagaaaggttgatcactaccatt

SEQ ID NO: 107114 - DNA, 295 bp, Glycine max
  Clone ID: PAT_MRT3847_67739C.1
acatagagcgatcgtgtttctcatgcacccacaattcctgctcctcttgctggtgctctgaattttcctcattggcacattttctgggtctactactaccagtaatgttggtacacctcaacgaattgtggagatcattgagaagaaaccagaagaagagcctaaggttacacacagagtattcttggatattgatgttgataaacagcgggtagatagaatagtaatgagattatatggcaagagtagaccgaaaactgtggaaaatggtagagctgtgggtacagaggagagg

SEQ ID NO: 107115 - DNA, 308 bp, Glycine max
  unsure (1)..(308): unsure at all n locations
  Clone ID: PAT_MRT3847_6773C.1
tcgctgggcccgacaaagagacaaaaccagggaaaaggggagagaaggccacggcccacacgacgcgcgacccaaagaaacaaaacgcgcacagccaaacngaaccgcagaaaaaaccccagaaccacacncacgggnccgccnngccagacgacaancgaaagaccgaaccgcacgaaacgcccccgacaccgnnncacaacccgcaccccaaaaacaaacggcgacanccagacgcaccgggacggcccccgccgcgccgacggcgacacggcgccccccgacggccaagaaggggncacgagaaa

SEQ ID NO: 107116 - DNA, 1449 bp, Glycine max
  Clone ID: PAT_MRT3847_67740C.1
ggaagaactgccaatcagaatacttgcagacccggagagcttattcatcccctgccaaggtcttactctccattacaagctcagcctacctggttcacctccacttaacatatcctcagcattttgctccacttcatcaatggctggggggttgtcaaaattaaatagacaattgacttttatacctccaaaagtccatcagcaactctacaggagctatagcaatcgggcggacgcgtgggcggacgctgcggctcttttagatggtccagtaacttctccccatcttactgaagatatccctgttttgcatctagatgaaattcatgaagatgaggaaacatataaatcagagttggagcaaaattcagaggacattggccaagtaggtattgttttaatacatgggtttggtggaggtgtcttctcttggcgacatgtaatgggacctctagctcggcagagtaattgcacagttgctgcatttgataggcctggttggggattgacttcaagactgagtcaggaggactgggagaaaaaagaactgcctaatccttataaacttgaaagtcaggttgatctgcttttgtctttctgttccgagattggattttcttcagttgtgctaattggtcatgatgatggagggttgcttgctctgatggctgcaaagagggttcaaacatcaatgaattctttcaacgttacagtgaaaggggttgtattgttaaatgtgagcttgtcaagggaagtagttccttcctttgctagaatccttctgcatacttcacttggaaagaaacatttggttcgtccactactaagaacagaaatcacccacgtggtgaatcggcgctcgtggtatgacgctaccaaactgacaacagaagttttgactctatataaggctccactatatgtagaaggatgggatgaagcacttcatgagattggtaaattgtcatcggaaactatcctttctgcaaaaaatgcagacttattgctacaagctgtaaaagacattccaatgttggtcatagctggtgctgaagattcacttgtctcgatgaaatattgtcaagcaatggcctccaaatttgtaaactctagactggttgcaatatccggatgtggccatctaccccacgaggagtgtccaaaggcgttgcttgaggctatatcacccttcattaatgataaactcttcttctctgtatataactcgcaaagccaataataggtcatcccttttcaagtttatacacaggtaatcaatctattattgtagggcgctgtttccctcctcctcctactatccttttcttggctttcttaacaaatattacttccaagagaaagagatcaaagggatcgtctttttctcttgggtggtttttatgtgctagccattaagtgtttaatctgtatctttcctctacccatttt

SEQ ID NO: 107117 - DNA, 1233 bp, Glycine max
  Clone ID: PAT_MRT3847_67741C.1
cacagatctccccccgattgaaaagaaaagaacttcgatcatatattcctcaggtcactcctacctatgactatatatgacatataatggaccatgcatctctgaggaaagaattgagctgggaatcaagcagcaaaaacggtccccaattcggatatattaacaaccaccaccctccaaaacaaaatttcaccctttcgttttccttatcccatacccctcaaaagaaaaagctggcgattctccaattctcctcttgtttcgtgtcctttactactccgaatcctcacaacactctctgtagtacacactactaacccaaaagtcactcacctctagaaaacctcaaatctcaaaacccatcaagattttagcacaaagactcaaacttttcacaaaattaaagagacccagttgatttttttctctttagactgaagtattttgaagcatcgaacatgctacaacggcggcttctggagacggagctgagcatgccaccgtcgtacggcggcagcggcggaaacaacacgcgcgacacgttcatcagcgacgcgaacttcgacacaaacatggtgatcattctggcggcgctgctgtgcgctttgatatgcgcgctgggcctgaactccatcgcgcggtgcgcgctgaggtgcgggcggcgcttcggcgacgagacggcggagcaggcggctgcaaggctggcggggaccgggctgaagcgccgcgagctcagccgcatcccggtggcggtgtacggcgccgccggaggcgaaaacactattccggcgacggagtgccccatatgcctcggcgagttcgagaaaggggacaaggttcgaatgttgcctaaatgcaaccacggtttccacgtgaggtgcattgacacgtggctcttgtcgcattcctcgtgccccaattgccgccactcgctcctagagaaaacctccgccgcgccggaaagtgggtcggggcggcggagcgaggtggttgttgtggtggagcaggcgagttgaatggcattaacagtgaaaggtggaaagaaggacaagttttggtgaatggaggttgagaaatttaatgttagtagttagagtagttattagttggttattaataaattccaagtgaccatccataattccatatacacgtttattttttaaaattaaaatatatgtttgtgtttgttacagtttgtatataagttggatattggatattatgatgctt

SEQ ID NO: 107118 - DNA, 704 bp, Glycine max
  unsure (1)..(704): unsure at all n locations
  Clone ID: PAT_MRT3847_67742C.1
gatctcttgtgggtatgcaagttaattaatatgtatctctgacagactaggcttgagcttctgattctttttatgtccaacaactcaccaagccccgcttcgtataaattgccctttatgcaccacagatctccccccgattgaaaagaaaagaacttcgatcatatattcctcaggtcactcctacctatgactatatatgacatataatggtaagtgttcgagtttaattattagtcttgaattttaaatgttaaatattttttaaaaaattatcattcatgattattttaaaaagatataccatcgatatcaaaaatatttatatatacaagtagaatagcaatatctatatatgaaagtcaggtaaaaaatactctctccaatctcaaacctcgtttgcactatttgatttgttgtgtttgattaggaccatgcatctctgaggaaagaattgagctgggaatcaagcagcaaaaacggtccccaattcggatatattaacaaccaccaccctccaaaacaaaatttcaccctttcgttttccttatcccatacccctcaaaagaaaaagctggcgattctccaattctcctcttgtttcgtgtcctttactactccgaatcctcacaacactctctgtagtacacactactaacccaaaagtcactcacctctagaaaacctcnaatctcaaacccatc

SEQ ID NO: 107119 - DNA, 505 bp, Glycine max
  Clone ID: PAT_MRT3847_67743C.1
ggctcgagctcgatcccattttaacacatacacttctctttatctgtgtcggatcgcatgaacagcacttggaggaggaagaagatcaccaccgtgcgggtgctagtcgtggaccaaatctgaagagacggggcggggggggtggactgtttctctgtgaccctacatgaacaagagtccatggaccgtgaccattcacctgtgactagacaattttttccggcggaagatgctgacgcggcgggtgccaccttcggtggtggacccggtctcacctccacgatcccttgtgctcactggctacgtgtgaaattttgccactcatattcactttgcaccggaaaatcatgaggggaagtttttctccctatgaagaagagtcgtcgaggaccatagtcaatgagctctcagtttagaggagtcaccctctaccatataacgggccgctgggagtctcatatatggcattggggaaaacaagtgtatctatgtggatcttacacat

SEQ ID NO: 107120 - DNA, 509 bp, Glycine max
  Clone ID: PAT_MRT3847_67744C.1
gtttgagtataggcgcagtgtgaccaatctccttaagattggtttaagatgtgggatttccttttgtcttttgaattgactgtgctgcacgtgggataggccagatcaggctttgaaagacctgagcctagcctacgatgactcacacctaaattgtaattaaagtcttacttgattataggaatagaagttatggagcagtaacgtgtaatcaagtatgatagtttaaaaaaaaaaattaattgtatccaaaaaataatattatatattggtacccaaaaaataatatatatatatatatataggccggacctaaccttttaattaaataggccagttcagactagactttatgtaaatcaggtcgtaggctcctgtaggcaggtctggcctattctcacccctagctgcacgtttagttgtctttggcttgggatagatgtatttgtgctcggtggtttgtcgcttgcgaaacttcatgatggccatagattctcgaaatatgaact

SEQ ID NO: 107121 - DNA, 342 bp, Glycine max
  Clone ID: PAT_MRT3847_67745C.1
ccttgactaatcgatcattttacaaccccacttttcaagcatgaactattgaccacgcattgtttgattcacctccattatttgactcagattgtgatgatcactaccagagtgttaattatcatgttatatctctaaatggaactcaaaccaattttgcaatctcaactgatcacatacatatacaccttaatctatcaaaaccacattctacacatatcttctataatgtcacaaattcatatcctcacttttttcatatacatgccacaaattctcaatgtaaacacaatgtaagaataaatgaatcaaatgaacctttttttcttgatcaattttcct

SEQ ID NO: 107122 - DNA, 162 bp, Glycine max
  Clone ID: PAT_MRT3847_67746C.1
cacaacgggacctgaccgaaccctataagatcatattactagacccgacatctacacttccttgtaatatcccaccccgctcaacagtaagcaaagcctaaaggcgctcactcctataagaaaaagcactccctttttctagagttgtctgcactttagagg

SEQ ID NO: 107123 - DNA, 286 bp, Glycine max
  Clone ID: PAT_MRT3847_67747C.1
aaaaaaaaaacaaaaaaaaaaaaaaaaaatttaaaaaaatcaaaaaaaaaaaaaaaaaaaagaaaaatttgaaaaaataaacaggcggccactttaaaagactccctcttacttccacctactttcaacttcctacctctcctttatattctcctaaattcatttcactctccttctttttacaaccccttcacttgcaaaacctttcctttccctaccttaacctcctcccaccaaatccccttttctccaactctctttataccaaatagccccataccgatca

SEQ ID NO: 107124 - DNA, 433 bp, Glycine max
  Clone ID: PAT_MRT3847_67748C.1
ctcttgcgtccgatgaatttgaaaaacatgttgctcatgaaagccttaaggatcaaattcctgctgttgacaagttgtattctactaaggctaataaagaagcaaagattatgaatcttagacaaagtgttgttggtgatcttaaacttattactgatgggaagttgtatgagggtaagcacattcctgtatctaatactagtgcaggggaaaatcatgtaattcaaatacccctaatggcacaggaggaaattctgtcttctagtgcatgtgattgcagaactggatacgggagtaaaaatagcaagcctaaagctactgcaatgcatctcggagctataaccatcatcagagatagtttcgccagtcctgactgcaacataagtgggacaaggcttatgtgtgatacttatcataccaatactgaaaatgc

SEQ ID NO: 107125 - DNA, 153 bp, Glycine max
  Clone ID: PAT_MRT3847_67749C.1
ggaaagcacgaggcaacttgcaaatatatatagtgctgtggacattggaggggagtagtgactttgtagtggaaggagcataccttatgtgaaggcatgggagtgtggcctgttgctcgagggcgttggggaaaaagtggtgggccggggggg

SEQ ID NO: 107126 - DNA, 285 bp, Glycine max
  unsure (1)..(285): unsure at all n locations
  Clone ID: PAT_MRT3847_6774C.1
ttcaaggtcacgcagacgctgttcaccctatcatatcttggtccaagagatctagaaatatagcagaccacctgctacagatctattctttaagtccatacaaccccctacccgagaactaaaatggctcctccttttcggatggatcaggaatcggaatcaccaactctaacnctctcaaaactgtatatctctggaaatggagtcctaatttgaggtcatcggaatcacccttgatgattttgatggatcaaatagctctgacccctcagatctttatgtttt

SEQ ID NO: 107127 - DNA, 489 bp, Glycine max
  Clone ID: PAT_MRT3847_67750C.1
tttggttaaaataaaaccgggggtggggataaaaaatttgggtttttcggtggtaaattttttttattttacccttcccaggttttttttaaaaaaatttcaacttacttggccataatatgggatgggattatcaatataaaatttaaaaatgtttatttttaaaaaaaaaatgaaaacaaaaactcaaatcataaagaaaataaaattaaatgtcagcatattaataaagaatcaaaatatgtgtaagctttaatattaaattatattttttataaaaaatgattgtgatagaattagagcatttttaactacaaatattttctctacggtttattaacggaatagggacatatatctttgtactcgtgcatgcatatatcacttgttagtgttaaaatactttacttatgtattgaagtgtaatttgaattggagcttacaaatttttcatttggatcatattttatattttaagaactattcatg

SEQ ID NO: 107128 - DNA, 307 bp, Glycine max
  unsure (1)..(307): unsure at all n locations
  Clone ID: PAT_MRT3847_67751C.1
gtagaagtggatgatagatgtcttcacaatctttacaagcatttttttatctctagacatacatttattacagagcgttccttttcaaccttagatggacaatntntaanactctctagtgccatttcaacaaacattcccactgtagatgttggcgtgataacaaaccaataccatacaaaaatcattatttatctaccttaaaaaatagtgataatcttttactctgaaatgattgcttccactgctcacacatggacaacactctctgggaccgctgctgattattttatgcttatgaccagaa

SEQ ID NO: 107129 - DNA, 158 bp, Glycine max
  Clone ID: PAT_MRT3847_67752C.1
aacaaaacaaccacccaactaaccctggttcagcttttccgatcagatcacttcgaggtgctttctttcgctctatgatcatctcgcattccccttttcctcaaccagagttttcgatctttcgtttgtataaatattctctgaaaatctgtcgggat

SEQ ID NO: 107130 - DNA, 743 bp, Glycine max
  Clone ID: PAT_MRT3847_67753C.1
atgatgttgaatcctggacgcggtcctttcatgggtgggattggggttggaggtgcaaatccaccaagaggtggtaggccagttaatatgcctccaatgtttccaccacctccaccactacctcagaatgcaaaccgtgctgccaaaagagatcaaagaactgctgattggaatgataggtttggttcaggatccgagcagggtaagagtcaagacatgctcagtcaaagtggcggacctgatgatgacgcgcagtatcaacaaggatacaaagggaaccaagatgatcatcctgctgtgaacaacttcaggaatgatgatagtgaaagtgaggacgaggcacctaggaggtcaagacatggagaggggaaaaagaaacacaaactataatcattagctagttaatgctttcaccaagcacgacatattgatgatcaactaacctggatgccagtttccaatgctttttatttttgacagatttctttgtatgagttcttttctccccccctctcaagagacccgggggctgggttgcttcagaaaagatttaaaactctgttcatcgatcatataattgttacatattgttcattggacatttaatgttaatgtatcaggatcaaaacggtaatttagtatgctcggtaaatgtacacctatgtatttgtaaagggatcgtaacatttgagttctgaatgaaaaaggtgggatgattcatacctttcaactttcaaagcacg

SEQ ID NO: 107131 - DNA, 955 bp, Glycine max
  Clone ID: PAT_MRT3847_67754C.1
aaaaagggtaaattaatcagttaatttcatatggaaagaatcacattttccatttacggtggatatcactagatctccataaattgataacccatttgaatctcaaactcaaacttaaaactcttctctatctatataacgcaccttcttcttgttcacttctctctctctctctctctctcactttttctcttgacacggaaagaaacaacatctgaattctgatgggtttcccagtggggtactcggagctcctcttcccgaagcttctccttcacatcctctccctcctgggcctcctcaggaagctgatttgcagcctcctccgcttcatgggcctccacgacttcctcgagcccgacattgcctgggccgaaacccagacccgagtgcccgaagagttcgaatccgtgtcggccacgctcatccgggaaatcctgccggtggtgaagttccgggagctggtggatcccccggagacgtgcgcggtgtgtctgagcgagttcgaggaaaacgatgagatcagacggctggcgaattgtcgtcacatattccaccgaggatgtttggaccgttggatggggtacgatcagagaacctgccctctttgcagaacggcctttataccggacgaaatgcaaggtgcttttattgagagactctgggctgcctctggtatcgctgaatatccgcatgttgcccctttctagtatcattcatatttccttattttacttttttggggaagggatatcaaaagccataaccagaagaggttcttttgatttcgtggtttttttttgtgtatgtgtatatatacagagacctctatcaattgtatatcgatttctcttagatgatggatttttttagaattgggagatctggttcatctcatattttgacctgtataacataattggaaattaattatgttttgattcatcttagttgc

SEQ ID NO: 107132 - DNA, 265 bp, Glycine max
  Clone ID: PAT_MRT3847_67755C.1
cttctgtaaaaaaagcttgcattaaactttgttcaaaattataacttaacgtaggagattatacaattatatatggatgatttaaatttaatattactgattacttataaagttatataaattttaaaaaacctagtgactttattctggagaattcattaataaaaatttattattctcaccctttcatacaaaaaaatcaaaaaataaaactattgatgatgatgtttttaaagctcttcatatcaaaatagattgaagtgga

SEQ ID NO: 107133 - DNA, 256 bp, Glycine max
  Clone ID: PAT_MRT3847_67756C.1
acgcgggctcagggttcttctacacactatttacatttccatactggcacagatccgctagctcggggctctatatgagtggcgtcctactattgcaggcattgcactcaagtacccatccatcgaatgtgctggtgtcgatatctgtaaatcccgcattgcactctggaacagggaccatcttcctatctatgaacctgtccttgatggtgatgagaagctacgccatggcatgaacctattcttcagcactgat

SEQ ID NO: 107134 - DNA, 235 bp, Glycine max
  unsure (1)..(235): unsure at all n locations
  Clone ID: PAT_MRT3847_67757C.1
atcggctcgnngttgacaaccatggccnnctcatanncaagaccttgaccancttctcgntagtgctttnnatgnttttcagtccttcaacctcaatnntcccnctccangttgngaagcaactgnnaatagcaaganggagagtcctctttgccgtngggggttcaanggtngggcatgggcttacccgatttgattagnagnanaaggggaaacagaatgcttccaaanncag

SEQ ID NO: 107135 - DNA, 647 bp, Glycine max
  Clone ID: PAT_MRT3847_67758C.1
acgaggaaaatcgtgaacgttaggttaagcgctgcagcaatccgcggagttcaattcgggtgttaaggatggttgcggctgcttctcagtcatcttgcctacttttccaagtcatgcaaccctatgttgcatgaccagaagggagatcaataacagggcttgtcatgaaaatgaaatttgtcctcactatatcagtaatctccactgaatcagcaatgctataatctgcatctcccttagtcttttcactcccacctaacctagaacctaggatagttagaggtttaggatcaagactagcctcagccatgatctcctcgcaacaggtctcggaagcccacggtggtggcggagtgggggcccaccgaggatcggcgtcagcggagacgcagaggacgcagaagtggttgaaggcaactgggcggaggaggaagtggtcacggaagaaggagatgaccttcgatattttgatttatttattttacttaaaaatcttcagaaaatttaaatttaattttaaaacaaatattaaaaggttttgagtcgtcacaaattacatcagatatcatggagcggatagaagaaaatttttatcagatgcaaaatttgaatatatatatcaggcagcatatttaattcaaagaaaa

SEQ ID NO: 107136 - DNA, 1800 bp, Glycine max
  Clone ID: PAT_MRT3847_67759C.1
cccacgcgtccgcccacgcgtccgttcactttcattttaaaatgggttatctatacttcttgagtttcctgtttgctttatgcctctcatctcctcacaatgttttgtttgctcaaaatttaccatacaaagttgtgaatctaggaaactggctggttgtcgaagggtggatgcaagaaccatctctctttgatggaattgtcagcaaagatctcttggatggaactcaagtgcaacttaagtctacaaagtttaacaagtatctcacttctgaaaatgggggtggagctgatgttgtagccaaccgtgactcagcttctggttgggaaacattcaagctgtggaggatcagtgactcatccttcaacttgagagtgttcaacaagaaatttgttgggctggaaaatcatgggggtggaaacaaaattgaagcagtttcagactcaccaaacaacccggaaacttttgagattataagggatgacaacgaccccttcaaaattagaatcaaagcatcaaatggccactttttacaggttggatcagagacatcagtgactgcagattatgaaggcacaaattgggatgaaagtgacccatcagtctttcgtatgaatattgtaccaggcaccaccttgcaaggagagtaccaacttactaatggttatggtcctaatagagctcctcaaatcatgagggatcactggagtacatacataactgaagatgatttcagattcatgtcagaaaatggcttaaatgcagtgagaatacctgtgggatggtggatagctaaaggtccaaaccctcctaagccttttgttggaggatcattggcagcattggacaatgctttcatttgggcacaaaaccatgggatgaaagtgatcatagacttgcatgcagctgaaggttcacaaaatggcaatgaccacagtggcacaagagatggatatacagaatggggagattcatacataccaaacacagtccaagtcatagacttcttagccgaaagatatggtaataggccaaacttaggaggaatagagctgatgaatgagccacaaggtgtgaatcttgagagccttaagaagtattacaaggaagcttatgatgccgtgaggaagcacaacccaagtgcttatgtgatcatgtcaaacccattagatgcagattctaaagtgcttctctcatttgtgaaaggctttgacagagtagtcattgatgtgcattactacaatctttattccagcaaattcaacaacatgactgctcaacaaaatattgactacataagaaatgaacgagcctcagatcttagtggcgtctcttcctcaaatgctctgagttttgtaggggagtggactggtgcgtggagcataaaaggtgcgtctaaggaagacctcaaaaggtatgcccaagcccaattggatgtgtattctcgtgcaacttttggatgggcctattggtcctacaagtgtaggtatatggaatggagcctcaagtcgatgatcgaaaacggttacataaagctctagattttggacaaaaacaatttagagaggttggtggaccaaaaaagaggtctacatttagcaagggcattccacatgttgtttcatttcttatattctgttttcttatctccgttttgtttgtttgtggtctagctttatttgttagggtttttctatttttcacttatcattgtggtttctttggatgaagagtacaacagataagaaataaatatgagatttaaaataaaatattaaattataattttgatatttcaaa

SEQ ID NO: 107137 - DNA, 805 bp, Glycine max
  Clone ID: PAT_MRT3847_6775C.1
gagaaagtcttccatagccccccaaaaatgaagagcaccatcttctttgctctctttctcttttgtgccttcaccacctcatacctaccttcagccatcgctgatttcgtgctcgataatgaaggtaaccctcttgatagtggtggcacatattatatcttgtcagacataacagcatttggtggaataagagcagccccaacgggaaatgaaagatgccctctcactgtggtgcaatctcgcaatgagctcgacaaagggattggaacaatcatctcgtccccatttcgaatccgttttatcgccgaaggcaatcctttgagacttaagttcgattcatttgcagttataatgctgtgtgttggaattcctaccgagtggtctgttgtggaggatctaccagaaggacctgctgtcaaaattggtgagaacaaagatgcagtggatggttggtttagaattgagagagtttctgatgatgaattcaataactataagcttgtgttctgtacacagcaagctgaggatgacaaatgtggggatattgggattagtattgatcatgatgatggaaccaggcgtttggtggtgtctaagaacaaaccgttagtggttcagtttcaaaaagttgataaagaatcactggccaagaaaaatcatggcctttctcgcagtgagtgagacacaagtgtgagagtactaaataaatgctttggttgtacgaaatcattacactaaataaaataatcaaagcttatatatgccttccctaaggaaaaaaaaaaaaaaaaaaaaaaaaaaaaaa

SEQ ID NO: 107138 - DNA, 400 bp, Glycine max
  unsure (1)..(400): unsure at all n locations
  Clone ID: PAT_MRT3847_67760C.1
atantctcttattttttttttttttttttttgaggggacccaattgtctaattaaaaaaaaaagaatggagctcatacacatggatctgatacacaggagtatgtacatttctgaaaagggagttaaacgcaagggaacggcgaaagggagcagaaaactgcattgcgtgcaagcaccctaatcgaccagggacaaagttaggggcataaccccaagcgatactggaaactggaccagaagcgggtgtgcaaagggtcagacaagggcccttggcagtgacaatatcctgcccaaacaaaccaaagatggtgaacatagccacccaaccgtgcctgaattccttaaccttcaacttacagaatgcttaagggcaattagccaaaccaagagggataaata

SEQ ID NO: 107139 - DNA, 508 bp, Glycine max
  Clone ID: PAT_MRT3847_67761C.1
gtgccgcctgcttggggggggggggggggggggggggggggggggggggggggcaaacgaaagttgttagggaggtaaagctaaaacggctaaatggctgataggcctaacgcaaagggtgggtgaggcagagtttataatgggaattccagacaaacgaaaagttgttagggaggtaaagctaaaacggctaaatggctgataggcctaacccaaagggtgggtgaggcagagtgagacggggggccacctggcctggcccaaccccagcggtgagcaggacgggtacggatgtttctacgttcgtgggaattaaggtggtgaacttgggtggtacgtgggtgctcctactgtgctacgtaggtgttcgtaacttgttaaagcaaaggtgaacaggctgcccataattatagctggggttgcccaggatgctaattttagctggcggactgacttactcaataatagtaaaagtagtcgcactcgtgaacgtgcccactgggcttta

SEQ ID NO: 107140 - DNA, 1646 bp, Glycine max
  unsure (1)..(1646): unsure at all n locations
  Clone ID: PAT_MRT3847_67762C.1
cccacgcgtccggggatgagtgaacactctcactaatccacccatctccataatcgctccccgcaacaaaaaccttctattctaatcaactaatcccttcacatttcacacccttatatttgaatctcaacttcagtatgaaaatccacaaagcgtaccttgtccttataggcttggagttaacttgtattggaattaagtattgagtctccaacaccaataatccttttcaacaatcaagccttctgcttttcctcactgctatattttcccatgtccttgcatccaccgctgatatgaccaaacaaattatcatcataacatttcacatctcagggataactggatgtgaaacactcctgtggattctcattcatgactttatgtgctactgtatggtcaacttgcttcttttactcctagtcaaattcttcttcttcaaccaagtcgctcagctggtcgtttacttcttcaaatacatcagtcagctgctgcgccaagtttcaggttcaaatgttgatcagatgccaaatttggagctgcaaccacagcaagatcaggtgtagcatatgtaacatagcataaatacctattcttgatttgtactgaggctcgaggatcagtgaacactctcactaatccacccatctccataatcgctccccgcaacgaaaaccttctattctattcaactcccttcacagaaccacaacacaacacccccttaaaaatttctatcaaaccaacacacacaaaacaatcatcaatcgcacttacccttcctcctcctcctcttcctccaaaagctgtgcacaacactactactactactttatagtaattttttctaccgctcgccgcgtctttgatactgacggtatagttttaaaagaagaaaaaaatgaacatctcaacatcagcctgcgcctgcgcctgcgcctgcaaacaggagctgcccctagtaagcttccaaaagggatcacttatgatggagtcgttgtttcatcatcggaataaggagaaggtggtggtgataatgggggccactggtaccggcaaaacgaagttggccatagacgtggccaaacacttccaacccgcggaggtagtgaactcagacaaaatgcaagtctacgagggccaacaaggtcaccgaagaagagtgttctggggtcccacatcatctgcttggcactgttgacccctacataaatttcaccgccaacgacttctgtcgccacgccactttggctatcgattccattgtggaaaaaaatggcttacccatcatcgctggaggctctaattcttacttagacgcgttggtcaatcattatcccgagtttaggttaaggtaccagtgctgtttcctctgggttgacgtgtcactcccggttctccattcttccctccaggcacgtgtggaccgcatgatcgaagctggtcaagtcaacgaggttcgtcaattcttcgaccccagtgtaaccgattacactaaagggatacgaagagccattggtgtgcccgaattcgatgactntctaagagcagaggctaatggaggcgttgatgagagaacanacagagacttcttgaggccgccattgcaggtttgaagatcaacaactgcacgctcgccaaccgtc

SEQ ID NO: 107141 - DNA, 259 bp, Glycine max
  Clone ID: PAT_MRT3847_67763C.1
ggaggctccgtcgccgaagctgatcatgcggactcagactgccgggaacttgggagagtccgtgattgacagagaggtggtgccttactatatggtcgagattgcgcccattctgcgcgtcactgacgaagttgaaaagactcatcccatggatgattatctctgccgtatttatgcctctgagaaagctcatatggtggatcccaatataagtggtcgtggagttcgccaattcacaactgcgcttcttcacgccttg

SEQ ID NO: 107142 - DNA, 426 bp, Glycine max
  Clone ID: PAT_MRT3847_67764C.1
gggagagagagggagaaagagaaggagatcgcacttaacacatcacacagcaagagaaagagtaatagaatcgtggttcgtttgcagaagaagaggttaagagaaggagtgaccgaagcgaagatgttaccaacagcttccaaaggacgttcttcttcttcctcctcctcctcctcttcctctcgacctaacaatcccatgctgcttccctacctccgcagaatcatcaagtggcaacaaatggatattgaatatactttttggcaaatgcttcatctatgtacatcaccgaaagttgtctatcggcatactaaatatcacaaacgtaagtctctgtctcattaatatctttgttcttctgatttattgatacacatttctgaacagtgattggtttaacaatgtttattaagcttctgttttact

SEQ ID NO: 107143 - DNA, 226 bp, Glycine max
  Clone ID: PAT_MRT3847_67766C.1
gcacattactccagcggagttcacatcgctactgctaagaatttctgtggtgctgatcctgaatgaatcggagactttcttcatcacactcatgctgatgccgtgggttctcggattgcttatgacgttttacttcaccggcatccttacctctctctccgttctcaggaagactaatctctgctaccctacgccacataaggatctccctgagtgaaaacttata

SEQ ID NO: 107144 - DNA, 340 bp, Glycine max
  Clone ID: PAT_MRT3847_67767C.1
acaaacaaaataaaacaaaaaaaattttttgggagggggggaaaaaacccaaaaaccaaccgtaattttgggaaccaagggttttttcttcaaaaggcccgaggaaaaaaaaggaaaaccccctaaattccggacggacccccccgggaaccccatttttccataaacggaattgcaaaaaaacaaggcacaaaatgagcacaaatttcctctgggaaaaattggtggacttcaacatttacaaaaaaaaaatggggccggtaatcataaaaaggtaacaccacgggggcgacccaacctgggggaccaaaccccaaaaatatgcggggcacgggccaaa

SEQ ID NO: 107145 - DNA, 885 bp, Glycine max
  Clone ID: PAT_MRT3847_67768C.1
cgttgctcgcgtcgttgctgtcgccgttgcagcatctacatttcatcacaatcttcctcaatcatgtcttcagaaacaaaagcagaaacacaaactttgaccaccccctcttactcctcagatgttgacaatggtatagtgaaggatgtagtcctatggagaagaaagaaaataaatataagcgttcttgttgcggcaacagcggcatgggtgttgatggaagtgtttgaattcaacttcctcactctcatatcatgggtggccatactcggtcttgcttcaatattcctctatgccaatatgcttagacttttgggcaaggaaccaccgaacttgttggggttggaagtgagtgaaaaaacaacaacgagaatagcacacacagttcgagcatggattgaagaaggaataaggtggttgttccttgtgggcgcagagaaagagtggcccgtgtttgtgggggctgtggctggattgttatcactatcttatttaggaagttgcatggacctcctaacactagtttatatgggtacgttagtgggaatggcagttccattaacttatgtgaagaacgaggacaagattaagaggtttgtggagtggttgagggagaaacacaagagatattatcagattattgacgagaagaccattcagaagattaaaagcagaatcgtaaaggagaagaaaacagagtaattagctttttaagagaaatgtgcacggttatgctgtattatttaatgaatattaagagtctattatttgtttcgttatatttcggtaatgttatgaatagattagtataacgtaagaattgtaacttcgccctgaaaagttaaactcttaagttaatattattattacgagtgttcatcagca

SEQ ID NO: 107146 - DNA, 359 bp, Glycine max
  Clone ID: PAT_MRT3847_67769C.1
acgcgtacggccacccttatgtttctaactatcttaatagaaaaagcaaagaggattatcgcaagtattatcgaaagcgttcttaaaagtatgctcaaaagtctcctaagcctaacgaaaataaaacatgtgttcaaattgctatttattaagtcggacttctcaaaagatacacaaattgagcgaacataaaaacgattcaacaatttataagaataatccaacgatttctgaaacaaccatctcaattcaatcaaataattcagttaattgctcattgaaaaaaaaaaaaaataagggatccttaatgccttaccgaaaaagccggttttaaaaaaaaattgtgaaaaagtttaaaa

SEQ ID NO: 107147 - DNA, 674 bp, Glycine max
  unsure (1)..(674): unsure at all n locations
  Clone ID: PAT_MRT3847_6776C.1
aatctaataagatgtttttttctctcttcatttttgggttccagtgtgttgcttgataacaagtaaccccacaaaaaaggaaagcacattacaaaggactaagtgactaatttcttagccaattcagatggccagtaactgttccatattaataggagatatgtattttgaaggtccattaaaaatttcatccacaaagatgcgagcagctgcctctgtaggatggaatgcatcccagaaaatatggtcttttctattggaacaaatgctcgaaattggcaggcatggaatttgggcattcaactcaccaagtccacaacatgcagctttcacattagcaaatcctgtagttgcacttttaatgtggaagccatggaatccacgtactgctgaggggtgtttttcttttgaagatcctttgagtcaaagtaaccaaagatatcattgccaccaatcaccacaatgaagatggactttgagaggtgtttcccgagagtagatgctcctatttgttgtatcagttgttcatgcacttgtgagtagtagtccacttgctttggcaaaggtattgattgcctctgcaagaattgtcatccagaagggatagctcagctggggggaagattntctttatttattttgncattttcttatcattctgggaacatatgttc

SEQ ID NO: 107148 - DNA, 132 bp, Glycine max
  unsure (1)..(132): unsure at all n locations
  Clone ID: PAT_MRT3847_67770C.1
agtctgcangcaacgcgtaacgtaagctgcgngaattcggcttcgagatgaattatgaanatgnnnatnannncngccttggntcatntnngntccctnntcganngnacactngcgngcagggcccnnngt

SEQ ID NO: 107149 - DNA, 140 bp, Glycine max
  Clone ID: PAT_MRT3847_67771C.1
gaacgggcgcccacacatacgagcatgagatgcgaggcaataaataacactaactatgagatggagtcgcactgaagaacctcgagcatttgtaggctgcattgctagcaccaaggtcctgtaggctaatggaatttttg

SEQ ID NO: 107150 - DNA, 404 bp, Glycine max
  Clone ID: PAT_MRT3847_67772C.1
ggtcccaatactgtatttatgggggttttcccttgaattggtaggtaatgtaaagttcagatgttggataatcatctgaactttatatttttcatatattgtaacaacacccattcgctaccaagcattttagtgagggtaactgaaaattcataatctggcagcaccaaccaccttacactgatgcagccacatccgggccaactcatctaacctttttagccttgggccatctgaagcaggggggctgttttccactccattagtccattccctgcacctaggcagccatactagccatttttgacaaccatgctagtgtatgcttggtttggtattcagtgctctcaacccacatttgatatgttgttcaactggattttattttaaccccccctcccaat

SEQ ID NO: 107151 - DNA, 125 bp, Glycine max
  Clone ID: PAT_MRT3847_67773C.1
cccacacgtccagagacgtgagagcgggcgacacatctaccccattttttcattattgagccggtatggaagcgatattactcaagctgagtgttccgtctaagatgatcgttacatattaagag

SEQ ID NO: 107152 - DNA, 162 bp, Glycine max
  unsure (1)..(162): unsure at all n locations
  Clone ID: PAT_MRT3847_67774C.1
ctctttcaacaccccctcataagtcgcaccgctacacnggggacactttaaactctatttacacgctaatcaaacgccacccacaccttcttctgccttggtaaactttccagtaccacccaaagcagccaaccaaccaacaaacaacacaagtcgctaact

SEQ ID NO: 107153 - DNA, 645 bp, Glycine max
  unsure (1)..(645): unsure at all n locations
  Clone ID: PAT_MRT3847_67775C.1
cagagttcccatttttactgggcatattcatgaacaattattataaaaactgacttgacaatacgtggtttttataatctggtttactactacaataataaacactttctttcctccacaacagttgaataattgtatatagcttggaaaaagccttcgtacttttgcaaaaaagagactcaggtgtttgggttttctgtgagggtcttgccattcagtctttgttggcctggtactctgtacatagcccaggttggacatgagcttttagtagtcctgttgtagcctcctgagagctgacgttaatagtgtgcaccactgtgcttggctgaagaacttaccttttaaattcccagtacctccataaacatcaatcaaacaatccactctgtttccccagtcttagtcacttccccatctgctgctccctctgcacagaccctcattacttcctcaactccctcgtaggatgctttttcctttttgagacaggggttcgctacatagaccaggctggcctcgaactctgagatcctcctatccctacctcctgagggctgggattaaagccatctgccacaatgcctggtccattaattttcttttagataatagnntntctnctctctctctctctctctctct

SEQ ID NO: 107154 - DNA, 318 bp, Glycine max
  unsure (1)..(318): unsure at all n locations
  Clone ID: PAT_MRT3847_67776C.1
gttntaacacaagaagacactgtaacgggaaattatagaggccgacggttcaatttgaaaaaatttgaaagagcaactaaaacttagcatgttgttttggcacctcaaacaatgaggatggtgggaatgttacacgcaagatacattacaacttttagcgcttgggttagtacaacaaccttaactaacagaaatatttactcgccaagtttgctatgccttcaattcaagactggcagaaaggtcccctttgaatagcattctgggtagcattaacaagagcagcctctttaaagttcttgacagccaattggactc

SEQ ID NO: 107155 - DNA, 438 bp, Glycine max
  Clone ID: PAT_MRT3847_67777C.1
cgtgtgtttaatagtgcaggacagttatgtagtagttatgtgtctatgtatgaaggacgttatcagttatatagcagccatgtattcctagtacatgatgtaagtaggggttaggaggcagttattatgtgtgtatttggtagtttggacagacttcattctctctgtaggagtttctcaattctgggaccattcatactttactttctgtaaaattttgtatttaatcataataataacaaacacttattaaacatcgttcagttggtagtatttcattcttagtaaccaaattagtccctcagattctttgtctcttactactttagtccttcataaggacaaccacactgacattttagatcttttgagaggttaatttgatgacaaattttttagaagacttacaattgtgttactttggaggactaaattgag

SEQ ID NO: 107156 - DNA, 311 bp, Glycine max
  unsure (1)..(311): unsure at all n locations
  Clone ID: PAT_MRT3847_67778C.1
gtcncnngcacgcgtacgtaagctcgggaatancngctcgagntcgagccgcggggattctccaacgnntccgnncggttcgggnccgtngttgcnatcngnctacctnatttccnaccngncggggcnacgtncgnnncntcnncananggnnngtantcacnggancnnncagnangcaaattnnttncccgngnagcctgnncantaccccgcngntgnngccgtnanngcgcgaagaaggnnnanggtgtcnngggtgnnngatttggggngtggcacgcaagncccntntaccttggngnggccca

SEQ ID NO: 107157 - DNA, 392 bp, Glycine max
  Clone ID: PAT_MRT3847_67779C.1
tcgagaatgaactcgtcatttgacttactcatggctgctactttgttcactgttaccttacacgcaccccatcaatgggccacggtacatgacatgtgcggagcatcttgggaacccaactactggggcgccatatcaaaaaccgaagacgctttaagccgactcttcgctgatattcatagcggggaggctgcacaaacatacaatgctgacgacaccctccaatggatctggaaccaacaccactacaccacatttctcaactcggtcgtgcatgcacacatgcaacaacttatggccgccactcgaatcgcctacaacaagatcaacgggacacatgcctcattctccaccctcaatacatacgatcccgccggcgtacaaacccttct

SEQ ID NO: 107158 - DNA, 2255 bp, Glycine max
  Clone ID: PAT_MRT3847_6777C.1
taacactaatccatagccccccaaaaatgaagagcaccatcttctttgctctctttctcttttgtgccttcaccacctcatacctaccttcagccatcgctgatttcgtgctcgataatgaaggtaaccctcttgatagtggtggcacatattatatcttgtcagacataacagcatttggtggaataagagcagccccaacgggaaatgaaagatgccctctcactgtggtgcaatctcgcaatgagctcgacaaagggattggaacaatcatctcgtccccatttcgaatccgttttatcgccgaaggcaatcctttgagacttaagttcgattcatttgcagttataatgctgtgtgttggaattcctaccgcgtggtctgtcttccatagccccccaaaaatgaagagcaccatcttctttgctctctttctcttttgtgccttcaccacctcatacctaccttcagccatcgctgatttcgtgctcgataatgaaggtaaccctcttgaaaatggtggcacatattatatcttgtcagacataacagcatttggtggaataagagcagccccaacgggaaatgaaagatgccctctcactgtggtgcaatctcgcaatgagctcgacaaagggattggaacaatcatctcgtccccatatcgaatccgttttatcgccgaaggccatcctttgagccttaagttcgattcatttgcagttataatgctgtgtgttggaattcctaccgagtggtctgttgtggaggatctaccagaaggacctgctgttaaaattggtgagaacaaagatgcaatggatggttggtttagacttgagagagtttctgatgatgaattcaataactataagcttgtgttctgtccacagcaagctgaggatgacaaatgtggggatattgggattagtattgatcatgatgatggaaccaggcgtttggtggtgtctaagaacaaaccgttagtggttcagtttcaaaaacttgataaagaatcactggccaagaaaaatcatggcctttctcgcagtgagtgagacacaagtgtgagagtactaaataaatgctttggttgtacgaaatcattacactaaataaaataatcaaagcttatatatgccttccgctaaggccgaatgcaaaaaaattggttctttctcgttatctaaaaaactatacaagaaagtattaattactacttaatcatcttgttacggcacattatatccaaactccatcaagaaaaaaaaaaaaaaaaaaaaaaataaaaaaaaaaaaaatgaacttaaggcaagaaagagagttctccgtaggctcggatacgctacaagtgacaatgtagtggaattaaaagggagggttgcttgtgaaattagtagtgcagatgaactgaccctaacagagctcatgttcaatggtgttttaaaggacataaaggtggaggaaatggtttctctcctttcttgttttgtctggcaagaaaaaattcatgatgctgccaaacctcgggaagaacttgattttctttttatgcaattacaagacacggctcggagagttgcccaacttcagctggagtgcaaggtgggaaatttgacgttgagagttttgttaagtcgtttaggcctgacatttatggaggctgtgtatgcttgggcgaaaggttcaaagttctatgagatcatggaaatcactcaagtctttgaaggtagcttgattagagcaattagacgacttgaggaagttcttcagcagttaatagaagcagctaagtcaattggggaaactcaacttgaggcaaagtttgaagaagctgtgtccaagatcaagagggacattgtctttgctgcatccctgtatttgtagttccttctagaaattatttatttgcatacgcacagttatgagaagcaaatcatgtggaaggacaccgattacatgaaatcgcccttgtttctcaccttggttttgatctccactaacacctacaaacatatagaacaattgtactattactacaagtgagtttaaatgagcaaatttgagctagaaatcaacctttaaattacagattgctcgagttcaattgtccgatattgagccatgtcaaatagggataaggttcctttaaatgagtaattcacttcagatgataaaacaagttattttagttgttgctttttgttaatagtaattttagttgttaataaaaaatgaaattgaagattgagatt

SEQ ID NO: 107159 - DNA, 1913 bp, Glycine max
  Clone ID: PAT_MRT3847_67780C.1
aaaatggtagcttgcagtctcttctgatcaaaattcttgaaggtccatgagaaaaatactcctatcgctacataccttgttatactggtagggatgacaagtggtaaattccttgatgctgtcactgtggataaagctctgaaaacattaaagaaaagtggtaatatgcaatcaagagaagcagcactgagggcactaaatcagatatcatcatgtgacccaagtgcaaaaattttaatagaggctggaatactttctcctcttgtcaatgacctttttgcagtcggtcctaatcagcttccaacacgattaaaagagatctccgctacaattcttgctagtgttgtaaactcaggagaagacttttattccattccatttgggcctgaccaccaaactctggtctcagaggatatagttcgtaatctactccatcttataagtaacactggtccagcaatagagtgcaaacttctccaagttcttgttggacttactatttctccaactacagttctgagtgttgtggctgctatcaaaagctctggtgccaccatcagtctagttcagttcattgaggcaccacagaaagatctgcgtgtagcttccataaaacttcttcagaatttgtctcctcatatgggtcaggaactagctgatgcactacgcggctcagttggacagcttggtagtctaattaaagtcatatcagaaaatacaggaatcactgaagagcaggcagcggccgttggccttttagcggatcttcctgaacgggacttgggcctcacaagacagctactagatgaaggtgcctttgtgatggtcatatccagggtgattgccatcaggcagggagagatccgaggcactcgcttcgtgacaccatttcttgaggggcttgtaaagattgttgcaagggttacatatgtctggctgggagaagacgacagaagggcactctgccgtgatcacaatcttgccgctctctttattgatctgcttcagtccaatggacttgataatgtacagatggtttctgctacagctctggagaatttatcccaagaatcgaaaaacttgaccagattacctgagatgccattgccgggtttttgtgcttctgtgttttcatgcttcagcaaaaagccagtcataactggatcgtgtaggctccaccgagggatatgttctttaaaagaaacattttgtctctacgaagggcaggcagtgcttaagttagtaggtctgctggaccacacaaatgtgaatgtggttgaggcagcacttgctgctttatctactttaatagatgatggagtagatattgagcaaggagtggcaattttgtgtgaagcagagggagtgaagcctatactggatgtgctacttgagaaaagaacagaaacattgaggaggagggcagtttgggcagtggagagactattgagaacagatgatatagcctatgaagtttctggggaccaaaatgtgagtactgcacttgtggatgctttccagcatggtgactatcgaactcggcagacagctgagcgtgccctcaagcatgttgataagattccaaacttctcaggaatctttccaaacatgggatgaaatgaactttgtagtattttgttgtagatgcttcactgtccagttgatgatcacaaaaatttgtatgtaattttatcttgtgccaagcagttttggattgtatctatatatgatgcttatcgtcttactatatgcatttatccaactgcagttggggattgttgtatactatacacgttacccattcttttaccagctgttcatttgttgctcctgattctgtcgctttttgaggtttccatcatactatggaagtaatagttgtaagttttattttgataaaaagagttactacg

SEQ ID NO: 107160 - DNA, 120 bp, Glycine max
  Clone ID: PAT_MRT3847_67781C.1
aagctcggaatcggctagcccatgcgattcttaactaatctatttcttcatcgccgattttctctcctaaaatgcaacttcttgaaactttgacccggaagacctaacccttgaggggga

SEQ ID NO: 107161 - DNA, 227 bp, Glycine max
  unsure (1)..(227): unsure at all n locations
  Clone ID: PAT_MRT3847_67782C.1
ggtgggggatatcgaagggcacttttgaggctgatgaaagtcttttcacggtcatggggactctcgatggagaaatggcttcatttgactttctaaagagttcaatgganncatgttcaacgtggagggagaccggtgaaaagagacgggagatcaagaaagtgcttttcaaaggtgtttgatttgaaatggcgacggaaaaaatcaatgcttgaggaaattatcac

SEQ ID NO: 107162 - DNA, 235 bp, Glycine max
  Clone ID: PAT_MRT3847_67783C.1
atctcaaaggtatatcctgccatgttcgtagacagtgttactgagcttgcatttgatgatatcacccctgaggaccctgatttttctttcattcaaggcctggcagaagctggacttatcgaaagcaggctttcaagatgttatgatagaccgtggtccacaaatgaagcctatggcccatttaacttctccccggaaagccctttatcacgtcaggatcgtgacacttggaaga

SEQ ID NO: 107163 - DNA, 973 bp, Glycine max
  Clone ID: PAT_MRT3847_67784C.1
cggaattcccgggtcgacccacgcgtccggttagacagaatataaacctatcaactgagagtttacagctactttttggacgtgaacagcatgaaagagcatttgagattattaatttgctttataagaatgggtactatgttaaaatagaagaagtggctcaatttctccttaaaagaggaaagctgtcagaagcatgcaaattgttgctttttagtttggaaaatcaccagaatgttgatattgatttgtgtaatgcaactattttgaatctttgtaaaattaacaaggtttcagaagcatttagtttatgctatgaattagtggagaacggtttacatcaggaattgacatgtctagatgatctgatagctgctttagaggaagggggaaaaagagaggaagctgcatttatatcaaagagattgccaagactggataacttgaatggatctatgccgaatcatagcactaagaagttcaggcctattaaagcattaggaagctagaatgtcatgaaaagaggtaagggacccatcaactgctgcaatcaggatctgagtcaatgtagatcggggaagctcttgttcagaattagacgagctctatgtctaaatgctgacttaactgggattattctttaaatcttctgtttcctagactatcatcaaaggctaattaaatattaaatattagtaaatggtgactcaatttggaacaattcctaaaacatttatgtatcttttagtgattggatacatgcatgtttttttaaccagtgctatgaaagaattagagagattccatggtaatccatcacaattactttcacctcactagattgaactaaaggtcccattctccttgacaagtaaggcaaagacatggctccaatcacatcccaaaaaaagcctcacatggtttgagtgtgatgtatcattttcaacattaataagaaatgaatcttttacta

SEQ ID NO: 107164 - DNA, 696 bp, Glycine max
  unsure (1)..(696): unsure at all n locations
  Clone ID: PAT_MRT3847_67785C.1
caaattccgctgcaaagcagggtgcgtcactccactatccagccatgcaagtcctgcaaacctcttatctcttcactttccagggcgtccgaaacccctaaacccttcccctcagcatctccaccaccgtcttccgccacgcctccaccactgccaccgccgccccctcaccatccccaaatccttcagctccgacgagttcccggtggatgagaccttcctcgagaacttcggccccaaggacaaagaaaccgaggacgaagcccgccgccgcaactggattgagcgcgggtgggccccctgggaggaaatcctcactccggaggccgatttcgcccgcaagagcctcaacgaaggcgaggaggttcccctccgctccccggaagccatcgaagccttcaaaatgctaaaccctaactaccgcaagaagaaaagagaggaaatgggactcaccgaagaagagttctacgcgaagcagttcgagatcaagggcgagattccggaccctctcgtgacgacgtgggcggngccgctggtggtgcgcctcgtggcgccgcgcgactggccgccccgcgggtggtgcgtggaccgggaggagctcgcgttcatccgcgaggcgcacaggatgcaggcgaggagggtgaggctggangaggntggaaagtggattgaagactgacactgatgacgcgggct

SEQ ID NO: 107165 - DNA, 164 bp, Glycine max
  Clone ID: PAT_MRT3847_67786C.1
tccgctgcgacgacgacaggaggtgaagcatatttaatgtctagtatctgacaatcatctgctgcgaaagtcacatattctctaatggtccgatcagatcgttacctagctccgaatcggaatcatatattttcatctcaagtcttaaagcttccgcgtgaacg

SEQ ID NO: 107166 - DNA, 438 bp, Glycine max
  Clone ID: PAT_MRT3847_67787C.1
acgaggatatttacattaatatctatattctatagctgaaatagagaggtctatatgagaaaatggtaaaaaaaactaaagtgctattatgctttttgcctggatccaaaccttctctttagaaggtcagaatttcttccttttcctttttgggttataaaaggggcccggaaagtagtgtgggaacaggcaagggaggcttaagtgcaggcagtgtagccttgctgcctctgggtatttgaacttgggatcaactgatcatgtagtctctatctctaagagtcctggtatcacttagtgatagctattgattccacttgagtttgttcctttaactattgaataattcatgaaatttagtagtgccttggtgtaattcctgagctaatctataggttcagttggggtcattatatcaataggaccagtcaatttaac

SEQ ID NO: 107167 - DNA, 374 bp, Glycine max
  Clone ID: PAT_MRT3847_67788C.1
ggttcgaacctttgggctgatttatgtgcttggcgacatatactatacccctctaaagcaacccaccaaccaacaaacaaacggtggtggtggtgcgtagcgatcgcgtcatctttattcacgaccttgattgttattaatgccatttgtcgtctcgtccagttcctctcgttcatcagtcgtattaatatctaaattatcccgtctccactccgttccaattatcctctagtgccttgaatactcctctcgacctagattacagtcctcctagacgaactacctactgcatacgttaacgacgtagccatagacccgaaagctaaacgttacgtctccgaaaataaccctatagcatccccccacggctgcgg

SEQ ID NO: 107168 - DNA, 459 bp, Glycine max
  Clone ID: PAT_MRT3847_67789C.1
ggtttgtccaatccctccaactctctaacggaaaacactttcccatcttcccccaccatatattctcttcctgtgtctctttctatactcccttgtctttattgttagtttcttatctctattattcctctctctctctctctctctctctctctcttatagctttaatattctttactcatcatagcttagggaagggaagataaatagatcaagcacaagagggaaaaatatataccctattcttgaattagggttttttttttctttctttgtgtttcagctcctagctagggagagataattaatatgtgcagtagaggccattggaggccagctgaggatgagaagcttcgagaattggtggaacgctatggacctcataattggaacgccatagctgagaagctccgaggaagatcagggaaaagctgtaagttgagatggttcaatcaattg

SEQ ID NO: 107169 - DNA, 1371 bp, Glycine max
  Clone ID: PAT_MRT3847_6778C.1
aattcggctcgagctgcgagaagacgacagaaggggacgccaattctaatcagcaggatcattccaatatgggcaacagaattgttatgggaaattcccttctctttatctctttcttcatcttcagctttagtttcttggaggctcaaaaggctccagcagtttatgtgtttggagactcacttgttgatgttggcaacaacaattacttgagtctctccattgaaaaggcaattcttcctcactatggcattgattttccaactaagaaacccactgggagatttagcaatggcaagaatgctgcagatttaattgctgaaaacttgggcctacctacttctccaccttatctctccctagtatctaaggtccacaacaacaacaagaagaacgtatctttcttgggtggtgttaattttgcctccggaggtgctggaatatttaatgcctcagataaaggatttaggcaatcaatacctttgccaaagcaagtggactactactcacaagtgcatgaacaactgatacaacaaataggagcatctactctcgggaaacacctctcaaagtccatcttcattgtggtgattggtggcaatgatatctttggttactttgactcaaaggatcttcaaaagaaaaacacccctcagcagtacgtggattccatggcttccacattaaaagtgcaactacagagattatacaacaatggtgcaaagaaatttgagattgctggtgttggtgcaattgggtgctgccctgcatacagggtcaagaacaaaacagaatgtgtttctgaagccaatgacttgtcggttaaatataatgaagctcttcaatccatgttaaaggaatggcaattggagaacaaagacataagttactcttactttgatacttatgctgccatccaagaccttgttcacaatccagcttcttacggatttgctaatgtgaaagctgcatgttgtggacttggtgagttgaatgcccaaattccatgcctgccaatttcgagcatttgttccaatagaaaagaccatattttctgggatgcattccatcctacagaggcagctgctcgcatctttgtggatgaaatttttaatggaccttcaaaatacatatctcctattaatatggaacagttactggccatctgaattggctaataaattagtcacttagtcctttgtaatgtgctttccttttttgtggggttacttgttatcaagcaacacactggaacccaaaaatgaagagagaaaaaaacatcttattagattaaacatttggattaatctaattgtacgaaagagtgagtttatgaacttttagctcaagtgatttattttatatttacta

SEQ ID NO: 107170 - DNA, 358 bp, Glycine max
  unsure (1)..(358): unsure at all n locations
  Clone ID: PAT_MRT3847_67790C.1
aaaaaaccgggtcggccgacgcgtacgcccacacctacctntgtactcataacaaattttattcccagaaacactgatatcccgccgctgatattttaaatgttcaccacctatcanaaccaccaaactacaatctccattcaacttttcgaaaacgaaatgaatctcacaaaagattacctccttcttatgaaatttgatctttcttgaatttctccaaccccaaagtatacgcctcaaattaaaaccacctttcaaattcattccaactgcattctaaatttgaaagcaaaaaacaatggcacttgttaatcaaaaaatatcaccattacaaacgaaaacctacttcttaaccaac

SEQ ID NO: 107171 - DNA, 181 bp, Glycine max
  Clone ID: PAT_MRT3847_67791C.1
ctttactataggtggaggaactttggaccttaacccaaacgagttcatgctccttgcgagcgaagggaccggggctcactgttttattggctctactgctttagatatgccaccttcacgtggccctctctggatccttggtgatgacttcatggggcgctataacaacacagtttcgttt

SEQ ID NO: 107172 - DNA, 460 bp, Glycine max
  Clone ID: PAT_MRT3847_67792C.1
ggggggttttttttgtttttttttaattattatttctttgagaccacccctcaatgacgtatcaacatggaaaactcgatttttcacatgcattattcacccccagagaccagggggggaagaaagaatcaatacttccacatttgaagaaatgaaccccccggggcctaaaaccccatttgggcctacctgggaccaccccggaaaaattaaacccttgggacccaaaatcgattaattgtggagtttaaccggcgggctcaaaatgaagtttttttatacttggaaaaaaaaggtcattttttatgggccggaacccccccaaacctctccatccatgggggcagcttcgcgttcaaaaacaaagggggctctaactctgaacaaaatctaaggtttaaaaacccttttttttttctgtcgacacccttccccaactctcaattggaccgcaaacctc

SEQ ID NO: 107173 - DNA, 494 bp, Glycine max
  Clone ID: PAT_MRT3847_67793C.1
ccaaacaacacgagaaaaccaatctgggagcattaaaagtaacaactccaactgcaaggtgcaacgaaaattatctgctacatcacctcttagaaatcctcctggtcctaaacttcagaaagtcactgatctggatgacaatttgaaaagaaaatcccgaatgatgcaacgaaaaattgtaaggcctagaagtgctttgccaaggaagaaagaaagagttgtccttgcatccaaccgttcccttggtgccgaagtggcagcggctactggggccccagggctgccccacccgcgtacacacgtcgcagcttcttcacctacaagtaaaactacaggttccgttcacaggcctttttcacggggaaggagggatttaactgttcccagggaaccaaagtgtcagagtctacatgtgccaaaggactgctccgccggcgggcacgcatgtgggcctttttggcgtggaattttagcaactttgggaaaatggttga

SEQ ID NO: 107174 - DNA, 412 bp, Glycine max
  unsure (1)..(412): unsure at all n locations
  Clone ID: PAT_MRT3847_67794C.1
ttaattctcaagactgaatttaaagaatgctgaaatgaaaatgaataataatagaagaaacatagaaaatgtttagaaatttgacccacaagttggcttaccaaaagttgacttgccatatcaagaatttatatattgtactacatggtactttgttttgctttcttgtccccatattggcttggcttcataatgtcattcttgatgtcttcatctacattcagtatgtatccatctatcttgaattactcataagtnaaaagagagagagagagaatgggaaaatgtctttttttcttgatactaccttttctcctttctagctgtagaaccagaaattcagaacccatgtttcattgttttaataagagttatgaatatcccagctttttgtgctctcatgtgaaatgat

SEQ ID NO: 107175 - DNA, 239 bp, Glycine max
  Clone ID: PAT_MRT3847_67795C.1
tcctcgtcctcgtactcctcatttctttgtcgccatctccattccctttccctttaaacccattccctttcaacatcacaatgagctcacacataaaaacatccatcatcattattattttactccgaacgagtttccaccgatcccactcactcaaccatgtcgctcattcaggcgttttgtcctcatagaacaaccacctttctatccatcctgctaattctcccttccttcgtcct

SEQ ID NO: 107176 - DNA, 432 bp, Glycine max
  Clone ID: PAT_MRT3847_67796C.1
ccgcccttttttttttttttttttttttttttttttttttttttttttttttttttttttttttttaaaataagaaaatttggaacaggggcaaaaatttttttaaagccggttaaaaaacaacaccgtaggtccggggagtgttttaggggacttacctctattacataaggggactttaacaaacatagctaaggctcctattcctattggaatagggcatttaagcatcccttattacttttagatgggagcaacctttacctaaattgttgaaagaggtgaaggtcctactcaatgtagtacatgggattaggaagcttaaaggtcctgttttcccctttggggtctcaaagcaaatcgctccattggtctccaatgattccaacaattttgtatccctgcctaaacagattctttttaattgctgat

SEQ ID NO: 107177 - DNA, 542 bp, Glycine max
  Clone ID: PAT_MRT3847_67797C.1
gaaataatgaaacgttacctgaaggcccgcaaagttacaacagggagcggcaaaaaaaaaaagggcccccagggggaaaacggggaaaaactggggggggggcagagcagggaacaagcccgcacaaaaagggaagcggaaaaaaagggccgaaaacagagaaaacaaagggagggggggaaaaaacaaaaccggggaaaaaccaaaagcccggaaaccaagggggaaaacgggaaaagcccagcgcccaaagaaaaggggccaaaccgcaaagaaaggcggggaggcaaaaagcgcccccggaaagagggaaaaccgccgagggacccggaccaaaaaaaactgccaaaaccggagggggcaggagaggatggaaagggcccccccgcggctgtccgtccaaacgggaaaaaacccacaaagggggggccaacccccgacagacaaaaaaaaaggtggaaaaagggccccaaccccattacccagaaaggaaaaaaaaagggttcaaagggggaaaaaggggagaaagaaaaaagcccggg

SEQ ID NO: 107178 - DNA, 151 bp, Glycine max
  Clone ID: PAT_MRT3847_67798C.1
aaaattaccatctttacagtgcataatgagatcaagatcaggcgtttggtatctactggttttattcacaggtttgaataatacaaaaggggggaaggaattatcaaaaaattacatttatattaatttcttcacaatcaaaccccctttg

SEQ ID NO: 107179 - DNA, 1681 bp, Glycine max
  Clone ID: PAT_MRT3847_67799C.1
gtttcttttgtggagtaacccatcaaactcatctatttagacgttcactaagttgaatccaaccatgttctagttgttgtttacgattaacattctccaacgctctttctctatctacgttttcaaatttgaagtcaaacacgttcaatcgtcgccctttgtgattaattcccatatcgtttccacggcagctttttctagcagataggaattaggttgaagtcaggacaaatatggccgatttggagaatttgcttttggaggctgcggggagaactggtacagctggtagaaatcgtcattctcttccaccttcaaggagacgacatgatggcgcctattcagatggtgggagtgattctagggatgacgattcagatgacgaactcaattatgcaagcagaaagccctctggatcacaagttcctctgaagaaaagactagatccaacagaaagagatgatgatttaggcagtcaggaagaagcagatgatgatggtcgcagcgatcatgatggtgatagcagtgatgaatcaaatattggcgatgatctctacaaggatgaggatgacaggcgaaagctttctgagatgactgaacttcaaagagagatgatcttatcggacagggctacaaaaaaggatgataaaaatttgttgggaaagatagcatcaaagcgtgagaaaggaaaggcagcagcacccagaaaacagtctccccccatgtcgtcatcgcgcatgcgtgcatcagccagatctgctgacaggtcagccaagaatgatgcgttaaatgaattgcgtgcaaagcgattgaaacagcaagatccggaagctcaccggagactgagagaggcatcaagaaatgcaggtccccggcatttttctccaccaaagcgcaaaacgttcacatcaacaagtctcagtagttcaagtcatagtgagagtgaaagtaggtcccatagtgacgatgaagggtcaactggggatggaggaattgctgacagtgatgatgacagggcactagctgggtctgagggtccatcatttcaggatataaaggaaataactattcgcagatcaaaacttgccaaatggtttatggagcctttctttgaggagttaatagttggttgctttgtaagagtgggaattggtagatcaaaaactggaccaatctaccggctctgcatggtgaaaaatgttgatgcttcagaacctgatcgacagtataaattagaaaataaaactacctacaagtatttgaatgttgtttggggaaatgaaagttctgctgctaggtggcaaatggctatggttagtgactctgctccaatggaagaggagttcaaacagtgggttaaggaagtagattgcagtggcggccggatgccaagtaaacaagacgtgctagaaaaaaagcaagctatccaaaaagccatcacatttgtctactcagcggctactgtgaagcagatgttacaagagaaaaagtctgcctcaacaaggccactgaatgttgctgctgagaaggatcggctgaggagggaattggaaatagcacaaagtaagcatgatgaggcagaagtggagaggatcaagacaagactgcaagaattagaggcatcgagacaagcaaagcagaatgatgccaaggcattgaaactggctgagatgaatagaaa

SEQ ID NO: 107180 - DNA, 228 bp, Glycine max
  Clone ID: PAT_MRT3847_6779C.1
cggactcttgggcagacgggggggggggcaactggcttgtcccctgtgcactacccgctgagttaaaagaatgcctacctctatacggggaggggcatctgcatagcatgctgttctacagaatatgacaaatgctgactggtgaaagtgaagatatgcggaaggagagcacgactcatatgttcggatgatgacaccaccgtacattcaaagtacagactctacacg

SEQ ID NO: 107181 - DNA, 185 bp, Glycine max
  Clone ID: PAT_MRT3847_677C.1
attcaaatgctgctagtcatttcaataataaacaacattacgatttattcatatcacatgatcactttacttataatttatcaatatcatctcaataccacattattcaagtaatattaccaaaatcaaatccttattctacaatattctttcaactacataacatattacatcattctgcaaat

SEQ ID NO: 107182 - DNA, 347 bp, Glycine max
  Clone ID: PAT_MRT3847_67800C.1
tgcaattgaagttaaaagccttagccttccttacaacttctctcacgaacgactcactatccatggctgcttggctctatacatgggagatgcaagctctgagcccttctgaacctgaatggcgctggatctggacctatagctctcagctccgcctggattgatgaccacttgagcaattgctctgcctgatgggtccccatcggcagagttggcagtggaagcttacctaatgcacgtcgaaacgatatccgagacatgtgcgataccccacagacctacaaggacatatggactgcatctgcctatgatgtctaaggctaccctcacgacatcacacgaggcaa

SEQ ID NO: 107183 - DNA, 337 bp, Glycine max
  Clone ID: PAT_MRT3847_67801C.1
ggaattccgatgctcaggcatctctttcaccatcctctacgctgttgctgttgcaggagagagccatgtgcatgcatcgctacctgaggaagataatggggaagctgttgggccaaacactcccattcgcactgcactgagagagcttctaaagcctctccctgtcagtgttgaaatcgatgaactccctaagcaaattgatgatacacaggccccaaaaacattctgatgtagagaagaccttcatccaggcaaaacactgaaagtgcagttcaccaagcgtacctatgcacaaccttatggtgtatatacatggttaacggatattaaagacacc

SEQ ID NO: 107184 - DNA, 212 bp, Glycine max
  Clone ID: PAT_MRT3847_67802C.1
ccaaaagaccaccaaaagggaagaccaagaagaagaaacaaccttcaaatccctttcctgtgtccatttaattactttcaaaccacaagtccttccaaattctttaacttccttctctctaagcccaaaacctcctactgtttttggccgttaaagatgtccgggaaaagaaccaacgggttgatcaaagcaaaacctcgccgccaacaaag

SEQ ID NO: 107185 - DNA, 335 bp, Glycine max
  unsure (1)..(335): unsure at all n locations
  Clone ID: PAT_MRT3847_67803C.1
accaagaagaagggaaaggcnnccncaaggancnccnccccagcggnnaccaccgncaaccgngccggngccggcttttttgctccatncaccgtttttttggagagggttggctttctttttttgaanaccaacattgacatttcctccattgctagcagcggtggaagagtcaatgcctgcnggtgtggccaccanttggcangaagaagttngggactctttcctactngcccgaccttggtgatgccccnttggcnnnggaagtcgnttcccttcttaggaaaggatggattccttgcttggaatncgagttggagcacggnttngggttc

SEQ ID NO: 107186 - DNA, 112 bp, Glycine max
  Clone ID: PAT_MRT3847_67804C.1
gggacgatatagaacagatttattcaagcaatatgaagcccccggagtgtctatattttaccaagacggcggagcaaaaatttatatcttatgagacaaaatgggccacaaa

SEQ ID NO: 107187 - DNA, 421 bp, Glycine max
  Clone ID: PAT_MRT3847_67805C.1
cccgaaaaaaaaaatttaaaaatgggaaatttccgggggcccttttccccttcccccaaaaggtcccgggggggcccccccttttggggggtccccttggggggaccccttataatccaaaggggggaccctagggccccctggggggcccccgattcgggggggctatcctggggaccgggagaggggtcaacaggcaaatccccaaggcccccggggggcccggggctgcttcaacctgggttatgtttcccgggggccccctttttttttggaaactgggggggggaccctgaaaagggtttaggcggccccccagccccccgaaaaagggggggggggggggggcctttaaccttcgggtttttccccagggggttattcccaaaaaaatttacttgggggaaaacaatttgggggg

SEQ ID NO: 107188 - DNA, 228 bp, Glycine max
  Clone ID: PAT_MRT3847_67806C.1
gggcccgccggactgcatcactatattgggggcaggaaaaaaaggaagcccccatgggcatttttagaatgcaaagcacaatgtgcgcagatgcgcttcgatctattgttccataactaataactaacgagcattaccaatgtagcaaaaggatttccatttcaatcatcctatgtgtaaagtttatttcctgacggcttgagtacggagcactaactgcgagagttg

SEQ ID NO: 107189 - DNA, 471 bp, Glycine max
  Clone ID: PAT_MRT3847_67807C.1
gggaaaaaacaaaacccccgaaattaaagacccttttccttttttaaagaaaaagaaataggggagaaatttttatgggcccacttgaaactgggccacaagggattttttaaaacaaattttaattatcagcaataataaaaggaaaacaaagtaaaaaaacaaaaaggtaaaaaaaaaaaaaccctcaaacccaaaatctttttttttggttcacgggatactattttaaaaggaggggccttttaaaaaagggggagtttaattttgggaagttcaatttttccccacgcccaaaaattttcccccgcgggaatatttcaccagtttttaaaaaaaaggctatgctttgcccgaataaaaaaagcctttttttgaaaaagctttccaattaaccaaaaggaaaattcccttaagtaaaagccccctttgcctaaattaaaaactcgtgcccctaaaaaaaattttcaa

SEQ ID NO: 107190 - DNA, 182 bp, Glycine max
  Clone ID: PAT_MRT3847_67808C.1
ccccccttttcgccttgcagcagtgatcgagatgctgggaaagacgaggaaggtggcagcgcgtggcgaatccgtggcggcgaactacgccttcggtccctccgaagatgacgtaatcatcaagcacaggcttctcacgcgcaccaccaccaccaggggcgaccctcccttgaagaaccttc

SEQ ID NO: 107191 - DNA, 1002 bp, Glycine max
  Clone ID: PAT_MRT3847_67809C.1
ggctcgagattcaaacattgggtacttcaaagtgtcgggaagaaaagaaataaataaacgaaaacgtgttttcccataagcaataactctataacccacgcagttacacttgcaccatttttttctccccaaacgtggtacccaccaaaccaatgaaaaaatcaagtctttttccatctgggaatttccttttccttttccttcttcttcttctcaatgtctctgcttcgttggcagcaccaacaccagaatcggtgtacacctccttcctccagtgtctcacaaactacacaaaatcacctgaccaagtttccaacatagtatttgctcaaaccaacgcttccttttcttcagttctccaagcctacatacgcaatgcccgattcaacacaacttcaaccccaaaacccttgcttgttgtcactccctcggaagaaccccatgtccaaggtgcagtaatttgcgccaaaagcattgcgattcaactcaagatcagaagtggtggccatgactatgagggtatctcgtatgtctccgaccaaccctttatcatcctcgacatgttccacttcaggaacatcactgtggatattgaaaacgaggttgctgtggttcaagcaggtgccacacttggggaactttattataggatttgggaaaagagtaaagttcatggctttcctgcaggggtgtgtcccactgttggtgttggtggacacttgagtggaggagggtatggtaacatgttgagaaaacatgggctgtctgttgatcatgttgttgatgctaaaattgttgatgccaaaggtaggattcttgacaaggaatccatgggggaggatcttttctgggctattagaggaggtggaggagcaagttttggagtcattttatcatacaatggtaaacttgttcctgtacctgaagttgttagtgtttttcggattgcgaagagtttggatcagaatgagagtgccactgagcttgtgttgcattgcagca

SEQ ID NO: 107192 - DNA, 331 bp, Glycine max
  Clone ID: PAT_MRT3847_6780C.1
tttacttgtgggcggacgcgtgggcggacgcgtgggtccaactgcattgttggaatctggtttgcaaaaagacagagggttaatggaggaatattttggaaggacgtcttacgttgctcataacgttaatcagccccaaaagaaagatttgctggagggaaatttttcctttgatatgaaatcacgctctagattgaaaaaagttacctctactaaagctcaatttgttagcggaaaaacctttaaatatgatatagtaggtgctggttgacattctttacaagatttccctgaaaaagaagatcaagacaaacccaaaaagattgatgcc

SEQ ID NO: 107193 - DNA, 322 bp, Glycine max
  Clone ID: PAT_MRT3847_67810C.1
ttgttgtttttttttttttttttttttttttttttttttttttgttttttttttttttaaaccgagcacactggaaccataattatgattttataaacaagcttttttatattttccaaagaattcctatgggtcatacattgaaaaaaatgtacctcaaatggagcagctgcttaaacaattacgggttgcttaacgcgaaaaaacaactcatggggttaacttaggggggtatcaaagaactgagtacccgggcctcaagggttttgtcaaaggtgaaagaaatgccgttcacttgcacttgccgaggaccgtcactgga

SEQ ID NO: 107194 - DNA, 145 bp, Glycine max
  Clone ID: PAT_MRT3847_67811C.1
gcgacctgtagacctatttactgtttttgaagaaattgatcccactgttggagtgtctgctcgatgataagttgcgcttgatccagtaacccatgcaatctgtagttacacatatactatagtataacgttcaactacaggtgag

SEQ ID NO: 107195 - DNA, 319 bp, Glycine max
  Clone ID: PAT_MRT3847_67812C.1
ggcctacacgaagtgaaattgagagagagagatcgccagtctttattgggtttcatcaatggccacacgttacgacccgtgtatgactgtttcctctcacgaattcatgaaggtattacgacctaatatgctacatgcgcactgctagatgggcctttcttgttggactgggtctagtgaaactgattattctgaggagtcggctacatatgatcctgcttggacttctgaactggctgactaaatggcgatacagatctatttctcacgcccatttgatatgtgacctattcacaggatctatagagtaagcaggata

SEQ ID NO: 107196 - DNA, 485 bp, Glycine max
  Clone ID: PAT_MRT3847_67813C.1
gggggagccaaagggtcctggtgaatttggcataatttgtaaaacacaaatcagggaaatcccagttttgtttaaaaattccacgtttttcgggttttacaatttttgggaggtttttccaaagggggggagggggtaaaatttttcctgcctggaagtggaaaaatttattaaggtttgaccctttataaagcaggttgttcattgtcaaaaataaactgaaacgggttttctcgacaatggggtgccaaaaattgaaaaagctcccctttccataaatgaagggttggtttaccccccaacgtttggccaaaaactaattaattgccaaaaggggtgtggttggatcaatttctgggggttttggaaacccaaacaaatttttttttcggagtttttgtttaaattctaccgggctttccataatttttaaatttcttaaagaaaggaaaagttttaagccttttggggtcttttttaagttt

SEQ ID NO: 107197 - DNA, 163 bp, Glycine max
  Clone ID: PAT_MRT3847_67814C.1
cgtactctaactccttttattattacataatataacttgaattgaaaatatcttctttgtcgacaaacttatcactacaaaaggatcgtattctaacgattactgcacacttcgacaatcttcggaataggacccccagtgatcgcctttcacccttcacaaa

SEQ ID NO: 107198 - DNA, 308 bp, Glycine max
  Clone ID: PAT_MRT3847_67815C.1
caagctttccaatcccaacaaaaaattttccctcggcaggaggcgtcacgtgcaacctcccgctgcacggaaaagcaacttgccaattgcaaacaagtttgcatggcttttgccgcaaatggtgacgatagtgaagtcagcaactaagggaacgttcaacataaaacactagaaggtgtttacaacattggtcgttgaacaaatggggttggtgcggtggccgcactgagtaagaataatcataggctttgggctaatttcataaaaggcaatctaaattggccctaggctttcaaaactattgttgt

SEQ ID NO: 107199 - DNA, 175 bp, Glycine max
  Clone ID: PAT_MRT3847_67816C.1
caacggtcatatttcattacacagagagagagagtttggtgccaagacttttctctgatcctgcatgctgccagaccaaacaagagtgcgggcaggactctgattgcggcatatacatttgcttccaacctgaattggcccctaattccaagatgggtgtctctaacaaaactcc

SEQ ID NO: 107200 - DNA, 386 bp, Glycine max
  Clone ID: PAT_MRT3847_67817C.1
ctttccagaagttaaaactctcttcacttgaagcgtaagtatatccttggcatgctgctttttattttagttgtacctgagtgattatatgttttcctataaatataataagaaaatggttatacacactaacatttagaagaccaaaaagtcggattgaatacatgttatccgctttaggggaattgtctatatagtagtttattaacatggtcttataccccattgagtgtgtggtctgcattttatttactgattttcttgtttactttcatgctttgtagtactgggcaaaagcataaaggttcaagtggctcacaaagtaaaagggcaaaaaaaatcaaacctgtgaaacgtgcatcaaaaaataagttgcatcaagagga

SEQ ID NO: 107201 - DNA, 449 bp, Glycine max
  Clone ID: PAT_MRT3847_67818C.1
caacaaagaggtagtcattgaacaaaaaaaaaatggagcaatctaggcgatagcaactgatgggcacaggaagtagtggacgcgtggcacgatagcagcatgtcccgtcgacgggacaagaaaatttggaccgttgaaggctccttggttgcggcgccgttgaccggagccataggttacgtgattcgatgattgcatctaatcatcaatcatcagttaattaatgcaaaattctcgaatcagttgtaaccatgttggtgctggcgctaacttcctttgcacccgccgcgaatccctttcgatttcgaccccgcgcgttctgtcgccgtaagctcaaaatcaataactctctcccaccgccttcttcacccgcagttcctttcgagaatctctttcacagcttaataactcagttcccttccgtcaactcactcaatttcattactccc

SEQ ID NO: 107202 - DNA, 1216 bp, Glycine max
  Clone ID: PAT_MRT3847_67819C.1
ggccaaaccacaaacgtgcttctcaaaaccaagccatattttcccaatgccactctccgaacggcgcccgggccttatttcacaggccgtggcacttttgacaactccacaactgcaggtaccctaatctacaagcaacccttgaaaaattccagtgtaaaaaatctcacccttctcaaaccaactttgccaccaataaatgccacaagctttgtggcaaacttcacagcaaaattcagaagcttggctagtgccaaattccctgccaaggtacctcaaaaagtggacagaaaatttttcttcactgtggggctagggactagtccttgccccaaaaacacaacatgccaagggccaagtaataacaccaagttcgcagcctcggttaacaacatttcttttgcacttccatcatctgtttccatcatgcaggcctactattcaggccaggccaatggggttttcaagactgattttcctgccacccctttgaaccctttcaattacaccggaacgcctccgaacaacacaatggtcaccaatgacacaaagctggtggtgctcaaattcaacaccagtgtggaggtggtgctgcaggatactagtattcttggtgctgagagtcaccctttgcatcttcatggctacgacttctttattgttgggcaagggtttggaaactatgaccccaacaatgaccctgcaaagtttaacctgattgaccctgttgagaggaacactgttggtgttcctgctggtggctggattgcttttagattccttgcagacaacccaggggtgtggttcatgcactgtcacttggacctccacacaagttggggattgagaatggcatggctagtactagatgggcctgggcccaagcagaagcttcaaccacccccttctgatcttccaaaatgctgactttgactaaacggattcattggctatgcatcatttcttcctgagttactctccaatgtttttagctccttttgttttcaacaacaaaaatgtgaaattcttttgatgtgttaagggaaaacgaataagttgtgactcttgtcacttggggtttgtaatggtaaaaaacggtttggttaatagtcttaatgttgttgtcatgtttggttggttggtttggaatgagcagtcacgggttttgccgtctgagagaatattcaaagcaatatatagctggtaattaatattt

SEQ ID NO: 107203 - DNA, 177 bp, Glycine max
  unsure (1)..(177): unsure at all n locations
  Clone ID: PAT_MRT3847_6781C.1
tcgacccacgcgtccgcttaaaacatggcctttgaatttcttcggcaggaggagctggcggaanccaaagtacgaaatatggaagacgttcatatgcaccaccagaacatgaaagtctcaggaatggccatacttgaatatagactttagagcttcttccggatggaagcaagagca

SEQ ID NO: 107204 - DNA, 467 bp, Glycine max
  Clone ID: PAT_MRT3847_67820C.1
ggatttgtttgattggaagcattttattaatatgctgaagaatgatgtccacatagttgagaaattacctcctgcctatgctggaattgagcctttcccaaaaactccaatatcttggtcaaaggttccttattataagactgaggttcttcccctcctaaagcagcacaaagtgatgtatttcactcataccgattccaggcttgataacaatgacattccacgttccatacagaaactaagatgccgtgcaaattacagagcattgaaatattcagctccagttgaagaacttggaaacacactggtatctagaatgcaacagaatggaaatccttatcttgcccttcatttgaggctgcagtcacaatttgactgcagaagaagatgaagaactgagacagatgcgatatgaagtgggtcactggaaggaaaaggagattaatgggaccgagaggagattgctt

SEQ ID NO: 107205 - DNA, 534 bp, Glycine max
  Clone ID: PAT_MRT3847_67821C.1
gcaattttctgggctttggctacagtaagcctttgctgccagttagctaccaatgctcaagccccagcaaccatgccagtaaagttgccacctacaactttgccaccaacaacaccaactgcaacatctccattgtcttctggcacaccaccggcggtaacacagccacccacagtggcggaatctcctcctgtctccagtacaccaattacatcgcagccacctgaaatgtagctcccaaatctgctctcgtgacgccaccagctcccaaggttgcacctgtttcaagtccaaaagccccaccaccacaacaaccaaaaccttcaccagtctcacctcccacatcaccacccccaccacctgttgcttccccaccaccattaccaccaccaaagatagccccaacaccagccaaaacaccaccagcacctgcaccagcaaaggcaacaccagcacctgcacccacaaagccagcaccaacaccatcacctgttcctccaccgccaaccccaacaccagcaccagcacctgtaa

SEQ ID NO: 107206 - DNA, 579 bp, Glycine max
  Clone ID: PAT_MRT3847_67822C.1
ttttttttttttgctttgctagttgctatgcttatcaataattcaattcttcttttcttctcgattcattctttagctttggggaattctgcaatgcctagtacatgctgaaataacttacagcaatggcaggttgtagtcagaatgttaatggactaacaattgagaacaaattcaaaacaactttatgttgatgggtctgcctgcctaagttgctgttgcaaatccttcttcagagtcagcaaacaccttgttcagaatcatggctaatcgaattccaccttgagcaattcgtttcatgacaaatggcatccttgagtcgaagtaatcatctgctacagttgttccaggttgaactccttcgtaaccccatttgcaagctatttgtatgctctctttggcccaattatttacacactgagagatatcattacaatgtttccaagatgtaacatcatctgaccagatcccatcagtgtagttcctctcaatgtcttggagaaggaagctcacatccttatcataatagtctgctaatccagtgagaataatttctctgtcccacctggtgccgaattc

SEQ ID NO: 107207 - DNA, 366 bp, Glycine max
  Clone ID: PAT_MRT3847_67823C.1
attttattttttttttttttttttttttttttttagggggataccggggcattgactgcacccatagtcattgtgtaatatggataccaacctatcaaaaacatggctaacattaggtaaatgggcacacgcagaccaagggatgcatttttctaattaataaaaaccctttttcccaataataatattttcaaaaatattatttgtctatttatatagaattggtaaatccaatccaccctttagaaaaataaccgccaattcttttcaaattattttttatttggcttttgcgatgacccacttaatctttgtattctcaacaaacgctttctggaccaaaattttatgaaaaaaaccggtaat

SEQ ID NO: 107208 - DNA, 477 bp, Glycine max
  Clone ID: PAT_MRT3847_67824C.1
gcgtgttccgacttccgagtaacattcagtttcatagttcactctctgtactcttcacttcttctacgctgctaaataaggttcttctgccactgtgaacagtgaattgttcgtgctgctatgttcaatggcacccatccagaaaaaatcgaagaccaagaagaagaccaagaagttcaaaaaacacaaacaggtgagcctggtccccgttgagcccagaaccagtgagaccgattggtgggactctttctggcacaagaattctactgtcccaggatatactgtacctggtgatgaggcagaagggtttaagtatttcttcagggtgtcaaagactacttttgaatacatatgttcccttgtgagggaggatctcatatcaaggcctccatcagggctcatcaacatagagggaaggcttcttagtgttgagaagcaggttgccattgcccttagaaggttggcatctggtgagtc

SEQ ID NO: 107209 - DNA, 725 bp, Glycine max
  Clone ID: PAT_MRT3847_67825C.1
gaaattatgcgaaagtctgctcagttagagaatatgtccatgaaattggaggagatggagcgttttgctttgggtacaaatggtattttgaatgacatgcggcaaaaagttgcagatttggtggaagaaacaactaggacagagacagcgtgctgctgaaaatgaagaagagctttctagagtgaaacgggagtttgagtctctaaagtcatatgttagtagtctaatcacagttagagaaaccttactttcttcagagaagcaattccaaactattgagaagctgtttgagcggttagttggaaagactacccaattggaaggtgagaaaatgcagaaagaggctgaagtacagaaacttatggaagagaatgtgaggttgagtgctctgcttgacaagaaagaggctcaacttctagcattgaatgaacaatgtaaaatgatggccttgagcgcttcaaacatgtaaatgccattgcactctacagattgcttacttagctcttccttgctgacagctggagtcttcatagtgaagctttactggattaagaagcatccatggagggctccataaacatcatcattgcctttatcttattttctgattgtcattttaatgcctctttcaagattgaacacgggaaataattttccttagaatgtaaacttggcgtgctctttaatgagaaaaacaagatgtgtctcttcgctgtacatgttgc

SEQ ID NO: 107210 - DNA, 532 bp, Glycine max
  unsure (1)..(532): unsure at all n locations
  Clone ID: PAT_MRT3847_67826C.1
ggtccggnnaattcccggggtcgacccacgcgtccggcaaaggattctacccgccgctcgatgggaatcgcgcgtcaaggcgccttcacatggctgcttctcttctaaagggcacggaactggacgctccattgggggtgtctgtgtcctctattcgattcttcattacctgaacgtgggagcttgtctctttcaaatattgatggcactctcgtgccctaaggtgactatgactccatactcttcagctatggggagcaaagggcgtatgccgccgccccctcaactacgggggccgaacaccggcgggccccgccgcgatgccgcatacgatcgcgacgccgttataactggggccgaagtaacctgtgtcggaacagaatatggcgagctaacgcgcggtaatgcagggcgagcacaccgacactcggcgactgctggttacccacggtgggctgaggcaagatctgggggtggaacagcaccggctgtataagcggtaggctgacacaagcgagctatccggggggcg

SEQ ID NO: 107211 - DNA, 399 bp, Glycine max
  Clone ID: PAT_MRT3847_67827C.1
aattcccgcgcgagccagcgtccgggcacccgtaccgcacttgagattcaaacgctgtgttcttgaagtgtttggggtcgtggcactctatgcatcttcctgtactgcatcaagactcaagcaacgcaatggattgggcttttgtgcataaaacctgtgataagtgggcttctacgaacattggttattctggtcattcgttaaaagctgctttgcttattaattatgacccgactggaccatctagattattatctaccattgctgatcaagaagggatgagagccaatcccattgaattgagtcactttgtggacttcatcaaacaaaatatactccatacagaactctttcattattgggttcaatcagtacttgatcacgtcaattcatgagaac

SEQ ID NO: 107212 - DNA, 241 bp, Glycine max
  Clone ID: PAT_MRT3847_67828C.1
gctcttttttttttggggggaaactaaaaagcttttccctttttctcccccagagacgaaacctataaccttgttctttctttaaccgtagaacgagataatagagcttaatagggaacaaaaataacaagttgtgtgtaccaaattccatgttaaccaggcggtggtggaggatagacactggcttctgaccaagtcgaagcataaactttcaggttcgacttctggtgaacgctatgag

SEQ ID NO: 107213 - DNA, 380 bp, Glycine max
  unsure (1)..(380): unsure at all n locations
  Clone ID: PAT_MRT3847_67829C.1
atgcttatgntgtgctccccttcatcacttatcaggggattttttcccccttcagttgttttcccattttgcttcattaancagcataaaagggaagtcctcttcataattttttgagtataatcaacatttatttgatgcaattcacacaaataaaagaacaaggaaattcagactaatttatacacaacaaattgacagtctttcattaacactgatgatgaattttgagagtgcttagataaaaaatttaattaaacacttatccaataaatcacattaaattatccataagctttgtcgatgagctcattgataaactaaaaaaaacttgtttttataatctcccatataaaattcatttaaataagactacacaa

SEQ ID NO: 107214 - DNA, 405 bp, Glycine max
  unsure (1)..(405): unsure at all n locations
  Clone ID: PAT_MRT3847_6782C.1
aaagaaaaaggaacccgaaggaaaacggcgttaaaattnttggttaccccaacatcaacaaatacagaaagtgacacaacatgcaacactgaaaagggaacttccccaaagtccaaaccacacgtaccaaaggttaattacctactattttatctcacaagccatacataagcgatataaattgaaaccattttgttgtctcaagagaaccaaaagcactgtgatacttgacatgacctgggcatgaggagcccatgtctgaatgtgttgcccaacctacttcctattctgaccgacgtactcaatcatgttcaccacgagccgctttttttgctacggtaacaccgtgattaacacagaacaccttggtatctgtcggataaagatcaccacccactagaacaa

SEQ ID NO: 107215 - DNA, 494 bp, Glycine max
  Clone ID: PAT_MRT3847_67830C.1
ctggtattacgtctggagaggggaaaccaaaaaaacacttgctattgatcttcaagggcaccgttctgatgtaagaagtgtcacacttagttcagacaacacttttctgatgtcaacaagtcacaatgctgtaaagatttggaacccaagtactggctcttgcctaaggaccattgattctgggtatggactatgcagtttaattcttcccaccaacaagtatggacttgttggaactaaagatggaaccatagaaattattgacattggaagtggaacttgtgttgaagtaatggaagctcatggtggttctgttcgctcaattgctgccctaccgcataaaaatggttttgtcacaggaagtgcagatcatgatgtgaaattttgggagtaccaaattaagcaaaaacccggtcaaatgcacttaacctacttcctctctaataaatttcttttttggatcctacatgagaaaggctgctaagcaactcatt

SEQ ID NO: 107216 - DNA, 188 bp, Glycine max
  Clone ID: PAT_MRT3847_67831C.1
cccacactcgaacaattttgcctgtgaaaacagatggaaaacaaaaacagtgctacaactaaaacttgcaataaacttgctccaccagaaccggctaggaaaacacctaccctagtttaatagagtttcacttaatatcttgcatgctgggacaaccgaaaaaggacaacccacttagagcggctttc

SEQ ID NO: 107217 - DNA, 849 bp, Glycine max
  unsure (1)..(849): unsure at all n locations
  Clone ID: PAT_MRT3847_67832C.1
cttccacacttctcaattcaatctctttctcttcctcttcctctctctctctgtctgtctttgtcgtacctttccttcatcctcagggcgttttgtctcattttgttattcaagaatcaattaaaaaaaatgactcgcggtaaccagagggaacgagatcgtgaaagggctcaggcaagagctggtggaaagacaaagcagcctaagaatgatgggttgacccctgaacagcgaagggaaagggatgcaaaagcattgcaggagaaaacggcaaagaaagcagctcaggctgcaggagggaataatgcaggtggtggaggcaaaaaataggcaaaaatcattgacttgaggaatgtaaatggagtgtagacatgggaaaaattatattgcttattatttgtgatatgggtttttggtttagagtcatctgcttatgtcatttcagaataactggtgttctgtgaggagggcattgttgttggcttatgaacctttgatttctatataatttggaatgcaatttgtctctagcttgttgtgatgatctttttgattttattgtctctgaaggaacagatctaaatgtgtgtaagttgatttatataatttgtcaaaggcgccaaaatgggtagaggcttgttagatcgtgcaagtctaaacaatagatagttagaactgttagccctttaggaggaaaagaatgtgggagtctttcggtttgggaggaaaatttgggagggagaacatgggtctcaaacatttggaagagtcatgtacaattgtatatcaaagtaattgagggttatacttaactctcctatgtctagatggngattactggtaaaataa

SEQ ID NO: 107218 - DNA, 449 bp, Glycine max
  unsure (1)..(449): unsure at all n locations
  Clone ID: PAT_MRT3847_67833C.1
aaaatacgaccaattggggcccattcttgggtcaggggttaaggcgtatggcttgggccttaaaaataaacacgaactcaagcactcgaaaagattttactgtccaccactttggtcctttatctcttggaaattagagggtatcgttgttgtggttattctctaacccggactttgaccttnatgataaatccttgaatggttagtgagcttctacaggatttttaaagaggccctcacatacctcataactcccgggttcttttttacgcacaaaaatgttactgtttgcttcccggccgattttttttaacgcttgaacagtgtgactttccacgccctctttcagagcggcctgaagttgcaggattatataaagattaatatatattctgctgtgacctccgtgacaccgccgaacgttggacacctgcgtatacttgacttta

SEQ ID NO: 107219 - DNA, 293 bp, Glycine max
  Clone ID: PAT_MRT3847_67834C.1
cactgagcatcgtctagctatctcgatcgaactgtccaaggtcctgtcactcgggaacctcagaccacgattgcagggcacgtaactgtatcaatctgcaacgcgcgggtctgtggatacgagtatctacttctgaacgattggttgcggccagtgggcaaaataatcaaccaggttaggaagatgtgtctggataagcctcttccaaacggtcagggcattcgggatcgatcttccacaggtttgtatcgatatatccacgacaggtgtcacaggctcatattaggtgcagg

SEQ ID NO: 107220 - DNA, 372 bp, Glycine max
  Clone ID: PAT_MRT3847_67835C.1
aggaaaaaagaagccccattgcctattaaagggttttgtttcaatggagacccgaccttcggggacctccgctgggtataacaatttttggggaaaatggaacttaaaaaggaccccggcgccacctttattgggagacaccccacacactttttgggtttgaaaaccactccggacaagggctgaaaactctgggattttaaaaaaaaaaagggggtggcctagcacaggggcctgaatatggggttggaccaggggcaatgtggattggccaaaaggtaggcctcaagggccttgaaaaagaaaaaaaacttgacttttccaattttgaggccctttgcgttgggctcaccctctccttttgttggggaa

SEQ ID NO: 107221 - DNA, 284 bp, Glycine max
  unsure (1)..(284): unsure at all n locations
  Clone ID: PAT_MRT3847_67836C.1
gttgatgnangcgtacgtaaagctcggaattcggctcgagcggntcgagctttcatcttcttgggttagggttctacacttgatatnnnntnannaanttntatnnnannnnaaaaanttttnntttnttnnntnatgntaantgnnttatngttctttnaganggtnntgtttattaagtggtttggatnnaagantagaagngtnaananggnttggtngnnnntnntntnnggnnatgttngtnantnngnntggagttgnnanggagaanggtgnngtgn

SEQ ID NO: 107222 - DNA, 457 bp, Glycine max
  unsure (1)..(457): unsure at all n locations
  Clone ID: PAT_MRT3847_67837C.1
aagggggggagaagaaaagaaaaggggancnncggccaggcgagcggnggccaacaaanccgangnagcaaaaagnngnnnngngnacggggncannnngnncaagncaaaanacngnngcgcaaaggggggggggaaaaaaaaaaaaaaaaaaaaaaagggcggccgcncnagaggagccaagcnnacgaacgcgngcaggcgacgncanagcncnncnagaggggcaccaaaanncaagncacgggccggcgnnnnacaacgncgggacggggaaaacccnggcgnnacccaacnaaagcgccgggcagcacaacccccnnacgccagcgggcgnaanagcgaagaggcccggaccgancgcccnncccaacagnngcacaaccggaagggcgaaggggacgcgcccngaagcgaggcaanaagcgcgggggagggggggganacgcgcaggggg

SEQ ID NO: 107223 - DNA, 440 bp, Glycine max
  Clone ID: PAT_MRT3847_67838C.1
caccaaaaacgggcccgtttttttaacaactttttaaagccaatacccaataaaagggggtctttctaaggttttaaaggcccccgcccccaaacagaaaattttttttttggagggccccaaatttttaaaaaaatagagctaacagagatgcttgggtttcgggaaacctaaatatcactaaacactttgccccaaaaaaaaaaacccctggttttctcccatattttttttttggggagccaaaaatttttggtgaaaaaaagaaaaaatatttcttttttttttaaagggggggaattaaaacctaaatgtttaaaaacacccccccccttattttcactattaaaaatggggggccaagtaacatgcttccttaaaaacattctagggacactaaaatttttgtgcccaaatgtttaaatcattttgagtccaaa

SEQ ID NO: 107224 - DNA, 467 bp, Glycine max
  Clone ID: PAT_MRT3847_67839C.1
catttttcttttgtgttaaataggtggatgggaaaactgactttcccccagggcagcttgccgaagtgttaaaagaatgcctctttctatagggggaggcgcaggggctcagaatgctcgcgtcatgaatatgccaaatgctgatacctcaatgtgcagacattttgtgggagaccttggctttgaagactgtaagatgacttctccctacattaaatgtacagtctctgtctttatcccatccggccatgtggttgaggacacgatcaattttgaggccttttcccacaagctggtgcagtttggagagattcaggaaaactttgtatggtaattttcacacgaggactatgttctaagcagtgatactgaagtgcatgctactacatctctaatgaattgatggtgactgtgataccctagggctagagctgagtgatatcatattacagatcacgatgatttac

SEQ ID NO: 107225 - DNA, 207 bp, Glycine max
  Clone ID: PAT_MRT3847_6783C.1
catcttttgagctcagtttaaagatgcttatatgagtttaaaatgctggtattgcaattcaggatggcgaggaatgttttaagaccttctgatcaacctgcttttttcaagtaccatgcctccttcaacccttataaatcttccacttgatgtgttggaagcaattctccccataataattgcttaaaaattaccaaaaaaaattca

SEQ ID NO: 107226 - DNA, 435 bp, Glycine max
  Clone ID: PAT_MRT3847_67840C.1
tataatctgttacaccaccgtgctttttcttttgctgtcaattaacaccatgttaacacatgtaaatgtgtacaatttgcatgcatcaagatgtgactgtaattttggcaacttccattagttatgaatttgttgtcgaaagttgatggaaaattaatccaccataggttggcactttgcaaagtgatatcaaccaaaattggcccaactataatggaacaaattgaatataaccttgatatatactgttatatccaaggtattgtggttaacgtttactagttaaatcatggttatgattgaactgctaataattaaatatttttacaatattataatatatagagtaattaagaaataaattaacatcatggttatgctatattttaagttaatctaaaggatcatattatatgccttgtaaaatacaaaata

SEQ ID NO: 107227 - DNA, 271 bp, Glycine max
  Clone ID: PAT_MRT3847_67841C.1
cggctcgagcccagattccgggccctttgttgtaaccccccacaagcccacaacggaggggggtctagtaacacacaagcccggaaatgctcagggagatgagcgagggaaaccgcgaggagggcgacgcagcgaacggaccagtacggtgacagccacgagtccgaagcaaccgcaaccaacaaagcggatagctccacctgatcaggacggcgcactataacaagggaaacctcaacacccgaagacctgggaagcatcattaacagac

SEQ ID NO: 107228 - DNA, 152 bp, Glycine max
  Clone ID: PAT_MRT3847_67842C.1
gagagaaagagagagaacgatgtcgaagcgtggtcgtggtggttcggcggggaatgagttccgcatgtcgctgggtcttccagtggcggcgacagtgaactgcgcctacaacacggcggcgaagaagctgtagatcagttcggtgaaaggga

SEQ ID NO: 107229 - DNA, 405 bp, Glycine max
  Clone ID: PAT_MRT3847_67843C.1
gtactagttccactgggtatatattaaagttgttctttctatattccttctttaaaaactttctgaatccattcatgatggtactatcatcaactatgcaaacatgaatgcaatcatttttgtgaaaatggaggtggaatacacctgaattataaatctttgacaataactttatttctttaggtatgtttttagtccttcataaattaatgaattttgtatttgatcccttataaaaaaaaaattattattagtaaggattaaaataaaattagttaatttattaggaaataaacattaaattctttaatttatttgggactaaaacaaaaatattattttatgaaaaactcaatacaaaacaaaaaatttcttaaagaataaaaataaaaattaaatatttat

SEQ ID NO: 107230 - DNA, 421 bp, Glycine max
  Clone ID: PAT_MRT3847_67844C.1
ggcaaacaatgttagtcttatgctcaagaaccatggggcagtatactaaaactcatccaccatctccccaactaaaaccttgttttctccctcaacgacaaaggctaactcttatgggctagaagtatcaagaaaagaaaacttccccatctaaccccattttcccttttctgctaatgagcactgatgaatcttatctttaacgcaactgactccatgccactccgacagttatagagcgcgcacccctgggccatcatctctttttagggcgacatactcttaccctctccacataatcttagcattccaccccacgaggttggtgcactgcgccccattgcgggctctagagcggatcacacctgccccgggtgcacgagaaatgtgtttcggacggagttcaccacagccctcccat

SEQ ID NO: 107231 - DNA, 712 bp, Glycine max
  Clone ID: PAT_MRT3847_67845C.1
caattggcttttgctcagttcaactgtgggagcaatcacaggagtcactggtgttgtgtgggttagcacacaaaaggcatggcattggggttttttcatcataaccatagcttcctccgttggctttgtgacccttgctcttggtaaacaattctaccgcatcaaaactccaggagatagccccactttgagaattgctcaggttattgttgtgtcttttaagaaccgaaagttgtcattgccggagtcacatggagaactatatgaaatcagtgataaagatgctacagctgagaagattgctcacaccaaccagatgaggttcctagacaaagctgccatcatacaagaaagctcaaaaccccaggcatggaaaatttgcactgtgacacaagttgaagaagtgaagatcctaacaagaatgttacccatagtagctagcaccatcatactgaacacatgtatggcacaactccaaacattctcagttcaacaagggaatgtgatggacctaaaacttggctctctaacagtgccagcaccatccattcctgttatcccacttgtttttataagtgtcctagttcccttgtatgaactattttttgtgccatttgcaagaaaaatcactaaccacccttcaggcataacacaactacaaagggtgggtgtagggttagtactctcggcaatttcaatggcagtggcaggg

SEQ ID NO: 107232 - DNA, 268 bp, Glycine max
  unsure (1)..(268): unsure at all n locations
  Clone ID: PAT_MRT3847_67846C.1
accgaaacangtttcctataaaatcccgcacgtgccgttgcanatgagctgaaatcgnnnnnnnnnnnnnnnnnnnnnnnnnnnnnnntcagatctggagcaggagaatagcgttggcagcgtttgcntttgcnctgctgttccaacggcctcagcagacgacgtcgttgtgctctctgaagataacttcgagaagaagttggtcaggacagaggagtctcgttgagtctatgctcttggtgtggaatgcaaancggtccagaantga

SEQ ID NO: 107233 - DNA, 404 bp, Glycine max
  Clone ID: PAT_MRT3847_67847C.1
cgcaggcgcatacaaacagttgacagggtagactcaaggcaacagtgaggaagtggccgatctgttgaggccgatggaggcagatagcatggtggccatgggctgcggaggtttctactggcagtcgcctccgcgcttgctccttgaacccctcgacctagccgacatcgtcgacagcatgtacgtgccgacgaacgatgctgatgagcccgtatccgggctctgctcatcgaaccggccggcggaggattactccagttcggccgaaggcgccaactcctgctccgcggcggtggttccgtcgccgccgccgacgacgggcgtgatgacgacgacgactaggaacatggccatggagagggacccgcgcatgaagctcaacgagaggctctactcgctcagga

SEQ ID NO: 107234 - DNA, 365 bp, Glycine max
  Clone ID: PAT_MRT3847_67848C.1
cggacttgctgtgaggatctgacacatgcttcagtgaaacccttgataatagggcttacagaaggtgacaccaatccacgattagattaaaaggatgccagtgaattgagaaaatggagtaccagagaagacatatgttgacccaagcaaggcgtataagtttgtgagcacgacacagaccatggagctaagaagtcagagaaggtgaccaagcttggaccctgtggtaccaacaaagacaaatgctgaagaccgtgtgaaggataccatggtgctcttacagcaaaagagtgtgaagccttacgactatgactctgaagatgaagcacctgcacacttaatagtaaacgatgaatcatgtatga

SEQ ID NO: 107235 - DNA, 1149 bp, Glycine max
  unsure (1)..(1149): unsure at all n locations
  Clone ID: PAT_MRT3847_67849C.1
tccttttttttttttttttctttttttttttttcaaggaatatgtactcttctatatataaattaaattgtttaactagcctattaattatattagcatatattatgatgaatcgaggaagtcaagccatgactaaagacaaaaaaattgaaaatttataaatttgaatcaaataacatgattgatatcattttcatctcgatagttgatagagggagtaaacagcaatgtttgaacatgttcatcaactgtaggcatgttttgatcatctccatgtcgataaataacttgagaagttctagccatgttgagagaagccctcataactgacaaaggaagattggtggtcatggtaagaccatttagctctggccataagttatctatgagttgccttataagtttcctggcaacattttcatctgaaatattattttgtttcatgagacattgtatgctacaagcattatcacctctttcttgctcatcccttgaggttcctaagtcgtcccaaagcctaagaattttcccagagcaagaaaaaagccttggatatggattcatcatgaaaatggtttcttttgagaggtcatccccaatgaggaaagttgcatgcaccaaggccaggntatgatcctgaagaaatcaccccattatccaaatattgctaaaaagttggcacatgtttgttgttgaaccagttggcttctttaagataagcttcaattaagtctatccatgttattttcaaacaagcaactacagttaggctgtggtctttctgaattttgtatgcaatttcatgggtggtgttgtacaatgccatataacatattttcatatattcaggtagttgctccatcgcatcaagatcccaccttttgattgccttagtaaaaagaacaagttcatctaatgttccgtaagtgtcgaacacatcatctataacttgtaaaacgcagatggcttttgcaagttcaatacggcaacttgaatgacgagggttctggaaaaatccccaatgcccataagaaacactctcttggtccatctcttccaaaaccaagtctttcaataagtcccaagtctttccaccacctcgagatctctgctaattctttttggtgcatcgattgaatcatgtcatag

SEQ ID NO: 107236 - DNA, 353 bp, Glycine max
  Clone ID: PAT_MRT3847_6784C.1
gtggtggtgccactgagggggggtgcttcgttttgatctgagcgagtgagcgtttcgcgatttctagtgcagttcgggggggtaatgggaaggctttgcggtgtggatcctaactagggtgacgcgtttggatttggtttttgttttatgcagcagcaagaggacgaggaggttatcgtgccgcacgcggatttgcctgcgaacaatcaccaacccatggaagttgtagctcaacctgaaaatgccaataccgcggagagtcaacccggtgaagatcctccatcatctacatttacatggagaattgacaattttttcaaggcttaatacaaagaaagctgtaattagaaata

SEQ ID NO: 107237 - DNA, 2004 bp, Glycine max
  Clone ID: PAT_MRT3847_67850C.1
cccacgcgtccgtacggctgcgagaagacgacagaaggggataatagtttggagctacgttaatttgtccctctcactttctcacagaagtcccattcctatctctgttagctgtttttgctgccgtcttttctcaaacttctctctctcaatagcagcaaggatcaagtgaaaactgattattttccattgagtttgatttagttcttagcttctgcttcgatgccttcaatcatgtcacctcagtggcaagacaaggctgctggtttcttttcttcctctggggtcaagcttaaagaagcgaaggagtcagcaggaacattcgttggtgaggtcacaaaggatacaaagagtaatgtggctgaagtggcaggacgagttggatcgatggtgaagagtcggtgggcacttcttcaacagccatccacaagacatgctgtgcaggatcgtttcatatcagctgctgctacaactggtacactcctgaggagaggcttctcagggacaaaggataaggtggttgtgggaaagtccaaggttgaagaggtggcaaaaataacagcacaaaaaagtaagactatcttgacagatattgaaagatggcaaaaaggagttgcaagcactgatgtatttggagttcctattgaggttactgtgcaaaggcaagattgctgcaaacctattcctcagatattaatcaattgtgcatctaatcgtatgtttccatatacaaccaagattctactgtttcggtaccagaaggcacaaatcctgttgatgtagcagctcttgtaaaatattatcttgctagccttcctgagccactaaccacattagagctttataatgagattagaagtgctcgatccagtatatattccatgagaaacatactcaagaggctttccagtgtaaactacatgactctggagtttataacagcacttctactccgtgttagccagaaatcacttctcaataagatggatgctcggagccttgctatggaaatggcacctgttattatgtggcaaaaggaacggagacctgaattttatcatcaatattggaatcaggtgtcaaaaagtctttccaataagactgtggatccaacacctggctcatatactgcctgggacatgcttgctgatgatggtgaagccacagatgcatcatctcctattcctttggatgacggcacaccagtagattttggtgcaattgaggttgttcagttgctcacagaacatcataatgcaattttcacagatgcaaatgagacagtctggaaatgaattgcttgattccttttactgtatttattggttgacttggaatattggacttggagtaaacttttttcccaatccgggcatgaagatcattattagcagctatatttgaagttatccacaatcatcacgcgcggaaagatgttggatattactggtccagttttagtgataatccctatctgattttcgatgttttatgcttttaggggagcgactgttatacttcaaaaagggggtaaaagtagcgaaagtattgtacagctattatgtattgcttgcagaaattcgccacgaagtgtgctgtgttgttgtggtctttcgcttggactgatgatatgtgtgatctttgttttgtgacctttgtctatagtttacgtagagtcatatattcatattcatatatatagataaaggtcagtttgctacactgtagtagaaatggatcatataaatcttgtccctgattgcaagaatgctacgaaaaggggtggagtaagcttgattggaggatctacccaagtatatgctatgaaattgttctttcacacttggggattcatattttatattttactattaggaccatagaattcagtgtactcccagtgcctaattattggaggatcttaaaggcctattctgttcgtattccatatcaatagatccgagagtatttagttatataagattataaaaaatgttccatgtc

SEQ ID NO: 107238 - DNA, 601 bp, Glycine max
  Clone ID: PAT_MRT3847_67851C.1
tacggccgagaagacgacagaagggggtgcaccagactaatgggttctaagagtagtaggtggtcggttacttgggtggttctttttatttgtttgctgttatgtttttctgccaaagcaatagcaacaagaaaccttgctggttatgcagatgaaaagggtccgagtaggagactccttggccgttctccatgcaagaggggaagaatgacttctgaagtggttcaaggagacaggaagcagcaaagggaggacagtccacgttgcaacaattatctgtgatttgcaggctggggttgtttgtatgtgttgcaattgcaaggatcaactacacgaattttttttaataaaatggacacatgagatgtcactgtttgttggtttagtttcatgaaatttgtgttcacagaatttctctcaagaataactttgagatatatgatcaatttaaggatgggtgtgggtaatatctgatttttagaaacgggtataggaatgggtatgtacataccggacacaatatgtataagaactaaattttctttattttatgtaacatatattatttattaaaaaaaaaaaaaaaaaaaaaaaccccaaa

SEQ ID NO: 107239 - DNA, 930 bp, Glycine max
  Clone ID: PAT_MRT3847_67852C.1
gtagaggcctgatcgattctcttctttgccttttactacacagactatttattgttggtgtaatttcaccaaattatttataaaagatttttgtgtttgattgatgattttgtttttcaacaaatcgatgatctgtcgtgtccaaacttgtcttttatgcaggatcaagtgaaaactgattgttttccattgagtctgatttagttcttagcttctgcttcgatgccttcaatcatgtcacctcagtggcaagataaggctgctggtttcttttcttcctccggggtgaagcttaaagaagccaaggaatcagcaggaacatttgttggcgaggtcacgaaggatacaaagagtaatgtggccgaagtggcaggacgagtgggatcgatggtgaagagtcggtgggcacttcttcagcagccatccacaagacatgctgtgcaggatcgtttcatatcagctgctgctacaacaggtaccctcctgaggagaggcttctcagggacaaaggataaggtggttgtgggaaagtccaaggttgaagaggttgcaaaaataacagcacaaaaaagtaagactatcttgacagatattgaaagatggcaaaagggagttgcgagcactgatttatttggagttcctattgaggttactgcacaaaggcaagattgcagcaaacctattcctcagatattagtcaaatgtggagattatcttatagtttcaggattgaactcgccaaatctttttaaatctgaaggggataaaaaggttatccaccagttggtttccctatacaaccaagattctactgcttcggtaccagaaggcacaaatcctgttgatgtagcagctcttgtaaaatattatcttgctagccttcctgagccactaaccacattagagctttataatgagattagaagtgct

SEQ ID NO: 107240 - DNA, 2660 bp, Glycine max
  Clone ID: PAT_MRT3847_67853C.1
ccacgcgtccgcactctgcagcaggagcgtacgcataactccccgccgtccggacatttcttggttcctgaaatttcaaagaataccaatggctcacaggcgttgcctcttgataagagggaacctcatgaatcggaagtgccacccatctttcagttatgttctccatagcaatgaagggaaacgtgaatgccctgatgaaaagtcatcttcagctggcattagtaattctatccaaagaaggatgtttgggaactcagttgatggatcaatgcggtttgtttcctattctggtcaaagaatgcattcaaacagattcctttctccgtactctggatataatttctgtcgacatatgtcaacagtcaatcagggttctgataagattgacataatgactgacatagcagatgttctcaaagacacaactgtggaagctgtaacttctcaggctcccatcgttaaagaagttgcaattgctgctgctgactccgctttacttgtgaaggccttgcagtacattatagatgctgtgcattcctacactggattaaactggtgggcatccatagttctaacaactctcttgattcgaaccgcaacagttccactcttaataaatcaacttaaggccacttctaaacttacgttgcgggggtcgctcaaccagggagagagcgtacgcataactccccgccgtccggactctttttctgttttgtttggaacactgcgtattcaaccctcacactgcgccaccactgcaaccagggtagctcatgaattggctgtgactaccattttcataccgtcggcaccacatgataaaagggaaacatgcatgtcgggatggaaagccatcttgaggttaggttcttgatatttaccactggaggtcttttagtacctatgttgaattatctaaggggtttgcctgagatattaccctgatactggcttacatcagctttgtttttacttgtgtatggacttgtgcataaagttcctggcgttcagattactttgggtattcctgaaatacctgctgttccatgtaccacgaccagtgcgattcaatcaactcttgtgattggtaccgtgctaaaactcgctacgtctccaacaatacatgcgtttaccttcaccctgggttaaccttcggcactattctgttacagggttacttcaaatttgttttctcttctgtggcggcgtagttttgagatacaagtgataggcagaactacgaacaagaagtgaggaagttttacactaatcctaaattctaacatctatacatcgcgcaattgtgctcagcattttgttatattatattcacctggaatgagagataaattaggccgaattttgtatgtatagtccaaacactatacataggtacctcaattcttgtgtaaatcttggtccctatccgacagattgagaaaaaaaattagaagtaagatgtaaggcacaagaagtgaggaaaatttacatttatcctaaagtataacatctttagttgttgtcttgcgataacgaatatggctgaaaatgtgcctccagtcaagcatggcggagctgcttggtttattgatctctcaactcctgatgccttgtacatttttccagctttgacagcattgtcattcttaataacagtagagtgtaatatgcaagaagggatggaaggaaatcctgtggctggcaccatgaaaaatgtctctaggggtcttgctgttcttacagttcctttcaccatgccatttccataggcaatattctgttactgggttacactaaatttgtttttacttttggatgggcaagtgcttaaagttcctggtgtaaagaaagctttgggtattcctgtaatatcttttgctccacccaccaccaccagtgctcatcattctacttttgacagatttgtaattcttaataacagtagagtgtaataaacaagaaggcttggaaggaaatccagttgctggcaccatgaaaaagttctctaggggtcttgcagtcctttcagttcctttcaccatgggatttccaaaggctatattttgttactggattacatcaaatttgttttcacttgtgtatggacttgtccttaaatttcctggtgtaaagaaagctctgcggattcccataataccccaagcagcacccaccagtggtccacaatctcccttttctatatttccagcactaaaacaagctacgtcagcaacaaatggaccaaactcaatgcctgttgaaccatcaaaacatccaaagaaaaaaacatcttcttctgatgtcaatcaaagacttagacgtttagagaaacaagtgaaaggaagaaagaaaaacaagaactgaggagaagttgaattgttccttagttaaaccatctaatatatagtagatgtactgaaattttgtcatcatttatgtcagaaaatctgttagaattagaatcaaaattttgagttatttgtgatctgaattctaaaggatttgctgctaataattagcatgatttgttcccaaaataattggatgagtctgatgtaactgattccataaaattgtttcctttttacttactgattgtcaggaattgttatttccatctattcaaatctgtaataaaacaatgaagatcgtgt

SEQ ID NO: 107241 - DNA, 452 bp, Glycine max
  Clone ID: PAT_MRT3847_67854C.1
tggaaaagtcacttacaataaccagcctttttcaggtgccatgaaaagaagaacaggctttgtggcgcaggatgatgtgctataccctcatctcacagtctttgaaacccttcttttcactgcacttctgaggctccccaactccttgacaaaggaagagaaagtgcaccatgtggagcatgtgatcagtgagctagggctgagtaggtgcaggggtagcatgattggaggccctttcttcagagggatttcaggaggggagagaaagagggtcagcataggccaggaaatgctcatcaatccaagcctcttgctgcttgatgagcctacctcagggttggactctacaactgctcaaaggatcataacgacaatcaagggcttggcttgtgggggaagaacctgtgtcaccaccattcatcaaccctctagtcgcctctattacatgtttg

SEQ ID NO: 107242 - DNA, 151 bp, Glycine max
  Clone ID: PAT_MRT3847_67855C.1
cacaatcctcctcatctctcttctattctgcaacgcccacactagcagagcctccaaatggcagcaccagcaagatagctgccgtaagcagctctagcgggtgaacctcacgccctgcgagaagcacatcatggagtatatccaaggtcgc

SEQ ID NO: 107243 - DNA, 390 bp, Glycine max
  Clone ID: PAT_MRT3847_67856C.1
ggttagaattacttcaaatcttttttcaattttcaaaattaaaaaaccaccggttaaaacccccttttattggccggcctttgacctccatgggaattggccaggtccggttaacctttggggccccctttagaatttaaattttggcaccgtgcctccaggtatttcttttaaccggaggtaaaatgggaggaggaaaggacctaccatggttaaaggggggctcagtttcattagttacagagggaatcggagtcctacctcatggagcgagggtcctttggctgtgggcacatatcaggagggggttcttcagttgggaatctaaggacaatggaaaacagtagctggaccagcccaagaccaaatggcttcaaaatctaacatgac

SEQ ID NO: 107244 - DNA, 272 bp, Glycine max
  Clone ID: PAT_MRT3847_67857C.1
ggtccttgagagcttctaattaggctaaactaaactaccacccttttgtattgatcatatagatatttggagttctctcttagggtattggtattttattacttttgaaagcttttaatgaaagattatttagattattttggggtttatgctacaaagaactagcaaacatttatgtcttatatccgaagacatgcaaagagatgtttttatgtcgccagcagaagaagcccaagctcacggaattgtagatcttgtagccgttaaataat

SEQ ID NO: 107245 - DNA, 474 bp, Glycine max
  Clone ID: PAT_MRT3847_67858C.1
ggctcgagggtgctcttgcgggttcattggatttgggagaaaccaagtgttcgattgcagcaccaacgagataaacattgtagattctgaggagctgtttgtgatcaatctgaaggagcaattgtatactgtatgcgaagaagactgcgaaagcagcgtgctctgttttgattttgataacgactgagatgttgatcatgttgcaggggaccacgttggggaatcaagcatggaagcactgttatggactttgaatcatgtctgtcacaccgatctaccactggttatctaagacacgttggacgtgaaatcatgctcgccccacatgcatttgagaaagttccaaggagtgatgtaaatgcagaatatgttaactttgactcgacacaagagatgagcaagactaaagtgctgcttcaaaagttcattgacttgtgccttgattcataggctaaggtggagattatgcttatt

SEQ ID NO: 107246 - DNA, 503 bp, Glycine max
  Clone ID: PAT_MRT3847_67859C.1
gacacttgacaggaaaaacagtaaagatgggtttgaagaacaacatggtggtgctaaaggtgtgtttcttggttcttttccttgtgggggttactaatgcacgcatggaactgaacctcttcaaaagtgatcactcatcaagtgatgatgagtcttcaaaaccatgctgtgatctctgcatgtgcacagcctcaatgccacctcaatgccattgtgcagatattaggttgaattcatgtcactcagcttgtgatcgctgtgcgtgcacacgctcgatgccaggccagtgtcgttgccttgacaccaccgacttctgctacaaaccttgcaagtccagtgatgaagatgatgactaggaattaatcaacaaaagctctctcaaatgaacaaagccctttaggctttctttgtcttttatgtaagggagacaaataaaacatggaataaaaagctcgcagtggccagtaatttgcttttggcaaattttggtcatttttatcaag

SEQ ID NO: 107247 - DNA, 284 bp, Glycine max
  Clone ID: PAT_MRT3847_6785C.1
agctgctcctggggatgatgctgctcagatcacctcctgcaggaccaccacatcgactttggcacccctcgccgcaatattccttcttgtcttccacatttttctccccagcttcccacctcaaacaacgtcaccaccatgcataacactaccttcgtcttcattttcattttcctttcccaacttcactttcaccatcactatcttcattcaattttttatcctaccactcattcatcattatcatcatcggtcttgtaatgccaaattaaatcttttttcaa

SEQ ID NO: 107248 - DNA, 801 bp, Glycine max
  Clone ID: PAT_MRT3847_67860C.1
ctcagggtatgttgcgaatgcagttaataggattctcaccccagaaaagtccttgttgatgataactcattatagacggattctggatcttttgaatcctacacatgtccatgttatggacaaagggaaaattgcaaggacaggcgacatatcagtggtagaagcaattgagtcagatggatatgaagcagtctctgctttaacataatacagctagtatcgatatatggctttctcggtagtaaaatcctggaagataagaaactctttaaactttgaatctcaatgcatcaacattagtctcaatatcatcagtacgaataaggagcagaaaaacattttcaacgtagagtgagttgaggtgcactacctgctggcatggatgcagtgtcacagtgaggcagttgcactgatatgctgatggctcttttcatcttttccctttctttgttccattttgaaaacgaggaagcagactgtctaaagctcatgctggcagatgttgatgtttcttgacttgggacgtatattcttctgggtattatttcagtaggctttgatagagaaatatagaaactattgaatttcgctattgttttgtgtttttaatgtaagggctttttccttgttaattatcaacttgggggcacacgtgccacgtttgctgtaaatgcagtaaggattgaaatagctgtcaatctacattaatattagccacatttttggtttggtattggctgttgaccttatcatgggttcggggcatattaaagtacttaaaattattgctttgagaataaa

SEQ ID NO: 107249 - DNA, 1934 bp, Glycine max
  Clone ID: PAT_MRT3847_67861C.1
gcagtaaaatgccacgatcaaacaacaaaattgatatttcagccatcgtttctagaacagcatatatctgaacaacataagatgcatctaaagcatcctagtgcaatgaatagttgtgtcaatgcggttgcacataggctgtttacccgggtacagcgctgaattcagctcatgcaacagcagtatttgaggtcggatacagaacctttaggttgcctcatgcaatcagccccaaaatttgttaaatttttcctttgatattaaatctcgctcagattgaaaaagtttcctctacaaaagcacaatttgttagtaaaaactttcaaatatgatataattggtgctggttcacattcttcagaagattttcctgaaaaggaagatcaagaaaaacccaaaaagattgataccagattgagacaaagaatagatcctcaatacaatgaggttcaggctcagatggaaacaaatttgtttaaattgtctcttgatgatgttgaaactcctaaagatccaacatagaacctttaaatttctcaatctaaaattgcacttcccaaaaacacagttggaggaaccattctgcgtagtgatctattggcaaattttttgacagagggcaattttagagccttctttttgatttccaagcccaaaatttgattatagatatgcagatgtagatcaatctaaagaataaaagcaattgcatccgacgcatacttttccgtctcttcgtccgactagttgctttggtacataagtctagatcttttgaaaagaaacgctctcttatgatacatatatggtgaaaacggctcgaaaaaatcttcaccattcttacataattgataattcacatattaacccacaaacctcatcgagacttgtatagctgcctgttgtctgggagcacaacttaatctagactaggatggcaaacaaagatgcatggcatgcagttgagaatccctccttgttatcatcattttatcttgtttgatgaatagaataaattaaccttgttcttcaattattcttgtcacaactccaacagcaatcgttcttcccattgatcttagggacacccttccaagagctttacaactagagaactctaccacacagactgtctcattcaaaatcacctcaattactgcactttgctttgcagtgagacagcggggtgactttttggtcaccttacccgtcttgggatcaagtactgataatattcttgaaactctaccaggttccttcgcatggtgtatgtgaaactctaactgtgtgcccaccaatatgggacttgcaccatccaacactagcactttcaactccaaatgcttagcaactgcaacaggaaagtcaggatggcataatacatctcctgccatcacatgatttccatcgacaccttgcaacattacagctacattatctccagctcttgcaacagtacaagcattagagtcacgctccaatgaacgtactgttcccacaacagctgaaggcataaccaagacctttgatccactccgaagagctcctgcttctagtttaccagaggcagacacctgcccaagtgtagttgatttgatgacatcacatactggcattagtagaggttttgagaattctctagtaggaggttggagagagtcaattgcatctaatagataaggtccaccataccagttttttaaaagggcatcagaaggggatgccaccaaattttgattttccatagcactcatgggaatccaagatagcgaagaatctttgaaaccacaagagtggagaaaaactcccagctgctgccttataaaatcaaatcgatctttggagtacacagcagcatccatcttatttacagcaactataacccgatcaacaccaaagcttctgataagttgtgcatgctcccttgtttgccc

SEQ ID NO: 107250 - DNA, 1437 bp, Glycine max
  unsure (1)..(1437): unsure at all n locations
  Clone ID: PAT_MRT3847_67862C.1
cccacgcgtccgcccacgcgtncgcccacgcttccgcccacgcgtccgcgtccagcactgtcaccacgcgtccgctgctcatcactccaaccttgctttccatagataacatcttcggcatcagacaatagacaaaaacatgcattccttaacatgcacaccactttcttcttcttattcttctcatcacaccactctaaagccaaacctcaaccctctgctgggtgctgatgcaacttttaggccatgttctctacccttgaaaagaagaacatgctttactaccagagccattctctcatccaccagagaagatgtcttgaagcatttcagcgagcgaagagctctcaagattatctcaggcctgcagaatttcaataaagacaatgttgcctcggttgtcactgctgctgacaagggtggagcaactcacgtggatatagcatgtgaccctgagttggtaaagctggccattggcttaacttcttgtccggtttgtgtttcttctgtagatcctgcaacatttccagctgcagttgaagcaggagcactaatggttgagattggaaactatgattcattctacgagaagggaatatttttcactccagagaagattctaggtctaacaaaggagacaaggaggatacttccatctgtagtcttgtctgttactgttccacacacactaagcctccctgatcaggtcaagcttgcagagtcactggagcaagtaggtgtagatattattcaaactgagggaggaaaatgttctaatcctacacaatctggtgttatgggtttgattgagaaggcaacaccaactttagcagcagcatattctatatcacatgctgttaagatccccgtcatgtgctcatcagggttaagcgctgtcacagcacctatggctataactgctggggctgctggcgtgggtgtaggctctgcagttaatagacttaatgatgtggttgctatgattgctgaggtcagaagcattgctaattcattgcaggcaccatttcggatatccactacacatgcagtagaaactcaaaggcagtagtttatgttgcaagaaacagatgaaggaggtgtaggtagtgaataaaacatgcaaagaaaatttgaatcctttcttaatagtaagaactttaggttccatatttctttgtcctttatattttggacttgttctctgatccaaatatttgtgttcctgtgtggatgttgatcccgctatgtcaaagaattaaaagaaatagtgacctattggaattttgcttcatgaatgggtggagttggtcagtttagggtacgtttggtacagtgagtgaaaagaaatggaataaaagtgaattgaaataaaagttttgaattgaagtagagtgtaaaactctggatcttgttccatttatagttcatttcacttta

SEQ ID NO: 107251 - DNA, 343 bp, Glycine max
  Clone ID: PAT_MRT3847_67863C.1
gctgccagaagacgaccgaagggaatgtattatttaaagttggccattatcagcgagccggaaagaaatatgaaaaggctgcctgttttgttgatgaagacggatcctttgggtttgatgagccaaagcaagctcagacactgaaagtgtcatgccgttttgttagggggggggtggaaccctcccccccgatgaccttccccttctcccccccccccccttggaccccggcggggcgccccttccccccccccctaccatccctcccccccctcctctgtccccccgccccccccccccctcccccctcccccccctcccccccccccccctcccctccccc

SEQ ID NO: 107252 - DNA, 306 bp, Glycine max
  Clone ID: PAT_MRT3847_67864C.1
gagggcagcatttgtgactagctcttacagagaaaaaagatggctgagacaagcggaggagatgcactgagaccagtggtgatatgtgataacatgggtggctgtacacttgcatgcactggtgggtccacttgcaggtgcacacgtgcttgcactgacacaggaggtggtgatcacgtgacatgctgttatgtatagaactgcacatgctatacatgctcatgatgcaagattgaggatgctagaagtggttgcagatgcggcacacattgtgcatgtacctgcagacgcacttagtctgacacc

SEQ ID NO: 107253 - DNA, 255 bp, Glycine max
  Clone ID: PAT_MRT3847_67865C.1
ctcgagcgcggcgtaactgagctcaatgcttgatggatgacttttcactatttcggttctgatttatctatataaatagggctatgatcctggagtggccagacaggagtgactagggtccaggttgggagtgtttcttgagctcgataccgcgtcttactttcaaagggtcccagagtggcaacggcttcttacaatggtgatggacattaccgatacaagatctcagcaccctcttttgcgcgactgcctgtg

SEQ ID NO: 107254 - DNA, 168 bp, Glycine max
  Clone ID: PAT_MRT3847_67866C.1
caagggaaaaaaaggaggtcgatattcattaaattttctagattaatggttgcttagttaaagctattaagttgcgttccaaatattccttttaatccccttaacgttattcctcgtcgattctcaaggccccaacttttatccctcgttcctcaataaactttcttc

SEQ ID NO: 107255 - DNA, 603 bp, Glycine max
  Clone ID: PAT_MRT3847_67867C.1
atgtagctatgagagtttgcttgatgtgttctgggctagacatgatcctaccacactgaatcggcagggtaatgatgtaggaacacaatacaggtctggaatatcgcccacgcgtccggaacaagagaaggcagccatagagtctttagaacaacaacagaagaagctgaacaggaagattgttactgagatccttcctgccaagaagttctacagggctgaagaataccatcaacagtaccttgagaaaggagggagatttggttccaagcaatctgcttctaagggatgcaatgatccaattcgatgctatggttagattaatatgactagatgtttaaagcagggagttttcttgataagtatttgttaatataccaataaagtaagtcacaatctacctactctctgtattctatttatagggtgaagatcactatagaatccgaatcagttttagagttatatagtattttatatgtatagttatctaaaaactgattttataacacctttaatcagtgactcttctcgagttaaaatatcgttattttgttgggtttttcatccaatagttatgtttggtgaatgattgcttaacat

SEQ ID NO: 107256 - DNA, 475 bp, Glycine max
  Clone ID: PAT_MRT3847_67868C.1
tcagtttatgtggaagctggaggaaatgctttccaattttactcaagtgggatttttacaggaaagtgtggaactaatacagatcatgctattaccgtagttggttatggaaaatctcgtggtggtaccaagtattggctggtgaaaaattcatggggcgctggatggggtgagaaagggtatataaggatgaagagagatatacgtgccaaggaaggtttatgtggaattgctatgaatgctttttatccaactgcttgagtgctgctatgaatctatatataacccttaagagtttgatttagtatatgcacgttgtatctttatcatcatttccttttctagctagtatatgcacctacttacgtcgtgttcctaataagttgcagttcttttttatttttttatcttatgatgatgtctatgtaaaagtttaatttttactaaataattaatgaaatataagttttataaa

SEQ ID NO: 107257 - DNA, 165 bp, Glycine max
  Clone ID: PAT_MRT3847_67869C.1
ttggacaacaaaaatctgggaaatttttagaaacgtgccccgttttttctctcagcgccaaaagaatctgatgtacgtcgctgcaccagctgttgcccaatcacaaacaccagccacgcctccccaaaaagcaccacaccctgtcatgcaacctggattttgttt

SEQ ID NO: 107258 - DNA, 544 bp, Glycine max
  Clone ID: PAT_MRT3847_6786C.1
ctgattctctctgtgggactccattgtctccttctctgaaattcttccgtgtctcagagcagattttaggatgcttctacattttctatcagctttacatactgcatagccattcagagttctgtcagttcctctgtttctgcctaattttctcctctgtttttaggatgttttgtgtgggatgagttcatttagctgaaaatcttgcaataataactttatcactctttgaaagtgtggaagtgatagcctttaaattggaatccagtaagaagcaaattgaatgtgcagtgattcattgtaaaatgctgttctgttgattgatgctactaactagtagtgtctaagcagtttataataagatggagcatttctagaaaatcaaaagaatgcaaggtactgctatcattattgcagtcggggttgttggttataagaaaattaaactcgcaaaaataatatatactaaaggttaaattgaccgtgcacaattgttaaattatacatgtgaattttgttaatttaaaaaaaaaaaaaaaaaact

SEQ ID NO: 107259 - DNA, 137 bp, Glycine max
  Clone ID: PAT_MRT3847_67870C.1
aaaggatttaaagaaaaaccggtcaagttagaatcttttgaacctttcgtccgcgtgggaaggaagagaggaagatgggtgcgtacatagcggacgatgagtactactacttgttcaaggtggttttaataccatac

SEQ ID NO: 107260 - DNA, 452 bp, Glycine max
  unsure (1)..(452): unsure at all n locations
  Clone ID: PAT_MRT3847_67871C.1
aaagcttttgaactggagaaattttagatatcacagatctaagtacaataatgaaaaacaaacagcattacaaatatatgatacaattaatacaacaatagcatactaagtttctggaaacaagaaantgcagtttataacttccctcccaaacagtgtggacccccacacaaaagaancatctcgcaaaaaaagctcccaacaggggggggttgggggaccaaaaatttgcagaacatctttttgccttggagcgatcagcaacacttgccacattcaccataagcatacatatgcataggctggtaatgcgttcagaaatctgatgcaagcaattctccaaagacgccacaacagtaaagggcctaaaaagccccaaaatccagtgagagatccaatccccaagctgagggataatccctcatagaaaaccgaatcatcacctctgactg

SEQ ID NO: 107261 - DNA, 255 bp, Glycine max
  Clone ID: PAT_MRT3847_67872C.1
aaaaaccaaattaggcaatttttaattttaaggcccttgaattttattctaaaataagggggattaaaaattaaaaccctgattttccccccccaagcttattcaaaatttgagggccccctcaaatgattaaaaggggagaagaaagggtgattctccggccaaagcttcacctttcctattttttcctggggggaccttgcatcatcttttcccccttcagcccacattttcctaaattcccccaaattgggg

SEQ ID NO: 107262 - DNA, 1453 bp, Glycine max
  Clone ID: PAT_MRT3847_67873C.1
gaccacttggataaacgaacttggacttatacctttggagcttgctgtgccacctctgtgttcataccttcttttcacaattaccgtatttggtcttttctgggacttggaatgaccacttacactgcttggtacttggcaatagcagcccttattcatggccaggcagaaaatgtgacacacacgggtccaacgaagctagtgctgtacttcacaggagccaccaacatactgtacacgtttggtggacatgcagttactgtagagattatgcacgccatgtggaagccacagaagttcaagtacatatacttgctggccactttgtacgttttcacactaacgattccttctgctgctgccgtttactgggcttttggtgatgaacttctcaatcattccaatgcattctctctcctccccaaaaatcgatttcgtgatgctgctgaatcctcatgctcattcaccagttcatcacattcggttttgcagtactccactgtactttgtctgggagaaggtaattgggatgcatgacacaaaaagcatttgcataagggcactagcaaggttgccagtggtgatacccatatggtttttggccataatcttccctttctttgggcccataaactctgcagttggagctcttctcgttagtttcacagtctacatcatccccgccacagctcatatgctcacttacagaaaagcctcagcaagacagaatgctgctgagaagcctcctttctttatgccaagctggactgcaatgtatgtctttaatgcattcattgtggtgtgggttttggtggttgggtttgggtttggaggatgggccagcatgaccaacttcattaggcaaattgacacatttgggctctttgccaagtgctaccaatgcaaggccccaactccaccacccatggcagcagcaccaccccctcatgctcaacatcatcactgagtagtacaactcactcatgactcaccacttcaacaacataatagagttcagctgaaatcatagtttcattaatattttgtatcatacatgggcaatcttagtaacactcccctttaatttgatgtgtgccggttgtgttttgttgcaattttcttttctttttcttttttctcttgttacactatataggttttccttttcttttttcctttaagattagttgattaaaattttaaaaaaaatagtgtggtcactgggtatgattcctttgctataaatgcatcggctaattaaattgcttatgttttggtatcttcccccattttttgttttggtttggaatttgatagtatgagaccttgtttcaaatttctttgtattcatagattctatcccattataactttgcatatttccaaaatatgccactttaatcctacacttcaattcaatcttataaatagagcgtggacccgttgcatattc

SEQ ID NO: 107263 - DNA, 492 bp, Glycine max
  Clone ID: PAT_MRT3847_67874C.1
aattcggctcgagacggctgctagaagacgacagaaggggtccttcggatcaaaatccaaaaactaagccaacaaacacatgctccaatgtctaatctacagatttttaatatgtcaaagaaatatttgattctagaccatggagaaattgaatatttgcttctttaatcaatatcgttccttttatactataaaatggactcaataatacttgcataactaaacggccttatcttaaagttacatgagcaaccgagcctctttgtttttttataattaaccgagcctttaatttcttctaacttcttaaaataaataatatatattagatccaatccaatagtttgaatttataatttcacgcaaacactagcgaacgcactcctatatggataaaaataaatatacattcaaaatagatataaccaagtatatatacagggactattattagaggtactagcagcagatttgattggctggttatatata

SEQ ID NO: 107264 - DNA, 396 bp, Glycine max
  Clone ID: PAT_MRT3847_67875C.1
tggggggggggggggggggggggggggggggggggggggggggggggggggggggggggggggggggggggggaatagggacaacaaggtaaagggaggaacgacccaccctaacctaaaaacattcccaatatttaaccaccttatacccttaaattacacattacaatttttacaaatagaaaaaatcccccacccaaaatagaaatttaccctatagaaccctcttgcctttctaacccatttccttacaagttttaccctttaacttattgacataaccacaaatacaacagttaaagacacaaacttcaacttacgtgggtatggtttacaagcccaacccccaccccccaaccctaaaattctttttaaagggccccacgcacaattatc

SEQ ID NO: 107265 - DNA, 370 bp, Glycine max
  Clone ID: PAT_MRT3847_67876C.1
gaatgaagcaaagtgagaaaattccccttctctcccaaacatgggaacctttaacctgctcaaatactggaaaactgctgataatggcaaaatcggccctccctaaaacgaagggcctttcctccaatttgaatttggcaaaactcacagaaacactttaacttaacgccttctccctctaattttaacacacacatgttctccacagaaaaactcacatctaaacctcacatcacacatctcacaaattcacagtggatgaggtgcccacagtgtccctgtgcgccaaaacctctcagcacgggaaagttgctgaaactgccaaagtgaaatttggtcataagcacgggaaagttgctctgcctgcggg

SEQ ID NO: 107266 - DNA, 391 bp, Glycine max
  Clone ID: PAT_MRT3847_67877C.1
tgttttttttttttttttttttttttttttttttttttttttttttttttttttcgaccccggcaataaaggagcaaaataacctttccctttgacatgggaaaaaaaagggcaaaccttacaagggggctaaaaaggaaaagcccccctatgggggccgggggtttacataaagggaaaaattatattggggtggtaacaaaaggaaacattagtttttttttaaaaaaaaaagggaaaaaaattttacataggaggcccaaaagggcggcgaccaataatttttgggccccctgaagagccctttgccgggtggacgccaccagtctcaggaaaagcccccacagtggggtcccccttgggaaaagttaaacccaaaaatttgggaccc

SEQ ID NO: 107267 - DNA, 151 bp, Glycine max
  Clone ID: PAT_MRT3847_67878C.1
attttttataaggggtcatgcctataccatggacacgatgtcttttgctgtacatttctgggctaatggggaagcacaagaatggtcctgcgtcatgaaggatttctggggagctttaagggcatttatgaattatggaaaaactggggtt

SEQ ID NO: 107268 - DNA, 337 bp, Glycine max
  Clone ID: PAT_MRT3847_67879C.1
gaaattttgattaaccgtgatcacaggttgccgcaccttaaaaccggaaacaaaagcattcgtaacttgattttaagaattactcaatttctttctacttctttgtgtacgacttcttaagggaaagaaaatcactctctgtgctggtcacagacttcgagaatcattttctttaacactcttattttatttgctgaacactctcctatttgatatatgacttcttgtaagatttaaactacttctgataatatttaagttctttgctcaatgacaagtataagcttgtgtaatattggattaaggctctcactctcctatctggtataagacttcg

SEQ ID NO: 107269 - DNA, 229 bp, Glycine max
  Clone ID: PAT_MRT3847_6787C.1
gagagaagcatttgttgctattaatggcggattttaaagaaaaacttcatattctcacggcattcctgaagctggtggggcgtcaagtgccccaccccctgtcttgaagacgaagtgcttgcaatgttcaaggagctcgtttcggttgccgacgtccaccttttgtcataccaatacactcctgcctcccgaggatgttgctttgtaatttgtccctccaaggaagaat

SEQ ID NO: 107270 - DNA, 246 bp, Glycine max
  Clone ID: PAT_MRT3847_67880C.1
tcggattcacatccagactatgctagtattagagtgaccacgcttagacataaactttgacggaataagcttgtatctactgcactaaaaagcatgctggagaaatgttaattctgagccaggtattccaaaatattgaaagaaagcatatgatgataattcagactgcattgtggttcccaaatgccaactacattggggactgaagaactgaaggaatctactattggactgtgttcaagtcaa

SEQ ID NO: 107271 - DNA, 795 bp, Glycine max
  Clone ID: PAT_MRT3847_67881C.1
atggcacaaaaagaaaataacatcattccaatgatttttgatgaggctttttatcgtaaaatggctacccaaaagtggcgacaacaggactacaagaaggcggcagaatattatgaaaaagtgcttgagttgtcacctaaggattttgatattcaacaacactatgctcaatgtttagttaaattaaatatcggcaaaaaagcagaacgtctattttatgagaatattgttaaagactttcatgtagcagaaagtttctatgaactaagtcaattaaatatagaattaaacgagccaaacaaggcattcttgtttggtattaattatgtaatattgtcagaggataaagattttagagaaatgcttgaaaaaacattcgaagtcacgtatacaaatgaacaaaaaattgaattagaagcacaattgttttcaacacaacttttatttcaatttctcttttcgcaaggtaggttagaagaagcccgaacatatattttgaatcaatcttacgagatacaacagcatagggtgattaggaatttacttgcaatgtgttatttgtatctaggtgagtatgatagcgccaaagcaatgtttgaagaacttttaaaggaagataattcagacgtgcatgcactttgtcactacacattattactttataataaaaaagaaacagaaaaatatcaaaaatatcttaaaatacttaataaagtagtaccactaaatgacgacgaaacctttaaattaggaatcgtattgagttatttaaaacagtatcgtgcttctcaaaaa

SEQ ID NO: 107272 - DNA, 304 bp, Glycine max
  Clone ID: PAT_MRT3847_67882C.1
gggaagccaaaaaaagtaacccttgggaaccaaataaaataaacccgggttccctttcgggggggcccaaatccaatcagggacccaaccggggcataattcacccccaccccgggggttaaaacaaaaagattcccatgattttccaaaggaaaaaaacccccgatccttaaataacacctaatacaggcgggcccttacaaaaacaagagcctaaccccttgttttgaaggggagggctcggataacttttgggggaaccacaggagcgggggcggctccaatgaaggggccaccccaaaaa

SEQ ID NO: 107273 - DNA, 401 bp, Glycine max
  Clone ID: PAT_MRT3847_67883C.1
tacggctgcgagaagacgacagaaggggggtcttgggtgggacaacaaagcgcaaagaaaaacgcggtttttgttcctcctgctctctctgactctgtctcggtgcagcaaaaaccttccttcttcatcaattccacgaactcaaacaacaaataattcattctttcaaatttcaattctaacatagaaataagaataaaaatgggttgtttcgccagcaaaaacgctgacaccaaggccagtagggctgcgcgttggcgatccacgggcattgttgctttgcgcgattccaaattaaagacgtttccggatgaaattcttgagttagacacatctgttcgcactcttgacttgacgcataatcggatagttgacattccggtggaaatcagcaaattaat

SEQ ID NO: 107274 - DNA, 357 bp, Glycine max
  Clone ID: PAT_MRT3847_67884C.1
caggctaattgccatagagttgtgttctttctacagcggagctgtcccttaccggtcaatagatgggcttagcacccagtaccgtttgtgcctccgaggagatgctatttggaattgatcccctgggctgggacgatgatatgaccggggttgatgcgcaagttagacaggtgaaacatgtgtgtatgtatgaacttgggaggtggtaattacttggttactgggaagggcatggctgagattggaagaagagggttactttgtttatgaaggtgagaccttttacttcgggctagaagtttatcacgggaggggagaggatgcattgggagaatagaggtcctgcttttgagacaa

SEQ ID NO: 107275 - DNA, 260 bp, Glycine max
  Clone ID: PAT_MRT3847_67885C.1
gctgactttacagacaaacatcaacgccttctccatcttgtgtgatgaacattttcaaatacctactggaccatgatttgaactggggcggaatattctacgactcagagaaggcatgttatttgtccgagaccaggagccccccctcagacaacaacctgattcttgcggcaacacggactaagcagcgagcgctataacaagtctttatagatacaactgtcaccatttaccgatgagtgcgctgcacgtacatgaac

SEQ ID NO: 107276 - DNA, 816 bp, Glycine max
  Clone ID: PAT_MRT3847_67886C.1
cccccgctttaaatgcccctttaagggggggtcccttttcccctttagggtggccaactttttgaaaaggggattggttggggccttttttttttttccccccctgggaaaaaggggtttttttccaaaccattttattttggtaaccccagggtttttccccttcccccgttttttaaaccccggccccttattttttttttggggccccctaaaaaaaattttttttttccaacccccgggagttaaatttggttcctttaaaagggcccccccctttttttttttttttttttttttttaaacctttttttttttttttttttttttttttttttttttttttttttttttttttttttttttttttttttttttttttttttttttttttttagaaatatatatgctgtatagtaaaaagatgtgtcaactacatgcatggttggcggaaaacattcaacctatgccagcccaagcacggatagagtccatgcttttatttcttatttcttacatatatactagttattacatggagtacactcaagtatatgagtgtgttcagttcatatatttgtgatttttacttcagcaacatttgcagccctttcgaccgcagcatctgcatcctccgccatgtccaccaccctgactcctcctgtctgtgctttcaattagctcgattgtgtacaaaaaccgttcactagtctgccggcctatgtggatgtgctcatttgaattctatcgatgaatccatatttgtaagtcaatgtaattagtgagagaacatgaaaactccttcgtttagcattt

SEQ ID NO: 107277 - DNA, 274 bp, Glycine max
  Clone ID: PAT_MRT3847_67887C.1
ctttgttttttttttttttttggaagctcgtaaatcttttacattacataaaaaagctgtctctgctacaccattatgcagccctcacttagattaacacttcttctaactggacaaaatcagcaagcaatcaaagaaaatgacaaaagtcaaccaactatgccgtgtatacactcactattccaaaaatcttatgtactgatacagtttcagcgatgatgatcaatgacctcaacttgtagaacctccatataaaaacggaacggacgcgtgg

SEQ ID NO: 107278 - DNA, 279 bp, Glycine max
  Clone ID: PAT_MRT3847_67888C.1
ccacccattggcctaagggcccataacattttttttaattctttttttggctcctaaataaaccagtcaaaaaaaaaaatggtgcctgaccacccaaaattaattaatccccattattcaattttaacagctggctatattttttaatttgcttttaaaaaaaaattttttggtccctaaaccaaatccggcaccaaattttttccttgcccaaattctttatttttaaaatcaacctaccaagtttacctccggaaaagaaattcagaattcccccca

SEQ ID NO: 107279 - DNA, 669 bp, Glycine max
  Clone ID: PAT_MRT3847_67889C.1
tgcagatatgcaatgactggccaattgaatgctaagagtgatgtatacagctttggtgttgtccttctagaacttttgactggaaggaagcctgttgatcatacactaccacgtgggcagcagagcctggttacttgggctacaccaagactcagtgaggataaagtcagacagtgtgtagatgcaagactaggaggagagtacctgcccaaagctgttgataagatggccgctgttgctgccctgtgcgtgcaatacgaagctgatttcagaccaaacatgagcatcgtagttaaagctcttcaacctttgttgaacgcaagacacgggcctgctggtgaaactccaaactaatctctgtctatatgtatcaacgagtatgtgcataagtctaagtctgcacccgagatataagaaagtgactgcttcagaagcggatggaaaattgcttgaacatgtttatattattgttgtgtaattacaaacttgtgtaggacctattagcaattaagaagactttgtgtatcagttttgtgaacggttaaaattcatttaactgtaattaggcaatggtatttttcacgctttaccatagtttagttttgattaagtgttataaatacacattctaataagtcaattcatatatgtgcaaatacgtgcgaaaaa

SEQ ID NO: 107280 - DNA, 248 bp, Glycine max
  Clone ID: PAT_MRT3847_6788C.1
ccacgcgtccgcccacgcgttcgtactgtttctttatgacacataagggcagaacaagtgtggcagggggtttattaactaagatctgtggccagagagatggttagattgatagaaacagccactgttacaatatttgctgaagatgtcgatggccacgtaaatgtttggaatgcacaggtttcagaattaacaggtctgcaaattaatgtggctattgggaatgttttgattcactatcatgactt

SEQ ID NO: 107281 - DNA, 1665 bp, Glycine max
  Clone ID: PAT_MRT3847_67890C.1
cccactcgtcctcccacgcgtccgcccacgcgtccgcccacgcgtccgcaaaaaaaattccaatctagtcaaaatcttggaccgctttatcctacgccctcctccctacttatcctgcgcatatttcgccgttttctcgccgagatcttgaactatctcctccgtgttctcactttctcaactacacaatattcttattgaattccagcggaaagaatcatgagttgcttcggctgttgtgaggaagatgactaccagaagactgctgaaagtggaggacagcatgtggtaaaaaactcaacaggaaatgatggaaacagtcgtgcatccgaaactgcaaagcaggggactcaagctgttaaaattcagcccattgaagttcctgaattacaagtggatgaactcaaagaaatcaccgatggctttggagaaagttctttgattggagagggatcctatggaagagtatattatggtgttcttaaaagtgggcaggctgcggcaatcaagaaattagatgccagtaaacagcctgatgacgaatttttagcccaggtttcaatggtttcacggctgaagcatgacaattttgttcaattgcttggttattgcattgatggaaactcccgagttcttgcttatgagtttgcatctaatgggtctcttcatgatattttacatggcagaaaaggagttaaaggagcacagcctggtcctgttctaacatggactcagagagttaaaattgctgtaggggctgccaaagggcttgagtacctgcatgagagggctgatccccacattatccaccgggacatcaagtcaagcaatgtactaatctttgatgacgatgttgctaaaattgcagattttgatttgtcaaatcaggctcctgacatggcagcacgtctccattccacccgtgtccttggaacctttggttatcatgcaccagaatatgcaatgactggccaattgaatgccaagagtgatgtatacagctttggtgttgtccttctggaacttttgactggaaggaagcctgttgatcatacactaccacgtgggtagcagagcctggttacttgggctacaccaagactcagtgaggataaagtcagacagtgtgtagatgcaagactaggaggagaatacccccccaaagctgttgctaagatggccgctgttgctgccctgtgcgtgcaatatgaagctgatttcagaccaaacatgagcattgtagtcaaagctcttcaacctttattgaatgcaagacatgggcctgctggtgaaactccaaactaatctttgtctatatttatatctgtatcaatgagtatgtgcataagtgtgcacctgagatataagaaagtgactgcttcagaagcggatggaaatttgcttgaacatgtttatatatcccattgtttacattgcaaaaaaaaaaaaaaaacccccccctttttttttttgtaattacaaacttgtgtaggacctattagcaattaagaagactttgtgtatcagttttgtgaacggttaaaattcatttaactgtaattaggcaatggtatttttcacgctttaccatagtttagttttgattaagtgttataaatacacattctaataagtcaattcatatatgtgcaaatacgtgcgaaa

SEQ ID NO: 107282 - DNA, 533 bp, Glycine max
  Clone ID: PAT_MRT3847_67891C.1
gactcatggcaacaaaacctcgtttggcttatctggctggcatttttgttcttcttctagttgggttcacttctgtgacggcacaatccccagggccagaatcttcatcactccacgacaccttccttcaatgcctcaccaaatacacaaaaaactcctcatctcaactctccaacatagtcttcgctaacaccaaccccaagttccccactgtcctccaaaactacatccgaaacgcgcgtttcaacacctcctccaccccaaagccttcactcatcgtcactccccagaaagaatcacacgtccaagccactgtaatctgcgccaaaagcgttaacattcaactcaaaatcagaagcggaggtcatgactacgagggcatctcgtacatctccgacgaacccttcatcatcctcgacatgttcaactttcgcagaataacggtggacataaaaaacgaggttgcagtggtccaagctggagcaacactcggagatgtttattacagaatatggtaaaagagtaaaagtcat

SEQ ID NO: 107283 - DNA, 307 bp, Glycine max
  Clone ID: PAT_MRT3847_67892C.1
ccccaccggtggggtggctcgcgggataggatgtgtcatataactcactgtcaggaaaggggcgtttgcaactcgagcaacggactcacgtgaacactgttcattgaagttccaggcgctgacaacaatgagtgtcttccgcctcactactgactggcacgagcaacaccaccctgcgtatcacgatatatggcttcctaccgttagctatgtttactttcaggcccttcggtcatctgttgagcgactcatagccgagaatgaggctggactaacaactgatgaaaaggggcatgcaagcctgaac

SEQ ID NO: 107284 - DNA, 153 bp, Glycine max
  Clone ID: PAT_MRT3847_67893C.1
cccacgcgtccgaagaatcaaaatatttctttgtagtaaggccttcaacatcatggcagagtggataaacgggtttacctataccacgtattattagacaggcgtcattttctacagccgaggctactcacatggaacttgagatcccaaaag

SEQ ID NO: 107285 - DNA, 866 bp, Glycine max
  Clone ID: PAT_MRT3847_67894C.1
cggagatggaggtgatgtccgttcgttcaccatccgcggcccgttcattcagtgatcaaggccgtcgggttcctgatgctccgcgcctgggttcctgacagcctgttgggagtggggcggctcgcttgtcgcagtacgggggagccggggaggcatcccgcgccaagggggacgggtggtcgttgtcgatgaaccgtcttcgacgaggtggccggtagtgggcggtccacggcgagggtgacatggtagggtctctcctctggtgaagctcacaaaggtttaatgtgaacatgacgactgttatggtggttctcgtcttgagagatggaggttcttgtttttttgtgttgaagggaaacgaggttaaaacaaaatccatgacaaaggagtagatatcactggtaatgtcaggcaactacctcgtattatgaaagtgtgaagtcttgctgttcttcctgatctatctactatgtctcagactatctggatatcagatggatgccattctgtgcacatgttcactgcaatggacatagaaaatgctttgaaggaagctgatggaaatgattgcaatgaaaagcttaggggatgtttggtttggttgttttttgttttcatttttactggtaatagaaaatggtgatggaaatgtgtttagttggatttttgttttcattttcagtgaaaatattttcccaaatgaaccaaaaactggaaacaataaaatctcgttttcagttaaaatcaagaaccttattttggataaaatgaaaatgcgatggcaaggaatgtaattttaagcaaatctaaaaatacatttccttttgaaaacgtattttcaatgtttttatttcttgaaagcagaa

SEQ ID NO: 107286 - DNA, 292 bp, Glycine max
  Clone ID: PAT_MRT3847_67895C.1
caccggttaaatcactgatactcttcttgttttacattcatttcacaaactaattatctagagatgtttttggaatccatattatcacaaatttaccacaccttcaatgcataatacagccaaaatctataccatacatagacaatctgtcaagcatcttatgtctttacctcaatttactaatactgtaacatcattatcttcgatatatctccatcatcctaagaataatagacttctaactctcataatttaaaataaccaaatatatcaatagaacctgtcttataac

SEQ ID NO: 107287 - DNA, 595 bp, Glycine max
  unsure (1)..(595): unsure at all n locations
  Clone ID: PAT_MRT3847_67896C.1
gaactgtttaaagattatattttctgtcttgcaccctctagaacaaagaaatatgggtgctcctattaaatcatttgcattgccagcaatgcttctcttctcaatgatcatcataccccagcttgcactagggggcattaccaggcactaccattttgatataaaataccaaaatgtatcacgattatgccacacaaagagcgtggtcacagtgaatggtcagtttccagggccacgcattgtagcaagggagggtgacaatcttcttatcaaagtgactaaccatgttcagaacaatatctccatccattggcacggaattcgacagcttcgatcaggttgggctgatggaccagcctatgtgactcaatgccccattcaaacaggccaaagttacgtctacaattacacagttgttggccaaagaggcactctctggtggcatgctcacatttcatggttaagatcaactntatatggtcctctcatcattcttcctcagtatggagttccatatccttntactaagccttacaaggaagttcccatcatctttggagaatggtggaatgcagatcctggagcagtaataaca

SEQ ID NO: 107288 - DNA, 420 bp, Glycine max
  unsure (1)..(420): unsure at all n locations
  Clone ID: PAT_MRT3847_67897C.1
cggccgccctctttgttgttctttgtgtattaacggggacaacctgccttgatcctgggnaacatcatgccaggctcgctctaaatgtatactcatggggcactacgctctcttatttggggcttattcccaccacctcgctttatcctttacgaaactgaactagtgacccttacatttgaacaagatgagacgtactttgaaaatcccccaagccgaagcaaacctagattaaactcacctttcttgccttggtgacttcaaaaaaaacttaccctaaaggtggacctaacaagatcttctcccaaatcctctttttgcaacttcaatttgtaaccgaccaaaataacatcatgttttgcatgaccccaacctaacctgccgagataagcacttgcggcacgcaaacagacaattgca

SEQ ID NO: 107289 - DNA, 248 bp, Glycine max
  Clone ID: PAT_MRT3847_67898C.1
gataaaataaagcagaaaatggtttgtttttttcctggattaaacgaaacaataatcatatcgaatcattgcattgtctcctcatggagattcctgaataagagaaggagggtctatccttgttacaaaaaacataccaaccaagtgctactttgaaactgaaactttacgtatcactgaaagcgaccttgattgtgaagagcaagattttttctttctggagaggaacttatcttaggaatcaatgg

SEQ ID NO: 107290 - DNA, 275 bp, Glycine max
  Clone ID: PAT_MRT3847_67899C.1
ttctagtgttcttttaagctctttgtgatatttatgtaatttgatttcatcttctttgtggtgtgcaatgaataatggtgatgaagaaatgaacttatggtaatgtgtttgcaaagacacaaatttagccactgtttcgtgtaaaattttctgcgaaaatttaggttcattcgtttttaaatgatatttgctacgcaatttgttatgtaacaaaatgtgatttcattggtagtacatgcaatgaaccagtactgtcctgtgctgtactttgcatt

SEQ ID NO: 107291 - DNA, 672 bp, Glycine max
  unsure (1)..(672): unsure at all n locations
  Clone ID: PAT_MRT3847_6789C.1
ggcacaagtgagtttgttgatccaggaactggaagcagtgggatgaaaataaaggtgcttgttgtcttcnttgctacaattttggtggcatggcaatgccatgcgtacgatatgttccctctccgaatgaacactggctatggggcccgtactccngaggggaaatgcgcaanttngaggcttggggggggggggncaacatctttnggtttnagaccattcctnaanagtgcgttgaagcaacaaaggaggacatccatggggaacaatatagatcagactccaaaacaggtaaccaacaagcgtacttttatgccagagacgctcgaagtccatcccaaggggcatttgtgttcagtatagatgggaccggactctctaatattccatactacaaaaaacatggggtatggggtggggaaatttaactcnaccttggatgatgaatggggtaacaagggcaatgcgccggcgctgcccgagactcttaagaattacaacaagctggggggctcttgggttcaagattatattcttggggaggaagaacactgggcaaacagggcgtaacagaagcaaacttaaagaagggggggtaccacacatggggaaaaattaattctcaagggtgcacaagagccttccactccaagtggggggttcatacaaaac

SEQ ID NO: 107292 - DNA, 150 bp, Glycine max
  Clone ID: PAT_MRT3847_678C.1
gctgaacttacaatatgtaaatattttgttggagatctaatgtggtaaggtttttagatgacaagtccctacaataaatgttctcaccctttctttataccaaattcaaacaccgcttttgataccaccaaattttaagcttttccccac

SEQ ID NO: 107293 - DNA, 690 bp, Glycine max
  Clone ID: PAT_MRT3847_67900C.1
ccacgcgtccgagttcgggcaaatacacaccttattcaagagcagcaaaacaaagtgtgatggccctggatgcatcaaccttcgaaaccatacccccttcacgcttcatcgccttcacagtacctcatccaacatgttccgattccaccctccgagtcgccgtgctcgactcgccgctccaacccactgactcaccccgagtcggcgccatgttggtccccgaaggccgtgaaaccgattggatcttctccaccgaatcgggccatctccaactcctcttcagctcccctggaatttcacgtttgattctcataggaaccctcttcaaagaaggtactttaactcttcttcaatcacgtgcttatcaccgttccttggagtgttcattgcagcatcagggttttgaggtttggtcaaagcctcttcttttggctttgtctcctaaatctttgttcaaaaggggcattcctgagataccccttttgagttatgaggatagtttggtttctagtgtggtggttcatgaatgtgttgggtgtcatgttggtgaaatgttggttgaggatgttgaaattgaaaatgagagtgatcatgggagggagtttaggaggaaggtgaggttttaagagaatgcctaatttgattcaaactgaaatttgtattattcctgagagagattgtgatggtgtg

SEQ ID NO: 107294 - DNA, 596 bp, Glycine max
  Clone ID: PAT_MRT3847_67901C.1
acctcgaaaaggggaaacaataaattaaaaaatttagcccgtccattaactggattaaaattcaatccccttggttcagcttaaaatctagcaaatatctaaacttgtatgtcaagacttatgtatcgtagtagagggtttatttacaattaaaatcgagaaacatttcgtctcattattttacatggtccaagttacaaaccagtagagtagtaccttacgacaatcgtcctttatatctaccacttttaatacgggggatttaaaccccatccttgttttggcgactattggcggaatgctttatcatctaatctctcgtcgactagtgcaaaacataataatactcttttaaatcaatctaccttgaagaaacatctagcattttcataagttcatccaattgaacccatacaccctatcattaaaaaaaaaataactatacaacatacgcaactcaggcacgaatcatttcctcttatttgattaagtttaggcaatcgtatccgcgtatgttttggccaaccaaacaaaactgggaagaacgatttcgcaattaccaactaattgaagatttatttatcaaaatccaaaaa

SEQ ID NO: 107295 - DNA, 256 bp, Glycine max
  Clone ID: PAT_MRT3847_67902C.1
tttttttttttgaaagaaattgtatgccttatccattctcatcatcatctccatttcgcaacactaattacataacttttatcatatacagaagaaaaattatgagccagggaaatacaaactaactccgaaaacttcatctctatgcatggcaagaaagaaacattaacatgatcatccccattcctattcacacctcagaacagcacctcagaaggggagaaacaaacccaaaatagcaataataataatctag

SEQ ID NO: 107296 - DNA, 125 bp, Glycine max
  Clone ID: PAT_MRT3847_67903C.1
acgtctatgattactaagatatgaagaagtacaattgctgatagtgggcagtgagtggcattgaatcaggtgagtccatcatagagatagatttcactcacacttggaagtgagggtttgaatat

SEQ ID NO: 107297 - DNA, 152 bp, Glycine max
  Clone ID: PAT_MRT3847_67904C.1
aaatagtcctatacgcattatatcttatccagcataaccctacttatatattctcctctaaccaaactaactatggcagaatcaaaaaattacgagcgggggctcctcccttttaaatctccaccaccaattatgactttccaaaccctcac

SEQ ID NO: 107298 - DNA, 416 bp, Glycine max
  Clone ID: PAT_MRT3847_67905C.1
tctctttcttctgcttgggtccgcttgttggccgctttttttttcttttgtttttcttttttttgcggccatttgttttatcattatagtgtggttgttttcttcggtccacacattttttctgtttatttaatgtatgctttaaacatgcgctcttgtttcttcatacatttcattttcatttcttccttttgcctgaactttttttcggtccgtaggtgacaacagctcttttagcgattcttgatgtagccatttttcttggcattgcttcgtttgcactgcctgtctcccattaggccattctttctggtctttccatgtggtttcccacactctttgcttgttcgagtacctggaccgttgttttttgggttgggttttcctacgttggtgtgtccctttgtttctcctct

SEQ ID NO: 107299 - DNA, 308 bp, Glycine max
  unsure (1)..(308): unsure at all n locations
  Clone ID: PAT_MRT3847_67906C.1
gggagatgggaactgcaataagcaaacgccaattgatacgtgcatatcagacatctactgtaaaacacacactcgctccaaaaaaatactatatcaccaagctcacctatctgctnatctcaaggccttatacaccgagcatgcgagataacctaacacatcatgctatatacttacccatcaggattccaagcagatacttacacaggtagcagcactacaccatcaagagcatagaagcagaacgtcatcacaagaatgttccatgatgaaccaatgaaatcattggataccatgtatgaatcata

SEQ ID NO: 107300 - DNA, 464 bp, Glycine max
  Clone ID: PAT_MRT3847_67907C.1
atttctgctatcacttgtgaatcatctggttcatgttccaagttccttaaagacatggctgatagaagattgactgagtgcattgatgatgttatattggagtatctttctgttggtgatcctgagtcttgttgtgagaagcttgaggagatactcacacaaggtctaaaagagcacttagaaggcattgaagtaaaaccagattgtatattcatgctgcatcccctacatcaccactctataaaagcatacacaacactggcttctgcatataaagtttgtgcttgcgatttattgtctgtagactctgaaacagatataaaccaattaaaagcttttgacatgagcaggatcagtgctgcatattctttggtacttgcaggagcaactcatcatctcttcaattctgaatcctcactgattgcatctggtgcaaatttttggacaggagctggtgaatcttt

SEQ ID NO: 107301 - DNA, 437 bp, Glycine max
  Clone ID: PAT_MRT3847_67908C.1
ggctcgagttcataataacttgtacattgagagcactactacttggagaattatttacctaccaacttttcaatttcaaagccaaaaatgtcaaccaccattgatgtccctgcagaaacgacaagcaagaataatattggcaatggaattagaaaagttccaggtgcacccccaaggccagaaggagggtggaagaaagggttagccataatagactttgttctaaggttaggtgctattgcatctgctcttggtgctgctgccaccatggcaacgagtgatgagacactgcctttcttcactcagttctttcagtttgaggccagctatgatagcttttctactttacagtattttgtgattgctatggcatttgatggacgctacctagtcctatctctacctttctctatagtcactattatacgtctccatgc

SEQ ID NO: 107302 - DNA, 422 bp, Glycine max
  unsure (1)..(422): unsure at all n locations
  Clone ID: PAT_MRT3847_67909C.1
aggcaggcaaaattgaagctattaagccttattgaaatcattgaaaaccattcaagtcaactatattgatatatttatatccaaaacaattatataggttcaatgaggtttgtcatcatggatgcagcattaactattctttatcaatatggacggttttggtatgttcaatgaggtttgtcatgttttacagacaaaataactcaaacaatcaagtagctaacgtgttattttcttcccttgttgcccttgtgtttttcccctaatctttttctctccccttgtgagttacgggataatttgccttctatttctttcttcctcctgcattcaatttttaatttgatgtgtttttaatgcttttttgcatatccctttgtcaatacanattannatatcatgtaactttatcatgactcaat

SEQ ID NO: 107303 - DNA, 404 bp, Glycine max
  Clone ID: PAT_MRT3847_6790C.1
cgcgcgcgaaccatgtatatgattagctttcctgtttccgacggaaacgacgcctgtgatgcctaactaggcccgcgggactgaactttagactcttgttttatgagactccaatccacagtatccctccggatttgagacaatacactactctgcaattctgattaaaagttaaccgccctaaagaaagggctcccccccccaagttccagctgttcccccgttgtttctttgccctacttgtagtaatacagaacccgcctattggcctttgccaccattcgccgacttatccgggagccactaacagaagctttccaaggcgatccttatccatgcctgccgggggcttacttgtgcctgcgaaccacataaccatctgctaggacaggaacgccgtacag

SEQ ID NO: 107304 - DNA, 228 bp, Glycine max
  Clone ID: PAT_MRT3847_67910C.1
gatattaaggtaaagagtgaaagtgatggattatggatgtaaagggaaattaatgataaaataactgtattggttgaattaaagaaaattaaaaatggtattgttgtatatgaggatgactaatgaagacttgatatagggatatgaatattgatgaaggaaaagtatattacgatttaatgggtagaatgatggtgaggaaagatagatttttaagattatggtttt

SEQ ID NO: 107305 - DNA, 436 bp, Glycine max
  Clone ID: PAT_MRT3847_67911C.1
aattcggctcgagtaaccccatcaatctccataccctcatctcggatttctcgaaaaacctccaatgcattcctcgttagctacattacatacccagtaagtaacctttgtatcaccgctcctagcgtaagcaacattcagcaatgaaggtgaggaaatgtcggcatcatcattgatagagtctccagttcttcaactccatgagatctcagctgtcaagttcggcaactttaagctcaaatctggcatctcctcgccaatctacatagacctccgcctcattatatcttacccttctctcctccagcaaatctctcaaacccttatttcctcagtctcttccacttcctttgacctcgtaatccgtgttcctttcactgccttagccattgccacatgcgtctctcttgctcagaccattcccatggtcatgcgc

SEQ ID NO: 107306 - DNA, 511 bp, Glycine max
  unsure (1)..(511): unsure at all n locations
  Clone ID: PAT_MRT3847_67912C.1
ccgggattctacgtgatggattgacgtgctttaggagctgcttgcatggctgctgataagtgccaaggtcgccttctttgctggtgagctagcgcaaattccagcaaattaagaagcctattcaggtgctgatagtagaaaagaactatgttgtgcgggcttgatgatcctcngagganggggtggtgcttggggggggggggcctttttttctctcccctttgtggtgggggggggggggtggggggggggggggggggggcgggggggggggcgggcgggtggggggggggtcgggggcggcggggggggggggtgggggggggggggtgggggggcgggtgtgggggtggtggggggtggtgtgggtgtgggtggggtgtgtggggggggtggttgggggcgtgggtgggggggggtggtggggttggttggtcggttgccgtgcggggggggggggggggggcgggtggcggggcggcgggggggtggggcgggggcgggggggggg

SEQ ID NO: 107307 - DNA, 568 bp, Glycine max
  Clone ID: PAT_MRT3847_67913C.1
ggggggtcttatcttttaaaaatacttttaattttatcctttgggttttaaatttggggtaatttcgtgctttcatcaatctaaaatagaggtgaataattttagcgtaatggggtttaaaaatgagtacaaaataatactttattgcgtgagtctgtgtccgtgtacgtaacatagggagaggttttttaacaacacatagggagattttttaactatcataataatattatacaaattaaaaataatttgcgaaaagaactttaaaattgtcatgcgcaatttctttgagacgattttatgcgtcttaaaattcattgaggaggttgggtatcctatgtgtgtggatcaatatataggaaaaattcaaatgggttcgttggggcgtgtgtgagcataaaatatggtcatgtgatagattttaagacattcaatttatttcgatctatgagttgagtgtgcattttttgcgattcattgaggggggtaattcaggggtggcggtttagatctcatgcgaataacattaaaaaaattattgggggggtgggaggaacccttttttggg

SEQ ID NO: 107308 - DNA, 198 bp, Glycine max
  Clone ID: PAT_MRT3847_67914C.1
tcgaccacgcgtacgagcacatgactcatcacctttacaccttcactggcaatcaattcaccaactgaatacggtctcatttctcactttcacatttctcctaacaaacttgtcttcgacgaggacgtctacaccatagatctcaataattgtcatgtcaccaaccgttcatctaaacttggaaagcctgatacatct

SEQ ID NO: 107309 - DNA, 1165 bp, Glycine max
  unsure (1)..(1165): unsure at all n locations
  Clone ID: PAT_MRT3847_67915C.1
ccacgcgtccgcgagggggggtcataaaattacaagtttagtgagagggtgagggaactatgaaaatttaactaaactgaaaacaaaaccaaacagaaacaccaagtagagcttgttttcttttccatctgcaccgaactgcggtgtagtgtttgttggtgtcttgagcatggcgacgcaactgagcgatgcggaactcataaccagcttgcaagccagggtcaaggaattagaaactgagaatgcaaagttattgtcccaacttgctgattgccgcagtcacgaggcgtgagatggagtatatgttgcttatccctgatgaggaaggcatggaatcggaaaaaggcaacaggaaatctgaatagaggatagagaaaatgccaggctataactcatggtttatgagtcatcatggcaagagatatgaagcctcaaaggctttggacgttggtgttacgttttatcgtctgaggtcagaggcgcacctagggtcaactctggagtctgaactctttttggcgtatgagactattgggctattggttggtggaaccacagagtcccagttgtcgcagtatggaagaggggctgccgctgttgcccctgtgagacaggtgatagctcttttcctattagctagtaaactgtttcatagctatcttcgcgtattttttactgtgtttttatctttttggccattggagtccagtgatagttttcagctttgaaaaattaaccaatgaaaaagaaagaggaaggggaggaaactgcattcttcagtgcaatttgtttgaatttgtgatgcagatggagaaaaaagtatatgtccctgatgagagaggcgggaaatcaaaaaaaggcaacaggaaatctgaagagaagatagagaaaatgccaggttcctttttttctatttttttctttaggggactatacctctccctcccctttatttatttatttttcaaaattatataaaatttgaaaatataagctccacttctgttcttcagtaaaaactttgtactatgtctgatgaacttcataacttattaatttcagttttttttttttttttatgcactatgcttggnttctgtttttcagctccaacagtggtttgtttaaaaaattatttctggcctatgtattatggggtttcccc

SEQ ID NO: 107310 - DNA, 247 bp, Glycine max
  Clone ID: PAT_MRT3847_67916C.1
aaaatgaatactatgctttccagccagggtattaacaaccaggacacagagatcatcacagatcatgccaaggtcaacaaagattaaggcccccgcataaaattgctgcgagacttaaagcatttgaatctcgattctcagctcattactgacaaaaactgtaaaacacagcttaaaatcgacgcttacccagtatctcggaaatcatactacatcattcgcaccgacttgagccaattggataata

SEQ ID NO: 107311 - DNA, 1046 bp, Glycine max
  Clone ID: PAT_MRT3847_67917C.1
ggggcaaccgaacatgcaaatcttcgaattttgaatacttttttcttttatgggctttcatgatgatccatatctgactcatccggcaaaaagtcaggagtcaacttgtttctttttggccatatatatatacacatatacccttgtagaatacaaggattcatcaaccaaagtgttaagagctcttgaatattattcacaaacttgtcattgctcaaaagaccctcctagagataagaggaaaattcctgaaagataacaacaaaaatgaagggctcatttcttcatgacctagctaatggaatttctgtcgcctcaacataccatgttgggaagtcgtcaaagagatatcttttgcctgattcgtgtggcaaatacagcaagtccatcactaaatcaaagcaaaatagagcaccctttcatcacaaatctggattcttacaaagattccgagagcatgtgaggcttggaccaaagataacagatacagtgaaagggaaattaagtatgggagccagaattcttcaggttggtggagtagagaaagttttcatgcaactgtttagtgtgagagaaggggagaagctgttgaaagcatcacaatgctacttatcaaccacatctggtcctatagctggtcttctcttcatatccacccataaagttgctttttgcagtgatagatccatcaagatctcttccccaaatggagatgatgttagagtccattataaggtctcaattccccttacaaaattaaagtctgtcaacaaaagtcagaatgtggagaagccttcacaaaagtacatagaaatagtaactgtggataatttcgatttctggttcatgggtttcttcaattatcagaaagctttacgatgtcttcagcaggctgtccctcaagcttagagagaaaaaactgtacaagtaaaattgtttgtcccctctgcttcatcacttattttgtgaagttgcagaggttcctaaaatgtacaaatactttacataattttgtaaatgataaagacaaaaactagttgtttatt

SEQ ID NO: 107312 - DNA, 365 bp, Glycine max
  Clone ID: PAT_MRT3847_67918C.1
ctcttgcgtgtttgggctttagcgcagcttctcctagactcaaggaagatcggttcggaaaaggttcacatcactattgtggttattggccatgtcgactctgtgaagtccactaccactgtccacctgatctacaagcttgtaggcattgactagcgtgtgatcgagagatatgagaaggatgctcctgagatgaacaagaggtcttccaagtatgcctgggtgctagatatgcttaaggctcatcgtgaaagatgaatcacacttgatatcgccttgcaggaagtttgaaaccaccatgtactattgcacagtcattgatgcccctggtcacaaggatctcatcaagtacatgatcactggga

SEQ ID NO: 107313 - DNA, 467 bp, Glycine max
  Clone ID: PAT_MRT3847_67919C.1
acggctgcgagaagacgacagaagggctgataattgaagaaacccatgaaccagaaatcgaaattatccacaggtactatttctatgtactttggggaaggcttctccacattctgacttttgttgacagactttaattttgtaaggggaattgagacctgaaatggcatagaaattgaagtacatatcagcaaaagtatgaagaaagattaaggagatagctcggaagcacttgcatgatagacactatataaaaaaaattaaaaagaaagtcaccttataatggactctaacatcatctccatttggggaagagatcttgatggatctatcactgcaaaaggcaactttatcagtggatatgaagagaagaccagcaataggaccagatgtggttgataagtagcattgtgatgctttcaacagcttcttctcttctctcacactaaaaagttgcatgaaaactt

SEQ ID NO: 107314 - DNA, 262 bp, Glycine max
  Clone ID: PAT_MRT3847_6791C.1
attaaaaaaaatttaaaaaaaaaaaaaaaaaaaaaaaaaaaaaaaaaaaaaaaaaaaaaaaaaaaaaaaaaaaaaaaaaaaaaaaaaaaaaaaaaaaaaaaaaataaaaaaaaaaaaagacgccagtgttaataaaataacactctacgagaccataaaaagtaccaaagaacaaaacggttagagctcattagattattattacaaggacgaatataaacagagaaaacgtggaaaatctataatttactccttctaaatt

SEQ ID NO: 107315 - DNA, 614 bp, Glycine max
  Clone ID: PAT_MRT3847_67920C.1
ccatatgttaggataagagatatgcgccagagttgaagcgagaaggaagggtccgcgcgccatggctggcatcaccacctcccccttcaaactctctcactttccgactctcttctcttcttctgattccaaactcttcggccttcccctctccaatccctattccctcaaattcgacccttcttctctctccactacctctctctcctacgtcaaagcccgcaagtcctccgattccgacgacgacgataaagctctcgacctctccactctcaggtcagataccgtgaggcttattgatcagagccagaatatggtcggagtagtgtcaattgatgacgccattcaaatggctgaagatgtcgaacttgacttggtaatattatccccagatgcagatcctcctgttgttagaataatggattacagcaaatatagatatgaacagcaaaagaagaaaagaggacagcagaagaaaagtgctgctaatcggatggatttgaaggagctcaaaatgggatacaacatagatgaacatgattattcagtgcgtttgaaagctgcacagaaatttttgaaagatggcaacaaggttaaggtcatagtaaacctca

SEQ ID NO: 107316 - DNA, 1474 bp, Glycine max
  Clone ID: PAT_MRT3847_67921C.1
cttggagctgacactaaactaataataggtgtgtctcacagtgagagtttaggataagagatatgcgccatagttgaagcgagaaggaagggtccgcgcgccatggctggcatcaccacctcccccttcaaactctctcactttccgactctcttctcttcttctgattccaaactcttcggccttcccctctccaatccctattccctcaaattcgacccttcttctctctccactacctctctctcctacgtcaaagcccgctactacggcggcggcggcggccctccccgctcccccaacgactcccgcttccgcaagtcctccgattccgacgacgacgataaagctctcgacctctccactctcaggtcagataccgtgaggcttattgatcagagccagaatatggtcggagtagtgtcaattgatgacgccattcaaatggctgaagatgtcgaacttgacttggtaatattatccccagatgcagatcctcctgttgttagaataatggattacagcaaatatagatatgaacagcaaaagaagaaaagaggacagcagaagaaaagtgctgctaatcggatggatttgaaggagctcaaaatgggatacaacatagatgaacatgattattcagtgcgtttgaaagctgcacagaaatttttgaaagatggcaacaaggttaaggtcatagtaaacctcaagggtcgtgaaaatgaattccggaatatggctattgcgcttattacacgttttcagaatgatgttggggagcttggaatagaggagacaaaaaacttccgtgacagaaatatcttcataattttggttccaaataaagttgctgtgcagaaaactcaagaaccaccaaagaaaagagacaagtcagctgcagatgaagtctccgttagtgcccaagcataaccgcaaacttccacgctagtttctaattgtagaatggatattgtgagtaacttgtattggtccgagttggaaaattttccgagcattatataattgtataattcatgtgcaataatagcatataaattcacgagaattttaattatagaggcagccttggccttttcaacacaaattactgaagggatacatcatataacataaaagatctatcgcacgtggataatttatgctcattttaattagctgcaacatacgtacctaacgatttgaaggttgcttaactttcaagttcttaccttccaagaatgctgacatgttttttacttgcacagaacgtagtctcctgaaagcaacaccttttgtgtacaatagtattttttgttttcattgaaagttaatcattttcttttctgtttccctctggattctacgattgtttaagaatcgaccagtcaaattcactgtatttttctagctgtgatggtagtaagccttttcttttttaggactcgtttctattcttgttgcgatggtttcgtat

SEQ ID NO: 107317 - DNA, 409 bp, Glycine max
  Clone ID: PAT_MRT3847_67922C.1
taatttcaaacatcaaacttattggtgatttgtcatagttctgggtagtacgcacacacaacacaaccggtccattattaaaccaacactgacacgactcatgacacgaacagcagatactttgacaacctccatatggagagagggcaccagacgacgcaggcacatcggcagcttaaacgacccatgacttactgaccaccacggagacggagcacaaggtggagggtgctctccttttggatgttgtagtctgctagggtgcggccatcctccagctgtttgccggcgaagatcagacgctgctggtccggggggatgccctccttgtcctggatcttcgccttcacattgtcgatggtgtccgagctctcaacctccagggttatggtttttccagtcagggtct

SEQ ID NO: 107318 - DNA, 2071 bp, Glycine max
  Clone ID: PAT_MRT3847_67923C.1
tacggctgcgagaagacgacggaaggggaacccaatccactattataattttttttatctcttctcttctctttcccctcaccaacacgtcatttcatttctttcaaagtcttcccttctctcctcttcctcttcacttcttaaaccgtcgccccttaacgacgccgtttcctgttctctcatgtaagcgcggttcgagaaaaaaaaaaagaaaatccgttattggcgttgttttatttttgtttccggttcggattatttgaatggatcgggcggcgttgacggtcggaccgggcatggacatgccgataatgcacgacagcgaccgttacgatctggtccgcgacatcgggtccggaaatttcggcgtggcgaggctgatgcaggataaacaaaccaaggaactcgtcgccgtcaagtacatcgaaaggggtgataagattgatgaaaatgtgaagagggaaattatcaatcacaggtcgtccggattcccgcgtcgacccacgcgtccgtgaaaatgttaaaagagaactcattaatcacaggtctctaagacatcctaacattatcaggtttaaggaggttattttaacacctactcatctggccattgtaatggaatatgcatctggtggagaactatttgagaaaatctgcaatgcagggcgttttaatgaggatgaggctcgtttcttctttcaacaactcatatctggggtcagctattgtcatgcaatggaagtgtgtcaccgggacctgaagttggaaaacacgttgttggatggaagcccggcgcttcatttgaagatatgtgattttggatactccaagtcttccgtgcttcattcacaacctaagtcaactgtgggaactccagcatatattgctccagaagtattgctgaagcaagagtatgatggcaagattgcagatgtctggtcatgtggagtaaccttgtttgtgatgctagtgggatcatatccttttgaagatcctaatgatccaaaggatttccggaagacaattcagcgggcagagggttctcagtgtccagtattccattccagacaatgttcaagtatctcctgagtgtcgccaccttatctcaaggatctttgtttttgaccctgcagagagaatcactattcctgaaatattgcaaaatgaatggtttctgaaaaatcttcctccttacttgatggatgaaaagatcatgggtaaccaatttgtagagtcagatcagcccatgcagagcattgatacgatcatgcagataatttcagaagctaccatacccgctgcagggacctattctttagaccagtttatggctgataacataatagatgatgacatggatgaattagactccgactttgagcttgatgtagatagcagtggggagatagtgtatgccatataatttaatcatcgtctgcattttagagacagcataatgaaagtacagcatcttaatattcaacacgacgatctcccttaatttaatcatggaaaaagaaatgtgtggagatcgtatttcctgtaagattggatgatacacaaagttcatcatgttaatttgtatgttgtatgcttcttggaactgccgaggaagggaacatgattcttactctctagaaggcttggtggctgagaaatcataactacccttccctcttctcctgttgaatacttgttatatatatatatatatacacacattagcctttttgttgtctcttgtcagttatattggtgtcaggattcttgtttgcatatacatcagccttgtgaccattcctttaggagttcttgtgtttatcctgtgatctagaacatctcattcctgttcaccatttcagtttattttttgcatattttcgtttcggcactgttgtacctcttgtcctcttctgtgctgcaatgcaagtcacgaagctgtgaatgctactaaaaaaaatgtgataagattctacaatagttactagaatggggtggacggccttagaattttatttcctgagcctgtattaatcgtctcgttgcttgtgggttatatttcgatcctttt

SEQ ID NO: 107319 - DNA, 280 bp, Glycine max
  Clone ID: PAT_MRT3847_67924C.1
taaaaatacaataaatatactaacaaaaaaaataattaaaaaaaataaataaacaaaaatatagaacaacaaataaagacctaaatacacaaaatacttttaaaaatattcaaacatctaacagacttaacaaaattacttttcaaacataatcttatttcatatagaaaatatattctaatattcactataatacaatctatatcactcatatctattataataagctatctaaaaatttctttttactataactatgctctatctgatcttaacattt

SEQ ID NO: 107320 - DNA, 548 bp, Glycine max
  Clone ID: PAT_MRT3847_67925C.1
gggagggttattcttcattggtgcacaatacccgctgccgctgccagccaccgctgtgatctctgatctctggtgcgcccacaccactggctttgcctctctctgatgaccccaccaccgctcttccttttccagcacatttttcggtagtttttcctatcagcgccactaaaagacccgggaagatatgacacacttgttggcagactcaattacctcgatttcaccagaccagacatcccctttgcaggtaagtcaattcctcaatgcctcttgtaatagccattgggatgctgcatggcatcatcagatatatcaagaatgcaccaggtcgaggactccgatatgaagacaaaggcagtgccaaaattggttgttaagatcaccatcagacgggggcatagttattagtatcgtatgaatcgtacgatttgtatcccgattcaaaacaaaaatcatgtccagcgatacaaatcgtagcttgactcatttttaagctgagtgccgaattccgatgattcctctgatcgatgatcggattcgactgc

SEQ ID NO: 107321 - DNA, 829 bp, Glycine max
  unsure (1)..(829): unsure at all n locations
  Clone ID: PAT_MRT3847_67926C.1
gactaacgcgtacgtccagncgtcagtaaagcagcgagaggagaacagaaggggcccgacgaggcaaccaccttaaccggcgtcatccacaaaacgacgtcgtcactgtctctcacaagtcacaagtcttccttcccacttgcaccctctctctctcgccggtcgccgaatctttctccgcatccgcaacctccgccgtatccgcctttgattcttcaaccgatggatcggccggcgaccggacctggcgtggacatgccgatcatgcacgatagcgaccgctacgatttcgttcgcgatatcggctccgggaatttcggcgtcgcaaggcttatgagggataagcagacgcaagagcttgttgctgttaagtatattgaacgcggagataagattgatgaaaatgttaaaagagaaatcattaatcacaggtctctaagacatcctaacattatcaggtttaaggaggtcattttaacacctactcatctggccattgtaatggaatatgcatctggtggagagctatttgagaaaatctgcaatgcagggcattttaatgaggatgaggctcgtttcttctttcaacaactcatatctggggtcagctactgtcatgcaatggaagtgtgtcaccgggacctgaagttggaaaacactttgttggatggaagcccggcacttcatttgaagatatgtgattttggatactccaagtcttcggtgcttcattcacaacctaagtcaactgtgggaactccagcatatattgctccagaagtattgctgaagcaagagtatgatggcaagattgcagatgtctggtcat

SEQ ID NO: 107322 - DNA, 451 bp, Glycine max
  Clone ID: PAT_MRT3847_67927C.1
gcacttaatatcagattgcagatgtctggtcatgtggagtaaccttgtttgtgatgctagtgggatcatatccttttgaagatcctaatgatccaaaggatttccggaagacaattcaggttgatctgatatttaagatatttgcatgttttctttacaagctcctggttgcgtgagcacaacctgttttggttggttccttgcagagggttctcagtgtccagtattccattccagacaatgttcaagtatctcctgagtgtcgccaccttatctcaaggatctttgtttttgaccctgcagaggtaatttctattttctaataaatcacctacttctgcatatatacaattcctgaggagttttgttctgtagatgcatttttatacactaccactactagcctcccacttgaaagtgttggtagaagtttttttccccagttcaagca

SEQ ID NO: 107323 - DNA, 142 bp, Glycine max
  Clone ID: PAT_MRT3847_67928C.1
tttttttttttttgaacttctaattaccatgatggggccctcatgttaacaaaaagctggcaagaggcatcccaaaacaatgaacagactaccaaatcgatacacaggcaagaaggttgggcaacttgacattgcataagtt

SEQ ID NO: 107324 - DNA, 560 bp, Glycine max
  unsure (1)..(560): unsure at all n locations
  Clone ID: PAT_MRT3847_67929C.1
cacgcgtccgaacaccttagccggcgtcatccgcaaaacgacgtcgttctatctctcacaagtcttccttcccacttgcactctctctctctctctctcactccctcactcaccggtcgccgaatctttctccgcatccgcaaccaccaccgccgtatcctcctttgcttcttcaaccgatggatcggccggcgcggacctggcgtggacatgccgatcatgcacgatagcgaccgctacgatttcgttcgggatattggctccgggaatttcggcgtcgcaaggcttatgagggataaacagacgcaagagcttgttgctgtcaagtatattgaacgcggagataagattgatgaaaatgttaaaagagaaatcattaatcacaggtctctaagacatcctaacattatcaggtttaaggaggttattntaacacctactcatctggccattgtaatggaatatgcatctggntggagaactatttgagaaaatctggcatgcaggggcgttttaatgaaggatgaggggctcgtttctttctttcaacaactcatatc

SEQ ID NO: 107325 - DNA, 498 bp, Glycine max
  Clone ID: PAT_MRT3847_6792C.1
cgatctatatccggtcgcgtgggctgtcgcgtgtttcgtcccgttttttcctgtccggttcctgaggcataaaagattttgggatacaaaatcaagctttaacttgcagtgttgaagaccccaacccaaaccgcttttacagagattgggttgacacccacgcccttaatacaagaccccccgcataaatcggcttttctgctggggcctaaaagtgtgcttcccaccagaagccccttgcctccaaaatggggtctccccaaaaggggtccttatcccgccacctgtgtttgaccccccctttccgagcttgatagaggatttcaaccttgtgccagccatagaggtccttattttaacattcatgactgacaaattgtggtatctcttggccgcgtgagagccacaaccccttcaccttaaatgggggctgggttcccatcaccagcgtttttccaaacgcatacttgcgagccagggcccttctcttgagaaatc

SEQ ID NO: 107326 - DNA, 464 bp, Glycine max
  Clone ID: PAT_MRT3847_67930C.1
agtagcattcacagcttcgtgacttgcattgcagcatagaagaggacgaggtacaacaatgttccatcggaaatatgcaaaaaactgaaatggtgaacaggaatgagatgttctagatcacaagataaacgcaagaactcctagaggaatggtaacaaggagtatgtgtacaaaactacaaaagcaggtatatgcaaacaagaatcctggcactaatataactgacaggagacaacaaaaagcctaatgtgtgtatatatatatatataacaagtattcaacaggagaagagggaagggtagttatgatttctcagccaccaagccttctagagagtaagaatcatgttcccttcctcggcagttccaagaagcatacaacatacaaattaacatgatgaactttgtgtatcatccaatcttacaggaaatacgatctccacacatttctttttccatgattaa

SEQ ID NO: 107327 - DNA, 161 bp, Glycine max
  Clone ID: PAT_MRT3847_67931C.1
gcggtttatgcataaatatatgaaggcatccctgtggatatatgaattggaagggctgcgcgtcgactattgagctcgtcttcccgccaattgatacgtgaccggtacctgctggcgtactcacctttccatattttcagtgatttcagagcgtgacaatg

SEQ ID NO: 107328 - DNA, 682 bp, Glycine max
  Clone ID: PAT_MRT3847_67932C.1
caaaatcaagcaacattttgcaagttatatccatttctttatccattacaaatatttcagtacatcaggattacaacactagtaaaagctgatactatacgtcacttgtatccaaatttagatggtatcaactaatataaagtgaatgccctgatcaagacatactacatacagaaatatacaaataagccaccttacatggaatctggtggatcaaatgatgtgatacacaagaaatttggacgtgatccctatactatacaaataggatgcaacattattcatagacaaattgagctcaatacagcactattaatatctatagggtaattgaaaggtgatttggcaacaagcgatctccatgtcttcttttttgggtcatatatttgaatgaacagagttcctgccctcttatgttgtctggaccttcgtgtttctgtaaaatcaacgacacataaatgtgtcactacataaagctccccgtctaacacaacaacaccaaaggacgaattgtaaggagcttttcttggcacacgagactcgtatagccaacgattagaagacatgtcatatctcaaaatctcattggcatcaagcatgaaaagcatggggcatccattatcatcaaccacaacaatcttcccaaccctgaccctctccccattcccccacatatccccaa

SEQ ID NO: 107329 - DNA, 778 bp, Glycine max
  unsure (1)..(778): unsure at all n locations
  Clone ID: PAT_MRT3847_67933C.1
gtcttgtccttaaaacaatgttcaacacctaaacctttccctaagaatatagcaaagagtcttatatcactaagtaagattggttacatatatagattacacaaaaacattcaactaagttaaatactgaagtttaattcagggatgttatttacctgaactccccttaagaactttctctaatgtgcctcttgatctccttcacctctacccaaaactaatatcatgcaatttactattctcaatatcagtgcctctcgatgccttctttatttgtatccaaatcactttagttgattttttgtaatcttttcctcatttcctcatttggtgttaccgatttctcctcacatgtaatccttttgtatgttgtcttttctcgagtagcctcatccattttaatattggtgttactccctcttttttcctcttgtgcctttaaaaccgaaataagaaaggaggttttaggccttctgcagtagcctaaataaaactccccaatataacaaacatgcatgcctacacataccagcacagtctctttttgctcacaaccttacccctgattactgcactttggttttcctgtacgacacggttcgtcgactttcttccagaatcggccaccnacctccagctcatacaccgtgtctaagcgctcaacatctcccacctgataacatcactaaggngaccacaccacaagccagacacaattgcttnataatccagcnnnnnnntgatcnnnacaaacaaaatcnannnntntgaagaanna

SEQ ID NO: 107330 - DNA, 394 bp, Glycine max
  Clone ID: PAT_MRT3847_67934C.1
acctccctactccccccctctggcatgatgtccactccacaagactcccctaaaaccgacgacgaatacatatatccacacctccacacatcttattacaatcctctcctacctatcacccctatataagtaacacactcgatcccctacccaacttacccctacatcatcccccaataaccactctttaatataacacttcctacacaccgtataccctccataatactcactatcaccaacaccaccacccccactttactatacaccccttattcatattatcactcaaaattttccactcctattattattattacccctatcaacttaccccaaatacccacatttccctcctctccccccttcaacccccaactccccaccccccccc

SEQ ID NO: 107331 - DNA, 393 bp, Glycine max
  Clone ID: PAT_MRT3847_67935C.1
caatcaacaaaaatatttttttatgacaacgtccaatgtaataaaccagattcaatcctacgcgatacaaaattaaaattacttttttgtattacaaattggaatacacagactcaggagcctcaaactgtggggacacatcttattctaataaaaaccagatcctcagccaatgtaggcaaattgaattcatcactgacctcaacacattcaaatggaacacaactaaaaacccattcacaaatataattagactaagaaaaaatataaagggaacccttttgtggttttctcgcagccgtacccttttggcgttttctcgcagccgtacctttctgaggttttttcgcagccgtacggacccgtgggcggacccgggggcggacgcgtggg

SEQ ID NO: 107332 - DNA, 350 bp, Glycine max
  Clone ID: PAT_MRT3847_67936C.1
taaaaatgacctattaatcaacctggatttctttttatttaaccaccccgaccttagaatattccaggtactttttggcattggtgggtgaaattagttgggaaggccggttttgtggcagggggcaaaccaagggtagccctttttacaccttcgtggatttcaaaaactggtagccattggtaatggtttcttcaaggtggcatttcaactggtgattgtggctgtgctggcctctctggtgggctttgatgtgtggaacagcatccattgttctgcacattttttcttctgcgatatcttagtgtgactgattgctatgggatacatatcactatatctgtctatta

SEQ ID NO: 107333 - DNA, 389 bp, Glycine max
  Clone ID: PAT_MRT3847_67937C.1
cgaggaaagcagagttggaaggtggctttcaacgacgcttcaatttcatcgacattgagaccccatcacgtggagcaagtgttgatgaacaccctcgacgatgccaagctagctttgaggttcttcaactttctcggtctgcacaaaaacatgaaccactccacaacctccttcgccatcatggtccacgcgctcgttcactccaggctcttctggcccgcgaattccctcttgcacacccttctccttcgtgggtcccacccaaaatgcgttttttccctctttctacactctcacaagcgatgtaagttctcgtccactctgggtttcgatttgttggttcagaattacgtgctgagttcaagagtttttgatgctgtggtcactgt

SEQ ID NO: 107334 - DNA, 878 bp, Glycine max
  Clone ID: PAT_MRT3847_67938C.1
ctgcatttcccatgggtaaaattgatcagacccggatgtggaaggttggtgagcgtgtccgttctacaaggccagctggtgatctaggtccattatacccatttactgctggggtctacgtggcattgatgatggcccagattgagatcctgaggaagaaggggcattcttactctgaaattattaacgagagtgtcattgagtctgttgattctttgaatcctttcatgcatgctcgtggtgtttcattcatggttgataactgttcaaccacggcaaggttgggttcaaggaaatgggctccccgatttgattacatcctaacccagcaggccttggtggctgtggacaatggagcacctatcaaccaggacctaatcagtaacttcctgtcagaccaagtgcatggagccattgaagtttgtgctcaactgagacctacagtagacatttctgtgccaccagatgcagactttgtccgtcccgagttgcgtcagtctagcaattagaacttgaaccaaattcttgagcctattcctttttggaatgcttagaatagcagctgtcctgttggtttgaattttgttcatatggttgagtgctgtgctgtggaagtctgtattatcactatgtagtactgagattttaataatggggaatgttgcttaatgtgaattagaaatgagttaataagacaagtgaagttcattactaggtttcaaaaaaaaaaaaaaaaaaaaaaaaaaaaaaaaaaaaaagaaataaaacaaaaaaaaaaaaaaaaaacaaaaaaaaaaaaataaaaaaaatataaagataaaaaaaaagaaaaaaaaaaataaaaaattatggggggggccgttttaagggatccaagt

SEQ ID NO: 107335 - DNA, 403 bp, Glycine max
  Clone ID: PAT_MRT3847_67939C.1
aagaataactcactctatccttctttacatcagtacacttttgttctatgagagttgaaaatgctgctagctgagaagctttagtgagtggatcctaaattcttgtagataacagtgccgttgatattattgtactgatcattatacttcttgagtgtataggcttacgctacatgaatcatggaaaatgtagattgagtataacattggagcttactagcatcctgttgcaacagagctacatctggatgtctgagaggctataaggagttgatagtcctatgaatagaattgaaaatgcctgttcctaagggagaagagcagattctgttatctaaaacagaaaaggcacgtgaggtttcgaaatcaccctcatggaattagaacccatattcagtagatg

SEQ ID NO: 107336 - DNA, 332 bp, Glycine max
  Clone ID: PAT_MRT3847_6793C.1
cgactatgtatttaccttggtctttatagaatgcgggtagagtcttatttgtgactggatgggtttttacaagaccatgtgttcaattgcccaatgcccagactgcactaaccgcctgcactgcaatgtattagcgttccttcattaccatactacgcatcacatgggcaacttgcttacccatgcgttgcagttaaatcatgtaccctcttgatattacgtggtaccaactcttcgagcattatcagctctttattccgacttctatggattcaacaagttacacagaatgtgaagttgcctatgacattccacccatgcttcaatgctac

SEQ ID NO: 107337 - DNA, 649 bp, Glycine max
  Clone ID: PAT_MRT3847_67940C.1
ctggacgaagacgacagaaaacgatcccaaacaaaacacaagcaaatcctaaaaagttgattgagatatatagaaactagcttcaatttcacaaaatgaagaaagtgtttgtcacatttttagctgtgctagttgtatttgttcttacagcgaaagcttcagaggcacgactaccagttaaaacaaattcagcatcaaatgactacaattgttcacaagtctataacctgttagtttcgtgcgtagattacatgattggtggagatgatggtgccccttcaggtgtttgttgccaaagtgttaatgcagtgaaagcatcagcaccaacacaaattcaacgaatggctgcatgtaagtgctttttcgacgtagcaactcgccttccttccttgctcgaaaacaaggccaattcacttcctaaattatgtggtgttgatttgggttttatcatgagcaagcagaacaccaattgtaacaatgttcctgtaagctcaaggcaagggagagattagtacaataaaattgatgcatgtttggaagtttctttcttcttgaaaaaagaaaataaaatggtttgttgaatatacaagcgtttcatgttggaaataataatgagtggatattttctaaaaaaaaaaaaaaaaaaaac

SEQ ID NO: 107338 - DNA, 659 bp, Glycine max
  unsure (1)..(659): unsure at all n locations
  Clone ID: PAT_MRT3847_67941C.1
ccacgcgtccgggcttatccactccttgagttacccactacaccaaccaccgtctcttcttcttgttcttcaggttcaaatttcaggtacaggttaggaagcaagagttgtcgtacgataattgggcaaatgggaaaagaaatcaaaggttcaacttcaacagcttcaaatttgacgagtaatatcatcacggaacataattctattttgtggccaccacgttttgatggcaaaaatttcactgagtggaaggagcgtatgagaacattcatacaatctgttaacttcaagctttggcttgtgattaaaaatggaccaaacattccaacaaagctaatatacaagaaaagtgaagatgaatacgatgaatatgaatacaatgaagaagacatgaagaatttggaattagaggccaaagcaagacatattttatattgtaccttgtatgcagatgcccctaaaatattttcagagggccacaaaacagccaaacaaatttgggacgagcttgacagggaaatgancagggccaactctccaactccctcaccagaactcatcagccactatccaagctttccattcaattatccagatctctactttntagatgaaacaggggaatcgatggacanatttctgaagttttgcgtgcccct

SEQ ID NO: 107339 - DNA, 713 bp, Glycine max
  Clone ID: PAT_MRT3847_67942C.1
gaaagtcttaagtgtctgttttggtcgggcgccttaaactcaaagctgctctaaggtgcggcttatttatcgagcaaaacgctgccaaatggacagcactgctcactcagttgaattgaatctactggcttgaatgagggacattctcaacttatgtcatgctactcggaaatatctagctgatattcgctcttggaatctgaccaagtcacccccattacattccttcctataagtctttgcgaaagaaaaaaagactgaaaaaagttgccaacatgtgacattcaaaggtttcaacacttggctatcgtggaactaatgcctcttgtgtcaacaaattcggaaactgacacctactacatgcttacggccttaatagaccacacatcttgtcagattaaacatcacgcagctctatcttgtgacacgctctcttgcttttattgaggcatgattgccactacaattgccttatttaattatgagttaatttcattacttactttttaaattactgatcagaggttagaatagaatgaaagggtcattgttggcatggaactaccaatactgcataatcacatatatgaaagcccttaccttatgttacaaaataatccattttgatcaacattacccttaatgccaataaccatggctttaacaaaataagatgatggtttaaatttcctgcgttttggcactttgattaa

SEQ ID NO: 107340 - DNA, 358 bp, Glycine max
  Clone ID: PAT_MRT3847_67943C.1
aggacaaaaggaaaaggcccccaattcaatttaagggggccctggaactaaaaattttagggggagaagggcccatatggaaaaatttgggaagatcccttccaccttggctttttttttttggccctaaaaacattgagaatgctaaaaatgtttcccccaagttccattccaacttttagcccttgggttagtacaacaacctttacgaacaaaaatatttacttgccaaagttgttttgcctccaattgaagacgggaagaaaggtcccctttgaatagcctccccggtaggatttccaaaagcaggctttttcaagtacttgtgagccaattggactcttttgacatttttttg

SEQ ID NO: 107341 - DNA, 411 bp, Glycine max
  unsure (1)..(411): unsure at all n locations
  Clone ID: PAT_MRT3847_67944C.1
caaacttcttatcgaaattttttttttccaaactcactgcgttagtcgtcgacgtcgaccgccggatcgacctccattcgccgtcttccaatcgctctcagttcgaccgtcgccgccggcatccaattcggttaggccatgcagctctctcttttgacgccctacgttcaggtatattaaggttctaatagaaaaaaggttgatcagcataaagatggagctcactattacacaacctgatgattggcatcttcacctccgtgatggttcccttcttcaagcagttctccctcacagtgcanaacaatttggaagggccatagtgatgccaaatttgaaaccacccatcactaccacgtncgctgctggtgcttatcgagagtccattttgaaaagcaatacctaaagata

SEQ ID NO: 107342 - DNA, 1390 bp, Glycine max
  Clone ID: PAT_MRT3847_67945C.1
ggctcgagtcgtcatctgggttttccttcggaggaacatccactgtttctgttacttctgccagttcaccctcgatgtttttatcaacctccagtgcatcaactcctcaattctcattcactccggcagcagcctctacctccacgcagcctgcttttggaagtcctaatcctgccttcgcattcggttcagctcctgttaataatggtgagatgagtatggaggacagtatggctgaggatacaggtctagcaactccacctgcgactgctgtatacagtcagcaacctgccccagttcaatcaaattttttatttggagcatcgactccatcaggaggcagtcctttccagtttggtagtcaacagaatattgctccactgaacccgacccggttctactttatttggatctagttggcagcccagcaagtctccatttggttccacatttagtacatcattgtcatctgggtttttgttcggaacatccactgcttctgttacttctgccagttcaccctcaatgtttttatcaacctccagtgcatcaattcctcaattctcattcactccggcagcagcagcctctacctccacacaacctgcttttgtaagtcctaatcctgccttcacattcggttcagctactgttaataatggtcagatgagtatggaggacagtatggctgaggatacaggtcaagcaactccacctgcgacttctgtatatagtcagcaacctgccccagttcaatcaaattttgtatttggagcatcaactccatcaggaggcagtcctttccagtttggtagtcaacagaatattgctccacagaacccttctccttttcaggcttctggcagtctaggagggagtttctcattgggcacaggtggaggtgacaaatctgctagaagaattgtgaaagttaaacataaaccacgcaagaagtaggacctaaagttatgaaaatggttaccttgtatcatgctgcaggctaatcttatagtgcaacaaataaataagctctgaagagtgattgcaggatattactgctcacatggcagtctggacaagtggggtgctattgctaatcagcatatgcaaacttgtcagtcttcttttcccttccatattcaatagaatacaaggctgaagttttaccaattttgtattagtatgatatgatgaaacatgacgtcctgtactaccagtaatggttttaggtcacagtccatgatttggccagttgtgatgatatgatatttcacaaagatcgctgtatccttgttacttgtaatataaccggaattagaatcaatttatagcttagatggttgtaactatacaaatccagtgagcgttctgtgaaatgattataacggat

SEQ ID NO: 107343 - DNA, 410 bp, Glycine max
  Clone ID: PAT_MRT3847_67946C.1
gctgggcgtcctgctcgaggtaagttacagtcctcaaacgtcatttttatacagtaggagatgctacgccgccttgaataacgctgcatgtgaaagctgtactgtcttgaccgaggattgtgtagtcacatcctctttgatcagcactacctcttgtattacaccaaacacacctacaccacggacatcttatgtaaacatcaactctgctttataccctggggggcctgctgtgcctacttagtctctccaacgtataaggatagtggacacatgtgatatgactggaggaccacaagatactcctggctactgtgttgcgtctggggcacaggctttttgcggagaaggctagctgatcactgctagtatattacaaacttgtgactgggataccagctgaatagagg

SEQ ID NO: 107344 - DNA, 225 bp, Glycine max
  Clone ID: PAT_MRT3847_67947C.1
gaccaacgccaaagccgtccactatctctcttctgcatgatctgaatcctgaatgcatgagcgagatcttgcacggtcatacccgtcaatgcagttaccagccgggcctcatgcactgggaggtgatctgcgacgagcacggcatcgatcccacgggcgagcgcatctagggatgcaacattacgatcccactcgtgcggatcaatgtgtattacatcgaggcct

SEQ ID NO: 107345 - DNA, 190 bp, Glycine max
  Clone ID: PAT_MRT3847_67948C.1
aagggcaaccatgtactagtctctcaccgtgtgagaccacagcatgagaacaaacaggtgcagaaacagcaacagcctatgaatatgttatctccagaagctggttcatccagtgttgagggtgcatacaaggactcatccacatctaaacacgggaggagaactacgacgcatacgattgcaactccga

SEQ ID NO: 107346 - DNA, 453 bp, Glycine max
  Clone ID: PAT_MRT3847_67949C.1
tgagatactgaaagcacaatttttacctttgttctcactacaatgatatgaaaacgttgagaaggtgtgagagattttgtaattgttacggcatccatatcaggaaattaacagttatttctgaggccaaacctgagtcctccaaagttgaaaatgttgttcacatagatcgtgtgtcaaatttgcactatcttttgcagttatgtgcgaaaacaagatcatccatgggaggaagagcatgccatgctcagattattcgcatcggcttggaaatggacatattaacgtcaaatatgctgattaacatgtactccaaatgctctttagttgacagtgctcgcaaaaagttcaatgaaatgccagtgaaaagcttagtttcgtggaatacagtgattggaagcacttacccagaatgcaaaggatcgggaagctctaaaactcttaattcaaatg

SEQ ID NO: 107347 - DNA, 772 bp, Glycine max
  unsure (1)..(772): unsure at all n locations
  Clone ID: PAT_MRT3847_6794C.1
ggggaatcaagagaaaccactagaatatgaggcacaatttgtccgtgctaaagcaccaaaagggctgattgaacttgtcaatggcaatctatgaagcacggacacttcagtcccttgccgtgtccggtgtccgacacgcgtccgtgtcagtgtctgaccgacacgacacccgtactacgttctatatttgggacattacaggtgtccacgtgtccgtgtctgtgtcgtgtccggtgtccgtgtcggtgttggtgcttcatagatggcaatactgacttaggttgtgcttaaggtctatttgttcattgctgttactcttgatgaacactaattatgtgcctggtgcagctgaagatttcttcgacaagtctcttgccaagcagtattgtgatggtatcctcccgttcatgaggtactggagcaggcatccttcaacaccgaattgatgtttggttttgtaggtactgctggtctatcatatgtggaattcctgcataaaatagggaactatccattggcaaaagaggttntacataacgtgtacaaggtgctactgaagtaaaaaatgctggcagaccatacttaggagcgggtaacatgagcatggaagaattaattgtagggtccttgtgtgctttaagacagcttgaagtacttatggggtaggcttaatatcaattntgtttggttttccttaccataccacaaccttnctttnttatgttgccttaaccatactacagtactgtaatctattatgtaacaacctgat

SEQ ID NO: 107348 - DNA, 605 bp, Glycine max
  Clone ID: PAT_MRT3847_67950C.1
catgtactatccataaaaaagaaaatccttaccaaaattgcaagattacaaaatcatataatattgtaaaaccaaaaaaaataaaaataacacaagtagggggcaccaaactagcaaacaccaccaaccaatctatactacaaattacaaatgaacaacacatggatgcacccacaaaaaagaaagaaaaaattatgtctcctcgaatggttctctgcacccctttcattcatccgttcctcatctcactgttttcccctcttccaagaaggtggattttgtcttcaccattcatatagaaataacaatttacacggccaaatgcaaatatttgacttcaatccagggattaccacaaacctctcattatgcgtaagtgtatcaatctgacaaacaacagaaagcgaagctgaaacttgcacatatttgtacaaggagcaacaagttgatgcttgactttacaatttcaggtggacaattcttcacattatccgaatgggttccctcctgtaggaaatgagttagaggtggggagtgtttgataacctaccgatcagctgctgatttggatttgacaagccaaaaacagctcctttggttaccaa

SEQ ID NO: 107349 - DNA, 482 bp, Glycine max
  unsure (1)..(482): unsure at all n locations
  Clone ID: PAT_MRT3847_67951C.1
cttttggaactttccatgggaaattcaaacatacccaagtcatttttcccaaaagacttttacaccatcgcttgatgaactcatcggcgaaccctatttcaccaggttttcttctgaatgatgaatcaaagtgaggtaaccaggtaagtgaccaccatcaacaaagacacttatagatgggttcctctatgcactgatgcttttgaaaaactcgtttacaatgcagtcataaatttctagtttaactagttttttgggggcatattagaagattgttaaaaagctattctattcaattgcattttcaaaagagagtataaatctggaaaaaaattgctaggcatagaaacttgagttcaaatcaagtaacatggtacattagcaaattgaaaatgcattttacagctattggttccaactntgcttacttcaactcttcctttaatagagnttgtggtatgtatgtattcattctgagaaat

SEQ ID NO: 107350 - DNA, 138 bp, Glycine max
  Clone ID: PAT_MRT3847_67952C.1
ggttgtataagggcccccaaaaaaaaaaggggaggggggaccagcggcataacgcaactcgggattcccaccttattccggaataccaaccacctattaccacccgaacaaaggacaacctcaagaccaaccgagggg

SEQ ID NO: 107351 - DNA, 347 bp, Glycine max
  unsure (1)..(347): unsure at all n locations
  Clone ID: PAT_MRT3847_67953C.1
nnaantaanantnaacgtcgcatgcacgcgtacgtaagctcggaattcggctcgagggttcggtcagctgtggaaaggaaacctcattgccaccatgaacttctccggcaagtaccaagtgcagagccaagagaactttgagcccttcatgaaggcgatgggtctgcctgaggacctcatccagaaagggaaggacatcaagggggtgtcagaaatcgtgcatgaagggaagaaagtcaaactcaccatcacctatgggtccaaggtgatccacaatgagttcaccttgggggaggagtgcgaactggagaccatgactggggaaaaggtcaaggcagtggttaaga

SEQ ID NO: 107352 - DNA, 804 bp, Glycine max
  Clone ID: PAT_MRT3847_67954C.1
cacacgcttctgcggaacccgggagtacgagcatttgggagccgggcaatcgtgtaacgcagtcgtattggactggaataggcacagagagaagatccaattccaatcccaaccgaacaaactagaaattagggttcatatcccatttcctcagatttcatctcagatttcgcattggtttgcgttgcgtggttggttttgcggtatcgaagaagaagatggggaaacaggttgtgccggtgaaatcagtgatctacgcgctttcccctttccagcaaaagattatgccgggtctctggaaggacttgcccacgaagattcaccacaaggtctccgagaattggatcagcgccactcttttgctcggtcccctcgtcggcacctacgcgtatgttcaaaactacctggaaaaggagaagctggctcacaggtactgagctcttgcaagagctgattggataaccttctagtttgttgccttgatcttgtttagccacccaataatgtgacactgttgaaacttgctctaccgtttggttttgatatgtctgagtttgagcgttttcaactttgacagtgtttattgatggtatacttcattaatccatattactttatagtttatattttgaaagacaatttatgtgttgtcaataatgccagagttagtttggcatgttaaactcaagaatgcttgagttaattttatcattttttaattcaaaacaagcattcttaattttcgcccaaaaaaaaaaaaaaaccgtggtggggtccggatgaaaaaaaaaaaattcctgcggc

SEQ ID NO: 107353 - DNA, 176 bp, Glycine max
  unsure (1)..(176): unsure at all n locations
  Clone ID: PAT_MRT3847_67955C.1
tgntttngtggagtcngagcgagctgataacnncacttgggcacnacnaaagctaagaggattgantgtcaaagaggatgacatnccccaagtgatntgtnactgctcggagacagtgctntgatgagtgcagtgcangtggtctttccgagctcttctaatttgttatnncgtct

SEQ ID NO: 107354 - DNA, 646 bp, Glycine max
  Clone ID: PAT_MRT3847_67956C.1
ccacgcgtccggcggaacgcagtcgtactggactggaataggcacagagagaagatccgattccaatctcaaccgaacaaactagaaattagggttcatatctcatttcctctgatttcatctcagatttcgccttcgttcgtatcgaagaagaagaagatggggaaacagattgtgccggtgaaatcagtgatctacgcgctctcccctttccagcagaagataatgccgggtctctggaaggacttgcccacaaagattcaccacaaggtctccgagaattggatcagcgccactctcttgcttggtcccctcgtcggaacctacacgtatgttcagaactacctggaaaaggagaagctgtctcacaggtactgaactcatgcaagagctgattggataaccttctagtttgttgccttgatcttgtttagccacccaataatgtgacactgttgaaacttgctctaccgtttggttttgagatgtctgagtttgagctttttaaacttcgacagtgtttattgatggtctatttcattaatccatattactttgatagacaaatttatgtgttgtcagtaatgccagggttagttttgcatgttaaactctagaatggttgagttacttttatcgaaggatc

SEQ ID NO: 107355 - DNA, 1684 bp, Glycine max
  Clone ID: PAT_MRT3847_67957C.1
cccaccgtccgcctatgcgatcgcccacgcgtccgcttcaccagccacagaggactgaccacgcttccgcttccgcttccacacacacacaataacagattaggagcgcactcaccacaccataccaattcgcttgaatggcgttccctctctcttcctcctccttccacctcaccgtcgctcgaaaccgaatcacgtgcttctcgaagaagcaccaacgccacgtcatcgcaaaggtcacggtttgcaattgcaataccaccaccacgcgtgccacgccagcgaggagtgttgtggaaaagatagtaaagcggttgaggagtgtggttgtggttccgatcgtgcttgcgtcgtttcctataagcgctttcgtggcgccgttggttgattacgtgacgtctcctggtgtcgccgaagcggttctgtattcgccggacacgaaggttccgagaacgggggaagttgctctcaggagagccatccctgccaatgccaacatgaaggctatacaggacactcttgaagatatattttacctgttgaggattccgcagagaaaaccttatggaacaatggaggggaatgtgaagaaagctttgaagatagcagtagatgaaaaggattctatattggctagtatacctgcagaactgaaggaaaagggctctttggtacatgcatctctaatagagggaaaggggggcttgcaaactctccttcagtctataaaggaacaggatgcagataaagtatctgtgagccttacatctacactggatactgtagcagagctagagttgttacaggcaccgggattatcatttttgttgccagagcagtatgcacaacaatatccacggctttcagggagaggaactgttgagttcaccattgagaaaggagatggttcaacattttctcctgttggtggagagcagaaaaatactgccaccgttcaggttgttatagatggatactcagctccattaactgcagggaattttgcaaaactggtgatggatggagcctataatggcgcaaagctcaattgtatcaaccaagctgttatttcagataatggagttgataagaacactggttatagtgttcccttggaaataatgccctctggacaatttgagcccctttacaaaacaacattaagtgtgcaggatggagaactgccggttcttccactatctgtttatggggcacttgctatggctcatagcgaagcctcggaggagtattcatccccttatcagtttttcttctatctctatgataaacgaagtgctggtttgggagggatatcatttgacgaaggacaattttcagtttttggatacacaaccaccgggagagacattctaccccagataaaaactggtgatgttattcgttctgcaaagcttattgaaggccaagatcgtcttgtattgcccaaggagagttgagtagattccggggcggtgttacccaagtaggaaaaaatcattcattctttttaatataattgtggacggcatcagcctgattttcttgttgcaggttgtgttgtaaattactaaattataaggaaattataaagaaatgagttgaaatttctattcattaaatatccaatggaacggttgagagaaattctccacaaagggatccctttcactcgagactagttctc

SEQ ID NO: 107356 - DNA, 339 bp, Glycine max
  Clone ID: PAT_MRT3847_67958C.1
aaacaaaaaaatttggctcaaaaaattctggcgggccagttttttgcatagaaaaaaaaccccccttttgggaagggggggggcaatttttagggggggccccccaaccatttcgtaattgggttcaaaaaaggaaaaatgggcaaggggataagcattttaaaatggggcaaactcggccacccctaggggttttcaatcccaaggcgaatcagtttttagcctttccctaaccccccccaatattatatttggggaagctctagcatacaaaacttagggccccccttcctcagggggtttataaccatcatactacctggtaaactccatcccggg

SEQ ID NO: 107357 - DNA, 781 bp, Glycine max
  unsure (1)..(781): unsure at all n locations
  Clone ID: PAT_MRT3847_67959C.1
ggctatacaggacactcttgaagatatattttacctgttgaggattccgcagagaaaaccttatggaacaatggaggggaatgtgaagaaagctttgaaggcattcaataatttatttatttatatatttgtttttttttatccttttttctttgctgtatttgtctgagaaacaaaatactgattattaggtgatgtaatgatgttgcatctctaaaagtttgctagatttgtttttcattttattgaatgacaaataggtcaaatggtttaaatttcatacatgcatggaacttggtggtttttccatcctccatcacaccaacaatgccttgctgcatctattggggcatataacttgagtactttagaacttcacattttgccaatggatttttatagtatttgatgcacctcactagaatatcttcctgcatctttaacattgtatttggtctgctaatagcatcttgttgtgtaatattcactagaggactttgaattttgataatttccttccgcatcagatagcagtagatgaaaaggattctatattggctagtatacctgcagaactgaaggaaaagggctctttggtacatgcatctctaatagagggaaaggggggcttgcaaactctccttcagtctataaaggaacaggatgcagataaagtatctgtgagccttacatctacactggatactgtagcagagctagnagttgntacaggcaccgggattatcattttttgttgccagaagcagtatgcacaacaata

SEQ ID NO: 107358 - DNA, 616 bp, Glycine max
  unsure (1)..(616): unsure at all n locations
  Clone ID: PAT_MRT3847_6795C.1
ggctcgagattttcttttatttcattttcatctattatctttttttttattattacatcatttatcatatatatttattatttttcttttctttttatctctttttccacaacttcagtcgcatagaataaatatttacaatttttataataaatttggagacgttccacttactgaatattaattttagggtgaacttgtctctacttttcccaaatcacatataaaaatttattcagaatgtcaccttaaaaaaatatttacatgtataacttttaataataataataataataataataataataataataataataataataataataataataataataggaatactatttggttatatcataaattaaaaattatttttttaacaaaatatgaatcacaattatacgtttaaagttttaataatgatatttagatacagaaaataaaatgtattagattggaattttaaaagattattttggtatataaaaaaaaatcttgaaaattntaaaagaatttataaaaatataataaactcttaagatttttatgattagggatttgtagttnatattntaatgaatttataatatttgaacaaatattatga

SEQ ID NO: 107359 - DNA, 409 bp, Glycine max
  Clone ID: PAT_MRT3847_67960C.1
tcggttgataacttaattagatgacacgaatatgacaagccttactttaggggatctaaattgagaagcttaatatctgtctataatgtcaccattactgtcggcattgacacaactagtgcgactctgcactttaaaaagttagcagattgtgactttctcacatagaaactttaaacagatgtctaatgactagcgggaggatcctgaagacatggatagcttatggacacaaataaattatgcttaatgcaataatctggaaacgcaagaggctactcttgtcaatcatttgaatgtggtacaagaattgactttgcacagctccatatgaagctctgacaattgagaaggaaagctctctctcgtcttgaatggctgctaaaagctgatgtgcctgccatagcac

SEQ ID NO: 107360 - DNA, 290 bp, Glycine max
  Clone ID: PAT_MRT3847_67961C.1
caaaccagaaatcactaaatttcctaccgtggctccattcctccagacttagatatcgagggacaaatccacccccgaagatacaaaagtgttgctcggaagcaaaacccccgccttaaatggcacccaattaactcacaactcaaaaaggcagcacggtcctctagctgaagaaccgcataggggacgccaggcacgcttaatacccaacaaaggcttcccagccagcccttctctgtacccacgattagtccatcctagccaacccataaactagtgcgcggacaagg

SEQ ID NO: 107361 - DNA, 520 bp, Glycine max
  Clone ID: PAT_MRT3847_67962C.1
tgtaattccacccctaatttgttccggtctcctagggttctattctaacaaagatggcagcgatactcagtgaggacctgatagtggaaattctaacatgggttccagtgaaatctctgatgcgtttcaggtgcgtttccaagtcttggaattccctcatcttccatcccgcattcgtcaaattgcaccttcaacatcaaagggcttccaaaaacacccacctcctattaaggtgccgccgagatagcatgcttaatctgtctgacgaattcatcggaccctgttctattcacggtttacttgagaacccatcatccactgttgatgatgcttgccaccaattacaccccggatactttttcataggttcctgcaatggcttggtttccttgctttatcattctcgttctcttgttagacatggatccatagaataccgggtccggttttggaacccggcccaaggatcatgtccctaaatttgtctcacttaactttccattcatcccaggatcatgat

SEQ ID NO: 107362 - DNA, 462 bp, Glycine max
  unsure (1)..(462): unsure at all n locations
  Clone ID: PAT_MRT3847_67963C.1
tcgagccggcctcgagccggcttcgagatatttttgacccaaggaacggttctttcgaaccttctttaatttaagcaattccaattgttaggaatgaggaattcttagtcgtacccagtacaagattaatgggggctacaacntnncaaatcnnataagnntgagggattggaaccctaggacangnntatcttacnncaaatacctacncaccnnncaaaattctnnatgttagtgccgtacccatctccnnnatatgaattgtttaattttaacctgtacccaaaataataaaaagaaagggtaccaattctaagttcttaagtttgtttttaaacaaatagtgctgaaagtgcattatttgcaaggtagccctaaagaatgtcaagcatatcccctctgttattaatttggcccattntgtttcacttnggaaataganaattcattctttcgattgtt

SEQ ID NO: 107363 - DNA, 2057 bp, Glycine max
  Clone ID: PAT_MRT3847_67964C.1
gcatcatatcattggaagtgtaatagcactccacaacttgattaacaacaaggtgagatacactcccctaaattttgctgcatgtatcattgatgtttgctgattactttatattttggatttgttatcatattatgaaaataacagttttgcaaggttggagaaaaaaacttaatcctccatttgtatattcaagtatagtattgagtaagctaggcacttgatgaactcattttttgcttacacctaactgagtacatgggttatatccacataaatgaaataagcttatcaagtgagagatgttgctattaaattgctgatttactgtgattcatgttttttaatactggaatgatttcagatgcttaacaaggaacatgaacgggcagaagactcgaaaacagttacagtgccaaggagagcaaatctaatgccatcattgatcatcttcttcgagattgtgatttagttggaaggtttctccaggcagataaacattgtattctttcagtggaaagcagtcagcacacagtacctgctgctggaaaacggggaacacgtgtaggaaacattggacatattactcgaattttcaataaacttctccacttggctcataaccaaagccacattctggcatgtctccaggagaatagtgagtggaatgagtggcaagctacagttcttcagcagcgtaatgtggtcgagaatgttcaccgttgggcttgtggacgtccaactgcattacaagataggatgagggatagtgatgatgaagaccttcatgacagagactatgatgttgcagctttagcaaataatttaagccaggcttttagatacaaaatttatggaaatgacaataatgaagaggaacatggtggtcttgatcgagatgatgaggatgtctactttgacgatgattctgctgaagtagtcatatcatcccttagacttggtgatgatcaagggagtaatttgtttacaaattccaactggtttgccttccaagatgacagaattggtgatgcacctgggggcacatcatcctctgagatgatggatgagataaaattgaatgcagttgcaaatagtggtagcaacagtagtgatgatgaggtagtggttggagaggatgaagaattggctgacagcaaaaatactgtgaatggtacatctagcttaagtgcagacttctttagtggattgactgccagtgattccatgaatgggggcactttaaactttgaaagtgagaagacaagtccttcaaatgatatgggatttttcaggtttgaggcaccagacaatgaggacttgtttggagataggcctttacctgattgggttggatggggtgaaccatccgaaatgcaagatgctggttcaagtaggaacccctttctggataatgacgagtctggtaggcctcaagtaggtagtcctaatctgagttctccttcaaatggggaatccataccttcaaatgggtcgccaactactagcgattcaatcaatgggagcagtgactccagtccaacatctgtagcggtaccctcactatttgaagaggatgtggaatttgtaggtgtagaattagaaggtactgagaaggcaatggaccaggctctcaaagaagggatagttggggaagcaggaccattgaaaagaaacgtagtctcaaaagttccagaaaaggaaaattctgaagaaggcagtcctggtgtgaaggagttcaacgatgcaaattactggagggttgacaacgaggttgctgttctagagtgatggacaaattggtaaatcttgcttccattgtttgtatgtataaaatttggatcaacgccaaggttatgcaacaaattagtgtacagtatttttgtttccattatgttctgtttctgttgtttcatcattgttagatattaaggttgtttattaatttgaagttttgcctctacctgcaagagatttaaagggaattcccacatttattgaatatttagtctgctcttcattctcaaaaaaaaaaaaaaaaaaaaaaaaaaggaaaa

SEQ ID NO: 107364 - DNA, 239 bp, Glycine max
  Clone ID: PAT_MRT3847_67965C.1
gtggtctgccacaaattgcttagagaaatttggccatacataatcacatttgatagctgacagttttatcggttatatagatcataagctggaatgccgtagaaattaaactggccttaccttgcttgcagaaagcactgagctaatatggggcggggctggttgggggctggccaccttttgcaggctgaaaatattatatatagataatattgatacaaatggtcttgttctgccac

SEQ ID NO: 107365 - DNA, 397 bp, Glycine max
  unsure (1)..(397): unsure at all n locations
  Clone ID: PAT_MRT3847_67966C.1
cgccaccaaatccatatttctttccaaacaaaataagctacagcttatcataaccancaaacacaccagcacctacaacagcacgcaatatattcgcaccagcacctttaaaaagtaacttagcaccctcatttacaacaattatttaaaatacatacaaagagctcttatacttcacagcttctccaaaaatcatcatcattcttcttcgaacagtatcaagtggataaaaagccaaaccancaccaattgtgattgcccatccgcagaaaaaactagcagataaactatggctcaacccaccaaccaaaactactaagttgagagaatcatacattccaaattaaagaccacgatacactataatttcgacacatgaaatgttgaagcactgata

SEQ ID NO: 107366 - DNA, 643 bp, Glycine max
  unsure (1)..(643): unsure at all n locations
  Clone ID: PAT_MRT3847_67967C.1
gacatattgctgtgaggggagcaattatccaccggaaatacttccggaattcccttttgtgacccacgcgtccggcagcatgtggcattttacctttgcctaatgtcccgttcttctgggttttatttcgcacttattctcactggagagccctgcagggaagtgagaaattgctccaactagtctcagatggcaacaagacttcaaacacttacacacaaactgagcggaagaactctaaaagtcaaagtcatagttcgaatgaaccctgttgggtgttgaagccctccaaagaactagataatcttgtcggtctagaagatggtcgagacggtcttagtcaacatgccatcgtaaacatttgcaagatctatgacttgaacaccaaagatgttataaaataccagaagtctattttttagtcagttttgtaatgcaataagttttggaattttctattcaatccacttccttcacattttcataaatgttaacccatatttttttgttgttattaacttatttatcaatttatgctacttgtgaatatctttgtttttcgaatattgtaataagcattttttttcataatttacttaattgtacgattttgatccaactaaaaaaaaaaaaaaanaaaaag

SEQ ID NO: 107367 - DNA, 714 bp, Glycine max
  Clone ID: PAT_MRT3847_67968C.1
cgggctcgacccacgcgtccggcagagtatcttctaagctccttgttcggctcgagctcgagctctgcgtgtcgctcgtctccgattccaccctccgagttgactcagtgcgccatggacgaccaagaacaacaccgacaacctcaacccaacagcaacaacggttccaacgccgacccttttctcctcaactacagcacctccgatctccgaaccgcttcagagtttctcgccacgtggctccctttcctctcacgagatctctgcactcgatgcaccctgtccctctccgatcgcatccgctccatcgacccaggtgaagcgcctcaaaacgaaatccccagtgaccaaaacgacgtcgacgtggaggataactgcgacaactgcgacgcgcattctctcgggagttggaaggacggggcggaggtgaataactccaatgtggagactccgagccagaggatttcatgggccgacatggcccaagaagatgacgagttcggcgacgaagaagacagcaacaatggcgggaattttgcggtgggtgattcgaatgctttctcttatgtggctaaggttgtggctgagaagcctactctggcgagggagcagagggagtacattagggtcatgaatgttgagcgaaagaaggactttatctgctttgagaggggttaacgggaagcttgtgaacattcttgaagggcttgagct

SEQ ID NO: 107368 - DNA, 212 bp, Glycine max
  Clone ID: PAT_MRT3847_67969C.1
acatttacttttgcgagaagacgacaacagggggggccgagtgcatagacaactgcaggccgccacaacccccgcgagaacagatgggacacggaaaggaaggcgacggaaccggtgcacgaagctagaaagacacacagatcggaacgagacacaagaagacgcacagaaggctcagcggaagcagaaaaacacgacccgaaggacacccg

SEQ ID NO: 107369 - DNA, 323 bp, Glycine max
  Clone ID: PAT_MRT3847_6796C.1
tccggttaaatacacgaaaatttctatttagtcactctctaactgagaaagtgcttgcaagagagaaacaagaggggcgcggtgaccacgctcaaagtgaaagtgaatatacaaaatgattattgcatttgcatgatcaggaaccaccccataagctttttactgcatttagattctgagggagaatgatccaaagtctcttctgtttgttgtggttgtaaacagagagatatcaatttaactaaggagtgtcattttagattcagatattccaaatcacaccgttggagttcactttgtgcttgttgatcattgtgattctt

SEQ ID NO: 107370 - DNA, 525 bp, Glycine max
  Clone ID: PAT_MRT3847_67970C.1
ccacgcgtccggggtaatctctatatacttcaaggtacaacatgtgttgaggatggtctatttgttgttgcatcaagatcaaataagaacatacctgacttaactcaattgtggcacacgaggctaggtcatatgagtgaaaaaggtatgatgatacttcaaaaacagcagctgttgggaaatcaaaaactggatgaactaaaattctgtgagcactgtgtttttgacaagcaacatgggattaaatttcctaaagcaattcacaccaccaaaggaactcttgattacattcatgttgattgttgggggcctacaagagtaccttctctaggtggtggcaggtattttctgtccataattgatgactactcaagaatgacatggatctacatcatgagtcagacgagtcaagctttcaaatgcttcaaagaatggaaagcactgattgaaaaacaaactaaaaggaaaggtaaaagactcagaactaataacgggttggagttctgctcaacaagatttaacaaa

SEQ ID NO: 107371 - DNA, 979 bp, Glycine max
  unsure (1)..(979): unsure at all n locations
  Clone ID: PAT_MRT3847_67971C.1
cccacgcgtccggccttacctaggcggagccaaaagttctcgataaacagctgctcggctcattctcatccctcgttgttacttagtgcaggtaagttaagaaaatggtatccatttcccaagcacaccattgacttggtacagtttcgagggcgcatcatcatcaccgattcaccgatgggtgacgcgaacttcgccttctttgttctctttcttcttcccgtgtttcttctggcggtgctctacttcctggtccgtccgcgtcccgtgaagatcccgattaagaaccggcacgttttcatcacgggcggatccagcggtatcgggctggcgctggcgcaccgcgcggcggcggagggtgcgcgcgtctcgatcctcgcccggtcaccggacaagctagaggaggcgcgcaacgcgatccgcctcgccacagggatggaggtggcggcattcgcggcagacgtgcgggacttcgaggcggtgaagcgcgcggtcgacgatgcgggccccatcgacgtgctgctgctgaaccacggcgtcttcgtggcgctggagctggataagatggaactgagtgaggtcaagttcaccatggacgtaaatctcatgggaacgttgaatctcatcaaggccgcgctgcctgcaatgaagaaccgcaacgatccgctgcccgcttccattgctcttgtttctagatcgcgagctcccgcccttttttttttttttctgcagttgtttgtaatttgattttgccttttaccaataagatttagagctagttgtttgattggctatatcctgtgtatgtacattatgtgattgaggtgtccatcgtatgtaagatctttaagtggaagagcttcatatgtgttcataaaataaatagggtgttgctaggtgcacccagcatttttttaaaacccnaaaattaaaaaaaaaaatttttaaaaaatanaaaaaaaaaaaatatttatttttt

SEQ ID NO: 107372 - DNA, 518 bp, Glycine max
  Clone ID: PAT_MRT3847_67972C.1
agataaaagcaaagaacaccataaaataacattaaatagatatttagaacattacatcaagagtttcagtagcctgctccccaacaaagaagttctagccttccattacgagtaaagcttcaaaacaacaaagaaagaaatgtttttggtgaaagaaaatggaagaagatgaagaagaatgtcttctccagcctctcagccctatttctctatgtttttcatgaagcaaatgcttggctagcctctggttgtggtgctcatgcccttttgtttccaccaatctcagtgttttaaagactcttggacttctcagcacacgaaggcttgctcagcgagcatgtcttgctgagcgagagtaagtgaaaacctgctaagccagtttggacatgctaagcgtgagaagagacaatgtcctcgctgagcgggctggctgtgcgctgagcgtgctgatctctgacttatcatcttctgaggttttgcatccgttaagcgagctgactgcctcgctaagcggatga

SEQ ID NO: 107373 - DNA, 1280 bp, Glycine max
  Clone ID: PAT_MRT3847_67973C.1
acagcagtcctcacaaccccgacgagaaaaaaaacaagttagaaggagactccacaccagtaggccttatcaggaaaggcttttgaatatggctgaggctcggagggagattgtcactgccttgaaatttcacagagcagctatgaaagaagcaagtgaacagaagcagcaacagcaacaagcccaagaacagcagcaaaggccatcagtatcactccagccatcccagttcccaagttttaaccaagatggaaaatttaagtctaggagaaatcctagaatttatccagcatgcacaaccaatttttctagttacatggacatggatgatttatcccattcagacttatcccaacctcctcctttggttccaaattcttacacctggcctgctgcttccccaattactccaccaccccttatggctgaaaaccccaatttcgtgcttccaaatcagactttaggattgaatctcaatttacaagatttcaacaacttagatgctacccttcacctcaataactcatcatcatcatcctcttactcatctgcaacctcatcttctcctccacaggaacttccttccgttggaatatcacagggagaggggttttcttcattggtggatactattgaatccaatgctgcaacccaggtcactggaggcttacacacagccatggacgatgagggtatggcagagatgagatcattaggagagcaatatcaaatggaatggaatgacaccatgaatttggtcaaatcagcttgttggttcaagtacttgaaaaacatggaacatagggcacatgaagccaacactgtagatgttgcatacaataattttgaccagcttctggagtttccagcttggttgaatgcgaacgagagctgcttagagcagtgctcggtggattattttcaagagtcttccttgccttgcatggatattggagatattgacagtatggatgacgattggttagcgtgacaacaactacaaggatagattgttttctttaagtgaattcctatgttgctctcatttttatatttctttcggtaattgggattatcgggcactatcattgtaatcattttagtacccccctccccttttcactgcttttatctatttttgaataataaataagggcttgcaaaatatcagtagaggcaagcaccatcaatgagtgatctacattttttgctcccattgctcctgttatcacaatgcatgttgagatattgaacaatatcaatgtgtaattctctttttt

SEQ ID NO: 107374 - DNA, 722 bp, Glycine max
  Clone ID: PAT_MRT3847_67974C.1
atggttataattacagttattttataaaaattagtctttttgagcagagtcctagatatcttgcatttgggctcaacaaaaactagcttaggaagaatataacattatattacagcatatgctagccacctaagcccctcaattatcagtttatcaccatcttctcaatggtacaaaaaacggtggacaaaaagagaaccacggtttaacagaaatgaaagaactcctgatgagaaccacaactctagctatctttctttctacaactaggtcaaagttccaagatagatttaactgtacgtatgtaaactttgttgactatgttagttaaactcttgcttccaaatttagcaagattccaatttttcatttgtcgtaaaaagtccaaacaatgcttgtcaagccaaggtcgaaattttccttcgtgggtcacattttgcaaccagaaaataaatccacgcaagagaaacaaaaccttttccggttttttgaattcggcaattgctttagctagatcagggtacaagtcaagatatgattcgctgacacccctagtgcgacaaaacttgaccaccccatgacgtgtttctctatgacgttccttttgttttttctgacgtacttcaagcagaagtctatcacattcttcttggtcataaggcctttgaagatcattcataagtcttctcctaaactgagaattaccgtaagcaggttattgc

SEQ ID NO: 107375 - DNA, 636 bp, Glycine max
  unsure (1)..(636): unsure at all n locations
  Clone ID: PAT_MRT3847_67975C.1
tgaaactaaatatacggtatattatcttcctttttgcctacaacttataggaaattattttgtaaaagtcttggctcgagcggctcgagtgaaaccgtattttcccattttaattttactatttaatactgtaattcccttgggcactatataggctgtaggtaacaatcagaagtatagatattatgttgtatgttaaaacttttggttactcatgtagaagatgaccacttaagctctttctctcattgcataacttaattcccacacatcaatttaaagacacttgactgtgtatttttgaaatgattgataaaaagataatgtgtgccacaaatatttgaagactctagattcatgtcaattttctgactttcttactgtgatacgtccaagttcctcatatgcctcaccttgaggattttcttaataatttaagtttgtgatttaaatattgattgtggtttctactttacaaacaagagtttggcatgtgctctaactagatctttacggcttatttctttcttgggtcaccatataaacaattgtgntctggtgcactttgaaatgaatgcttgatgaaatggaatttcaaggggacactgcactacatattagttcattggtgaaatc

SEQ ID NO: 107376 - DNA, 332 bp, Glycine max
  Clone ID: PAT_MRT3847_67976C.1
ctcgcatccaatcctgtggttattctcttattcatacttctcttctgaataatgcagagagcgttctgtccttttatcggacgcgcttaatccgaccggatctgtctggattagatccatatctacacaccactggtggttttggccggatctttcataaatctgatgcgtagaggcgtaaatctacagcaccgaggtacaacagataatcgatgacaagaactcaaatacatcggccgatccatccgactgcgcttgttatatcaatacagacccctgtattggatcattaatctgctcgtattgtgcgaaataaacgtgttgcctatggg

SEQ ID NO: 107377 - DNA, 248 bp, Glycine max
  Clone ID: PAT_MRT3847_67977C.1
atcactccataccacaatacatagcgcccttcttgttaatttacaataagccacacaacccctttaataattaataataaatatgaacaatccaaagaaacaaatataactttaatattaaacccccctttccccttacaaattaattcacttcccctcatctccctaaatcctttcaccaattaaactcacaaaccttctaaccgacccttccttctcatactcaccatctttaccaacctatacct

SEQ ID NO: 107378 - DNA, 362 bp, Glycine max
  unsure (1)..(362): unsure at all n locations
  Clone ID: PAT_MRT3847_67978C.1
accgcgagcgagaagcaaanggcnnncncaangancncnnccccagcngnnaccacgggcaaccgngccggngccggcacgggggcnccanncacnggccncaagnccanggcnggcnnccccaccagaaagaccaacaangacannaccnccanngcnagcaacggnggaagagngcaangcangcaggngnggccaccagnnggcaagaagaagnnggagacncnnnccnaccngccagaccnngangangcacaannggcaaaggaaggagaanaccnncnnaggaagggacggannccncgcngggaanncgagncggagcacggnnncggggaccgngagcacaacaggncaccagg

SEQ ID NO: 107379 - DNA, 439 bp, Glycine max
  Clone ID: PAT_MRT3847_67979C.1
acggctgcgagaagacgacagaagggcaatgatgaaatgattttctttaacacaaatactcttattaaaagagttaaatgtagttacgaattattcgagtattgaagtgaaataccaataaatgaaagacaaatatttttagacaagctaaaatgagacatattatatgcaatggagaggatactactaacttgaagctcagtcatttcaatgatagaactcagtttaactaacttgatgcgtcgaaaataagatagtttgttaactgtaattacattttagaggaataagtattcaaatggaatttgattgaagtgagaaagaaagaaaagaatagaaaaacaaagagaaatttaaaatatgttctggtcccactttgattgtcatagattacttccgttgactgaaaaagaataatttataaatacgtaatttaaaa

SEQ ID NO: 107380 - DNA, 880 bp, Glycine max
  Clone ID: PAT_MRT3847_6797C.1
cccgacaactctatctttctttctcattcggccaaaatggccaagaaggtttaccctcaggatcccacttcctctccctgcatgtcccatggaccagaaacatataccctttggatgaaatcacttattctccactctaacggttgcaccgtctatgattcaaatggtgtcatcgtttatcgcgttgataactatgacacaaagggtagaagacacgttaaccttttggatctgcgaggcagagttctctgtaccatacacaagaaactacttgcttttggacgttgggatgtctatagaggtagtgataattctaacttcaaaacccaggagaagccgtggtttcaagttaaaagatgttataagatggtcacaagaaaaataacgtgccagattacagtggagtgccaaaagtactgcataaagaaaatcggtggcaaaacaacatttcagattgtcaacatagatggagacacggttgccgatgcaaagcaaaaacactcgtcatcgggagttgtgctgggtaatgatgttctaacgttggatgtggagggcggaatagatcattctctcataatggctcttgtcattgtgttcggattaatctgcggcagaatgtgattttgtgaatagtatctctctctatatattatatatatattctgagatcagcatgcactctcatggcttcgctgtatctgaaacctgattatgtaatcctcatcgttgcttttctaaattttctccaaataaacagttttgtagaccgtatttgactttatttttattactgtacatacacagaagactgtgatgagttccgttaggaattcggtattatagtgaatggtgatgaatttggatacgtttctcttttctc

SEQ ID NO: 107381 - DNA, 767 bp, Glycine max
  Clone ID: PAT_MRT3847_67980C.1
gagagagagagagagagagagagagagagagagagagagagagagagagagagagagagctaagattggcccaaactgaagaaatacaaaaaaatggcttgagatcaagcctaaccacgaaaaaagaaaaaagaaaaaatgaccaggggcttgggaatgcttgagtctaataagtctagacttttagatgatatggtactttccaaacttaaaaatgttaaacgcctgtattaatccaacaaaaaatgggcctttgaaactaaagaaaaacaaactaagattggcccaaactgaagaaatacaaaaaaatggcttgagatcaagcctaaccacgaaaaaagaaaaaagaaaaaatgaccaggggcttaaaatgtatttaggttgggaatgcttgagtctaataagtctagacttttagatgatatggtactttccaaacttaaaaatgttaaacgcctgtattaatccaacaaaaaatgggcctttgaaactaaagaaaaacaaactaagattggcccaaactgaagaaatacaaaaaaatggcttgagatcaagcctaaccacgaaaaaagagaaaagaaaaaatgaccaggggcttgggaatgcttgagtctaataagtctagacttttttaagtctagacttttagatgatatggtactttccaaacttaaaaatgttaaacgcctgtattaatccaacaaaaaatgggcctttgaaactaaagaaaaacaaactaagattggccagtggcgaagaaatacaaa

SEQ ID NO: 107382 - DNA, 436 bp, Glycine max
  Clone ID: PAT_MRT3847_67981C.1
aactgcacaatgcgcttcctcacttgccttgcgctgttgcccggcgccctcgcggcaccagctctcgacttcacctcctacatcacaccgcgcgccaacgccaacgcctctctcacaggctacctgggcgtgttcttcctcggcgatgcccccaacgtctacttctaccaatccagcggcaacaacgccgtctcgatgaaccccctgaacaacggcaaccccgtcatcgtacccaccctcggcacaaagggcgtccgcgacccctctatcatcacctccaccgccgacaacaaatactacatcatcggcaccgacctcgacatcgccaagacgacgtgggacctctcgcagcgcaacggcagccgctccatcttcgtctgggagtcagccgatctcgtgacgtggaccgacgagcgcctcgtggagtagaggatac

SEQ ID NO: 107383 - DNA, 1069 bp, Glycine max
  Clone ID: PAT_MRT3847_67982C.1
gtgcttcttatttgcagtcttcttctgctaaagctcaagattggctgaatactgctattggtatctcgaaacagaatttgatggaaagttgttcctctggtggaaagatttccgaaattattactcataaaaagtcatggaagaggtgtgcagctcatgttcacatcagtcatctcatccgtagtttagaagtgtcaaaacgacaggtgggcaaagaacatgagctttgtcctcaaacaagacacctacggtgtgtaaaaaagccagttctttgaatgaaaccattggtcaagaacagactgattttcccgagagtgctaacttcttggtggctactgacaacactgctccaaaaaaatccgcaggccgtgcctatgatggttaagactgaaaatggcggcaacgttgcattgcatgactctcaattgtggaaatgggattaaatgtgcccacacaaccacaaatttcacatattggaaggcaatcagacgtgggatttcagacggtcggaaccgttggttataagcaagaacatctaattaagtaccaaaatgaaactgtaggttcggcattgtggccaggcttgtctccgattgcatcagctgggattactagggcttcttatttgcagttttcttctgctgccaaagctcaagattggatgaaaactgctatgggtgtctcgaaacaagatttgatggaaacttgttcttctggtggaaagatttccgaaattattactcataaaaagtcatggaagaggtgtgcagctcatgttcacatcagtcatctcatccgtagtttagaagtgtcaaaacgacaggcgggcaaagaacatgagctttgtcctcaaacaagagtacaccaagggtcaaaatgtggggttctaacacaagcacacaacttgaattggatgagaagtggaaatagtcatgctactcgaacagtttattctgctactacgagtaattcacgtgaaaccaagaatggtattcttcagcatgacctttatcatgaaaatcgctcccccacacctggggtgtatgatcctcaaaagcactgttccaac

SEQ ID NO: 107384 - DNA, 392 bp, Glycine max
  Clone ID: PAT_MRT3847_67983C.1
ttacagttacttacgctatgcttgtgtatctctgagctttgtatgcatgacactaaactcttgctatgtacatttggatgctctagaacagctccaagcccataggatatgttttgcatgacgatttggatattgtataaagaaagtatgcgtatccgaaactggctaaagatgagggagaggttggttgaaccgtataaccttatggacgagcatgaaggttacacgcctaggacgatacttacctgcggggggttcgagaaacagctcttaactcgagacacaatcgtcaggatcttgagtgcccaagaccttcagagatggggtcattgatgaagcccatctacgacatgcggagcgactagcttgataagaaacgcagtgtactgaat

SEQ ID NO: 107385 - DNA, 860 bp, Glycine max
  Clone ID: PAT_MRT3847_67984C.1
cctacaaaacaacaattaagtatcatatagaagataaattagaatgatgtcaattttaagaattttcaacttctcaatattccttctataaaaacattacgtataacaaatatcccatgtcctaaagacctacacaaaacacttcaatattaaaccaagacattgacaccagcatatcaagagggacgcctagacatactccaagcagccacagttcaatcattttgcacttcatcgtccattcagccaaaatcaaagtcagtccttcttgaagagtttctctgtgatatagtttaatcgcgcaacatcagcacctataagctcatcagcctttttcccattctgaaagaaatgaagtgttggcacagatgaaatctgcaacttgcccagtgtgccttgaagtgcttcctgatcaatgtcaatcttatatgttgttacatgagggtacttcttactgagctccccaacgataggtgaaataaacctgcaaggtccacaccaagccgcagtgaaatagaagaccgcgtgcaacgagtcatctcggactttggtaaggatattgttgaactcttcctcggaattaacaaggacaacgtcggaaggagctgaggcggaggagagggagcgagagtggtggaaggaggggaggagggagagctgagaggaggcagtggcggcggcggtggtggctaagagagaggattttgatgggagtgagggaagaattcggttgaaggagagtgtgagaaccctattcttcattgcgtgacgaagcgccaaggatcgaaccacccagtttctcgccatcacgctgattctgcttcccctttctccttccctttgctttgttttgctttctc

SEQ ID NO: 107386 - DNA, 1674 bp, Glycine max
  Clone ID: PAT_MRT3847_67985C.1
ctagaaagcaacataacaaactatcatagtaacaatttggaagggtaagactttcccgctgttaagttcagtcttaccattatcaataggtactgattcttcatttcgggcaccacaccataggtgtcctccatttgatggaaaattctcaggccttcctccacctttcctccatggctgcaggcgaaaaggatgcataagtaatgtgacagcgttgatctttgcatctgactgtttcatctttctgaagagttgaagggcatcttcaacaaggccgtgttgggcataagtggatattattgcagtccatgaaaccgtgtcggggttggatattcttttgaaaattttcattgccccttttagattgccacatttggcgtacatgtcaattagagcactttctatgcatgtttcggtatccatgctggccttgcatgtcagaccgtgaatttgctggccgtattctagtaaacaaagacctccacatgcagtaatcacactagaaagggtaaaatgattgggtacaaagccttcattgcgcatttgtgagaagatggccagggcttttccccattcagaatattggcaatatgctgtcaccatggttgtccaagatactatgtctttcccttgcattctattgaatacattttctacagcttcaagtgagtcacatttggcatatgcatcagcaagggcattggttgcactaatctgcattgcatcgaatccacatttcaaagccattccatgagtctcccttaatgatttcagacacaagtgcgggtctatgtcagatgcccaagttctcttcgaatgagtggttgagtatgggacttggttaatctgcttccacgttggttcctttgaaagtgttgcagtctgaagaaaggaaacaataggtgttgggtggtgtgaatgatgatgaagcgtggctgctttgtttgcggaagcatggggaagatgacgaggaggttggtgcacgcggtgtgcaatggagaagctcatgctgcaaaatgttttggacacggaattcctctgttttcttatcagcatatcaagagggacgcctagacatactccaagcagccacagttcaatcattttgcacttcatcgtccattcagccaaaatcaaagtcagtccttccatctcaatagattcaaccagaatgtttcctttgggtggcaggggggccaaattgaagagtttctctgtgatatagtttaatcgcgcaacatcagcacctataagctcatcagcctttttcccattctgaaagaaatgaagtgttggcacagatgaaatctgcaacttgcccagtgtgccttgaagtgcttcctgatcaatgtcaatcttatatgttgttacatgagggtacttcttactgagctccccaacgataggtgaaataaacctgcaaggtccacaccaagccgcagtgaaatagaagaccgcgtgcaacgagtcatctgaggcggaggagagggagcgagagtggtggaaggaggggaggagggagagctgagaggaggcagtggcggcggcggtggtggctaagagagaggattttgatgggagtgagggaagaattcggttgaaggagagtgtgagaaccctattcttcattgcgtgacgaagcgccaaggatcgaaccacccagtttctcgccat

SEQ ID NO: 107387 - DNA, 2020 bp, Glycine max
  Clone ID: PAT_MRT3847_67986C.1
ccagagccttgttgctcactcacctatggtgcttgtgttgttcaacaaacattgatgcgtctcagccttgaacaaagcagtcatgaaagtatagcctgacgagtctgtaccgggctgaattgagaaagcaaaccacaggaacgggaaggagaaaggggaagcagaatcagcgtgatggcgagaaactgggtggttcgatccttggcgcttcgtcacgcaatgaagaatagggttctcacactctccttcaaccgaattcttccctcactcccatcaaaatcctctctcttagccaccaccgccgccgccactgcctcctctcagctctccctcctcccctccttccaccactctcgctccctctcctccgcctcagctccttccgacgttgtccttgttaattccgaggaagagttcaacaatatccttaccaaagtccgagatgactcgttgcacgcggtcttctatttcactgcggcttggtgtggaccttgcaggtttatttcacctatcgttggggagctcagtaagaagtaccctcatgtaacaatcatatatgattgatatttattaatgaacactgcatgattcaatattcaaaaaacgaaagtgtaacacaaacacagtacacaacaagtcgtagcgggcacatggcatgaatgtgcctatagcttctttatttgtggtctctaatcaccccattttaagtgaaaactattcatcctaatccatttagattgaggtaaccataccctctgtagatgattcttctgaggccacactagcaatatcaactttaacagatttcttgttaacaaagttacaatgttttctgatttctcctttcttcccagtgagcacaccaatgttacccatcttaatcattgaagcctcaaaggcgtcaaagaaaactttctggtcactgctgaacctgttgacaatggggatggtatcggcaccaggtgtcgagaacagctcttgatcactctgaagcaagcccttcttaacctgaagattggagaagtagaccctgtcaattttatcaggagtgacagggtcaaaattgacaaggttgttaggtccaccattggggcatatttggcgcaattgttgtaagtaagttgtgtcaagagttggatcaggtttgccagttccactgaaattgtacaatcggtcaagaatgaaattgcagtgagctctgccgaatgtatgagcacctgagagtgcaactagatcagtggtgtcaagaccttgaacagcaaaggcagatttaagtcgagataggttgaagaatggagctggaaggttttgatttgcaaggtttcggtttgctgttaaactatctcttcttcccaatggaactttccaatcaggaccaccacccagaacagaagatatttcggatgcaagggtaagaatatcagcacaagaaaccacgccgggacaagccttttccactgctgtcttaatgtcgttcacaacatccaaacctcttagtgagttgttgtttggcagagcttgttgctcgctctctatggtggcagtgttgttcaacaaaactgatgcatcacatccttgaacaaagcagtcatgaaagtgaagtctaatgagactagcaagcatacggggatctttctttgaaacgttcctgacgacttcacgaacaatggagtgaaccctgggacaagtgtctctgtaaaaggagggatctagttgtgcatctagggagagtggaagcactccaagcacaaccactacacagcacaaagctgtcactgtgagatggaaagacttcatttttctctctctctgccggaactgctcgagcctaaaattgatttgaactcactcaacacctctgtttgagagtgttgctgctgcaagactcaccatataacttgccttttatttatagagacaaatagcagccatgcttgtgaatattgtgatggacgaagaatgacactgaagaacaagacaacttcttgttaggcacgttctcgagccgattcggctcgag

SEQ ID NO: 107388 - DNA, 307 bp, Glycine max
  Clone ID: PAT_MRT3847_67987C.1
atgactcgggggttatttttgatttcgcaaattacacaatcacagccggacatcacacgtgagctgggcctcttccaacttaaaagcagaggataacattggcccatgacgcaacacatgcaccacctaacaatcataattttacatctctacacaacaaaatgcaaccactctaaattcaacttaaaaaaaaaaaacataagctgactcaccttgaggaaatgaaacccaaacccacaaacattgtcatgcaccttatccgatgctcccaacttgatttatcctgaccggcctgacagaacccact

SEQ ID NO: 107389 - DNA, 478 bp, Glycine max
  Clone ID: PAT_MRT3847_67988C.1
agttcttccccacccccactgaggaattccctcccactggtgtccgtactgttgacgacatcaccaacaacgtcaagctcgtcattgaaactgccaagaaacctcaacaaatgatccaagaatataaggacatgaaattgactcctccagcagaggcgacggaggtgtataacgatgccaatgagctttatagggctcctcagactattctttctgagaacgctagaatagtctccgagattcccaaggttttggaaaacccctcaaagatcttggccgacccagccaattttgcccagagattgaaggaattgattggtgacccagaaaaactggtcgctgaatataaaactttgatcgagaaatttaagcaactcgctgagaattctcaaggattggtcggaaatgccaacaaatacattgaagattacaagaatttgatcgatggagaataccaaaagattttgacttacttgaa

SEQ ID NO: 107390 - DNA, 439 bp, Glycine max
  Clone ID: PAT_MRT3847_67989C.1
ctaaagagaaattttattcactttcccttctttttttttttcgttttgttcccaatttccacctggtccatttaccaacaccgttctatcatggcacaccactcctcacaacgtctgaatctagcagcttcagaatctaaccctacaaccccattctcaaacccagatcttattcaaacatataaaccctctttcttggttaaacacttgacaaaccttaaccttattcaaacacacataacttgttcatccctcaaacactctcttttatttacacctatttgcaggcaaaatccatgttaactctttctatacaatatatttatattactttgcctgttattatatcccacatagataattctctaattctactgttttaattggattttttaaacttttttatctctattactattatttttatactgtttcttat

SEQ ID NO: 107391 - DNA, 730 bp, Glycine max
  unsure (1)..(730): unsure at all n locations
  Clone ID: PAT_MRT3847_6798C.1
gcaatgatactaatagggggaaatatcttgttccgaatgttgcataactttggatttctttaccctgtcataatcaagataaactccaatccttatttattacaatcaatgtaagatgatacaactttcacaagtcactgctttccagagatgcataaactagataaatcaacacaatagaaattttcccagtttgaaagatcattagacactcctatcaatatttcatatatataggacatttgtcgccattaccatgcaaaatcaaatatgataaaaattagctttagatcttttgcattagtgtctactcgtgcttttaatacatttcattttactgacatgacatctatacactactgggtgctaaagagagtcaaggaaacacaacctctcagaaaatacagaaatattgacattttggaaagaaaaaaaaatggactccattaacatgctagaggtttaaaaagttgcttacacagtttattttcaatttcttcagtttaagcaagcattttagnggaccctaatcaaagatgtggatttgaccacatgaattcttgcagatcaactctgagaagnntaattcttcccataaaacaacaacaacaacaacaacaacaacgccttatcccactnnntggggtcgnctacatggatcaactnnngncataatnnnctatcaagtaccatactnctannnnnntcattangttcgagnnnnntcttg

SEQ ID NO: 107392 - DNA, 735 bp, Glycine max
  unsure (1)..(735): unsure at all n locations
  Clone ID: PAT_MRT3847_67990C.1
ggaattcggcacgaggtaggaaaccgccaccaccaactaattccatttaacacctttcatcttcaaacgggtagatcggatcactgttttcaaccggatcaagcaccacaccctantgtgaaaacggagggcaacaattcccatcttcactatcctctaatgagatcaaatcttcaccacatgctgcatcctcagcaaggagggagccagagctctaacgaacttgaagccataaaagccaaaatcattgaccatcctcactactcaaatcttttacaagtttacatggattgccaaaaggtaggagctccgccagaagtggcggcgcgttttgctacggttaaagagaattttgaggcacggcagcgatctttggttaggtcaatggaaacttgcaaggacccagaacttgatcaattcatggaagcttactatgacatgctagtgaagtatcgagaggaattaacgaggcctatagaagaggctaaggatttcatgcagaggatagaatctcagctgaacacgctttgcaatggaaccgtgcggatcttctctggtattttatctttctatttgtgggagtagtggaggacactgttccactgtactttcgttgcctatatctttcaatttctgcaacacaaattttcattatttaaactaaataattataaaatatacaataatcagctatatataaaaaaaaaaaaaaaaaaaaaaaaaaaancctggtgc

SEQ ID NO: 107393 - DNA, 207 bp, Glycine max
  Clone ID: PAT_MRT3847_67991C.1
agggacggtatctgatgaggaatgggtgatctaactaaattctaattggttgaatttaagtttactctactacaaccataacatataaatgtttcatagaaaagttgttctatactagagtggaaaatgtaacattaattggttatggacacttaaagataaaacctcagaacttaattacttggatcccttaccaatcgggcgttt

SEQ ID NO: 107394 - DNA, 256 bp, Glycine max
  Clone ID: PAT_MRT3847_67992C.1
ttctttatctctatttgtttttattcgggttttaacatgaggaactattcttctctacctttggacttcatgtctttcaaattcttttcctggagctatccccaaaaaaagctatgtcatggtaagaattgagcttcaagttgattttccttttcctgcgttagacattatttatacatctcctcaattagatagaaactttattctgctagacttgttggattctctggagagcgatataaaagggatacttctg

SEQ ID NO: 107395 - DNA, 360 bp, Glycine max
  Clone ID: PAT_MRT3847_67993C.1
caggccaaaaagattgatgaggagatccttcaggaagtggtgaaaatgggatttgacaggaatcaattggttgaatctcttgggaacaggatacaaaatgaggtttgtgcctttgattttgtctttctatatctgccagataatcccttactaccatccatatatttcagggtactgtggcatactatttgttattggacaaccgatttcgtgtttccagtggctatcttggagctgagtttcaagagaccatggattccggttttaatcaaatgcattccagtgaacttgcttcttcagttgttggaaaccgctttccaggctacatggaatatccaggagtaggatcgaggcaacagt

SEQ ID NO: 107396 - DNA, 420 bp, Glycine max
  Clone ID: PAT_MRT3847_67994C.1
tacggtctaacgggtttttaaaatattttttatttacatagatgatatcccaaaacataggggggtccttgaagaaatacttaaacgactccataccaaatgtcttccaagggctagcaagacccaatctaagataggcgtgtggcccctgagaatggcctgcggtgtggaacctgactgacccaatctaaagccgtaagactcagggcggaaaaaaagatggccaggggctggttaaggcacagcctgtaggggcagagagccaggaaactagaccgtgggggggacacccatctaagagcgaccagagctatggggaaggctgtggccgtagcgatgtctgggaggattggaagctctatggcagcaacagagccccgaaacatgggataagcaccaagagctgaccaagcagtaaaa

SEQ ID NO: 107397 - DNA, 164 bp, Glycine max
  Clone ID: PAT_MRT3847_67995C.1
agtttgccatgataatggaggtgagttatccttgcagttgagacgatcttcaaggcttccattgggtaaatactcatagacaagagtccaagattctgggcaggctcctataagtgtgataatattgggatgccttaacttgctcaatacttcaacctgataca

SEQ ID NO: 107398 - DNA, 425 bp, Glycine max
  Clone ID: PAT_MRT3847_67996C.1
ctcgagccgagaatacatatctttcagctcttgttggtcatcaaaatttatgcagctttcagttcttggttttttttcatggtctaatgtatgttttactgtgccagtgtgtctatataagtgaatctgttcttgtgctggctttctactttctagtgtatatattggttagtgttccatacagcagtttgctaaccatagtgacggttagatgtggacattgtgccaatttgctatcagttaacatgggagcgtcacttcaagcatttcgccctcaagaacctcagtcacagaaacagcttctaagctttgaagaaccaagcagctgcaaggaactgggatcatcatcttcagaatgtaacaaaatagcgccattttacgatggagtagagcatgaacaacctaagattcctcccaatcgtcct

SEQ ID NO: 107399 - DNA, 244 bp, Glycine max
  Clone ID: PAT_MRT3847_67997C.1
ggccccatggcgaacgcgttaacgaatttgcgggttgaccgaagcattggatgaccaccggccatacgaaacgtgaggtcaccatgattaagacatgaccgctgaagctgttgactgaacctgaataattcgtggacttgccactggtacagtgatggccgtctcctatcattggatgagtgtggaggaggccatgacaaattattaactgattgcccccctacgatcgctgggagaataacat

SEQ ID NO: 107400 - DNA, 173 bp, Glycine max
  unsure (1)..(173): unsure at all n locations
  Clone ID: PAT_MRT3847_67998C.1
gccgnatagaactgtccctcacgggggaggagggtctggaaatttttatgaaaggatcaattatgacccccttgggaatcttaaaagaactaaatatgaaaacatgaagtgtcaggtgatattctttaacaccttgaagagtcctgttggaacccttttcatatccatttaaa

SEQ ID NO: 107401 - DNA, 534 bp, Glycine max
  Clone ID: PAT_MRT3847_67999C.1
gactaaaattcatgtttacattcttatacatgcgaatcagggatgtggcgagtttacaattgagcctgatttcttgtccaccgttggtgatgctgctcatcttgatcatggacttgacgaaggccctttcaaattccttttgcgaatcaacaaagttggaaaccaaagctttagtggtgggatgagtgagcagagcttgatcagaggagaataagctcttttcttggaggagtagcttgttataagcattgtcaaacaaggtggaactagaatccaatgagcttcctgcatttttaacctttgtgtgagaggggcatattgccttggaggcttcttgctaatgaaggggtcagagatgggtcaatctctagtttttggctgaaccttatggattctgttttggaaagattaacaatgagccaaccctcaggtgggaccttctgagagggctacataatcttccaaggaaaggccctctttgggagaagcttttttgcaattgggaaatgttgaatgtgggagccgcaattgtct

SEQ ID NO: 107402 - DNA, 566 bp, Glycine max
  unsure (1)..(566): unsure at all n locations
  Clone ID: PAT_MRT3847_6799C.1
cggacgcttgggctttaacctaagacataattgttctatagctgttttttatgatgagtaggggcaccataatccttcctttcccagtgcttgaatcttttctttccttaaattgattttgggcgcttatttgtcttgattgtattttctgtacttccagtaaagcctgtttgtaaactcaaccaagtcttgcttttcagaatcaaattgttaatggactcttgaaatgctaatgttatatagaaaggataatttttatagaaatgtaaaagtgtgaaatgataatataactttccaagcttttcagatgaatttcttggaaactatagctctaactcaagacattacatgatgaagttcaatatatattgacaggaacaagtagaacaggttcagatggtttatgttaatattgttccctgctaaccaacctccacttgtagtgatattcttggtcgcacagttcataaatttcaccaatatggaacatagaaaatagccaagggccatagagcaccanaggaagcatgttgatgttgatggtttgttggtaagagtgattactt

SEQ ID NO: 107403 - DNA, 473 bp, Glycine max
  Clone ID: PAT_MRT3847_679C.1
ccacgcgtccgaaactgagcagacatggctgattccagatcagctccttgtactaacatactacaacttcaagcctctagagcatattatcataatgcatcatttaagatcatttgatgccactcctagtctgcgaccatacaggaacatcgcacctaggtgtacgaggtagcgacaccgacgtcctacaaactggggctcgggaacacatcaagccgagacaggagttgattgtgtaaggcgagatgacaagtaatatcctgagcgagatgtgtacccaagacaacaccgacttgcataacagggggacacgcatattgattttctgaagcgcatagcagcaatcgaaaaaccacaccgtgaaggtactattaccaaagcagatcgtcaggcgcagcggatgcgtctggctgggagagaaagtacactatgtgaagggagagggctagcctgcactcttaatgataaaggag

SEQ ID NO: 107404 - DNA, 230 bp, Glycine max
  Clone ID: PAT_MRT3847_67C.1
tcgatgctttaacatagctcatcgcattcattgagtatgttagccatctgtgcatcatgctttctataccacggatattcaggcatatcgcggttagcaggggtattcaccgtactaggagaatgtatacctttacttctagacacatgctcttcacataactaccaacacagttccacgcatctgcataacacgtatcctgctcacatgacattctaggaggcgctctg

SEQ ID NO: 107405 - DNA, 117 bp, Glycine max
  Clone ID: PAT_MRT3847_68000C.1
gggggggagggtagaattctttgggggcgttttaatattttcctttccagcaccatttgggataacctagtctactaagggtttaggggataccccaacctggggctgctcggtcga

SEQ ID NO: 107406 - DNA, 290 bp, Glycine max
  Clone ID: PAT_MRT3847_68001C.1
atattgacaaaccgtacggctgatactcctttataatcacttacattttcatctaggtcaactttcctatgaaaatcgccatccgtgagagcacaaatcccactttatatcatcaagcttgcctatcgtcattgatacatcacattcgctcactgcattgctgaaccttaacaccttaacgttaggatttcttctactatcctcacatgatgaactcataaactactacctatgattctatatcaactgaaatcatcatcattttcacttttatcaattatattcatcac

SEQ ID NO: 107407 - DNA, 310 bp, Glycine max
  Clone ID: PAT_MRT3847_68002C.1
cttggattttggaacacaggcattaactcttatgcatttaacaacttactttagggaaacgagaattaacatcaaaatatctcccactcgactaatttattcagcaaatgattcaccatattatcactggccctaaagattaatacaatatataaacactcttttactacggaaaagttaataccctactatgtactcagctatgtatatatcatctctgcagacatatctttacatgattttgataaataatggattgacactgaatctaatggaccattatcttcttttttatgtatcaaaccctctt

SEQ ID NO: 107408 - DNA, 114 bp, Glycine max
  Clone ID: PAT_MRT3847_68003C.1
catttattcactatatgatttactagtaggtatacttacatgatgcggatgcctatgtggaatcaggctgtttcacgatgaatgtgtcactatactgcaccggatgctatgatt

SEQ ID NO: 107409 - DNA, 423 bp, Glycine max
  Clone ID: PAT_MRT3847_68004C.1
ctgtcctttccacttcccttaccgtggcttgggcttgcactgcgcgtctctcacactatttacctcccttcatagatctagtcattgtgtggtgagcgaagaatccagcacaggaagctggaaatgaaggggctgacgacgcacatgcgacatattgggattgcgtccaaggcagcggggggcttgcctagattcccacaaatctcggacacatggggggccaaatgagtgctggggaaatctgggtatacggctcttacctttgatttcaaaagctgtcgactctctgagcatcccacggggccaaaaaagggaaccatgtgctgatccagggggggggggaggggggcttttggatgctttaaacaccacccaggctgctccttgggggaccggttttcgggcaataccaggggatcttac

SEQ ID NO: 107410 - DNA, 235 bp, Glycine max
  Clone ID: PAT_MRT3847_68005C.1
agcgcttgaattctggttccattggatggctgggcgttttgcaaattatggtttaggtttttcattgtgctgttgtctgtttctgatggcatcatgattaagataatgaagttactgtggtattttctttgagcttgcagctatggaatatctgtgaaggaaaaattctctcttcatcttcaataatattgtggtttctaaacttacaaattcagaaaaaaaaaaaaaaaaaaaa

SEQ ID NO: 107411 - DNA, 321 bp, Glycine max
  unsure (1)..(321): unsure at all n locations
  Clone ID: PAT_MRT3847_68006C.1
catgcacgcgtacgtnagctcggaattcggctcgaggttccggcgacatggctaaacgcaccaagaaggtcgggatcgtcggaaaatacgggacccgctatggtgcctccctaccggaaaatggtgaagaaaattgaaatcagccagcacgctaagtacacttgctccttctgtggcaagaccaagatgaagagacgagccgttggcatctggcattgtggttcctgcatgaaaacagtggccggtggggcctggacctacaataccattctgcagtcacagtgaatctgcctcagaagantgaaggaatgaaggaccant

SEQ ID NO: 107412 - DNA, 277 bp, Glycine max
  Clone ID: PAT_MRT3847_68007C.1
taatggctagagccaacatgtcagtatatctcatcaagtgctaaaactacaaactggcatgcgattctgaaggccactgccatgacatacattcctaacagcaatcacctcaggtaactatttgactaccaacatggttactattaacaacatcttcaatgcttggtcaaagctaacaaatatgatcaaataccacgtcttaaacaattataagattgagttaccttactcacatagcaccataaatcagcatcgcagtctaatgtactacttattg

SEQ ID NO: 107413 - DNA, 440 bp, Glycine max
  Clone ID: PAT_MRT3847_68008C.1
gaaacacaaataaaaaggggcctttaaaaaagcaaaccaacaacgcaaggggaaagcccaaaaaccgggggggctaaaaaaaaagggaaggggggggtcccacaaccccacccctttaaaacaaaaggataaaggggggctggccaccggggataaaaaacccaattgggggaacaaaagtggcaaaaagaggggggaaacttaaaactagggccgaaaaacaagctccctaaaaacgaaaacccaggggcaaaaaaccaacttttatgggaaccaaaaaaaacgacccccccggaggaaccaaaccggacgattaactttttttttggggcagcctgggggacctgggccccagaaggaccctttttctccacgttttggaggacccccacagaaacagggggacgcatatcccggacagaaaagggaccaaggggggg

SEQ ID NO: 107414 - DNA, 215 bp, Glycine max
  Clone ID: PAT_MRT3847_68009C.1
gttaatcaaaaggcattaccctgtgattttcgaatttcaaaagactggaaatccacatgaacctaccacatatgctcagcgtgagaaactgtgacagatggcaaacatttatgacggcccggggttcaacgtccctttaattattttataaaccacattttgaaaaagaatagggggggcaaaataaccaatagtttacttataggagtgttttt

SEQ ID NO: 107415 - DNA, 1233 bp, Glycine max
  Clone ID: PAT_MRT3847_6800C.1
gctcttcctcaccgattgctagaatggaatttcgatgctcagtcatctcttttaccattctcttctctcttgctcttgcaggagagagccatgtccatgcatcgctacctgaggaagattattgggaagctgtttggccaaacactcccattcccactgcactgcgagagcttctaaagcctctccctgcaggtttattaattttatgagaattatcaattctagattattgattcttgaacatgggttcttatcttcctatcatgccttggcaagttaaaacgttaattaggtttggctgtgtaacaaagtagcaaagacaaaatttaaaaggaaaatgcttaaagtattaaatgttagagtgcaagacatgcgaaaagtctccttacaaattcattcataagggtgacttacccagttatataaacccttatcatgttcattaactatttaatgtgggactcttaacacgccccctcgagtcagggctcacctcaaagtgaggactgacggcactatccaccaaactaccggactctgatgccatattaaatgtttgagtacaacaaagacatccgaaatatccctttaaaaatcggttcataagggagtgacctaccagctatataaacacttatcatgttcattaactactcgatgtagaactcttaacataaagatacggtgacccaaaaattaggaaagagcccctgaagggacataaaaaaagaaaatgaaaaaagaacaaatagaagtaaaccatgtgataagtgacgtgaatcgaaaaaaaacaaacaaaataaggtgaaaaaaatgaaaaagaaaacaaatactctttagcgtcctgtttataatacctatatttaagtgttgtttagttctttttataaagctcgtgtttcttgctctaattgtttaagactaaaataccctaattacaagacaagctataatgttaaataattagaacaaagagaatgacgtcgagtattaataataataaaagttttgaagaaaaaaaaaagacttataaaacataaattctgacagacactatatacaatgtagactaggggtaccgtatacacatacgtgacaaaaactctaatgatcatgaaatgaaatatgattaatataaaataaaatatctaaattcaatttactaaaagtaagtttaaatttattatatatttattttgtaatcaatcttctatatttttttatgatatataa

SEQ ID NO: 107416 - DNA, 393 bp, Glycine max
  Clone ID: PAT_MRT3847_68010C.1
ggctcgagctttaacttacgcggtcctcgctacttatcctgcgcatattcggtcatcatgtcgccgtgatcctgaactatcaactccgtggcgtcacttcttcaagtacacaatactctcatcgccttccatcggaaagagtcatgagttgatcccgctgtcgtgaggaagatcactaccagaggactgctgcaagtggacgacagcatgtggtgaaacactaaacgggatatgatggaaccagccgggcattcgtaactgcatagcagggaactcaagctgtagaaagtcatcccactgaagatcctgaattacgagaggaatgactctgagagatcaccgatggctacggataaagtgatatgagaggagaaggatcctatggaatagtat

SEQ ID NO: 107417 - DNA, 437 bp, Glycine max
  Clone ID: PAT_MRT3847_68011C.1
tgttttctttaacttccttctcatgggcctttagcatatgaccgttctagaggagtagtactagtaggaggcacttcaagaatcatagtatatacagtcattgttttattccctaacatttgtctgtagtcacttccatgattttgtcatttgttaatacttttcttccccattttttacttatgtcaagtatcattgaatgacgctttccagggttagaaacaagcgaatttttagtgaagacatggattaaaataacctgattgattaatataaaagaggttaaagtgaggactgactgtaaaaaattctaggatgtttctttggttgttgattgactgtaaaatgctttgggtggatgctattacagacacttggagtagaatactcagattacttactgaaataagatatctaaaccattataatatgttgtg

SEQ ID NO: 107418 - DNA, 406 bp, Glycine max
  Clone ID: PAT_MRT3847_68012C.1
acataatagagaaagagggagagatgatggaggacaagaacaagaagaagaagaagaggagcaagttgtggttgaagaaggtgtcgtggccgtttcggtggaaacgactggatcttcaaacgaccatcatggacaccgtcgttttcaaggtactctacgcggctgaggctgtagttcttgtctccaccctctgcttcttctacctttgttgtggctgccacttctgaatcaccaccaccaccctttggcttcttccatcagaaaaagatgatttagctaatttcaccttacaaaataagtttttttttttttagtttcttctccaataaatatttatagaaaaaattctcctgatattgttatttcattcattctttttcattattactttgcttcaattgtattt

SEQ ID NO: 107419 - DNA, 321 bp, Glycine max
  Clone ID: PAT_MRT3847_68013C.1
gtttacattttttaactattacgcgaacctctctcacattctttctgtgttggttcactctacattattaaaaataaccaccctcacactttccaacgctaacttaacaatgagccatgcccacctgtgtgcttactccaaaaatcctcaactgagaccctcactcattcgtttacaactacgaatgcaatgactcttacgagtacccctacaagttcttattggattaaaacgaaagcatttttcacagagaatcatggtttttggtcaggacaaataactaatttggtccaactttattttacaagacttcttttgaga

SEQ ID NO: 107420 - DNA, 375 bp, Glycine max
  Clone ID: PAT_MRT3847_68014C.1
atatatcactgttgagatgtttttattgtccgaaaaaaaaatggtgaaaaggcatgcataccggggcaacaaaattggtcacgaacaaaaaaagggatttagcaacagattgagggggcaaaacttccagcgcaccggaagaatagcattctccagatgatgacaaggggagtaaagggacccttggtagccaattttaaaaataggcctgacaattccccctcagatgagtgagagcagaaagaggagtaacagtaatatctccttcccgcgggcatgggaagcccggaggaacttcatcaagtacagatcctattacctctgtgggggacaaaagatgtacagccgatgcaaaaaatgagtcaaaagagggag

SEQ ID NO: 107421 - DNA, 482 bp, Glycine max
  Clone ID: PAT_MRT3847_68015C.1
gtactgtcacttagtgaactgttttcgagcctgaaccatccttaaagaatttggctttgcacaacaacttaatactcaaatgttatgacccgtacattactcggcaagaggtatcatggaccatacacaaaccttttccgtcttaaaaggatttgatgaatttagcatttcccttgctacaatgtgcccatttataaactggatctaactgacaaaacttggcaaggagagatcatgggggttacttagcaaccattgctccccagtttgaccacccattacaatagcttttgggccttcaacagcacatgtactatgtccccaaacaaatcttggagggcgcccaggaacattaaggattctccatgcaggctcatcatcaggaggatctattatgtatagctcgcaggcagtttgaaggaccggaacagacccaccgaggatatgaattctgccaacgagaaggctgacagtcacatgat

SEQ ID NO: 107422 - DNA, 556 bp, Glycine max
  unsure (1)..(556): unsure at all n locations
  Clone ID: PAT_MRT3847_68016C.1
gttattcaatcccatcgcgtcgtccgtgttttttggatggtcttctgtccccccttcttccatctgttgcgattgggggactgtgtccttgcctcccttaaactgttggcatgatcagcttgcaaactgcacatggtttttaccttcactgtgacttctactgtggcatcagtagaagattctgagctgggtggtgggatgagtttactttcatcccaannctattcnnttctaatnncagggtaatggtcactttacccttacgaatgcannattgttgcttggtgttttgggaagtcanntcattcatgatgaaaaactagggaaattatacctctaactgtccacttttatcagctgtgttaggaaattttcattgtcccatttaatgtcattatagaaaactaatgagtcattaattattctttttactaacttcacgtttggttttcataagtgagagaagattggtatgattaatatcacttaataaagggttatttagttcaatacaattattttttgacaaaattgtggtgcaaagtgttttttgtgt

SEQ ID NO: 107423 - DNA, 426 bp, Glycine max
  unsure (1)..(426): unsure at all n locations
  Clone ID: PAT_MRT3847_68017C.1
tggaacctttgggctgatttatgtgcttgcaagagatagaaggggataacagaaagagaatacaaggctaaacttccataacggtccccgacacccactaatgattccacgccccgagtgctacacgtaccgtcacgacccctgtcgtaggagcagcaatccgccccgagctcttatcatcaagtcgttaggagtgacgtacacacgacttaatgcgtgatcccactcgttacaaaaagggccccgctaaagggggactccgcaagttaactacctcacacccctcgtgccgtcgcacgaaacgagcaactcttacgcgcgaaaaacagaacaaaatcaccggagccagcaagaatcctccgcatccgacccactaacatacgcgtggcgcgatctgccgtcctcatcnacaaccctacgcgcctc

SEQ ID NO: 107424 - DNA, 433 bp, Glycine max
  Clone ID: PAT_MRT3847_68018C.1
cggaattcccgggtcgacccacgcgtccgcttcgccgctctttttagggttttctcaactcttcgatttggggcttaaaccctcgcttccgattcagattcggatttagggcttccgtttctcgattctgcctcccaagaaaaaccagatctcgtgattgattattcatcatggccactgttgctagtcccgcggatcaagcaactgatttgctgcagaagctatcgttggaaactcagcccaagcccttggagattcctgagccaaccaagaaggccactgggaatcagtatggatcagttgattcaggaaatgctgcgaatggccagatcccatcgtatgatcggggatcctactatgtggtacctcccaaatggttacccatccactggctattattatggggggtatgaaggaactgggaacgaggggg

SEQ ID NO: 107425 - DNA, 3024 bp, Glycine max
  Clone ID: PAT_MRT3847_68019C.1
ccacgcgtccggcccaaacccttggcggctgcgagacccgttgtgttctctcttctctctcttttttttctctttccctctcttcttcgccgctctttttagggttttctcaactcttcgatttggggcttaaaccctcgcttccgattcagattcggatttagggcttccgtttctcgattctgcctcccaagaaaaaccagatctcgtgattgattattcatcatggccactgttgctagtcccgcggatcaagcaactgatttgctgcagaagctatcgttggaaactcagcccaagcccttggagattcctgagccaaccaagaaggccactgggaatcagtatggatcagttgattcaggaaatgctgcgaatggccagatcccatcgtatgatcggtctgtaaccccagtgttgcaggattttattgatcctactatgtgttacctcccaaatggttacccatccactgcctattattatggtggttatgatggaactggtaacgagtgggatgattattctagatatgtgaattcggaaggagttgagatgacttcgggagtttatggggataatgggtctctactttatcaccatggatatggatatgcaccctatggcccctattcgccagcagggtctccagttccaaccatggggaatgatggtcagttgtatgggcctcaacactatcagtaccctccatattttcaaccgctaacaccaaccagtgcaccattcacacctactcctgctgtccttcctcagggtgaggtttccacctctgttgctgctgatcaaaagcctcttcctgttgaagcagccaatggaaattctaatggtgtctcaaatggtggcaatgcaaaaggtcgtggtccaacctcaggttatcaggatccaagatttggttatgatggagttcgctcacctatcccctggctagatgccccactattttcagatgggcaaccaaggcctgtaagtagcacaaccatcacttcttcgatatcaggtggcaacaacactgcctcaaggagccagactttccgccctaattctcagttcatgggcttgcaccacccaagaccaatgcctgccatgggagccacccatagcttcataaataggatgtaccccaacaaattatatggtcaatatgggaacactgtcagatctggaatgggttatggtacacatgggtatgattctcgggctaatgggcgggcttggttggctgttgacagcaaatacaaaactaggggaagaagtggtggctattttggctatggaaatgagaatgtagatggcttgaatgaactgaacagaggccctagggccaagggtggcaaaaaccaaaaaggttttgcaccaactattttggcagtcaaagggcagaacttgcctgcaagtttaggcaccgatgaagagaaagacaagactagtaccgttccggaccgtgatcagtataacaaagctgattttccagaagaatatactgatgctaaattttttgtcatcaagtcttacagtgaggatgatatccataagagtattaagtataacgtgtgggccagtacccaaaatggcaacaagaagcttgatgctgcatatcatgaggcacagcagaaacctggtggctgccctgtttttctctttttctcagttaataccagtgggcaatttgtggggcttgctgaaatgattggtcctgttgattttaacaagagtgttgagtattggcagcaagacaagtggaatggctgctttcctcttaagtggcacgttgttaaggatgttcctaacaatttgttgaggcacattaccctggataacaatgagaacaaacctgtcactaacagtagggatacacaagaggtaatgttggagcctggcctgaaattaatcaaaattttcaaggaatataccagcaagacatgcattctggatgattttggcttctatgaggcccgtcagaagactattttggagaagaaagcaaagcaacaattcccaaagcaggtatgggaagggaaacctgctgatgagaagattgagataaatggggaagtcaatactcaaaaatctgaagttagctcggaagtgctcaaggagtcccttgctgagaaggatagtgatgaccacaaagttcccgagaatggatgtgctacaaaaactggagatgccccaaagggtgctaaaccagttgttcctgagagcaagattgtagccaatggggttgtttctaatggttgctaagctctactgtgtttgaaggaggcggtcctatccatttcagtggcatatattggttcttagaagtattttatcagaaacttggtaccgcctgattttatctttcttgcctcttctcttgcagtctgaagatagagattggttgcctagtgaagataaagatctgtatattgagattggctgggcggagttacttcatagaatgctagcaccaatcccttctcattgggttttgtttacagtggttagctcctaacaggctttactcctagggttttttgggttttagggtttctgcctaagatgcttatatcttttggtttttgttcgggtttatccttctctttgccttttttcttttttctttcttttattttactttgttggtcgtttcctgtcttgtaaatttagatctactttgttgcagagcagctttactttgttactttcaacaggggtagaagcaaggtgggaaatactgaaaaatatagttggattttaagtttgagtttttcgtcttaatttagtcttctgtttattttctatctgttgattgacttgggcatagtggaaaaagaattatatttgtggacaatctgttatgtaataggggtgtttttctggctatgaagctcaccatattgtttagttaaattagtccttcctgttcttattagatatttttcaccgttaattttagctagtatgatctagttccttagttaacttaacagcatacttcaattaaatcaaataacatttgtt

SEQ ID NO: 107426 - DNA, 286 bp, Glycine max
  Clone ID: PAT_MRT3847_6801C.1
catgtgcaccttacttggtggccctgcaccttctctctctctctctctcacacacacactttctctctcttctctctctctctcagctcctcaaagatttacgggttgcttctgctcttttgtgatcggcagaaataagagtgccaaaccagtatgcattacaccaaagtgaattactgcaagctcaatcaatcaatcccactcattctccttctattggtgtgggacagaatagtaaaagaaagcagagctgtggcactggacttgtcttaaagagcataggttt

SEQ ID NO: 107427 - DNA, 2984 bp, Glycine max
  Clone ID: PAT_MRT3847_68020C.1
gactgcttttggaggaacaaaaccctctctccccaaaaacccaaacccttggcggctgcgagacccgttgtgttctctcttctctctctcttcttttttttttctctttccctctcttcttcgctccttttagggttttctcaactcttcgatttggggcttaaaccctctccgattcagattcggatttagggcttccctttctctattccgcctccaaagaaaaacagatctcgtggttggttcgtcatggccaccgttgctaatcccgcggatcaagcaactgatttgctacagaagctatcgttagaaactcagcccaagcccttggagattcctgagcctaccaaaaaggccactgggaatcagtatggatcagttgattcaggaaatgccgcgaatggccagatccagtcgtatgatcggtctgtaactcccgtgttgcaggattttattgatcctactatgtgttacctcccaaatggttacccatctactgcctattattacggggggtatgatggaactggtaacgagtgggatgagtattcaagatatgtgaattcggaaggagttgagatgacttcaggagtttatggggataatgggtctctactttatcaccatggatatggatatgcgccttatggcccctattcgccagcagggtctccagttccaaccatggggaatgatggtcagttgtatgggcctcaacactatcagtatcctccatatttccaaccgttaacaccaaccagtgcgccattcacacctactcctgctgtcctacctcagggtgaggtttccacctctgtagctgctgatcaaaagcctctccctgtcgatgcagccaatggaaattctaatggtgttgcgaatggtgggaatgcaaaaggtcggggtccaacttcaggttatcaggatccaagatttggttttgatggagtacgctcacctatcccctggctagatgccccactattttcagatgggcagccaaggcctgtaagtagcacaaccatcacttcttcgatatcaggtggcaacaacactgcctcaaggaacccaactttccgccctaattctcagtttatgggcttgcaccacccaagaccaatgcctgccatgggagccacccatagcttcataaataggatgtacccaagcaaactatatggtcaatatgggaacactgtcagatctggaatgggttatggtacacatgggtatgattctcgcactaatggacgggcttggttagctgttgacagtaaatacaaaactaggggaagaagtggtggctactttggctatggcaatgagaacgcagatggtttgaacgaactgaacagagggcctagggccaagggtggcaaaaaccaaaaaggttttgcaccaactattctggcagtcaaagggcagactttgcctgcaactttaggcacagatgaagagaaagacaagactagtaccattctggaatgtgatcaatataacaaagctgattttccagaagaatatactgatgccaaattttttgtcatcaagtcttacagcgaggatgatatccataagagtattaagtataatgtgtgggctagtacacaaaatggcaacaagaagcttgatgctgcatatcaggaggcacagcagaaacctggcggcacccctgtttttctctttttctcagttaataccagtgggcaatttgtggggcttgctgagatgattggtcctgttgattttaacaagagtgttgagtattggcagcaagacaagtggaatggttgctttcctcttaagtggcacattgttaaggatgttcctaacaatttgttgaggcacattaccttggacaacaatgagaacaaacctgtcactaacagtagggatacacaagaggttatgttggagcctgggctgaaattaattaaaattttcaaggaatataccagcaagacatgcattttggatgattttggcttctatgaggctcgtcagaaaactattttggagaagaaagcaaagcaacaattcccaaagcaggtatgggaagggaaacctgctgatgagaagattgagataaatggggaagttaatactcaaaaatctgaagttagctcggaattgctcaaggagtctacccttgctgagaaggatagtgatgaccacaaagttcccgagaatggatctgctacaaaaactggagatgccccaaagggtgctaaaccagttgttcccgagagtaagattgtagccaatggggttgtttctaatggtgtctaagctctactgtgtttgaaggaggcggtccaatacacctcagtggcatatattggtgttcttagaagtatatttatcagcaatttggtaccgcccggatttgatctgtcttgccttctcttgcagtctgaagatagtgtgattggttgcctagtgaagataaagatctgtatattgagattggctgggcggagttagttcatagaatgctagcaccaatcccttctcattgggttttgtttacagtggttagctcctaacagggtttactcctctagggttttggggttttttagggttttctgcctaagatgcttatatcttttggtttttgttcgggtttatccttctctaagcctttttttttctctctttttattttacttgtttggtcgtttcctgtcttgtaaattcagatctactttgttgcagagcagcttactttgttactttcaacaggggtagaagcaaggtgggaaatactgaaatatagttggcttttaagtttttgagttttcgttttaatttagtctgtttattttctatctgatgattgacttgggcatacttgaaaaagatttatattttgtggacaatctgttatgtaataggtgttttctggctatgaaggtcacaatattttttaaaaaaaaaaaaaaaaaataatataaataatataatatatattaaaaattaaa

SEQ ID NO: 107428 - DNA, 256 bp, Glycine max
  unsure (1)..(256): unsure at all n locations
  Clone ID: PAT_MRT3847_68021C.1
ttctagatctcagatctagggttttnttttgctcttctttctaagaaatacgaaaaagtttggtttgtgttgtgtattnttgttagtttactttgtagtttcatgctcttgtccagatgagggattcagacaggtttctagttcccatttgggtgtgtttatgtagatgagtctctgcgattaggttcatggtcttgtgtttttggtgttttacttagtgggggtggttctagcaagggtttaggtggtgagtgga

SEQ ID NO: 107429 - DNA, 528 bp, Glycine max
  Clone ID: PAT_MRT3847_68022C.1
cagaaaacaaggggagcaagaacattggagggagagcaatggttgcacaataatctggtactccattcattgcaaagaggccacgtacggtcttctcaaagaaacccatgttcgaccgtacctgggcgcagtcgagggcgctgcactttgggagaaattaatgtggctggtcatcaatatcatgttgcaattgctcatgcaccaccactcttccagaacgtgcttcccaagtttggagaagcaaaaccttccattcacaccccaaaagatcgactagacaattaaaacacttactctgtcaaaaattactctaatatacatgtgtgtattatatgtcatctgtgtcagatcttttactcctccaagacagatatacaacttactgtgtatgcaattttttatactgatacattttttttaatctaaccccaaaagatcttgcactggactagaaaaaccacctactctgtccaaaattactctcatatacatgtgtatgtatcatctttgtcacatcttttactcctc

SEQ ID NO: 107430 - DNA, 489 bp, Glycine max
  Clone ID: PAT_MRT3847_68023C.1
aaacaaaaaaaaacattgggcattggaaaatttttaaaacaacaaacgggttaaaggggtgaggggctccaaacccctttttaaaagaggggaattaacatttccccccaaaaaaccctgggcttaaaagggggaaaaacccaaggggaagggggaaacaaaaaggggcccatttcaaatgcggaaattccaagaaattcatttttcccattccaggggggaaactttagaggccccctttactggaaaaaaatttaggcccggggaggggggaaaaaaaatggggcccccccccaaaaggggggggggggaaaaaggggaggggggttttattacagaaaactcagcgggggggacgggaacccgggagtagccatggggggtaaacgggggggtgacaaaagtaaaagacacaaaggagcctttggggggggggtaaatggagaaggttttttttaattgacccggattactggaaaacatgggggg

SEQ ID NO: 107431 - DNA, 1252 bp, Glycine max
  Clone ID: PAT_MRT3847_68024C.1
caagtgaccaccaatattccacaggctatgtgaccaaaaagtcccctcctccacctgtggagtttcgtacctcaccacaactcatatggggggaggagattcttcacttcagccaccctcagcaccctctctcaatggtggatctccctgacctgttcaattgtgtggggtgcaaagagtatggctctggaaagaggtttgtttgccagcaatgtgattttcagctgcatgacttctgtgccttggctcctcctgctctcaaggcacacccctttcactcacaacactctgtcttgttccattccaaaccagccaagagtgggatggcaaaatcaaaatgcgatgtgtgtggcaaaccaacaaagggctttggcttcctatgcacggcatgtgcctttcagatgcacccatgctgcgccatgctcaacaacgaaatcgagtacccagcccacccccacactctcagaatgctcccaacaaccgtcccggaccccgcctctttcgtctgcggcgagtgcaagaagcggaggtccgggaaggtgtaccgctgcaccgtgtgcgagtatcatctccacgcggtgtgtgccaagaccaagatcaacggcctccaagccaatggcattagccacctgagaagcccagcgtgcttgctgctgcagcacgcgtggcttctcaggttgtcattgagttcattggaggactcgttgagggcattggagagagtgtgggagatgtgcttgtgcagaacattgttaagggaaacaatgctcctgctaatgctagtccaaaaccccgatacaaatgatcattataatcgccaatgagagggatgaatattgtttttcatgtttcctctcaaacttttgggaaagatacaaagacaaatatctatgtaaggtttactatatttgtttttttacaatgtgtttctctcccaaatgcaaaagggaaacgagaggatcgattcttaactccctctgcgggaacgactcttgtgtgatgaatccctggtgtcgctaggtccattcaacatagacatatagtttccctatagaaaaaaattgtatatcattgattaatgcaactattttatattgtttgattctgttgtatatttgttgttggtttgaggaggggagttgtaaacggtggctaggttagtgtttcatattatttatgtttttatataaatttaagttctttatatgtgtgcaaattgtaaaatttcatatatataaatattaattatctc

SEQ ID NO: 107432 - DNA, 447 bp, Glycine max
  unsure (1)..(447): unsure at all n locations
  Clone ID: PAT_MRT3847_68025C.1
aattcggctcgagcacgcttgctccctctctcaaccgcttccatctttgctctctctctctctctctctatggacacacatccttgtaagttcttgttctttttcatgaatcttatgttttctttacttttcatgtttttgtgtgtctgttttgttttccaattttggttcttagttagtcctaggataatttaatatttgaataaatcacttagtctttgaagagcttcaattcacacacctgaatctcatttattgcactagatctcgtgagcaaatttgtttccttttaaaaaaagtgttttttttttggggggtaattattggttccattctggaacttggggctcttgaattttatgtatgtatgttctttttcttatttatncgtgcaacttgtaacttgccagccgtctcatttttaaaagggtttggaatgggaattta

SEQ ID NO: 107433 - DNA, 372 bp, Glycine max
  Clone ID: PAT_MRT3847_68026C.1
cggctcgagatttacttgacgcaacaaaacaaaaaaagattgattaaattgaaatatattaattcaacaaaataattaaaaaaacttctacaacaaataatttataaagtaaaaaaaataatcactatgaaacaataatttctataatcttattttatttattcctattattattattattattattattattacacatcatagtgaagatgcatacttgaaatacactaagacaaaaataaacactgtatcaaaccattttgtatactttcaaatgtttcttaatgctctaatatatatgttaaactgctataggaaatctcaaacagcaaaaacagtgccacaaggaatcacgtacagggcactttcaac

SEQ ID NO: 107434 - DNA, 266 bp, Glycine max
  unsure (1)..(266): unsure at all n locations
  Clone ID: PAT_MRT3847_68027C.1
tttggtgcagcaagccatttacctcccctttgtctaataattganacacaacaaatggacaaaantcttaanttttacgggggtactgtgtcaaaaagaaactcttggaattggccaattggttgtcagccanangtaagtattacangtaagtacngtaacngttccttttaacactaatcagntanatacctggagtttaatttaatacttncatgtggnaagttgatttggtgtggaggtcgggttagtaatttggctgacca

SEQ ID NO: 107435 - DNA, 1317 bp, Glycine max
  Clone ID: PAT_MRT3847_68028C.1
ccacgcgtccgcaaccccgaaaccaaaacctccttcaaccacgctagttcaactcaaccaattacttcatattcatatatatggattcccctgcagtttcctctatccactttcacaacgcccatgtcttacccgaaccagacctttttatgcacactcccggtggtaaccgcattccagcgcacgcaaccattctggcttcggcatccccagttttagaaaacgtcattgcgtccaaccgagtcgtcaaaatccacggcgttcccgacggcgccgtcacggccttcgtagcgttcctctactcctccaggtgcacggaggaggacatggacaagtacggaatccaccttctagcattgtcgcacgtgtattcggtgccgcagctgaagcagaggtgcatcaagggactggcccagcgcttgagcacggagaacgtggtggacgtgttgcaactctctcggctctgcgacgcaccggatctctacctcaagtgcgtgaagctcctcaggaaccgtttcaaagccgtgaaggaaacagagggctggaaattcctcgagagccacgacccctggctcgaactcgacgttctccgcctcatgggcgaactcgaaaagaggaagaggagggtgaggaagtggagggaggaggagaggttgtacgtgcagctgagcgaggcgatggagtgtttggagcacatatgcacggaggggtgtacggaggtggggccatacgaggtggaggttggacgacagaaaacgccgtgctcaaagttcgccacgtgtcagggtttgcaggtgttgatacgacacttgggaacttgcaaccggctcgtgaaaggagggtgtttgcggtgtaagcgtatgtggcagctcttcaggctccactcctccatttgcctatgccagaattcatgcaaggttcctctttgcaggcaaattcgattaaaaatggagcaagagaacatgaaagatgacgcaaggtggaaactactggtgaggaaggtggcctcggccaaagccttgtcttccttggcgctgccaaagaggaaattagatcagagctagggaccatatatataaataaataatggcaagttgtgcctacatgtttcggggggattacaaaatgatcgagaaataatggcaagttgtagtgttaacatgtcattagtatttcttttctcacgggttatagccttattggtacctattttatatgaaaggtataatatactcattgagataatctctagtacttttcttcttgttttaatgctggggaaataattataatgaacgaggaaagaaaattttattt

SEQ ID NO: 107436 - DNA, 427 bp, Glycine max
  Clone ID: PAT_MRT3847_68029C.1
catcactgtatgacgtcctccttctttgggggggggggggggcataagaaaataagtatagaggggggtctggcagcagaaaataacaatacaataaatcggtatagaatgtatacatattatggggttgatgtaagatatactgtaacaacaaaataatagaaatacaatgttatagtacggctcgctggcgttgtaaaatagaggacaaatggccacaaagccagcggtggtaaaagtaaaatcataggcgagtgcatcgtgcgtaccaagcgtaatgttaaaccatattaatcggcggttagcaacgtgaataaaatggcggctattacaatgcgttgccatgcttgcaattgccgttgtagtggtcagcaacacggtgttggagtagtgggaccaattgccattatagtccacgtgccactga

SEQ ID NO: 107437 - DNA, 125 bp, Glycine max
  Clone ID: PAT_MRT3847_6802C.1
cctacgcgtccgcctacgcgtcttgaataattcttcgttatactaactctatgtgatggactcttaataataattgcccttgttattttacatgtcatttgtttgtaatattaaccagtagccta

SEQ ID NO: 107438 - DNA, 309 bp, Glycine max
  Clone ID: PAT_MRT3847_68030C.1
gtggtaatatgggaggagcattcatgatcctcctttcccttcccttctccctcatcttcctcctcatcctcttctacataaccctccccgcaacaacggggcgagggaagaaaatctctggccccgctggtccggcaacctatcccctcataggttgcctgatatccttctacaggaacaggtaccgtttgttggattggtacactgagctactagctcagtccccaaccaacaccatagtggttcaaaggcttggtgcccgtaaaaccattggggccaccaaacccacaaaatgttgagtacatgctc

SEQ ID NO: 107439 - DNA, 723 bp, Glycine max
  Clone ID: PAT_MRT3847_68031C.1
agaattaaaataatagcttcaccttggtacaatacgtatgcatacatactagacatatggtacagctagatttacacattaattacaatgtcatagtgtcatgctcatggcagacagcaccaccttagaccaatatacttagtcttttttttatgatcaatacacttgatcttattttctctaacagtacttggaatgtatgttgcaaagccatcgatcacgattttattgttacagtacaagatagatcagtacacatgtactcaaacttaaactcaattcctgcgtttctcaatcagcttctgcagctcctcctttttggctcccaccaccttttccactactttacctttcttaattagtataaatgttggcattgcttgcacctgaaaagcctcggccacctccattaactcatccacatcaatcttaatgaactcgacgtctgtgtattttgcagcaaattctttgataattgggtccatgtatttgcaaggtccacaccacgtagcagtgaagtcgatgaccatcagcttgtttgtttctttggaggcatcaaagtgagccttccatttagcagtggaatggaaggtgaggaccagcgatgagtgtgatgatttttctacaaactcgaaagtggaaaagttggctcccataattttaattgcttccttttggggatgaaaaaccaaaactgatttaaggatgtgtagggatttgtta

SEQ ID NO: 107440 - DNA, 449 bp, Glycine max
  Clone ID: PAT_MRT3847_68032C.1
ggagaccaaaggaaagcatgtttattcagggcctaaacagagttcaatacattggccccaaggcacaaaaccaaaactcaaaaacagcaatttccgaagcgggggggagggcaacattttttttttctaactacaaatttcaattcttcttcacagtagcaggggttatgaggcccacaaatccccccttgggggaggcccccccacccaaaaatccatcaacatcgggctgggctgccaattttttgcagtttcccccatttacagagcccccatagataatttttacagaggcgggaacttcagccctcacattggcgtgaacccatttccttaaatcagcatgaacctcttggccctgagcaggagttgcaccctttcctgttccaagggcccaaactggcttataggcccaaacgaccttgccccaatttgatattttaactgca

SEQ ID NO: 107441 - DNA, 259 bp, Glycine max
  unsure (1)..(259): unsure at all n locations
  Clone ID: PAT_MRT3847_68033C.1
catnanagnnnctctcttaactcgagtgagntcaggaaggtccagaaacaattcntatggagtttnaagtnaccttcatatttnggnnangcgtgcaccttatatattntcctcagactananacacgccctantgncatatnatgagccatcatatggtagaaagtngaagcttnaaatgctgactgcagttgcaantgaaantaacacctatgagatagtgacaganttatgtgnntatgcngcaaatgttgacatt

SEQ ID NO: 107442 - DNA, 545 bp, Glycine max
  unsure (1)..(545): unsure at all n locations
  Clone ID: PAT_MRT3847_68034C.1
aatcaacaaataatatatttatatagaaaaataggcactagaagtgcccaaacaaagtacaaacaaaccccatacagccagcacaatgcctctggttacaaagaatttacgtgatacttattacatataaatgctatgtatcctagttaaagactagctactcagccatagaaagtggaaaacatgtatactgtccatgagtaatacaagtcgtcgcaaaaaaagtgacgatactatgtaaaaatcaaactaactctcacatttcaccttgtttctcctcacttctgtgtggaagtaattttggtgagactcaattttttttttccttcaaatctctactccatttcgcggcaactaaattggaaataaaaccatactctcccttgnttctttgcagnttcttcatttcttggggatttcttgacaacctaagatagcgttagagatagaatcttaactttgagtgcagtgacacgtatgattaagtaggtacctcaacgtgaggcagaaaaaaattaaaaacgaaagttctggaagtacaaaaa

SEQ ID NO: 107443 - DNA, 720 bp, Glycine max
  Clone ID: PAT_MRT3847_68035C.1
attgcccacagtagtcatattatttgattataaaattgctaataatagacaggtgcaaacgaagttggttctagttataacccttttgagtagaaatgaatgactcttgttgaacaaagatctcaacctttgtggctttataaagaccgaagtcaatggcctatagccctgccacacaacaaagcattacttggtattgggtactcatccctccaagaattggcaggggaataaacaccaagataaaattgttgccctaaatactgacgagcccagttctctgatctcacattccacattcccacattgtccaaaggcatgtatactgcagtccatgacttgggatatacctgaactgtgcaacgagagattgtgtctctcaaattgtaatttgacctgcttgaagttgaccattggcctccatccattccaacaacatagaagtggtggccatcaacgtgccatgactggacagtgtcttcaggattctcaaacacgatctccgcgtaacctcggaaatcggcagccatgacagaagtctggaggtaacagtcactgccagtagggttctctgggatgcttccaaggttgaacactcctgggatcttgaagtaatcagccagtttaagcggtgtatcagcagggatgaaggaaacaccattgacagcatatctctgcttgccattgataattcctgcagaaatttgaagtctaactgta

SEQ ID NO: 107444 - DNA, 2475 bp, Glycine max
  Clone ID: PAT_MRT3847_68036C.1
agaaaaaccacagccaaaagtcaagtggagcaaaaacaatgggcagctagtgcttccaaatagggtcactgttctctgcaatggtgttgaagtcataatttttccaagccttcatatagttgtgtgcaagtgtgggttttgcaggacagaaaagcaagcacttagtgcatgggaacgacacacaggttccaaattaagaaattggagaacaagtattagggtgaaagattctatgctacctctggaacaatggatgctgcagttggcagaatttcatgctactgctcaggttcccaccaaacctaagaaaccttctctgaaagaaagaaagcataagttgcttaccttcttgcaagagaagtatgaacctgttcatgctaagtggactacagaacgctgtgctgtttgtagatgggttgaagactgggactacaacaaaattatcatttgcaacagatgtcaaatagcagttcatcaagaatgctatggagcaagaaatgtccgagattttacatcttgggtttgtaaagcttgtgaaagacctgacatcaagcgggagtgttgtctttgtcctgtaaaaggtggtgctttaaagccgacagatgttgacacattgtgggttcatgtcacttgtgcttggtttcgacctgaagtctcttttgctagtgatgagaagatggagcctgctttgggtattctaagtattccatcaaattcttatgtcaaggtacgttttatgctggtaaaaattagtcacgcaaaggcacgtttttttcatcgtacaaagattttagacaaaatatattcaatggtatcttattgcgtattgcatttactttattggtttcaaatcgacaatcatagaaatttgataaaagcaagttgttgtagctgtttggcataaaggacattatctagactctgaattacttaatatttttatcattttgtgcaaatcctagaaatagcctctttgtttgcaagagtaaggctgtgttcgtctaccctccccaaactccatttggtgggagctttttgcattgggttgccttttgatgtctcttggtccactactcttaacaaatacctcgagccgaatcggctcgagtgaattttcagatttgtgttatttgcaagcaaattcatggttcgtgtacacaatgttgcaagtgttctacttatttccatgccatgtgtgcttcaagggctggttatcgaatggagttgcattgtttggagaaaaatggcaagcagacaacaaaaatggtctcttattgtgcttaccacagggctcccaatccagatacagttttgattatgcaaacccctcttggggtcatttcaactaaaagccttctccaaactaagaaaaaaactggttcgaggttaatctcatctagcagaaaaaagcaagatgactctcctgttgataacactgagcatgagccattttctgctgctaggtgccgtatctttcaaagaacaaaccataccaaaaagagagcagcagatgaagccgtttctcatcgagtgaggggtccctatcatcatcctttagatgcaatagagagtttaaatacacacagagtagtacatgaacctcaggcattttcttctttcagagaacgcctataccacttgcagagaaccgaaaatgatcgggtttgctttggtagatcaggcatacatggatggggcctctttgcacgaagaaatattcaagaaggagacatggttcttgaatatcgtggtgaacaagtgaggcgcagcattgcagatttgagggaggcacgctatagattagaagggaaagactgctacctgtttaagataagtgaagaagtggtggtagatgccactgataaagggaatatagctcggctgattaatcattcttgtatgccaaattgctatgccaggatcatgagtgttggtgatgaggagagccggattgtactcattgctaagactaacgtggttgccggtgatgagttaacgtatgactacttgtttgatcctgatgagccagaggaaaacaaagtcccgtgcctatgtaaagctccaaactgccggaaattcatgaattaggaaggattatacaaatgaaatgaacaccagatgactagactattgtttcttctccgcaaggagcactaaccccccatcccctcttctgcagggaagctcacagttacaccaaagctgtattttttatcaaaccaaaagaagagaaaacaaagtagggagaaaaaaaaaaggcatagtttagtgtttttcttttacccttttgatttcctttagacattcatcgaattttaataaaaacctagatttggtagcttttggctcttggcgtctctgtaaatgtatcaccttacattttactcattttcttctacttaatgtcaaccgatttcttcccttcatgtacttttccgatgatctaccaatctaattgtattgaaagatagtaat

SEQ ID NO: 107445 - DNA, 236 bp, Glycine max
  Clone ID: PAT_MRT3847_68037C.1
aaataaaaattttccaattagcccccctttaaatatacaccaagggcgttgggtgaatatggcacatatgtgttctatagatagtgtgcggagagaatttccatttctgaaaagcgcaaattctgaaaactcctttccaaacagggagactgtaaaaaacacaatattttcattattatccaaaaaatagagcagcggacattaaaagcccggaagtgaaaaattattttcggaga

SEQ ID NO: 107446 - DNA, 389 bp, Glycine max
  Clone ID: PAT_MRT3847_68038C.1
tcggttcaaatcacaacaggcattttcactcttacagctctcagttggctattggcctctattcctttctcatcttgttcttaaaagtgaacttaccctttggtgagaatttcctctccagtgcccctatgatgaagaagctctaaaaaatgcaatcttttacttaatttgatgcataatagctggtggggggatcagagttttgactcttcactgcgaaacccgctttccaacagaattatcagggaggcacggctaatttagaagatgaccagctgccgatgctgtcagatctagatgcacaaccatatgatgaaccctcggactctaaattcacacggacagtaaccaggacacagagcgcatcagtttctatttctatgagttcc

SEQ ID NO: 107447 - DNA, 639 bp, Glycine max
  Clone ID: PAT_MRT3847_68039C.1
cgagagcaacacactctcactgttgtcgcctcttgctactttgcgcgttctttcatctgaaaagttagctcctactaactgttacatccttcgttcatacaaccattttctcaaacacttttcctcctccaccactaacctcaagctcggaactccacaggccattctaaatacttctcctatagccccttcagaggtcaccactcccactctcagagaattatgccaatcgcatgttcccgaacatatactgcaaaggatggaagagattggttatgtaatgcctacagatatccagagggaagcactgccttaccttttttccgggcttgactgcatacttcatgctcaggttctgggaagacactcacatacctgcttttgatccattccatcatcaatgctgcaaaatcttccgtgcaagccctagttctggtacccacccgggaacttggcatgcaaggtaattccttgcaaagggtaactactgagtgccaaaataatttgatgacaaggtcaccaaggttgctaggacattggctgcaaagccaactggagttgatggggagcagaagtcatgttccatcatggctctgctagatggaggaacactgaaaagacacaagacttggttaaagg

SEQ ID NO: 107448 - DNA, 716 bp, Glycine max
  Clone ID: PAT_MRT3847_6803C.1
aaaaaaacacattacacaatgccattccaactagtaaaaacttgggctccaaaactcacaccccccattaatttaaaccttgaaattttaagcattgtaattggaggtcgttaatgtacaaccatttgacagttcttttattgggctaggaaagttgggtcaagggatgataatgcagcaacagcatggagttacaagaaattttaagcattgtaattggaggtcgttaatgtacaaccatatgacagtactctcattgtgctaggaaagttgggtcaagggatgataatgcagcaacagcatggagttacaaaaaaacaaaggcttgaaaaaaaaaaaaaccaaaaaaaacccctttttgactcaagctgagcataccaaataccctggatcttgacatcctttggagcctttgctcccaaatcagggggggacgggtgaaaactttggaacacaccgataacctcgccggtctaaggcttggtcttggggacactgaaggggattttccccttggatgaagaggcactcttgttgttttccttggaaagttcctcctaatctccttttccaccaacaggaaaagcaactgcattgtcataacctgaaaaggcacctcttcccttggggtccaaaaaaaaccttccacggtatgatgggaccaaaaactctccactaaagctgtctggcttccctgatgccaccaactgcttgat

SEQ ID NO: 107449 - DNA, 127 bp, Glycine max
  Clone ID: PAT_MRT3847_68040C.1
gaattcagctcgagctttataccgctacaccatactgtgaaacatcttatctccatcgtatacagacacaaatggtacttgacaacctgaacgactatgcagtaagagcccttgtgaatgctgttgc

SEQ ID NO: 107450 - DNA, 3571 bp, Glycine max
  Clone ID: PAT_MRT3847_68041C.1
ttttctttttttttttttttttttttttttgaaatcatgacttgatggcaacgatcaaagtacaatagccaccaagttatagttataattttataatctccatctgctgacagtcagtacaaaagagcctgtacagcaaacccattcacaagctgggaattgttgtaagtgcgtttggatgataatctattttaaattgctttcataactgatattgtttcataagactaataactgatgcactctacaggttttggttagcagctaaaaagcaaaacggactacaacaatagatacaactacggatcaggactaaagtagctcacaacaataaggtggtgacatcagaacctacaaatttcaggatgggacataatacatttacctgaaagtactattctagatttttttgatctgatcacatggcaaggctcattttggtagcttccattttggataacagatctttaatgtctgtctccattctcattttcatgttcaaatactccagatgtgctctttctaatgcttgggcttcttcaaatttttgtttacgaatttcatcagtctcagtcaatcgtaacttggcaattcgattggtatattcttcctcaattttctcattctttgcaagggcaatgcgcttcaacccttcagcttctcttctagcatcatcagcacgtgattgaaacattttagcctctgcctgtttaatttttactatactctccaattcatcaaaacagaagtccttctggatactactcatctgcaattcttgcacaagagttcttttatcattctggtcaaaggtaggaaggatatttgcaggcctttctaacagaggtggcttttctgaataaatagatttcatccaagttgcttcctggctgggcccagctactccattgttttctttaatttgttccttcccagaaaagtttgttgtcatgggtaatttggaagaatcaccatccgaaaggaaagacatgatgtgcctcaaaacctcagggagattggacttatttgccaaccttggcagcacttgctctgcaatctcatgcaactgtctccctctcatatccttgctcgcagaaaaaattctctttacatattcaagctctttgcaaagggtttcaactgaccattcttttgcaaaattttgaaacacctccttgacaaagccaaacatctcagaaggatgatcacaagcaatacagtgaaactgcatctcagtcatcccttttgtcccaggcccatttctaatataagattcccgtaatccacagtcagtatggcaccaatgaaggcaaacatcacatccaacccaactacatgtatttgaggcattgtcaaactttgaacacacaaggcacatacactccctgcaaaaaccattcttctgtgcacaaaccttgcaatcacattcgtccacaggcaactgacttcgacatgaaagattcttacaccttaagttcagaaaaatttgagccaactcagaagatgaaatgctgctctctaggtgaagaaaatgagtcaaaccagtttttaaagcaaccaaaatttccagttgcactctgtgacacttcaataggacatccaagattatatcagatctgttcagcagaactttttgaaaagcaagtatctgcccgtgcttatctgcattaagcatgatttcacgaataccctctttcagacatactatggactgtccggtcatttcatgaaactttctggacattgcatgaacaggttcagaaacaattcttgcaatgattgtctcaacaaaatcaactccacccaccagaagttgttcttgttccttctggcttgtagttcgatacagactaccactacccctctctcttacctctctctttttctcaaagctataatttgatccaatatcatgagacccaacactctgtgacggagatctaacatcgtcatggcgtcttgactggcctgaaaactgtttatgaaaactcaattgcctgtcaagtccactgcccatttttgaacttccttctagaaccctggaatgttgaccctttacagcttgactgtctaaaacaccccatgatgcctgaggctggaaaagggagccatttccgtttgccgaggttctttgaccaaaaggaacttctttctgtttgggatcgctctgagactgaccttgccaacatccctgggaaacttgatctattcccccgaataaggggcgactgccaacagattgctcatagtccactgaagtttttgtcagagaacagcttggattatgatagaatgattgggaacctgaaaaggacattgatgcagtaaaaccatctgagttagtacaaaatgtattacttaaagactgcacactccgtgcttgactgggggatccaggggcttgcgttgtacgattttcatcagtctcatgagcaccaataggtaacagaacattcggcaagctaagagtaagatcaagctgctccatgtcatccttgtgcttgttgagaactgagtggtctactttctccactttcctaacaggagatctggaaaacaactcgaatccccttgtgcttggaccttctataacatcaacagaacacgtcgggaggtctctcgaccttctgtccaaccacaagctatcatctaaagcatgatcaacattagtaggtggtacaagtgcaacagagacacctttgcctttatcctttgcaatattgaccgcactctccatcgccaccggtctgggcccagctactccattttcttctcctgttgatactccatcatttaactcaggtttcacaacatccgcgccggttcctagatctacaaccttgttcttgtccttgtcctgcttatccacatccgcacccttctttgtttcctcctcgcactcagctccagcatccaaagcctcctcctttttatcatcatcaccattacccacagactcaacttcagtctcagtaacaagcattttctcagacaaatcatcccgaacatctgccatctcatcagcttctatctcctctccatcctttacctcacaacaaccaacctcctcattaggtttcactgcttccttactggacaactcccgtctctcatccacagcagcatcagtgctgtcatcattagggtggcattcattcttctgagcttgcttctcatcagtctccatagcaacagagggcaagtcttcactcacgggaggaaccgtttccgcttggggttcaggctcaagctccccttcctccatctcactaccactcccactcccactctgaacctgctgcaacgactcctcctcagccttcttcacctcaacactcttggacagctcgctctccgaatccttggaccaagtgggagacttggacttagacttgacggagttaccatctctgaatggtctcggagaagaagaagacctcttcttcgattgctcgctctcagaaacagaatccttcgaccacgacggagacttcacatccctcaaacccttgggagaacgcaccaccctctctctatcatcaaaatccttcatggaccaaaatctcgagcc

SEQ ID NO: 107451 - DNA, 460 bp, Glycine max
  Clone ID: PAT_MRT3847_68042C.1
attctcgaatggagggtgtcccgcctcatctctttgtatcccatgtcctttgctctttgcacaatcgtttatccagagccttgcctagacccataccgcgtgcttctggagagacatacaaccgcttcatttggcacagatgcttcgaatcgtcaagaggacggacggcaacacatcctagtggcttgtcttgtatgctatatgcaagcagaaggtctccgtgaggagcgccatactttccgggcagaaagtccaattccgactggaagtcttggaagccaaggtcgatatttagccatgcaacgtaggctgtaaataggtctcttgctgtagcgatgtcctctgctgtctgagcggaaacgatgcggaacttggcgttatccataaggtagattgcccgattgttgtcgcagagatgagagaagagaccgagtccatcttaagttcttgagaggacttt

SEQ ID NO: 107452 - DNA, 272 bp, Glycine max
  Clone ID: PAT_MRT3847_68043C.1
aaaaagttcttttttttgttaaggctgaggagccaaaaaaacagaacctgccctttaataagggcaacaaaatgacaagttgctgtgggaatactcagaaaccaaaatttgtttaaaaagaatgaggttattagacccatttaaaaggccctcaataattttttgaaaagactgtttacaaaaaaatttttaggttacattgctaggaagattataggatttttttattttgttcggccattgatgaaaagaaatttttttttttggaaatt

SEQ ID NO: 107453 - DNA, 126 bp, Glycine max
  Clone ID: PAT_MRT3847_68044C.1
agctgtgcgccttggggaatcttttactaagatattatttgttcattgtaactttagaagacactggaagaaagccaaaaatgctaagggggagttaaacggagaaagacccacctttctagccga

SEQ ID NO: 107454 - DNA, 200 bp, Glycine max
  Clone ID: PAT_MRT3847_68045C.1
ctttatactttttttcacacactccattattcaaagtcccaatcctaagaaaatagttatcacacatttaatcataacttatttcatcaaaatcctcagtttcatatactattacattttctctctttatatctgttcaatatgaattagtcaaataatttatccaatttccctatgagtataaccactcccaatcattt

SEQ ID NO: 107455 - DNA, 463 bp, Glycine max
  Clone ID: PAT_MRT3847_68046C.1
aaaaaaaaaaaacaaagttaaaaaataatacaaatagtaccgcgtgttgaatttttttgtgatggtgtcgggaaaattaaggtgagtatgcgtgttgacttattgcatgtgcacttgaagctcccgtgtggtgtggtgttgaagaagcatcttatggggatcgttccatggtagccaaatgtaacgtggacacgtgtttcgtattaggtggttggtgaggatttcttgatgtgaggctatcacatatgacattgctaatagctttgtgttggtcttactcagtattcagtaagtactcacatcacatgtgggcatctaacatgacccattgtagcccaatgtcggcaaccaattaagaaaatatttcaaaatgctccataaaccaagaattaggtgcattatttaagtttttctttttaatttaaatgaaaacataaattgtttaaattaaggggaaatgaat

SEQ ID NO: 107456 - DNA, 271 bp, Glycine max
  Clone ID: PAT_MRT3847_68047C.1
cggaaggaaatcttaaaatactttttttataggagggaattaacactcttctttttattgggacaattctatttaaggtacctttggcacaggaaagaaagattttcaaaacaaattttggtaaataatccttaaacaaacctttatagaatccacctaattaatacccccttttaaattgaaaccacttcaagatttttacattgatatccccctgccacataggtttagattcatctaatttcaaactatccatttgggttatttttaa

SEQ ID NO: 107457 - DNA, 764 bp, Glycine max
  Clone ID: PAT_MRT3847_68048C.1
ggcggcacaacacaacctattctttttccccttcgctttcccttttcaaaaagcaaagctttcatctttctctctatccatatgctatgcatatgcttattctctctctctctctctcaccattgatctgattactgcttgtgtactataaccaaattggagcaaccccttttgcatctgatcctagaatcacaagcctagctacccgttttctaccttctcatgacctgtaattggttgtgaaaaatgacgaggttgactcgtgattttggtgatacaatgcaaagagatgctgtgcctgcggtttcttctgatgttgtgtttgcttctagtcggtttcctaattacagaattggagctaacaatcagataatagagacaaaggatgacccaaaagtgctatcaatgaaggaggttgttgcacgtgagactgcacagctgttggaacaacataatcgtctctccgttcgtgaccttgctagtaaattcgagaagggtttggcggcggcagctaagttgtctgaagaggctagacttagagaggcagcatcattggaaaaacatgttcttttgaagaagcttagagatgcacttgaatccttaaaagggcgtgtggcaggcagaaacaaggatgatgtagaagaagctattgctatagttgaagctctagcagttcagttgactcagagggaaggggaactaatacaagagaaggcagaggtgaagaagcttgcaaattttcttaagcaggctttctgagatgc

SEQ ID NO: 107458 - DNA, 1118 bp, Glycine max
  Clone ID: PAT_MRT3847_68049C.1
ggaaaatgttccacatttatatgaacttgaagggaatgaaacgttaggttcttatttgcaaattcaaccttgctctgataatgcccctgaagtttcgaaatgttcaattcagtggtatcgtgtatcatctgatggtgccaaaaaagaacttatctcaggagcaacaaaatcagtttatgcccctgaaccttttgatgttggacgcatattgcaagttgatattatttcagaaagcgagcatgtcacactttcaaccgctggtccaatagatccagctgctggtttgggaacctatgtagaggcactagtgcgcaaacatgacactgaattcaacgtggtagtaacacagatgaatggttcacatcatccaactgaatctattcatgtgcttcatgttggaaagatgaggattaaactttgtaagggaaagacaacaattgccaaagaatactattcaagttcaatgcagctttgtggagttcgcggaggtggaaatgccgctgcacaagcactattttggcagccaaagcaggggcattcttttgtattagcttttgaatcagagagagaaaggaatgctgccatcatgcttgcaaggagatttgcatttgactgtaatatcatgcttgctggaccagatgacagagctcctctagggacatgatgggcctccttacatcttatttccccccttgtaattatgagttttttctaccttgtattataagtgttatttcaacagtaaaatctaccttgttatattggtaagttagtaatgattcataccttgtggtctgaatcatttatataattttgtttcatcagtccaaggcatttttttatttgcctttgtgagtcgtaagttttaggttacattataattataatagaatccgtggctgccatgtcgaagtgtttgagatgctaattggttgtatttaatagacagacattcagacaattactgagaattctgattgcattttgtctatggacactggcctcgtggacaggacaatatgtgaatctactctcattatgtaatataatacaagagaatccaatgtatattgctagatttacctcaaaagaatccaatgtagtgtccaagatactat

SEQ ID NO: 107459 - DNA, 1609 bp, Glycine max
  Clone ID: PAT_MRT3847_6804C.1
aggatgacaaagctgagttctctccaaggatcaattgcaatccatttcaaatacagtgtttccctagttacttgcatattaggtgtaataaaacacataacacaatgcaattccaactagtaaaaacttgagctccaaaactcacacacaccatcaatttaaaccttgaaattttaagcattgtaattggaggtcgttaatgtacaaccatatgacagtactctcattgtgctaggaaagttgggtcaagggatgataatgcagcaacagcatggagttacaagaaaacaaaggcatgaaaaaaaaaaaaaccaaaaaaaaaaaaacactctatgactcaagctgagcataccagataccctggatcttgacatcctttggagcctttgctcccaaatcagtgtcggacggctgaagactctggaacacaccgataacctcgccggtctcaggcttggtcttggtgacactgaaggtgattttccccttggatgatgaggcactcttgttgttttccttggcaagttcctcctcatctcctcttccaccagcaggcaaagcaactgcattgtcataacctgtagaggcacctcttcccttggggtccaagaaagagcttccacggtatgatgggaccagaaactctccactaaagctgtctggcttccctgatgccaccaactgcttgatggtgaagaggaacggaacacgttcgcctcccggtagctggactgtgacggccgcatagtcaattccatctttctcctcaaacttcacagtgccatcagaagacacctcaaagggtccctcaatctcatcaagagtgtaggtcaaacgtgtcatgagctttgtgttttggaactcagggggagcgttcttggccacaccctctgccttcactgtgaatgaagttggctcaaggcagaacttcttggcattgtatttcccttgcttgaaggcaaatgactccaatccaccatcaattgttggacactggtttgctgttcctgtccccttcacttccaagtaggtcttgctctggatttcgtcaaaggttagccgctttggtactccttcagcacttgccccagaaacaacgagagcagaggtggcaagggcaaagcctgcaattttggtagcatcaacacacttgtgagccaagtccttaagatcagcctgaagggagcatgtgacctttttagctccagcaggttccaaaccaaaagccttggaaatggactgagtagacttttgctgcaaagtgttgctcctgctcaacttggtgggttgcatgaaagtagctgctgcttgtagcgacgctgccattgctttgccaccaatctaatgtaatgtaatgcgatatgttccaaaaacaaaactagtttgcaagtgtttttgtgttggtggagaatgaagagtggagagagtacaattatttggtggctatggtgagttgagtaagatagcgaataggataaggtgatctcttattggatgattcatgctaatgcaaatggttctcttggttgccacgttgcattcttctcaattgggataaagatactttcgtctttctgtcagagttttgctgactaagatgccacctcgt

SEQ ID NO: 107460 - DNA, 2429 bp, Glycine max
  Clone ID: PAT_MRT3847_68050C.1
actagggcaaacgtgcacacaaagacacaaaacgttcacttcacacacgggcggcacaacacaacctattcttttttcccttcgcttcctcttttcaaaaagcaaagctttcatctttctctctatccatatgcttatgctatgtatatgcttattctctctctctctatacaaccattgatctgaccgctgcttgtgtactataaccaaattggagcaacacctttttgtatctgatcctagaatcacaagcctagctacccattttctaccttctcatgatcttaggtgtttttggttgtgaaaaatgacgagggtgactcgtgattttggtgatacgatgcaaagagaggctgtgccagcggtttcttctgatgtggtgtttgcttctgctcggtttcctaattacaaaattggagcaaataatcagataatggagacaaaggatgacccaaaagtgctatcaatgaaggaggttgttgcacgtgagactgcacagctgttggaacagcataatcgtctctcggttcgcgaccttgctagtaaattcgagaagggtttggcggcggcggctaagttgtctgaagaggctagacttagagaggcagcatcattggaaaaacatgttcttttgaaaaagcttagagatgcacttgaatccttaaaagggcgtgtggcaggcagaaacaaggatgatgtggaagaagctattgctatggttgaagctctagcagttcaattgactcagagggaaggggaactaatacaagagaaggcagaggtgaagaagcttgcaaattttcttaagcaggcttctgaagatgctaagaaacttgttgatgaggaaagagcttttgctcgtgctgaaatagaggatgccagagcagcagttcaacgagtggaagaggcacttcaagaacatgagagaatgtctcaagcttccgggaaacaggacatggagcaattaatgaaggaggttcaagaggctcgaagaattaaaatgctgcatcagccaagcaaggtcatggatatggaacatgagcttcgagcattgagggctcaactcgcagagaagactagacagtatcttagacttcagaaggagttaacaaggacgaagaaaggtggggaaaatgttccacatttatatgaacttgaagggaatgaaacattaggttcttatttgcaaattcaaccttgctctgataatgcccctgaagtttcaagatgtgcaattcagtggtattgtgtgtcgtctgatggtgccaaaaaagaacttatctcaggagcaaccaaatcagtttatgcccctgaaccttttgatgttggacgcatattacaagttgatattatttcagaaaacgagcacatcacactttcaactgctggtccaatagatccagctgctggtttgggaacgtatgtagaggcactaatgcgcaaacatgacgctgaattcaatgtggttgtaacgcagatgaatggttcacatcatccaactgaatctattcatgtgcttcatgttggtaagatgaggattaaactttgtaaaggaaagacaacaattgccaaagaatactattcaagttcaatgcagctttgtggagttcgcggaggcggaaatgctgcggcgcaggcactattttggcagccaaagcaaggtcattcttttgtattagcttttgaatcagagagggaaaggaatgcagccatcatgcttgcaaggagatttgcatttgactgtaatatcatgcttgctggaccagatgacagagctcctctagggacatgatggtcctccttaacatctgattttcttccccttttgtaattatgagtttttctaccttgtattataagtgttatttcaccagtaaaatctgccttgttatattggtaagttagtaatgattcacaccttgtggtatgaatcatttatataattttgtttcatcagtccaaggcatttttttatttgcctctgtgagacgcaagttttagcttacattataattattatagattccatggctgccgtctcaaagtgtttgagatgctaattggttgtatttgatggacagacattcagacaattactgagaactccaattgcattttgtctatggacactggcctcgtgaacaggacaatatgtgaatctaccctcattatgtaatataatatagaagactccaatgtatattgctagatttatctcaaaagaatccaatgtagtgtccaagatactataaaataaaaatgtttttgtctacctgccccccattgcaactgtatatgaataggaggtttatccataaattaggaattctcagcaataaccaaaattgaaaaaaaaaattgcagaagagtaaaatcttattgtctgcttaataaaaaaaaagaaaaaaaaaaattaaaacaaaaacccc

SEQ ID NO: 107461 - DNA, 492 bp, Glycine max
  Clone ID: PAT_MRT3847_68051C.1
aacaacaacatagttatgtttatttctcgggttgaaagaggcgttacctagaagtcgaaggaaggcggctatacgattattaaaaagccgcaaagcaaaacaccataatagtgtgactcactcggggcacgtgagatccaagacgagagggtggtattggcgaaatcgagcgaggagatgagaacgcttagcaagcccccagtcccgggactgaaacgcaggggcacaagcgcatcctacaagagtgtacctcctctcactatctctagcttcagcttaacctgcagcttcaacacttacaaataccccctgcgcaaagtaggtatagtccttggttggaaaacagcctacccacacgttgggtggcaccgtgtactgcggctcccgattctgagtcctatctgacccaaggcgagtgaatgctacgctcccatttttctcattcaattccactacctgcaattcaattcatatcacattcagctcacaaag

SEQ ID NO: 107462 - DNA, 569 bp, Glycine max
  Clone ID: PAT_MRT3847_68052C.1
atttctttcttctgatacccccaattgatttgttgcaaagctcaatatggcttcagtcaagctcaacaccccgcagacgggcgagtatgagcagcccaccggccttttcatcaacaatgagttcgtgaaggctgtcgacggcaagacttttgaggtcatcaacccctccacagaagaggtcatcacctccgtgcaggaggcgaccgagaaggatgtcgacattgctgtcgccgctgcccgcaaggccttcaacggcccatggaggaaagaaactccagagaaccgcggacgtcttctcgtcaagctcgccgaccttttcgagaagaatgctgatctccttgccgctgttgaggctctcgacaacggaaaggcgttcggtatggcccgaagcgtcgatgttcctgccgctgctggttgcctgagatactacggaggttgggccgacaagattgagggcaaggtcgttgataccactcccgacacattcaactacatcaggaaggagcccatcggtgtttgcggacaaattaatccatgggaacttttccctgctcatgtgggcatggaag

SEQ ID NO: 107463 - DNA, 132 bp, Glycine max
  Clone ID: PAT_MRT3847_68053C.1
ggttgaaaataaccatgatggaaaaccgggctttgaatactgctggcacacgtttaaattattacacaatatgatgcggggcggataaacgaagacagggaaagcacccgcccttattgagattcctgtgtt

SEQ ID NO: 107464 - DNA, 262 bp, Glycine max
  Clone ID: PAT_MRT3847_68054C.1
ctcgagccgcttgtcacctttgtggccttaggcactttgtcagcgcctcaatttcttcatctacagaaaggcagtatgactgcatgccatgtttttctgaagataaaagatggtcccactaggtcttcttagtgctagtcactctttgagaggatttggtgtattcatttgttttcttattaattatctatttgcccctaaaatgtcagctctgacaaggggaggacatagatctgtccagtttacccaatgcttagattta

SEQ ID NO: 107465 - DNA, 170 bp, Glycine max
  Clone ID: PAT_MRT3847_68055C.1
agggttgcttttaataccaaatgaaccgaattaagctaatggtcacaacctcgggggactaggatttacctctcaagccctcaaatcaagttttcaagggttttacgggattatatgcccaagcgcaacccggggtccatcggggccactttgaatacatgacacattga

SEQ ID NO: 107466 - DNA, 468 bp, Glycine max
  Clone ID: PAT_MRT3847_68056C.1
gacaaacaaaaaagtcactgcgaaaaatatcattccattaaggctccagccacattctctacattacaagctcacaaaccatctggttagctcctccaccaatcgctgcaggattcactttcatgatacacctaagccttctactttagggagattcgacatgacaaacaaaacgaggttaggtaaacaatgaatgaatatgtggaaggcataaaaggcctcagcgcctatctacataaatatattatgatcatggactatgtcacctcatgtagcagcataccgggcttacccttttgttgcatcttgtcccacatacgaggacaattgtcttggagagtggtcatgtgcagagtagtagatctaagtgcacccaacaagggataacacgaagctgtgcacatactcaactgggcttgaactgttgaattgatacacccacattaccatgctaacatgctgcatttt

SEQ ID NO: 107467 - DNA, 326 bp, Glycine max
  Clone ID: PAT_MRT3847_68057C.1
tacttcggctcgagctcgagccgctgatgcttcgagttttcttgtgcctctcgcccagaatccaagctcaacccgaacgatctgttagccgtacatgctggtttgttcacatttatggaatggctcatggatgacctctatgcttttactgtctccatttcctgcctgacttatgcgcttgctggacgagattattctcttgcttaatgtatgaatatttcaataacacctatctcgctacatgcgcggtgtattgaacatctgaaactatctacattgaagatctatctcttcaacaggtattgtttgattcggctccataggaa

SEQ ID NO: 107468 - DNA, 350 bp, Glycine max
  Clone ID: PAT_MRT3847_68058C.1
ccatgtcaaaatgcctcatttaatggaaaaattgcttgaaaagttgaagttcttttacaaagggaaaaccctccccaattaatacccccttttagaatatgaattttaatcctaatctacgaaatataaaaactagacgtaaataacaagtcctctcacaacacaatttgaatctaacttttacaaattcccccttcaaaataattagaaattcaataagtcccccaggctccaaaatgattggggatgtcccataaaaaaggacaagactaaaactaatcccctcccagaatgggattttctattcacataaaaagactaacctttgtggtgaggagtttttttttaat

SEQ ID NO: 107469 - DNA, 684 bp, Glycine max
  unsure (1)..(684): unsure at all n locations
  Clone ID: PAT_MRT3847_68059C.1
ccacgcgtccgccgaggcttgccgctgtttcggattccggcgcggaaaatggacgagtcatggagaatgcgaatgggccaaacgccgggcctccctcgccggagatccatggaggagcgctcctccgccagaactcgcctctccatcttcgccggtgccggcgctggcgagcaggcaaccctcgaccccgacgacttcgccgacgtatttggcggcccgccgaggaacctcctggcgcacaaattctcgaggtcgaattcgttctacgaggagattttccggccgccggtgttcgcgtctccggcaccggcgaagggaggccggagcctgccggtgttccggattccggcgaagaacgaggcgttctacaacgacatattcgggtcggacgacgaccggcggtcgcgggagcgatcggggccgcagtcgaaggctaaatcgaagtcgaattcgtcgtcggcgttgagctccgaggagctgagccctctccggccgtcggccggtgatgacgcggcattgtctgcctttgcttccaagctcaggccaatcaatgtcccgtgcagatggaactcaaccactatgatgccaggggaacacccaattaaacaaggggggccattntatccatgcaatagtcagtcatttgaaaatcagtttcaggacaatgagtacaagggagagctc

SEQ ID NO: 107470 - DNA, 1453 bp, Glycine max
  Clone ID: PAT_MRT3847_6805C.1
gcaaataattgcactctctcctctctccactctccaccaacacaaaagcacttgcaaactagttttgttttgggaacatcatcacattacattagattggtggtaatggcagcgtcactacaagcagcagctactttcatgcaacccaccaagttgagcaggagcaacactttgcagcaaaagtctactcagtccatttccaaggcttttggtttggaacctgttggagctaaaaaggtcacatgctcccttcaggctgatcttaaggacttggctcacaagtgtgttgatgctaccaaaattgcaggattcgcccttgccacctctgccctcgttgtctctggggcaagtgctgaaggtgttccaaagaggctaaccttcgacgaaatccagagcaagacctacttggaagtgaaggggacaggaacagcaaaccagtgcccaacaattgatggtggattggactcatttgccttcaagccggggaaatacaatgccaagaagttgtgccttgagccaacttcattcacagtgaaggccgagggtgtggccaagaatgctccccttgagttccaaaacacaaagctcatgacacgtttgacctacactctggatgagattgagggaccctttgaggtgtcttctgatggcactgtcaagtttgaggagaaggatggcattgactacgccgccgtgacagttcagctaccgggaggcgaacgtgtgccctttctcttcaccatcaagcagttggtggcatcagggaagccagatagctttagtggggagtttctagttccatcctaccgtggaagctctttcttggaccccaagggaagaggtgcttccacaggttatgacaatgcagttgctttgcctgctggtggaagaggagatgaggaagaacttgccaaggaaaacaataaaagtgcctcatcatccaagggcaaaatcaccttgagtgtcaccaagaccaagcctgagacgggtgaggttatcggtgtgttcgagagtgttcaaccatctgacactgatttgggagcaaaggctccaaaggatgtcaagatccagggcatctggtatgctcagcttgagtcatagagtgttttgttttctgttttgtttgttggctcagattttgttagtaacttcatgcatggtgttgctgcattatcccttgacccaactttcctagcactactgagagtactgtcatggttgtatattatatcgacctccaattacaatgtttaaaattcaaggtttaaattgatggtgtgtgtgagttttcgagctcaattttttactagttggaattgcatcgtgttatgtgtttcattacacctaatatgctagtcactagctagggaaacactgcatttgaagatgattgcaattgacccttggagagaactcatgtgcttgaatatgatacttactctttccttcttgt

SEQ ID NO: 107471 - DNA, 1229 bp, Glycine max
  unsure (1)..(1229): unsure at all n locations
  Clone ID: PAT_MRT3847_68060C.1
gnagttcttcaacccattaggngacttcacttnttggtaccatcagttcaagagttggctaaacagaatttgtctaccgttccacatagatacattcagcctcaaaatgaagaagctattagtatccctgagattccaattattgacatgcagagcttgctctctgtagaatcttgtagttctgaattagccaagcttcaccttgcatgcaaagaatggggattcttccagctgataaaccatggtgttagctcatccttgctcgagaaagtaaagttggagattcaagacttcttcaaccttccaatgtcagagaaaaaaaagttttggcaaactccacagcatatggaaggatttggacaagcatttgttgtgagtgaagatcagaaacttgattggggtgatttgttcattatgaccactcttccaacacaatcgagaatgcctcacttatttccacaactccctcttcctttcagagacactctagaactttactcacacaaaatgaaaaatctagccatggtaattattggccatatgggaaaagctttgaatatagaagaaatgaaaataagagagttatttgaagatgggatacaattgatgaggatgaattattaaccaccatctcctcaacctgaaaaggttattggactcacaaaatcattcagatgcaacagctctcactatcctcttacaagtcaatgaagtagaagggctacagataaggaaagatgacatgtgggttccagttaggcccatgccaaacgcctttgtcgttaatgttggggatatcttggagattaatactaatgggacatatcgaagtattgaacaccgagcaacggtgaactctgaaaaggaaaggctttcaattgcaacattctatagcccaagacaagatggtgtgataggtccatggccaagtttgatcactaaacaaacaccagcacaattcaaaagaatcggagtaaaggaatactttaagaatttcttcgcccgtaaacttgaaggaaagtctaacagagatgccttgagaatagagcatcacaactgaacttattaaattagaaaaataaaatagttgcattaattataagtgtcagaaaagatataatgatgacctaaataaggttatctgaaccatgtgtgtagtgcagtaaaaaaaagtgagccatgtgtgtagtgcaccatattactctaaaattacaaagggaatgttgact

SEQ ID NO: 107472 - DNA, 247 bp, Glycine max
  unsure (1)..(247): unsure at all n locations
  Clone ID: PAT_MRT3847_68061C.1
agtaaattctttttggtattttatttattcattccanccacaccttattttttccagatccaccaacaccaatggcgccgctcactccgccatatgtgtaacgcctaacattccttatctaataataaaaaaaatcccaactattaaaagctgaccctccttcctttcttacttcccctccactctattacatttcctttctatccattacgacgaaccccttctcccctattatgccctaaaacaa

SEQ ID NO: 107473 - DNA, 295 bp, Glycine max
  Clone ID: PAT_MRT3847_68062C.1
cgaccggtcatatttccgtgcaaagaagctgacacaacccaacctttacttttacttttctttactcctttattggtactcatatatgatcactttctttacacccaatagtaaaagcaagaggaggctgaagctacgagtgcaatcaagataacctttgctgcataggagactaaggtgaactcctttattttttttttataggggaagttgacgtagatggagcacacagacgcagatgatgcaggcatgagaagcaaaggcagcaggtagcaacagatgtggacggatatat

SEQ ID NO: 107474 - DNA, 276 bp, Glycine max
  Clone ID: PAT_MRT3847_68063C.1
gtcagtgcagtcagcttgcagcgggctgtgagggagagtgcctttgtcctaagaaatgtgctttgtgtttttcttttttactgctttctttttaaacccccaagacaggcttgagaagacttctgaaatgattttttaaagccgaatagaagacaggatccgacacctcccacaagcccttgacgggttttgtttgagtctgatttttttgtgtgtatgattttttttttaaagccttttacatactttgttttgatcttgtgaggctgggcctct

SEQ ID NO: 107475 - DNA, 326 bp, Glycine max
  Clone ID: PAT_MRT3847_68064C.1
gtaaactgtctttcccccagggcacttcccgaagtgctaaaagaatgcctctttctatagggggaggagctgtagcacagaatgctattctcatgaatatgccaaatgctgttctttcaatgtggagatattttgttggagatctcgtctttgaagattataagatgacttctccctacattaaatgtacaggctctcttttcatagcatgtggaaatgcggctgacgacaccatcaattttgctgcttgtccccacacgttggtgcagtctggagagatccaggacaaagctggattgtaatcttcacaagacgaatttcttaca

SEQ ID NO: 107476 - DNA, 827 bp, Glycine max
  Clone ID: PAT_MRT3847_68065C.1
tttttttggtaaaacagcaaataaagtagatgcgtgcatcctcctgtcgtcaacacaacacaataaccaaaccaacaaacaacgatcgctcgcgttcatgcacagtgctgtggccactgaagtaaacgtaactaagtcatttcagttccgaactcactcactcgcatcgcatttttccgtcagatctcggcgagatcgctaaacgaagccgtttttcgctatgaaacgcgagtgccgccgctcgatctcggggtcttaagtttgcgatgcagccgaatttgtttccctttggaagcgtgctggggaatcctttcattttcaatggcgacggcgatttgagcgagggaggaggagggatcgagagctctagggttttcttcttgctcccgttcttcttgctctcccagggcggagcaatggatttgtccaaggtcggcgaaaaaatcttgagctccgttaggtccgccagatctctcggattgctccctcccgtttctgatcgccccgaggttccagctcgagctgctgctgcagctgctgtagctcgtgctcttgcagggttacctcctcatcagagatacagtctttcttcaagttcagaagaactaagttcaatatatggaagcatacctcaaggccaagtagtggaggagctggaggatgaattctatgaagaggactttgatccaattaggcatgttttagagcacgttccagttgaagagaatgagctaacatattttgaaaaacaggctgcccttagattggcacaactagatagagtagccgagcgtttatctcgccatgttatggagcatcatgaagtg

SEQ ID NO: 107477 - DNA, 654 bp, Glycine max
  Clone ID: PAT_MRT3847_68066C.1
tgtccattttattccgaaagatactagaaagttttacataatatatataatatagtacgaaagatgatacactgtttatgtacaagcacactcacaagagcagcaaatcacataattttgcttcatgctggtccacgacatggcagttgatccattgagtgtaggacactacgggtttcagatggctcgtactatggacaaaggtgaagcactagaaggttttgtaaaccaggcagatcaccttaggcaacaaactctgattcacatgtctcggatcctgacgactgggcaagctgctaaaggcttgctggctatgggagaatactttcatcgtcttcgcactcttagttctttatggactgctcgttcatgtgatccttcctttcccactcaactctcaaactgagatctatttctttaaacctcaactgtaatgtggtttgcacaacaggtccacaaatccgcagagatctctgttttgtttaatatgttaatgtatatgctagtaattaattgtgcctagttagtaccatgaaggctgaagcaaagtttatatgatttgttgatctagagaacaaatgaaccactctgtacataaatattgtatcatcttccacatggaatcatgaaaaaggatttaggccgaccttagat

SEQ ID NO: 107478 - DNA, 1038 bp, Glycine max
  unsure (1)..(1038): unsure at all n locations
  Clone ID: PAT_MRT3847_68067C.1
ccacgcgtccggtggaacagaacgcggccaccaccaccaccacgtcgtcgaccactataagaaacagagcagacccgttcctggtagcgtgcagatgcttcagcttcctcacctctctcgccgccattctctgcatcgccgtcaatgtcctctccgccgtccgttccttcaaacacgcatctgacgtaacatctctctctctctctctctctccaaatcttcgatctccgctcctcactttccgttaccgtctaatatttattggtttcagattttcgacggcatattccggtgctacgccgttcttatagcgngctttcgtggtcctcgccgagaaccgaatggagtttcatcataaagtttcgaaggttccgttttcgcttagttgttaacactcacgtgctgtttcgcgtgctctgttatgacttgtgacctaaattgaatgttcctttagcaggttttggagtattgggctgccaggggtatgctgcagatcttgtacgtgttcctttcgattttctctaaattatgatgcttacttccactacgttctaatttaacttatctgttaaatcatgcgatctcataatcacatgataaaaaatgttaatagtgcgttcctagcatatggataaaaaaatgtaccttattaagtgcgtgtttggatgagtttcgacaaaattgattttgaatggagttgattttggttaaaattgattttggaataatgtgatttatgtttaaatttttattataaaatcaagttaaaggtaaatctcaatatgaaatttaggaggaaatgtggcctctatctaaggcagagagagtttctgagctcaaagagaatgcattcacatttaccttatccaaggaaacaagtaggggttcaaatgatttttcagatgccagccctatcttgctcacgcaaccaactccttgggggttattaaatacttttccttacttaactaaatacacactactaatattgtgtttggatagctaccagaatcaatttcggcacctaaaacaatggtg

SEQ ID NO: 107479 - DNA, 527 bp, Glycine max
  Clone ID: PAT_MRT3847_68068C.1
ttcgtattatttaccccaacattatgatagagttggaattgaaaatttcattcgtgcaaagtacgaagagaagagatgggctgcaaggaatgagaaaccaaaatcaccttctagtttccgagaagagaaaagtccttcacattggcaaaagcctgaggaaacgaagaaaatccaaccatcaaatgcaattcctgctacaagaattagtgttcctgctcctcccaaagggcctgagctggtaactcctatggcaaaacctcaacatgttgagaaagtggaacctgttgcaccaccaccacaagctgaaactttaaaacagaccactgaaacaacacaaaattcccctccaaaagttgactatgctacggaccttttcgacatgttgtctatggatgatccaaatgaaaagggctcaggggcagctaatgataataactgggcaggtcttcagtctgctgcagaggcatcggcagatgagaagactgatgccccaaaagcaattgagagtacaccccagtcgacacccc

SEQ ID NO: 107480 - DNA, 346 bp, Glycine max
  Clone ID: PAT_MRT3847_68069C.1
ggctcgagccatcactgtttactgtctataacattatgaatcctgggaatgtcacggcagcaaggtactgcgtgcggccagaacgggtggtgcacctttgaaccggccaggccgcatcacgaaggacaagccgtttcagccgctagccatgtcggcacggatggggcggaaacagggccagcagaacggcccggaggcggcggctcagctgccgacggagactcctgcgacgaaatacacacacgctgatagtgaaagctgcagcggacccatgactacgtacttatcgacgcatctttacaaagtgatcctagacagattgtactaacagtagaccacctacttg

SEQ ID NO: 107481 - DNA, 176 bp, Glycine max
  Clone ID: PAT_MRT3847_6806C.1
ttaatatacctcttaattcaacacgcacatgttacacatatttacggcaagataacaaaacctaatcacctctacttcctttcactttaatttcttatatatcgttccttgtcaaatattttcatcaatcttaacattcattatcaatatacataaaccctaatccaacttatatt

SEQ ID NO: 107482 - DNA, 145 bp, Glycine max
  Clone ID: PAT_MRT3847_68070C.1
ctgtcttttggtgaatgtgagggacaatcctctgctgttatcttgaagtttgaactcatgcatgcgcctataattgacactgggcctgagttactaggttcactggatacatatgctgcttcagtgcatgaatatgaaatccccc

SEQ ID NO: 107483 - DNA, 1486 bp, Glycine max
  Clone ID: PAT_MRT3847_68071C.1
ggtttaatcaatcataaatatatgtagtttttagtcttttcctttggtctcaggtgtttccattcatggtgcacaacttgtgaaggttttattaacttaagagccttgcaaacaaatgtgctgaacaggttttggaaatcaagtctttaaaaacattgactgaaaagttacagaaggagaatcaggaattagagtttgttctggatatgcatggcctggagaattatgataaaagatattcggaagtaagagaatctgaaagtaaagctcactctcaagctgaaatgctgaaaaatgctttagatgagcatagcctagagttgagagtaaaagctgctaatgaagctgaagctgcttgtgaacaaaggctttctgccgcagaagctgaaatagaggacttgaggtccaagctggatgcatctgagagggatattttggagctgactgaggctgttaaagttaaagatgctgaggcagaggcatatatatctgaaattgagactattggtcaagcatatgaagatatgcagacacagaaccaaaatctgttgaaccaggtgatcgagagggatgactataatattaagcttgtatcagatagtgtgaagacaaaacaggcgcacaacactttaatgtcccagaagcaggccttagctaagcaacttcaacaaatcaatacatcaatagaaaattcaaagacgaggattacacacagtgaagagcagatgaaagctattctatccgatgccattaaatgtaaccaagaagaaaaacaccttgcagtcaccctggaatttgcaaaatgggaattggctgatgccgagaaggaattgaagttgctcaagtctgctgtttcctcttcagagaaagaatacgatcaaattcagaaagatacggaagctattgaaatggaattggagagtgaaaggagtttacggaagaagcttgaggaagaactaagagaattgaactgcaaaattgatgagctgacttctgaaactggagaaaccacgatacaaaaactcgaaaaagaaataaggatttgcaagaacatgatcaagtgtactgtctgtactgatcgtccaaaggaggttgtgattgtcaagtgctatcatctgttctgcaatccatgcattcagagaaatctagagcttcggcaccgcaaatgtcctgcatgtggaacagcatttggacagagtgatgtccgctttgtaaaaatatgagacaaatgttaagatagacaacttgtagataggtggtgattgtaatgttttggatcctgatcatagtttcaaacaagcattcctacccgaaagaaacctatgcattagagatatcagtattggttgcacttgtttgtgtatcatctcatactccctcccccactcttttgggtcttgactaatctaaagtcaacttggatgtacttattcaccgagacaactttttcaagtttcaattttaaacctgaaatctagtttagaag

SEQ ID NO: 107484 - DNA, 369 bp, Glycine max
  Clone ID: PAT_MRT3847_68072C.1
aaataattgattcacccaactctatccaataactacagacaattgtcaacaaaggtttatataattacatttgaggaagaaaaagttagggaaagagagatctatttaacaaatacttcaactttaccagcagattggcaaaatactacgaaggaggctgtctgcatgttgctggcctcgagagttctgaagcacatttgctcacagggcaagcttgtttgattattcaaatccgagagatcctcttagaaaagcccgaatttttagttgtccaaataacccggtgaacgcaattcctctcatctaaggtgatgaccctcactttagggaagttttgttctgtttgatcaaggcatatgcatcactgtc

SEQ ID NO: 107485 - DNA, 396 bp, Glycine max
  Clone ID: PAT_MRT3847_68073C.1
ggctgagccaaacaaacacctatccgtgcaagtaccaatccatctctttcctctctggcccatgaccacttcaggcgggtccccgaagaacgcgatgggcgcacacctccaagaacccaacatcaatgcccaaccctattgctacggcgacgattgctccaactccaacacgaagcccatagtgttgttcaccaacagtgactgcattgaatgtccgggcctcgttcacctcgccgaagccctaccgctccaggacctctgcgacgtgcatgtctgcgttcctcaatcagacaaatcagattcagcccactctgacactcgcggagtaaccggtgaagcttcttcagcacacattaatggcgccaccgtctgtgaaggatcaggaactcccgtgga

SEQ ID NO: 107486 - DNA, 220 bp, Glycine max
  Clone ID: PAT_MRT3847_68074C.1
taccgctgcgagaagacgacagaaggggattcacacagctaactaacaaagtcttccctagccccccgaaaaagaacagcaccgtctggcatgctctctttcagtttcgagcctaccccacctcacacttaccttctttcttcgtgatggcgtgctcgacaatgaacgtaaccctcctgaacatgccggcacatattgtatcctgtccgacgtaacacca

SEQ ID NO: 107487 - DNA, 279 bp, Glycine max
  Clone ID: PAT_MRT3847_68075C.1
gggtggtcaatatttttaattttacacagacgtatcattaatgggataatagagtacatcacaaaccttacatattttaaacggtgatttcaaacctattacacatcacattttttactaaaatgtaagtgataatccaacattgaacattacaccttaataatatcctgcttaaaacatcctaagacgacgcaccacctattgcagagttaactacttctgcatagagtagtcatgaaggggtctttgattcttgagcagtttgccaccaaaaataaa

SEQ ID NO: 107488 - DNA, 1130 bp, Glycine max
  Clone ID: PAT_MRT3847_68076C.1
cccacgcgtccgcccacgcgtccggtaaaggagtaaacactcattttttatcatccgaagatatgtgtggcatcatattaatcttccatttataaatatatcaaattggcctccaaagatatgtgcagtatcaaacgtcggtaaatgtcacatttttgccatcagattggtccttgaaagaccactgttggcattaatcatttgaagtacgaatttaatgtcacgaataaatggaaggctaatgtcatgttgcgtatatctttgaagggcaaaaaatgagcttttactctataaggaagtgaactgagtattatcaatattaaatttcttttgtcctggctaaattaagctctcaaatggtttttgattgctataattctactattttaattagggtagggaataaaacatcttttaaagcccgagcgagcatttaccttctttgcttgcatgttttatgatttacttgagtataggcacgcagtaagtaaattgtacaagtacttgaagcatttgaattttgacacacgggaaaattctgcacaaaaaatatttgctctaatggatgcagaaagccaagggaactgttgcagcaagaaagcatacttccaaaattatgaaagcttactttagtgatccagtaaaccgtcagaaaaggagcatggccatgaagggtgtgaaattctactgccaaaactgtggacgtgaagggcataggagacactactgtccagaactcaatgatagcttggttgatcggcgattcacgtgtaggctctgcggggggaaaggccccaacagaagaacatgtagaaagttaaagataagccttagcaatggaagaacaataaaacaccatcagtgcaaaatatgtcaccaattcggccataaccgcaggacctgccctcaagctgttccttttgctgttcctagtaaaagaaggaacgcggcctctcgaagaccatacaaatgtaggttgtgtaagaaggaggggcataatattaggacatgtccaagtaggacagttgttactgagaatcctcaagattaataatcctactcatgtcaaacataaaattttcaacctaaatcttatcatggatagtaattgaagctagaagagctttatt

SEQ ID NO: 107489 - DNA, 325 bp, Glycine max
  Clone ID: PAT_MRT3847_68077C.1
aagggccaggaaaaatgaccgatcgaggtttaaaattgaagcatcaccggattacgcggatcgaacattttctaatagatatcatccaaatattattcagggattgaatacacaatacaatagacaacatcggccgttataacccacgactgatatttttcagccaatattgcgcaattgtttttacaaaccacgccgataatattttttactgtagaggatgctttttttcggttttgccgtaaatattttcaatttacgtcgtctaagttttttcgtttgagctcaaccgaagttgtgtttcggccgacaacggcatgttttc

SEQ ID NO: 107490 - DNA, 429 bp, Glycine max
  unsure (1)..(429): unsure at all n locations
  Clone ID: PAT_MRT3847_68078C.1
agtattcaactttaacgtaaaataattttttgccaggattaacataaaaccggttgttaaggacaagagatttttgccacctaaatatttttttgggagaaaaaattcccgccccccctttttgacagggttttacaattctactatggaaaaatgggaggggatttttaacatttgtggcccgaaaaaatgcatggaacaaactcaaaatgcgggttggtaaccaccaaaagggcgaagaaaaaaaagtttttggggccccaaaatttcctttaaaaaaaaatgcttttggggggaaaaggattcattttaaaaaccttgtttgaataaaaaaaagcctttggggaaaaaaaagggggaacaaataaccccccacccgggggaaacaacaaaaacccacccancaaaatttcctttgttggataaaaa

SEQ ID NO: 107491 - DNA, 224 bp, Glycine max
  Clone ID: PAT_MRT3847_68079C.1
gtgtgaacccggaacttcaaaaatccctaaggtgatcattcagcctccaacaagacttaaatgcgggcaaatagggtggggtgtttaaaagccccaagccgtaagagattcaaagtgaacgcccaggaaaccagcttttgttcaaaggagccaatctttagttatattacaaaataaactggggctttccagaacaaaaaattgttatggcctcaacatgatag

SEQ ID NO: 107492 - DNA, 506 bp, Glycine max
  unsure (1)..(506): unsure at all n locations
  Clone ID: PAT_MRT3847_6807C.1
tnnnnnnnnnnnnnnnnnnnnnnnnnttttggggaattcaggcagtaacgatttatgcaaatacgaaaacatgtctcatgtgagacttaatttataaatcctagtgaaatttcaacaatcaactatgttaataacttataattacatcattaaaataacattaaatttgtagtacatcattaaatttccatgtctcatgtaagtgcatcattaaaattaagatttccaaacatcctaattttaagactacaaaaagattttccaaacatcctaacaatcagctttgaagctttacccctaaacctttatttcatctattgaaattccaaagttgaatatagaagttcaaaattagtcatggttgatgctagagtcagagttggaaaccctagaacaacatgagaacataatgcttttgttaatattgaatgacaacaaaggtgttgataaattagaaaagtttatactttgttattttgaataaattaggaatataaaatctagga

SEQ ID NO: 107493 - DNA, 473 bp, Glycine max
  Clone ID: PAT_MRT3847_68080C.1
cctttttagaagcgacttccactttcccacaaaactgaaaaggaagaattcaaacccaccaagctttgaattccacaaaatcgtgggtcgtgactcgtgaatatagatattgggaaaaaaaaaaccttaattagaagaaatataatccaacctttattattttccaacccgaaggtgtgttggaagattcgtgttggaattcaacgactgcgcttgcttttctctcgttttcatgtttttgacacgtttgaactttgaaggcacacagtgcgaggagtatttgtctttataaaagccaagggtagccactgtgatagacccataattcttttgtttgcttttatagtcagaacttcaattatattcagcaacaaataacataccatacaagaacgacaaactgaagtgtgtgtagctctatgggattatcactttccttactccaatctgcgtgggaagaaattgttagacat

SEQ ID NO: 107494 - DNA, 686 bp, Glycine max
  Clone ID: PAT_MRT3847_68081C.1
gagaaaatggaaagctcgttagtatttcccaagttaatattcacatacagggaaaattctaaccaatataatggagcttaaccctaagaaacagctaccctttgaacaagttataatcactacttgaaagaaaaagtataagataatttacactgcgatcctaaacctaactctacaggcatgaatttgagcttttaccaactgcagcattaactacggagttctaagactaactaattacataatgtgaggaacctttggatgatggccacgggcagacatcaatagatacatttgatcttgtttacacctgatgtaacacactttcgacatgcaattctcccaccagcaaaaaaattacaggcccagaatttcctattgattaccttcgccgtgacatgttggtgtggtgattggctttgctatcaattcttatcctgtctgcatacatgggaaggcgaattatctcacttatttcattcaacaggatatcctctgtgatattgtctcttatacttcgcatcacctttctataagtattaaagtcatttggagttgatttatctgttctgattcgcttgaatatccattcctgtctatcagaatcccaagacactcaatgatctttccagaataatgcaagggattcgaacctttcttcaaatgcaaccctgtacccttccatg

SEQ ID NO: 107495 - DNA, 567 bp, Glycine max
  Clone ID: PAT_MRT3847_68082C.1
aaaaaaaaattttaattctttaataaacctaagggctagaaaattatttgggggggtataaaattacaagttcccccataaaagggtgggaaaaattaaaaaaaaaaaaactttttgggtaatttatcagcccgaaacacatgggaccccccattatagctgttttgggggcccatggggttgttttgggagttaggcctctgaatatagttcagggggggagaatttggacccattaccccaatcatcaccttttaaaaacccccatgctaaaaaaaagcctctcctaaaatagggtttgttatgggcacccacaaaacccccatacttttaaatggggcaggaatcatgattaaagaattgatttttttggcccaggggtttgggccatgtttttaatggcaacaatttatgaaaatttttttttttggggggggtacaacttacgaccccctaagaaaaaaaaaaatgggaggacttttctttccccaaaaatgggtttccttaaaaaaaaatccctttgggaaggttaataagagggtaaaaaaaaaagggcctttttttttc

SEQ ID NO: 107496 - DNA, 347 bp, Glycine max
  Clone ID: PAT_MRT3847_68083C.1
gtgaaacaaagaacctacgcatgagagggattatataaaaataaaactacatatacaccattaattgaattctttagtcttttgtctggagaaacttttcaaagtcataatcgacaacatgcttcattgaacagtgaacacatcatatgtgtacgcactatttcagctattgcagttcttcttcaatcttgggacccttttgaaagaaatttctacgaaactctccgaatgtcatggatttgtatattgctggagtgctttcattgatcaaagcttgtgcaggttctatgatgctttcaaatgatggatagacgaaataggcaacacttgtgcgtgcactgctcgaa

SEQ ID NO: 107497 - DNA, 491 bp, Glycine max
  Clone ID: PAT_MRT3847_68084C.1
ggagaactagtctcgagttttttttttttttttttctagcagaggcttatccagtacaagattaaaatttgttgttcatatttaaagcgggcaacagcacacctgaaccatgaagcaacatgtaatcaaagcgagtttagtataggacaagaaggatataggcattctcattagtttgatgccttaatttaaacacaatagattttaagttgcctcaaagcaatatttagctacacagtaccaaaaatttatttagcaaattgacatgaatactgcgttgacataaaacaaaaagctaaaaatagattttttaaacatgaaaatatcccaggagtcaattgtttttaaaataaaaaggaaaacataaaaaagatgcatgggattaggatcctaaatgatgatctcatataaggagaagaaatatgtatctatcttactacttataagtgagaacaatgttactttaatacctacagtcctaccatcataca

SEQ ID NO: 107498 - DNA, 421 bp, Glycine max
  Clone ID: PAT_MRT3847_68085C.1
gaagattcaaatgtgcaaaatgtcctagatatgtaattttcaatttgagatttaggtttgtcattttcaatttagagatttgggtttgttcattttgtggtggctcactatttgcataccattttaaataatttaaaaaataaagaattgaaatatattttttaaaagataaataaccaagggatttgacggtaagaaatcaaattttaatcagagtgttttttttttttcctgtttgaggcgtttgagacgtggcagttacgttacttacgtaattttagcccaaagtatatcagacatgaactaaatttaaagcaaagaagtttcgtaaggccatactagaaaaattgtgtaatgacaggattggatatataatatgataatgaaatccaataaaagactcgagatatgtgtaggtggc

SEQ ID NO: 107499 - DNA, 264 bp, Glycine max
  Clone ID: PAT_MRT3847_68086C.1
cgtccgggattaaccccccgacagcaaacggggaaacgcggggcttgatcgaaatatcggggcgggtattaaaactgcaacaaagacaacgttagtcccccaatatacccctcagcggcaattccacaaacgctccaccctcaactccgacgcaaacccttatatcctactactaaagcgcggaccaactgctcgaccacacaaagggccttctccatcaccacgccggtaaactcaccaccctctacactggacactactatg

SEQ ID NO: 107500 - DNA, 323 bp, Glycine max
  Clone ID: PAT_MRT3847_68087C.1
gcacgaggaagaattgaaatcataaggttgcttaataacatatatactatgatcgatttacatcttttttccccctttaacttgtgtttttgagttttgtcatgatttgagcttttgctgtttagtatttaacgtagtgaaactgtgaaagcatatgggggcatattgtagtcctcccccttcctgctgcaaagaattttgtgatatagaaatatttataattccaaatgattttttttttatccgaccaaaaaaaaaaaaaaaaaaaaaaaaaaaaaaaaaaaaaaaaaaaaaaaaaaaaaaaaaaaaaaaaaaaaaaaaaa

SEQ ID NO: 107501 - DNA, 452 bp, Glycine max
  Clone ID: PAT_MRT3847_68088C.1
cgtgctcaagaggaagccattgacatcgatgagtccaagttcaggactggtaatacccaagccaagaaccagaacaagtgatcatgcaacccccttcactatcatatgtagtgtgttcttatgctagcttaaatgctagtgtcttagtgttttaggaaaggataggttataaaaatggtataggtagcagctaggtcaaagtgtcatgtcattgtgtcgtgaaattattagctagcatgtttagtgttttagggtttcttttgcatgtgtgtttctcttatggggtgtaactgatgagtgaggcatggctctactatagctatctaaaaaataatgcaagcttttttttatctcttgttcttgtaatatatttatcgtgcctccatttcactattatgtatgtatctatggagaccacgttcaatactagaagtaatgttcttaactatgtt

SEQ ID NO: 107502 - DNA, 886 bp, Glycine max
  Clone ID: PAT_MRT3847_68089C.1
ggtcataaaagagaatcgcaactctcaactccttccctgatgatcccctttccctcaatgtcatcgtcgttgtttttttacttttcttctttatgtttcaattgtagctttttgattttagatcttacctttatttttgaaatctgagtttctcaaatatgattgcaggcttggtaatcgtcgctggaatgtaattgtcggagaagttcaggtccccaaagtggtgtgtgcaaaactcgctggagaagaggaaagaaaaggtgttggtggtggggagaaaaaataaaatgaaagtccaccgtcggatatcaccttcgacggcggtgactagtggtcgaaaaatttaccagtgagacttttcaggatcagatgcaagttggtaatggctccaactaaaatggccatccattttggtagagcctttggtgtcgcaacagataagttccggtgatacatatcaaattggtaatgaccccaaacatggtcgtgtaggaaatttggttgttggttaaaaggtgatgaaatgttccgattatatgtgaatcatggagtatgaattgttagagaatctaaccactttatttagtagcaggtggactggtggagctaagctatagtcacagactcaggccccacccacgcataggactataggagacatgggctaaatagggctgttacttcctgcaccttaaagttactttgtttggggtctgttgtatatgtgaacatttcacaacaaggtgttgaacataaatgtttttttaaaaataaaaataaaaatatagaaggaatgtattttaccgaaatatggaggtatatacatcaatttggcattttaatatgagtttgcattatttcgaaaaaaaaaaaaaaaaaactcgag

SEQ ID NO: 107503 - DNA, 175 bp, Glycine max
  Clone ID: PAT_MRT3847_6808C.1
gtagtgacaatcttggataatggggcaatctttgttaacatcaagaacacaatatatcattgcaatttactaatgcaaaggattatcatcctctgcaatgcaggaataatgtcaaaaagtctaagatgttgtgcaagtgcttgaacttaaaatgaagaatcatgtgaactccttt

SEQ ID NO: 107504 - DNA, 260 bp, Glycine max
  unsure (1)..(260): unsure at all n locations
  Clone ID: PAT_MRT3847_68090C.1
caagggggggaactatttttatgatatanttacatgtattcataaagaaccatctactaaaacaacaagtcctcaacgggcttaattgccaaaactattttttgagtctacatagttaattaagcctggagccttaatgtgaccttcgataataatatacatatttatttatgcttcaaaaggaaccatattttttcaggagtcgttctatggtgttccactcttaactatcatatccaccttaataaccaatacgttgc

SEQ ID NO: 107505 - DNA, 337 bp, Glycine max
  Clone ID: PAT_MRT3847_68091C.1
taccaatatttcttacataacataacataccatactgtaacattacttttactaaccttacataaccttgcttgtagctttgtgttaggaagctatgcaggatgtgtctattgatgttgctgcgccgttgctcgcttatgatgcctttatgggcctcgttagcgttttcaacagcactttttgcaatgtcggcagtgatttgcgcgttcctcctgttgagactttggaagagtgtcctggtgcgtgggttgacgcccttgctaggaggggattccgtctcgttgatgggggaaggaaatcagactgcggaggatgtgagcgatgtggttgtaccgtt

SEQ ID NO: 107506 - DNA, 402 bp, Glycine max
  unsure (1)..(402): unsure at all n locations
  Clone ID: PAT_MRT3847_68092C.1
acatctgagcngncnngtaacannnagncgcgcgactgcagngtctgcgtgtnggtaagantnannnngatncctgatnnngggcncaagcgcgnangngagtnngtcgngcgaagtcncnntcgcnatcgncatggtgtacaagacagtgnggnggnngagngcgacggnanncngccntgananncggctgtctagtnncannnggcngncacnnnntanncgctnntgcgaagcnncnagnggggacacaatcncgcagcgtcggnnancgcacncnaggncnngangacgcaganactgcancancncncangagncccgngngnntncggcaagcccgngggnaacnnanggngggnatcgcncgnngnagnngcaatgtncagggngcnntgnnta

SEQ ID NO: 107507 - DNA, 433 bp, Glycine max
  Clone ID: PAT_MRT3847_68093C.1
ctgaggctttctttaaatgaagaaaacacctccccccaatttgcatcaatctagcaaaagtagacagaatgctaatctccaacttgttgaaacaaacaatgatgcaaagaggcacaattctaagacattgagatctttgaagtatgctgccaagaaatgtgtagctgttttttcattgattatctatggcaaaagaaaatcagcctcatatgttgttggcaatgatgacaggaagaatacatccaaaattagaggggtggtatcatcatcaactgatttatcatctgagagtaccaccaagaattcatcaaaatggaagttttcttactcctatgcatcatccagcactgtaagtggacaacttggaattggcaacttctcctttgaagaaattacaaagtcacggcaaaaatctctccagctaatgaaattg

SEQ ID NO: 107508 - DNA, 170 bp, Glycine max
  Clone ID: PAT_MRT3847_68094C.1
gtgatcttgacacagtctctgttccacgcaagccataggcaatgttcacgggtccagagactccagagtcctttcaatgaaaagacgttctcaagtggaagtttaatgtgtgaaatgcgacttgtgtgggttcacagaagaatgcacccctgcgtgaatcacggaggtgc

SEQ ID NO: 107509 - DNA, 623 bp, Glycine max
  Clone ID: PAT_MRT3847_68095C.1
ccgggttatgttttgtcttctgatattgcacactacattgtatctgaatttgagatgaataaattaaggttgtttaagatggaagatgtgagtatgggaatgtgggtagagcagtttaaccggacgaaaccggtaaactatttgcatagcttcaagttctgccaatacggttgtgtagaaggctattacacagcccattaccaatcgcctaggcagatgatgtgcctgtgggacaaattgcagatgcagacaacgcctgagtgctgcaacatgagataaagttgaggtattggttgccattgaattcagtgaggaacaaagtaaacaagttttgcagtcatagcttagcttcaacattttgtatatatagtggagcttggatagttaaattagccctgtgtataaaatggggccttttaaattttgggggttatttattcatttggaaagacaattccattatttaggttactcgattttgtttcgtcatgggattgagattggaagatcaacgtgagggtgggcgggaactatgggtaggaggcccataggtagcgggaacatttttttttttttgagggagagcaagaacatgttaaaaaaccaagttctgtatttttttt

SEQ ID NO: 107510 - DNA, 1095 bp, Glycine max
  Clone ID: PAT_MRT3847_68096C.1
gttctctcatactcctctcactatacgttatccgagcgagatagagaacagatagagataacactaggcagcacaagagaatggcgctgctgtgtggttcaacttccgtgactccattcctttctcacaagaacgttggtttcacaacctcagcaaaatcttcctttgttggctttcaattgccgcttccaaagctcacattatcttcttccgttcgaacccttctgccggcaacatcccgtgtccgttgccagcaagagtctactactgttacccctgtcgcagaagaagacccgcgcttcgcgtgcgtcgaacccgaaccccgattcaaaggcccggacatttggaacaagagctggtatccaaaagctgcagatcatgtgaatacagaaaaaacatggtatgttgttgatgctacagacaaagttcttggaagactagcatcgacgattgctattcacatccgagggaaaaacttggcaacctacacacccagtgtggacatgggtgcgtttgtaattgtggtaaatgcagaaaaggttgctgtatctgggaaaaagaggacccaaaagctttacaggaggcactctggacgacctggtggtatgaccgtggagacatttgcccagctgcaaaacagaattcctgaaagaattattgaacacgctgttcgtggcatgcttccaaaaggaaggcttgggaggagactattcacccaccttaaggtttataaaggcccagatcatccacatgcggcgcagaagcccgttgagttgccaataagggataagagaatacatttgcagaaataggtcataggtgtagcagagaacatggaatgaaatatgaaaattttatgtctatctatttcacagaacttcgagtttcctgctttggttgctaccttgctgatgtttccattaaatgtttatattgtctgtagaggtaactgattattgtgttacttgtttttgtcaaggtcctttgtggaatcttcataatatttttgttgtagatttgaaccttgccatgcaatattttttaatatttgaatttattggcaactttttcatttgaaggaaaaaaaaaaaaaac

SEQ ID NO: 107511 - DNA, 513 bp, Glycine max
  Clone ID: PAT_MRT3847_68097C.1
tggggaacaatttgacaatttgcaaacgggttgattcagtttaatttgaacacttctaaaatctctcatgaacacccttttatttgcaaattgttccacctcatgtaatcatttctcttccacttgatatccgtatcatgaaatatggtgtagtctctaacaatatcaataaacattatgagaacatcaaatttcatcccaatctccaagtgcacaagtccaaaatgactttttgtattgtattaaacttcgtgtttgatagttgcaatttcaatttgcatgcatgcaaatgtgttgtgtctgagattatttaattaagtgttttatttttcgtggattaatttgtcaataagatgtatctttgaaagactataatggtagtaagttgtaatgcttcaagactaattggctagtattttttaaaaggagaggtaaggtgttgtaaaaaaaactttcaatattgataatttagtccatgataaacatcccttctgtcgtcttctcgcagccgta

SEQ ID NO: 107512 - DNA, 315 bp, Glycine max
  Clone ID: PAT_MRT3847_68098C.1
attttcttgaatgattatcactctccaagggtaattttttagagtagagacaagtcagtcttctatgttcggtggcaaagcttgtatgctttgtctctagaacattatggtttagttttgcgatccagcatttcgacacgatgataattgggagaaggggatatagtgatatcttgtataattagtgttttgaactgctacgagttcgtaaaatgtattgcccctttgatttctcactcatattaacttactacattaatttctccactaaagaaatgaaattagggatatagtggagctttagtttttgttttt

SEQ ID NO: 107513 - DNA, 519 bp, Glycine max
  Clone ID: PAT_MRT3847_68099C.1
aatagtttgtgccaaatactctctaatggagtgtaacgcccatgttacctcattggctcctggacagggttaatgctcgaccatcaggacttcaaagtattgaattgtcagagacagcagaagttcaaacaatcaaatcaaaggtgcagcctggctggactgaacaagctgaatgcctctcagatatgaaaagcgagacttacagttacagtagaggatatgaggcttttccatctgacagtagtccagagttgaaggtttcttgctgtgaaagcgtgactgaaatgaactctgaaattaaaagagagcagtctaaggatgtggacattattgatgttgctagtgagtctttctgtaatggttttgaaacatctcatatgcatgattctgaagctgtcatagatttgggggatatagattcggatggatcaaatacatgctcatctgttttagaagagatttcagtctgcatggaagagcaagatgataatgataatgatatggctaagtccagtcctt

SEQ ID NO: 107514 - DNA, 384 bp, Glycine max
  Clone ID: PAT_MRT3847_6809C.1
caaggggagccttaaggggggggggaaacaaaacctgatattgtacattagccttccaaggttattttttctaattatggcccccaaaccattggttattttttacttattaacaaaaaaccccccccaaaaaaggaaaagaaaaaccccaccaggggtttcttgaggtttcacaaacttttggttggttttttgaaaaacccacccaccttggggaggtgagtcccattaaaacccgtttttaaaaaaaaggggaaaaaaagaccccccaccaaaaaagggatttagggggatggggaggggcctcctttgggggccattaaccaatggagacttactttttccgggcatgggaaacattgggggttttggaggacattttat

SEQ ID NO: 107515 - DNA, 479 bp, Glycine max
  Clone ID: PAT_MRT3847_680C.1
ttttcgcgttttgaaaaaaaccctctctttctctatcttccgaaacctatttttcatcttttcttctttaaacagaattatgcaaagatgctgtgtagatcctctcacatatcagggtggtcactgtggtatcctcatcggcgccacgttttgggaggtggtttgagtggagtacgggatctaccttactgggaggtacggtggggactcatagctttagctctggaggagcattttctactatatcgaaatcagctggggccggttcgtgccgcacgcggctctaatggacctttaaccgtgcaccatgaacagatttcgcgccgggccggtcggtaatgatgttacgaccgacaactttgtgttctggtagtatatggcaggactctagtggggcaaggtgcactacactgagggtgctgaactcaatgactctgtccttgatgaggtgcgcaaggagggagaaaactgttaatggt

SEQ ID NO: 107516 - DNA, 383 bp, Glycine max
  Clone ID: PAT_MRT3847_68100C.1
ggccctcgatatcagagtttattaaaaacatagcagcatttttcactcaacccgcaaacataacttaaaggtagagcgataatttttcctcaaaacaactttaaaagaataaacttgcctttaacaaaacccttggttattgggccccaaaaaaaaaacccatttaaggaatctgccctctcacaataaaagggagacaaaatgcaatgggcccattggactatgagttttattacaatggccttggtagacacaggaatcagagacaggcatccacataatcacctttttgcccttaactttttttttctccatgctttacttgggggaaacaaaaaagtaataatgggtttcgaacaacttttgtttgcatcagttgaaaa

SEQ ID NO: 107517 - DNA, 248 bp, Glycine max
  Clone ID: PAT_MRT3847_68101C.1
cccatgcgtacgcctctgaagcctatgccgccttcctaccattgacatcatgcaacgcagcatcatggggagcaccaaagatgcatgatagatcaactcttgctcttactgacactagaaacgcaaacacatgccttacttgacctataagaacggtaatgccacttatcactccatcgctatgaggcatacccacctgaagatatagctatggaaatagttatatccatgctgagtggatgcaccac

SEQ ID NO: 107518 - DNA, 430 bp, Glycine max
  Clone ID: PAT_MRT3847_68102C.1
aaataagttttgggactgaggacatgaaggagtaaggattctctaattctcatagaagagacatgaggttacgaaagcaaaattgtggaatctcagtttatcaccactgatgtaatttcttggatatattttctttgttttccctttgccacgctatgaggagttgaattctcttatcacgagacagaagatcccaacttaaacatatttgtaagtgtagattatttttttaattcaagtttatcttactgcttgtttttattctccatacatccatatattgatcaattcatggatgatgttatatgtacttacagttacagtcgaaaaaataggttggggattagaaaggaggctaaatacataattagtaatgttttaagttcgataagaatagggattgtcaattatgagaccttttgaattctta

SEQ ID NO: 107519 - DNA, 455 bp, Glycine max
  Clone ID: PAT_MRT3847_68103C.1
cggacgcgtgggttcactttctttacaatctccaaagattattattcactaacacataagccttatctatactagttcctcttccgattaatctgtgcagcttgaatcttctccgccacgtgtcaagcgttcagcgcaagaggttaccagacgcgatagcaggaagcttctcggagaaaccaaattaataggtggtgagtctcttctcctctcagaactccttcgtgctcaaacctgcattaacaggctcaatgctgaaaagcttctctggaagcgtcgagaactcaagaataatcaatcaatgctagaggacttaaaggataagttagccagggaaaggacaagtagggagagaatggaatcaatgaatgccaaattagttcttgagcttgcccaagcaaaactatatgccaagcaatttatggtttactacaagggggaaagagggaaagaga

SEQ ID NO: 107520 - DNA, 402 bp, Glycine max
  Clone ID: PAT_MRT3847_68104C.1
aatgtatgggacttttttttattaataccataatgggaaaaactgggtttttttaagggacacagaaccagtttttgcccataaccaaggttctcacttagcagggggcatcatgtgagaccggcccaacaaaacctagggtgggaaaaaagagggagggcctcttttactaataagatcacgggaacatgggctccattcccgggggtgacccactttccatgcctcgagaagatttttcaaagccccgcgcgatgaccctccggggctcgtagaagtcggaacattgaccataaacccatgactcggtccctttcttgctcacctttatacgaaaccattaatttcctatctcggtcctccacctcactcgacgtggcaacagccgactctgcagactaa

SEQ ID NO: 107521 - DNA, 398 bp, Glycine max
  Clone ID: PAT_MRT3847_68105C.1
tttggattttaaattgtattttatttagagtattacagctacatgtggctaatggttacttcacaggacagcatccttgctcagggccttgctcaagaggcagggagcatgatgatcctcaagtcctctggatagagagtgccaaggtacaaaagcacaaaagccctcatgtgggaggaaagtgagcttcatcttgttacatcttgatacgaagagcccccacgcgtatcctcaagggaagtctggtcctcgcctagcctgcggcagccttcggcgtcaggcagtctccgcgcccgcccagggatgccactccaagtccggtccgcctcgcccagtacccctgaagaagcgcggatacgatgtaacctcgagccgaattccgagcttacgtacgcgtg

SEQ ID NO: 107522 - DNA, 571 bp, Glycine max
  unsure (1)..(571): unsure at all n locations
  Clone ID: PAT_MRT3847_68106C.1
attcccggggcgacccagcgtccgaaatagttcattctctttgcggcgggccctacctctcctttcaaggaggcagatcttcgtcaagaccctcaccgggaagaccatcaccgttggggggggaagcgctgacaccatcgacaacggcaagggcaagatccaggacaaggggggagttcccccgggtcagcaacgtctcatcttcgccggaaagcagctcgagggcgggcgtaccctcnccgactacaacatgcagaggggaggaacccttcaccttgggcttcgtctccgggggggggtgcanatcttcntcaagactctcactgggaaaaccataaccctagagggggaaagctctgacaccattgacaacgtgaagggcaagatccaggacaaggaggggatccccccagaccagcaacgtgtcatcttcngcggaaaggacttgaggacgggcgcaccctcnccgactacaacatccagaaggagtcaacccttcacctcggcctccgtgtccggggggggatgcagatcttcggtaagaccctcaccgggcaagactataacccta

SEQ ID NO: 107523 - DNA, 874 bp, Glycine max
  Clone ID: PAT_MRT3847_68107C.1
ggctcgagcagacacggaactcacaggaaaaataccagacttcatagggaattggtctaagcttcaaaccttgagatttcagggcaattcttttaatggctcaataccatcatcattttcaaatttgagttctttaacagaattgagaatcagtggtttatctaatgggagttcctcattggaatttttaaggaatatgaaatctttgactatcttagaactgaggaataacaatatttctggttcgatttcatccaccattggagagttacacaatttgaatcagttgaatttaagcttcaataacatcacaggacaaaatttgggatcaattttcaatttgagttcgctcacttacttgtttcttggaaataataaattcaacggcacccttccgatgcagaaaagttcatctcttgtaaatatagacttgtcatacaatgatctatcgggtagtctcccctcttgggtaaacgaaccaaatttacaactgaatttagttgccaacaacttagatgtctcaaatgccagtggcttgcctattgggctcttcttttccaaaaaatttttccttgcaatcaaggaattggaagatactctgactttgcaatcaagtgtggcggtaaccaaattaggtcggcagatggaatagtgtatgaaatcggcaatcaaacacttggtcctgctacatactttgttactggtgcaaaccgatgggctattagcaatgttggattatttacggggagcagtaatcctgtctacaaaagttttgtgtctaatcagtccactggcactgtgaattcggtgctcttccaaacagcacgactttctgcttcgtcattaagatattatggcctggggctggaaaatg

SEQ ID NO: 107524 - DNA, 355 bp, Glycine max
  Clone ID: PAT_MRT3847_68108C.1
tatgcagtgctatgtgtggtccacctgtatggcatagaagaagattgagactctttcctacctgccatacctagatgatgcacaattggctaaggaagtaaaataccttgttaggaagggatggattccttgcttggaattcgagttgagatacggtttcatgtaccgagagcacaacaggtcaccaggatactactatgggagctactggaccatgaggaatctgcttatgattggatgcactgtgcatcacatgtgtgaaggagcttagaaggttaaaaatgcataccgcagcggctatatccgtatcataggatacactacagttcttcactgcagtgctatagcttatcga

SEQ ID NO: 107525 - DNA, 1080 bp, Glycine max
  Clone ID: PAT_MRT3847_68109C.1
tttggaaaagaagtaaacaaaattgcaatttgtaggaggaaaattatcttggtatgagcttgcctgattgaaaatgcctcctgtgtgcctgtttagttttatatcttgaatttaaacatcgtatgggttttggtgattttcagattcattccatattcacatctccaattatatgctaaatgtaaatgtccatttgaacatgtagaatatgaaaatgattatttttgtagttgttgcaactaacatttctgaagttaatctacataatggcttcaaaatgtgaaaagaactctttgctttaagtgattaagttgttgacttttagttatccctctaacatgccttcttggcttcttctatgttgtacctccagttattaaagatttcaagtatgttgattctcatgagtgggtgaaagttgatggaaattacgcaaccatcggcataactgatcatgcccaagatcatttgggtgatgttgtatatgttgaattgccagaagtgggagcagctgtgacacaaggaggtagttttggtgcagttgaaagtgtgaaggctactagtgatattaactctcctatttcaggaaaagttgttgaagtcaatgaagcgcttaacagctctcctgctttggtcaattcaagcccttataaagatggatggataattaaagttgaaataaatgacagtggtgaactaaacaacttgatggattcagaacaatactccaagttctgtgaagaagaagattccaagcactgatggtcttgccaagatctttcagcactctccaatctccatggtgtagatcatgtttttattgggaaagctgctaaattacttattcctttttctccttgtgtcatggtttgaccactgctctatttttatttttcataagcttctgaaccagtgggatgatatttttcactctttgcaatggaaaaatgaaattgataaagaggtaaaatgatgatgatgataacaataataacttctagttttctttcaaagttatgctatttttgttagatgatgtctataatggtttgataaataagatggaccgtagttatcaag

SEQ ID NO: 107526 - DNA, 815 bp, Glycine max
  unsure (1)..(815): unsure at all n locations
  Clone ID: PAT_MRT3847_6810C.1
ggctcgagaaagaccattgggaaagggaggcagcattggctggattggtaaatcgttggctcgagctttatccattagagggaaatggagatgtacagtcacggaattggcataatgatggcaagctagcagtgtcaaccagtgcagaagacaaccttgagactaaaatggttgatttgaccagctatactgtggagttttctactagtattagcggctcgaaagatggatcaacaacatctgaatcaactgtctgcagtgtgtgcaaggaaggagactctaaaaatagacttacaagggacacagctgacagtgagatcacttcaaagagtacaatggattctgggcttgaagaacaaggacttgattgtcacaagtcatatgcaattgacataaatacggtgattaataaagttgaagatactttttccaatgaagatttcaatacagatgaagcacttagtgaaggtgtcaaacctgaggactccagtaaatcaataatgtccagtgaagacagcaacggtaatgataaagatgagttaattgatgagatcacatcaaagagtactctagattctgtgcatgaaaaacaaggatttacagctgaacattttcagaagtcagatgtgattgacacaagtgcagtgtctacaaagattgaagataattttttcagtgaagatagaacagaagctngagagggaaaatgccaaacctgaggactccagaaaatcaatagtgtcaagtgaaaacagcgatgttaaagataatgagggatccattaatgagatcacttccacgagtatgctacattc

SEQ ID NO: 107527 - DNA, 305 bp, Glycine max
  unsure (1)..(305): unsure at all n locations
  Clone ID: PAT_MRT3847_68110C.1
ctcatttcttattttaatcactgagtaaggncaatggtgtgcgttgtttttattatgctattttccatattcacattaccaatcattttattatcatgatctcacaaattataaacagactctcttaaggaaatgaaaaatttattcgtataatgacgcacctacttatgacttaatgttcaattatggcaatattttttaaagacttctaaatactttaatatctaatccattttgcatttcctctaactatttttttcaataacatcatcattcctattcatattatatatatttattaaaaa

SEQ ID NO: 107528 - DNA, 1056 bp, Glycine max
  Clone ID: PAT_MRT3847_68111C.1
cttaatttttttttatctagacaactactgtccatcttatttataaaactattatagccgtcatctaacaacaatagcataactttaaaataaaactatttaagttattattattatcatcatcaatttgccacgttgtcaaattcatttttccattgcaaagagggaaaaatatcattccactgaatcataagccctcgaaaaataaaaatagagcagtcaagacataacacagggagaaaatggaataagcaattgagctttcccaattaaaacatgatctaccccatggaaattgaagagtgctgaaagatcttgccaagatcatcagggcttggaatctttttcttcacagaatttggagtattgatctgaatccatcaagttgtttagttcaccattgtcacttatttcaactttaattatccatccatctttataagggcttgaattgatctgtatgcagaaatgtaggacaacatgaaaacacttggtgttcataaaaaaaaaagaattcattgcaatacttcagcattgcataggcatactgatccaagatgtagcatgtagaaactacaaagtacttaaaggagaaaaaaatagttaatgcacataaactcagcatacacaacttgtatttcatgtaaaaagttctttaagaattaggcaataaaactcaccaaagcaggagagctgttaagcgcttcattaacttcaacaacttttcctgaaacaggagagttaatgtcactagttgccttcacactttcaactgcaccaaaactacctccttgtgttacagctgctcccacttctggcaattcaacatatacaacatcacctaaatgatcttgggcatgatcagttatgccgacggttgcagaattttcatcaactttcacccactcatgagaatcagcatacttcaaatctttaacaacattagaaaagcctctgtgaaacacagagatcctcaggtaagaggcagctcttgaagcccacaattgcctgcaagccatttctctctctctctctctctctctctctctctctctc

SEQ ID NO: 107529 - DNA, 228 bp, Glycine max
  Clone ID: PAT_MRT3847_68112C.1
tcggccacaccgagcgaaagatcgtgaaaaccaaacttaccgggttttttttgacatatccacatgcattaagggccattaccggattattgtaaacacctgttaaacccttcaaaaaagtgtgtttgaaaccttcaaccaaaggtttattgaaaggaccccgcccaaaggggttttgatttgaaccctgaattcttttggtcctttgaaaaagggttattaccggtg

SEQ ID NO: 107530 - DNA, 188 bp, Glycine max
  Clone ID: PAT_MRT3847_68113C.1
tttttgcaacaatccttacaatagcccccggttctcttataaacagaagatacaagccctcgattactaataatggcccagcttcacatgcaaaacaccttcaaattctgatccttaaacgaaaaacccagagtctaacaagcaacgcccacaccttctttaccaggtgtccactttcatactctttc

SEQ ID NO: 107531 - DNA, 281 bp, Glycine max
  Clone ID: PAT_MRT3847_68114C.1
gtttttttgatatggcgccttgtatttctttccagtcttgccccccgccccccattctcccagttctccagcccaccgtactcggtctgcatccccggatggttcctcagtggccgcgggatacggagcctgctgctaaggaaccgggattctccatttcggcagtagaagcacggaccctaatggtcgcatgcgcagtgataattccgcggcctaccgaccgcgccttttgactgctgttcaggtgaagattgtggtgaggaaggagaccagaagatggg

SEQ ID NO: 107532 - DNA, 748 bp, Glycine max
  Clone ID: PAT_MRT3847_68115C.1
aaaagcaaattatctagttcttgaggagtaaaaatttgtaaagatgagatatcaaaaacctgcattaaacagcacaagcatacaagtgatgtttagttttgaactaaataaaatgagccaaaagtaactaatttccccatcaatatcctcttctcatcctccacaagagagtctagcagagccataactaccccacccatttcacaaacaatatattcagaatgtaaaaagtttaacatccaataactgaatcttgcaatttccattttgtacagggaaagtatagttggtgattgggagccaatgtaagtaaaagaacaggatcatatattttataagatcccaagtggaatattcaagcatgagagataaaggaaagatatttaagatctcggtaaaacaccaaataacttttagtgagacagaatgtcacttaagaatttcaatggcatgttaacaaattaatgtcatgcatcaggtaaactaattccaatctacaactacaataatcttatcccacaaggagatgtcagctacgtggatctaacaacaccattaagcacggttaaaaaacaaattctcagggatgcagtgggagataagtatgggagcatatatagacaaggaggataatgtcaataaaagatactttccactagaaaggggagagggaaacacccttgttttagaaaaataacatgctccacaccaacaatgtgtacattttaaagttaaattactaattatt

SEQ ID NO: 107533 - DNA, 323 bp, Glycine max
  Clone ID: PAT_MRT3847_68116C.1
aaaaaaattaaagcaaaaacgactataccttatggagtcattttttcaaaattcataatctaatcatatttatcctaaacccaatattaaataaaattttttcaaccctttaattgtctccaacatccttttttgctccttttaaaaccatcattttatattcaactttacctcattctctttttgcttgatcaaccaacacaaaacccccattcaaaatcttatacaagcaaattttctcaaacaaacccttataaaatttctcacatttataaactcaaaaccttaaaaaaaatacaaacttatgccccattttttttttc

SEQ ID NO: 107534 - DNA, 460 bp, Glycine max
  Clone ID: PAT_MRT3847_68117C.1
ggggggattcacctctcccaaaaaatagatgattatattttctcagttgtactgagttacacaacataattggatttgaaagtggcattgctattttaaccaccaccggtcttcaaaaaaaagaccgggtttggacatattacaaaaacttgcctatttttcactaccaaaatgggatgccagcacagaccaaaccaatcttttgcgaccattaacacagggaatatatgggttactgagaaggtaagccgaaatccaccatcgaccatgattcgctcatgttttgggaagaaaagaggccatattgcgaagctccccgaatgcatgcattgatgatggatcaaaccctcctgcaaactgatggatgctaaaagcaaatctcactccttggagaaacatgtaatccatgagcgggatctttcactaaggctgactctccttgaagatacatagataccct

SEQ ID NO: 107535 - DNA, 576 bp, Glycine max
  unsure (1)..(576): unsure at all n locations
  Clone ID: PAT_MRT3847_68118C.1
ttattacaaaaaattcttattataattttaatttatatttnnnnatcttttaaattttaaaatgcttttgccaataatcaaatcaaaagtacaactgagatgattattgttaaatccctttttgataattttttacaataattaaattacaattacatccaaaaagtggttatcactaaaccttnnnnnnttctgnnnnnnnnaaatgggaagtatatctaaagtagtcaccactaaagcttcattttattattattattatcttttctaatactgcacatgaacaggataaccaaataacataagaaaagttatagtttaatgacattaaagcacaataaaatagcatgataatatagaaaagtaataacaaaaacaaagaacttgagaagctgtaggtgttgggaggtagcatttatttaagaaaagagaatgatggcatcagaatgaatttaaggcataaaaagtatatagcataaagcaaaagttaaaaatactagagtataaaacgaataatgtggagaaccagtgaagaaatgagtgaacaaagtaaaacaactaaattatgatggaata

SEQ ID NO: 107536 - DNA, 196 bp, Glycine max
  unsure (1)..(196): unsure at all n locations
  Clone ID: PAT_MRT3847_68119C.1
ggagcacgcaaccgaaccaggcaagaagggaaaccacagcgcaggaaaaggcacaagcgagggaaccgaagcagaaagaggagggacagcnccncgagcgcaccaaggcnncgnnacaccggaacgacagcgagaacagagccaaacnccnnncgcagcnaaaggggggacagacaggnngcagaagccagccacc

SEQ ID NO: 107537 - DNA, 690 bp, Glycine max
  Clone ID: PAT_MRT3847_6811C.1
ccggggcggccccttctttcccttttttccggccccccctttatccggaaaagggtcaacccccttctcccttttcctcgttgtcccaacctggtttcaggggggaggcacccccccccccatagtttatatataaaacatcccctggcccccccatcctccggaccaaaatggcccccttcttcatcccatttattttcccaacccggggccaaatcccggaaaaaatcaccccccggattattccaaaggccccccccccgtttatcttagggggattggccccccttggcccaaaaccccggcccggccctttcagcaaacccctggccaaacccggcttcgggcccttcagcccggaaagggacacaaccccacccttccccaccctggcaaaaggccccccggccccggtggctcccaacatgggggggcaaatccaattttggggaccctgcttcccccccggggggccgggggcatttttaacccctttaaacaaaaacttggccaggtcggggcccccgggttttagttgggaaaccggcccccccttcccccctttgcaaaaggccccgccctgggccctgcccaccccaagggcttaacgggtcttggggcccccccggggagggaagaaccccctcctcccgggggggggggcgggccccgcctgtgcgggcggggggg

SEQ ID NO: 107538 - DNA, 738 bp, Glycine max
  unsure (1)..(738): unsure at all n locations
  Clone ID: PAT_MRT3847_68120C.1
acgaaagccagactgactgcagcacctgcgatacgccaactagaacacgctcctttcgctacgcccgcaccctcgcctctcctccacgaatcgccgctcgcactagggaacaacagaacaagatggcgcccgcaaagtccaataagaacaagtactcggtcatcctgcccacgtacaatgagcgtcgaaacctccccatcatcacctggttgctgaaccgcaccttcaccgagaacaacctcgattgggaaatcatcatcgtcgacgacggctcccccgacggcacccaagacgtcgccaagcagctcgtcaaggcctactccccgcacgtcgtcctcaagcctcgcgctggcaagctcggcctcggcaccgcctacgtccacggcctgcagttcgtcacgggcaactttgtcatcatcatggacgccgacttcagccaccaccccaagttcatccccgagatggtcgccctgcagcagacggccgactacgacatcgtcacgggcacgcgctacgccggcaacggcggcgtcttcggctgggacctcaagcgcaagctcgtcagccgcggcgccaacctcttcgccgacacggtcctggcgccccggcgtcagcgacctgacgggcagcttccgcctctacaagaagagcgntgctgcagaaggccatcgccagcaccgagagcaagggctacagcttccagatggagctcatggtccgcgcaaaggccatgggctt

SEQ ID NO: 107539 - DNA, 1111 bp, Glycine max
  Clone ID: PAT_MRT3847_68121C.1
gaggctgcgagaattcgacttccacggggacagcaaaaagaaaatcagtaggcgtagagaacagcaaagaaagaggaataatggagcaggaagagcacgaagtgtacggtgcagacattcccgacgaggagattgacatggacgcagacgccgagcaacaagatgagcaacttgcccccaatcacacaaacaaggaactggaggacatgaagaagaggctgaaggagatcgaggaggaagctagcgcccttcgcgaaatgcaggcaaaggtcgagaaagagatgggcgctgttcaagattcgtcgggcacttctgcaactcaagctgaaaaggaggaagtggatgctcgatcaatctatgttggtaatgttgactatgcatgtacgcctgaagaagtccagcagcattttcagtcctgtggaactgtgaacagggtgacaatactgacagacaaatttggtcaaccaaaagggtttgcttatgtagagtttgttgagattgatgctgtgcagaatgctctcctgttaaatgaatcagaattacatggtcgacaactgaaggtgtctgccaagcgtacaaatgttcctggaatgaagcagtattttggaagaagacctgctggtttccgatctaggaggcctttcatgcctgctccattctttccaccatatggatatggaagggttccaaggtatagaagacccactcgatacaggccatactagtgcacattctctgtttaataggtgatcacatatttaattatatgatgagacaaggcgttgttaatttgccattgtaataattttcgttggtggagcaagaacataaagctttagtttacacagaagttagatgtccttgcctgttaacgctgtagaatgtatgatgcgaacaaatgtagttttgatcacttggctacccatcttgaatgttgatagcactcggcactccggtttacttatacagtgatggaggcaactatgcaggggaaaatttcaatagttttgttagtttgaacatcaaaattggactattcagtgcaatgttggatttttttaaagaattgatattaacagtgttggaattggttacgtgcttgctaccgaag

SEQ ID NO: 107540 - DNA, 110 bp, Glycine max
  Clone ID: PAT_MRT3847_68122C.1
gaaagaacaatggttggcagtaggtatactacaagtaactcctcaatcccatgtaagaaaacaaaaggcagcttctttaatgccagtattgcacaacacctcagactagt

SEQ ID NO: 107541 - DNA, 681 bp, Glycine max
  Clone ID: PAT_MRT3847_68123C.1
tttccagatttgcaacgtttccttctttctctttttcttctaaaggttgaagtgcactcctttcctcccaaaaatctgcatgcaacccaaatgacacctataaagagccaacaattggttacctagcctaaccttttttctctttccttggttacttgcacagagagcttctgcaaatagagttcaaggttctaatccacaagaagaatcaactactgctagagcaacatcaacagctagcacaattatggtgtttaaagatagaaatgtggttgcttagcttgtgagaagagctgaaagagttggtttcaaggcaattgcctttactatggacattgatattcttggtcgtggggaggttgacatcaaaaataggttggcaaccatttggaaatttcaattggaacaacctttccacaaaactttacatggttcatcatggttgaattgataaatctcccactttaagatatttacttcttagtttgaaagtgtgttttataaatttacattgccaccaaacttggttttgaagaattttgaaggattggatcttggaaagctagacaaggtgtgcgattacattgctattttacattatttgttttgaaattttattggatttttttcattattgatcatattattggtgttactattactatttgttgtctggaaata

SEQ ID NO: 107542 - DNA, 734 bp, Glycine max
  Clone ID: PAT_MRT3847_68124C.1
ctcaaacccttcaccttcaacacccacaaaaccacccttcccaacccccccttcttcctcttccataacccctcttcttcaagacctctttttgaaccaaaaccactcttctacaccccatctacacctctctccctccacccaccgtacaccccgctctccccaccgcctctcccctcaagcccaccgaattctccaaaccctaatccacccttccttcgattccaaccgcttccacgaaatcctccccctcctcttcgaccaaccctcttcctcttccctctcctgggacattctcggcattatcaagggtttggggtttaacaacaaattcgacctcgctttgtccctcttcgacttcatccgtacccgaaacgaccgcgtttcgctcctgaacggttccgtgatcgccgtgatcgtctccattctcgggaaaacgggtagggtttcccgcgcggcgtcgctgctgcacaatctagaagccgatgggtttgaggtagatgtgtatggctacacctctctcataactgcttatgctaataataaaaaatacagagatgcactcaaggtgtttgggaaaatgaaagaagtggggtgtgaacctactttgattacttacaatgcaattttgaatgtttatggtaagatgggcatgccctgggctaagatcattgctcttgttcaggacatgaattgccatggccttgcccctgatttgtgcacttataatactc

SEQ ID NO: 107543 - DNA, 319 bp, Glycine max
  unsure (1)..(319): unsure at all n locations
  Clone ID: PAT_MRT3847_68125C.1
gtgtattatggataaacaatttatattacttttttcttctaatttgattcgagagaacaaaaaacatgaggcggtactaacaataaagggtgaaaaaggattatgtgcttactacgattactcaaagaaattatcttttatgcanacggaagtggtggacttgtaaacccactcttgagaagaggcatgggcacactcgctggtggaacgtgttatttctgaccaggtcttggaggcgccccatctttacctatagacagtgaccttaaagctaggcgtaaaaaggggggtagctgagaggggggggaaaccgggatgg

SEQ ID NO: 107544 - DNA, 256 bp, Glycine max
  unsure (1)..(256): unsure at all n locations
  Clone ID: PAT_MRT3847_68126C.1
cacccgacccggangacgaaanncacaacccccgncacaaccaggagaaaacaccggggagcaaaacggggagggacnngaaagcnnccccnaccaaaaagggcacaacgcgaggcaacaagngcaagaaancaaananaaagcancnaaaccaccacgaaccaaggcaaccaccaaagcaggaaaccccaaaagccancnaagagggnggagnaaanncccccgcagccaaacaggggncccagggcaaaaagaa

SEQ ID NO: 107545 - DNA, 225 bp, Glycine max
  Clone ID: PAT_MRT3847_68127C.1
ataaaaacaatctttgtgaactggaaagccccgaaacttacgtgggctgagtgcacagtcaaacgcaccctactgttagccgggaacataaaatgcgcagagggacactcttttgtttaaactagcaaaaggcccacatgcttttaatgtgattgtggttaagatgctttaagaatgcccactgtggcctgcccaccataatacttggtgggtgccctaggcatg

SEQ ID NO: 107546 - DNA, 188 bp, Glycine max
  Clone ID: PAT_MRT3847_68128C.1
ttagcgcacaggcggggagatgatatcttatgattgagctaacaagatgtgggctgctcatgttaattccgatctaactggtcactctatggctcggttacacgttatgaccactgattaaaatgcaagttcgctcaaggtacacggatcttgccagcagtcttattgcctatgcggcatagaaccct

SEQ ID NO: 107547 - DNA, 344 bp, Glycine max
  Clone ID: PAT_MRT3847_68129C.1
ttttcgtttttggaggagggaaaaaggcaactaggattgtgaaactagatctagatgggaaaaggcaaccaccgcaaaagcgcaacccgacaggggaaaaatcgacaaaaaagaaaaaaatggcgctgggacacagacttcagaagactttcatgaaaaggaagatcaagaaaaacccaaaaagatcgatgccagattgagacaaagaatagagcctcaatacaatgaggttcaggctaagacggaaacaaaatcgaacaaaacgaccattgaagaatgctgaaacttctaaaggctccatgttggatcttaaaaatcttaagtaaaaaagggcttcccaagaa

SEQ ID NO: 107548 - DNA, 639 bp, Glycine max
  unsure (1)..(639): unsure at all n locations
  Clone ID: PAT_MRT3847_6812C.1
ccacgcgtccgaaagtatgatctagtctaaatgaaagcgagtaaagtgagtaatggtgtgtgaaaacaaaatgcgaacatgttggttcctcctacagggcattttgatgtaatttaaggatatttctctacttaacagtgctcctgtattctatgttgaggtcctaactaataaaccacgatgtctcatgagtttagcttgatcctaactatacttcgttctcagatgtctcttgttgaacttagcctaatcgaacaacattacggttatagcataccaaaaaaaccaagttaccgcactccgtgtctagatatacgataaattaggcctgtcctattaagttctaaggatcaaaccatttcccaatgaggatgatcctaactacacatgcgtttgcgtgatcaagacaaaaacatgcgagaattaaaggccgataggaacaaagaacacatgaaaacactgttaaatagatattaaagattttacatcatttactctgtagaagttcccaactgaggatttagccttccattgcgaggaagctcctttttacaagtttaaagaagagaagaagagaaattaaaaaagtacaaagtggtgggagatgtctcctccacctctaanaacctcacaatctct

SEQ ID NO: 107549 - DNA, 182 bp, Glycine max
  Clone ID: PAT_MRT3847_68130C.1
gtcgacccacgcgtccgcagacctttatggaaaccattaagctcagcataagttgttttaagaatattactgtaaatttctctaaccatgtacttatgttttaatggcaggaaagtgatgcattaaacatgtccatatgtatgactattgaattcaatacataatataccactattaaaata

SEQ ID NO: 107550 - DNA, 674 bp, Glycine max
  unsure (1)..(674): unsure at all n locations
  Clone ID: PAT_MRT3847_68131C.1
aatcaacaggttccggcgncggcagtgatgaactggcctcagataatgcaggctgagaactcaccccagtttgatagaattgaactgaggttgcttggtgcagctcgggtgccggtggcctggatgggccaccatatgaaggacctacgccacggccactgcccataccaccaccacttcggccaccgccataccctccacggcctccttgctgagaaggccctccccttcccctaccttgatattcaggaggggcaccatattgctgttggggcatcccacgactgcggcccccaccatagcctcctcgtcctccttggggaccccaacctctgcctccttggggtccagcccctcctggggcagcagcagcagcctgttgttggggtggtgcactcctttcagcagggcgttgagcctcagagctttcacccccactgggtagttcagttcttctctttctgaccatgatctcagggagaaagtgaaaagtagagaagctactgcaaacggtgagcgatggacagggcgaagctgggcagtggagtgaagaagggaataaaaaagaggagtgtgtatatgtgtgcaagagagagaaaagaagagtgggttttctcccaaagagagagaaagagagaaagagagcggacgcgtgcttgcaagcggacgcgtgg

SEQ ID NO: 107551 - DNA, 721 bp, Glycine max
  unsure (1)..(721): unsure at all n locations
  Clone ID: PAT_MRT3847_68132C.1
ccacgcgtccgcggacgcgtgggttccggtttcactcttctaaaatggcgaatctagcacgcttctccaagagagccctaagaagcgcacacgcgctagcaaggccccacgtgcagcctcagctgctgacagcagaacgcgctttttcgacggatgcgccgacatcgattaccccgtcggcggatcgcgtgaagtgggactaccgtgggcagaggaagataatcccgttggggcagtggctccccaaagttgccgtggatgcttacgtggcacccaacgtggtcctcgccggccaagtcaccgtctgggacggagcctccgtctggcccggttgcgtcctccgcggcgatctcaacaagatcagcatcggattctgctccaacgtccaggaacgctccgttcttcacgcggcttggtcctctcccacaggccttccagctgacacttcaatagagaggtacgtgacaattggagcatacagcctgttgaggtcctgcactattgagccagagtgcattattgggcagcattccatcctcatggaaggttcattggtggagacgcagtcaatccttgaagctnggtcagtagttccaccagggaggcgaattccaaccggtgaactttgggcaggaaatccagccaggtatgtggaggacctttgacccatgaagaaatcttaaaaatccccaaactggcagttgctataaacgatctgagc

SEQ ID NO: 107552 - DNA, 3524 bp, Glycine max
  Clone ID: PAT_MRT3847_68133C.1
agctcggaattcggctcgagtcttgcaagcatctcatttctctctttctctctttctctctctttgggagaaaatccactcttcttttctctctcttacagacactctctttcttcttcccttcttccctccactgtccaccgttgcagcagctgcaatacgtttctctttctccctgagttttcgtcatggtcagaaagagaagaactgaactaccaagtgggggtgaaagctctgaggctcaacacccttctgaaaggagtgcaccaccgccccaacaacaagctgctgctgctgccccaggaggggctggaccccaaggaggcagaggctggggtccccaaggaggaagaggagggggccgcagccgtgggatgccccaacagcaatatggtgcccctcctgattatcaaggtaggggaaggggagggccttctcagcaaggaggccgtggaggatatggcagtggccgaagtggtggtggtggtggtggtatgggcagtggccgtggcgttggtccttcatatggtggcccatcgaggccaccggcacccgagctgcaccaagcaacctcagttcagtcatatcaaactggggtgagttctcagcctgcatcatctgaggccagttcatccctgccgccagagcctattgatttggaacagtcaatggggcagatggtgcttcattctgaacctgctcctactcctcctcctgcaagtaaatcatcaatgaggtttccccttcgacctggaaagggtagctatggcaccaagtgtgttgttaaggctaatcatttctttgctgagttacccaacaaagatctgcatcaatatgatgttacaattactccagaagtgatatcaagaggggtgaaccgtgctgttatggagcagttggtgagactgtaccgggaatctcacttgggtaagagactccctgcttatgatggacgcaagagcctctatactgctggaccacttccttttatgtcaaaggagttcagaattgttctcgttgatgatgatgaaggagggatatgatgaataagaaaatggttaatggggggacagttaacaactggttctgcataaacttttcaaggaatgttcaagatagtgttgcccgtggtttttgctatgaacttgctcagatgtgttatatatctggaatggcatttacacctgagccagtagttcccccagtcagtgctcgccctgatcaagtggaaaaggttcttaaaactcggtatcacgatgccaagaataaactgcaaggaaaagagcttgatttactcattgttatcttgccggataataatggatcactatatggtgacctcaaacgtatttgtgagacagatctaggacttgtttcacaaggctgcttaactaagcatgtcttcaacaggagcctgcaacacctctctaatgtcctcattctcattttccggtttctctctctctctctctctcatggcgaatctagcacacttctccaagagagccctaagaagcgcacacgcgctcgcaaggcaccacgtgcagccgcagctgctggcagcggaacgcgcttttgcgacggaggcggcgaaatcgatatccccgtcggcggatcgcgtgaagtgggactaccgagggcagaggaagataatcccgttagggcagtggctccccaaagtggccgtggatgcttacgtagcacccaacgtggtcctcgccggccaagtcaccgtctgggacggagcctccgtctggcccggttgcgtcctcctcgggtatctcaacaagatcagcgtgggattctgctccaacgttcaggaacgctaagttattcacgctgcttggtcttctcccacagaccttcctgcttacatttcaatagagtggtacgtcactattgcagaatacagtctgttgagaaccttcactattgaagtagtgtgccttgattggcagcactccgtcttcctgtaatgttgattgataaacacacattcaatcctattagcattgtcagttgtagcactgcggtaatccagtttccacaccgtaccgctcaccagcatgtcttgtgagattactgcacttttaaatctgtgacctattttaagcactccaacaattttcgttttgaatacgttacaatgcgcacggacattttttaatagtcccttccccattccatcctctctttgcaggttttccgcccaaggctttacatgtcttcctagacgtgtgctagtttgtttttgaccatgggtgcttttgcagggggtggattgggaggtgtgaagcgtgatacagaagtaaggggtgtctaggcttctgtgagtccattgcctgcacccaaggagaacgtgaagagagttgtgtttaatagttcagattggtatgtgaaaggtttctgttgaatccttgtttagttagtagtttttgctttcataacccaacgtggtcctcgccggccaagtcaccgtctgggacggagcctccgtctggcccggttgcgtcctccgcggcgatctcaacaagatcagcgtcggattctgctccaacgttcaggaacgctccgttattcacgctgcttggtcttctcccacaggccttccagctgacacttcaatagagaggtacgtgacaattggagcatacagcctgttgaggtcctgcactattgagccagagtgcattattgggcagcactccatcctcatggaaggttcattggtggagacacagtcaatccttgaagcagggtcagtagttccaccaggaaggcgaattccaacaggagaactgtgggcaggaaatccagccaggtttgtgaggactttgacccatgaagaaatcttagaaatccccaaactggcagttgctataaatgatctgagcagagaccattactcagagttccttccctattccacagtatatttggaggttgagaagtttaagaagtctttgggtatttctgtttgatgttcttttttgttattcttcaatgtatctgttagctggagttttgcttgtaaggaaataagaattaaaacaaagagagcaagcttttgtattttctttgtattccttgctgaaagaattggcttaaaacatcgtgttctatataattgactggagtgatatgttcagagatgagatgcatcttctgagctttaggcattagtatttttaagtcccaattggacagattctgatgtttccccctttttatccatttgttgcaaacaaatagaaatcttaaatgccaggtgacaaccaaccttgatccacttggcaagtatgctttcaaccggtgtttaggtggacaagggtatgggactatgggtagttcttccttgtcgttaaaaaagttaatatgcacccttttcccatggaaataattcaagtagtctctgagatactttctgtgtctcactgtaatgtataaagataaagtgtttgtttggactagcgtttgtagaatggatttgagattaacgtgaacttataaaattgatttttagt

SEQ ID NO: 107553 - DNA, 431 bp, Glycine max
  Clone ID: PAT_MRT3847_68134C.1
atgacgggtcatgcacccgtccataagctgggcgtcctgctcgaggttagacacagctcatttctacaacgtttactcacgaaaaacattggctgtgataaaacatgaggtgtggttcttgatttctcggggtgcagcatgaatgctctgaaatgagcatttgtgagctgacacggttaggagactgcatatatgccatgcacttgtgccctgactctatagaccagtcccgaaacaagcaatggggataatctggttctactcttattactttggtagagttcacatggccttgaatgatgaaaaagtatgatgttgaattggatatcggggatatggatatgcttggcactgctatgagacaaaaagatacccccatcgtggcactcatgtatattgcggatgcaagacagaggctgctgtatgctact

SEQ ID NO: 107554 - DNA, 430 bp, Glycine max
  Clone ID: PAT_MRT3847_68135C.1
acacgtacgtattctcgctcgacgtcagagtcaaggagcagagagtgagcaatcttttacaatcactcctagttggagcatcagtgtttgctatgcctgccataaaaaagataccaacttcagttctctggggatattttgcttacatggccattgatagtcttccaggaaatcaattctgggaaaggatcctacttctttttgtaacacctagtaggtggtacaagttgctagaaggggatcatgcttcctttgttgagtcggtaccttacaaatacatagtcttcttcacactcttccaatgtgtatatttcttggtttgttttggagtgacatggattcccatagctgggatactgttccccttgcctttctttttgctgatcacattgaagcagcatatacttcccaagctgttcaagcctcacca

SEQ ID NO: 107555 - DNA, 410 bp, Glycine max
  Clone ID: PAT_MRT3847_68136C.1
gttacgcgtccgggaagacaactggagaggagggacaccacttctttaaggacgacctgtggccggagggtatgcttattcttgacacacatgcaaatgtgtatatttggaacgacaattcagtggaacgcatagaaatgccaagtggttctgcaattggccataattacatagagttggatgcatctctggaggggctatgtgcacatgtaccactatctgatgatactgcgggggatgaaccttgttttgtaacaacatcctgaacatgggatcatggacaaactatgattatagggaagtgatttcagaaaaaggtgatactactgttgggacttgaccatgcggtgatggaaaagaagaacgtgtcaagtacaaggggaccaaggaacaaagcagaagctttggct

SEQ ID NO: 107556 - DNA, 584 bp, Glycine max
  Clone ID: PAT_MRT3847_68137C.1
gcagaccagacttcgctcgtactcgtgcgcctcgctttgcttttcctccgcaaccatgtctgacaaacccgatatggctgagatcgagaaattcgataagtcgaaactgaagaagacagagacgcaagagaaaaatccactgccttccaaagaaacgattgaacaggagaagcaagcaggcgaatcgtaatgaggcgtgcgccgccaatatgcactgtacattccacaagcattgccttcttattttacttcttttagctgtttaactttgtaagatgcaaagaggttggatcaagtttaaatgactgtgctgcccctttcacatcaaagaactactgacaacgaaggccgcgcctgcctttcccatctgtctatctatctggctggcagggaaggaaagaacttgcatgttggtgaaggaagaagtggggtggaagaagtggggtgggacgacagtgaaatctagagtaaaaccaagctggcccaaggtgtcctgcaggctgtaatgcagtttaatcagagtgccatttttttttttgttcaaatgattttaattattggaatgcacaatttttttaatatgc

SEQ ID NO: 107557 - DNA, 802 bp, Glycine max
  Clone ID: PAT_MRT3847_68138C.1
cccacgcgtccgcccacgcgtccgcccacgcgtccgcgaaggaaaaagaaaaatgatgaaaagatgtgaattggtgtttgaagcttcaacaagaggagggtgtgaggagcacccatatgataagcaatcaccaggtgtttgctcctcttgcttaagggaaaagctatctcagctatacaacacaaaccctattattgatcctcgttgtttttcttctccttcttctccttcttcgcctcatcaatcttttttttcttcgaagcacggttcttccggtcaccggagaccgcgctttcggaggaacgcttcgcaagcggcggaatctgcctcgtgcatgctgagcttgaacttgaagaagagcaagtcgctggcgtttgcttcgaggaatagggagagggatgtgatgatgagtggaaggaagaaagatgggttttggacaaaggtgctcaaactcaagagaaaggatacacgggcctaaagggaaggaagaaaccgtgttcaattttttttttctttttctttcttgtcccaaaggtgatcatgtttagctgtatcataattgaaggatgtttctgttgtgggtcgtttcaggaatttcagagttcatctaatttgtatttcgattatgataattatgcatcgtattactgtttcaccccctcgctatatcataattcataattgaaggatgtttctattggggttcttttcaggaatttcagacttcattgttgtattccaattatgataatgatgtatgtattattggaagatttatttaatagatagattttttaacaaa

SEQ ID NO: 107558 - DNA, 247 bp, Glycine max
  Clone ID: PAT_MRT3847_68139C.1
gttagctagagaaacaaagattgaacaagttatgatggacggagaagttgatccattgatgaagagggagacagccaaggacaatagagtgaagaatgagggctgcgaagaggattttcttgataatccaataacagagttgatcaagatggaagttgaaggtggagatgcaaccaagcctcattgttttcaatattgcaatttcataaaaaagttgttatgatgagacaaaaatcatggttgggac

SEQ ID NO: 107559 - DNA, 403 bp, Glycine max
  Clone ID: PAT_MRT3847_6813C.1
gaggacggcgagcttatctagggggtcattgatgtggaagaaaaagctgcaatagctaataatatagccacaatcaagtgtgggagaccctactcgcgtatggacctcccttcgaagaatgatcaaaacgaactcgaggaaatgaagaacatgacggcgacaagactatgtagctcattgacgaatgaaaagcaacgattactcatgaggggcctccgtgtacagaggcatgactatgtcgtacacggctccatctacacagatccacccacacgggaggtggcaagcgttacatgtaagattgtctagaaacaaagatctctatgttggcacctacactgcccaagacgaaacaggtgtagcctactacattggtgctcttacatgcagagaattttatgca

SEQ ID NO: 107560 - DNA, 1039 bp, Glycine max
  Clone ID: PAT_MRT3847_68140C.1
tcaactttaccaatcttggcatgcacaaattaacccccacccaattttacactccctccctcctcccatacccatcatcttataatacacaaaggttttgaatatcaaaatacatgacaattcacaacaacaaaatgacttcaattgccaccaatagcactgttgtcgccactagaatgctagttgtgatcactttagtccttgcactagtatgttgtgtcacatccgcgcaatcaccggcagcagcaccagccccggagagcaacgggtgcttgatggcactaacaaacatgtcagattgcctgacatatgtggaggatgggagtaagttggcaaagcctgacaaagggtgttgccctgagttggcagggttgattgatagcaaccccatttgcttgtgtgagttgctaggaaaacctgactctattggcatcaagattgatttgaacaaagccctcaagcttccttctgtttgtggagtgaccactccccctgttagcacttgttcagctgtgggagtccccgtgtccttgcctccatcaatgagtgaaggttctttgtcaccaggtattgcaccaggagtctccagtccttcaaatacagatgctagtcctgcttctagtcctggtggtccaggcccttcctctgaggaagctgctgccagcccttctcaaaacaaaaatggagtttctgccattcaagcctctgctttgactaatttcatttttggcctttccactctatttgtctccgtattcttctgattttacacattagttctccgtgtcgttattttagtggatctttttatttcctcattatttgtatgttgtgagccaccttttaaaggttttgttgtaattttatgcactgatgcaattgttactgtcattattagtagtgaaccacacactttaatcagggccttcttgattgcattattaagccgagctattcattttttgattttgtactgtattgtttttttcctcccaagtataatgtcctcatgacattgttggaaaaatcagctttatta

SEQ ID NO: 107561 - DNA, 3040 bp, Glycine max
  Clone ID: PAT_MRT3847_68141C.1
acgcgagaagacgacagaagggcgcctaatgattagtagattgatttccatagctttcagggaacggtctgcctcccataccagctaactaacactggattcaatgattttagctgtctagatcaaaactgccctatgtaatgttgttacaatacatgaattttgaatctagtttagtagaggaatttcatggtgtaacggtttcatgtgagccacgcgtacggtcctaatctttaagatcctcagatgtcaaacaaaaaaaaaccaacaaccttttcctttgggttagtgagctcacgttgaagttgttagttcaaagacttttactctcttcactgatgacgagtaggttatgggaaggttctggggataacggattccccacccgatgaatgccttcctccgctggacatgtcaaagcagccacctacccaggagttggtggccaaggatctgcacgccaacgagtggcgattcaggcatatttttcggggtcaaccgcgtagacacttgctgcaaagtggttggagtgtttttgtcagctccaagagactagttgctggggatgcgtttatatttttaaggggtgagaatggggaacttcgagttggtgttaggcgtgcaatgagacaacagggtaatgttccatcatcagttatctcaagccacagcatgcatctcggtgttcttgcaactgcttggcatgccatattgactggcaccatgttcactgtgtattacaagcccaggactagtccagcagagtttattgttccctatgatcaatacatggagtctctcaaaaacaattataccattgggatgcggttcaaaatgaggtttgaaggtgaagaggctcccgagcaaaggtttactggtaccattgttggaattgaagatgctgataccaaaaggtggccaaagtccaaatggagaagtcttaaggtgagatgggatgaaacatcaaacataccacgtcctgagagagtttcacaatggaagatagagcctgctcttgctcctcttgctctgaatcctctaccaatgcccaggcctaaaaggcctcgatctaatgtggttccatcatccccagattcctcggttcttactcgtgaagcttctaaagtaagcgtagatcctttgccaacaagtgggtttcaaagggtcttgcaaggtcaagaactttcgaccttgagaggtaattttgctgaaagcaacgaatctgatacggcagagaagtctgctgtgtggccacctgttgcagatgatgaaaagattgatgtttctacctcaagaaggtatgggtcagacagctggatgtcaatgggaaggcatgaactaacatatccagatctgctttcaggctttgggacccatggagatcattcatcccatccatcctttgttgatcaaaatggtcctgtagctaatgttggtagaaaacatttgttggattgtgaaggcaaacataatgttctgagtccttggtctggagtgccatctagcctgtcactgaatcttttggactcaaatacaaaaggctctgctcaaggtggtgatacaacttaccaagttcgagggaatctgaggtatagtagtgcatttggtgagtaccccatgcttcatggacataaagttgagcattcccatagaaactttttgatgccaccaccaccatcaactcaatatgagagtcctcgttcaagagaactgttgtccaaaccaatatcaggaaaaccttgtgaggtttcaaaactgaaagacagtgactgtaagctatttggcatctcacttcttagtagccgccccattgcatcagagccttctctatcacaaagaaatgttacaagtgagtcagttggtcacatgcatacagcatcacaccatcaacgtgcaattgaaaacgatcagaagtctgagcattctaggggttcaaaaccagctgatggtctgctgattgatgaccacgaaaaggtgttacaaacttctcagccacatctgaaagatgtacaagcaaaatctcatagtggttctgctagaagttgcactaaagttcacaagaagggtattgcacttggtaggtcagtggacctcacaaaattcagtgattatggggaattaattactgaattggatcaactattcgaatttggaggtgaattaacttctccacaaaaggattggcttattgtctacactgataatgagggagatatgatgcttgttggtgatgatccgtggcaggaatttgttgcaatggttcgcaaaatttatatctaccccaaagaggagattcagaaaatgagcccgggtaccttgagttcaaagaatgaagagaatcaatctgctagtgaaggtgccacagacacacaagaaatcaagtgtcagctcaataattcagcttcagatacctgataatttgtagatttgatttccatagcttccagattccggactggagtggaaagtagaggtgactgtcataaagccatccagttggagaatatgacctgatgaagaaaattctaattctgaatctgactgctttatcaagtgactgcttgtgtttggaatctgaatatggatggcatgaatgagtatccatccaattttggaccgtgtcgtggaattagtagtagtagtagtagtagtagtatatatgccttccctgttatacactcctaatatagtagtatgttattgtgccttgtgcaaggtgataggggggtgtatcggccttgcatttttcaacaatcctaccttgtacatagttttactcgcatccttagtacccaaactcgttaatgtaattaagtgtcatatacaagggcggtttatctgattttaaatatgattgtctcttatttgtagtggggtaatttgtgccagtatgcctaatcattgtggatattaaaatattagtatgcgtttgggtagtagatgtattattaaattttgcccctaaaaaaaaaaaaaaaaaaaaaaaaaaaaaaaaaaaaaaaaaaaaaaaaaaaaaaaaaaaaaaaaaaaaaggatatat

SEQ ID NO: 107562 - DNA, 1827 bp, Glycine max
  unsure (1)..(1827): unsure at all n locations
  Clone ID: PAT_MRT3847_68142C.1
ggctcgagacgggtgcgagaagacgacagaaggggaggaaccctaaatctgaaactgggtggagtccgttctgccacggctgagaaaatagcgacgcggaaacacgctcgtcttcacgatcctgcgatccagcgcgacgtgtccagcgattcctctctctaacgagtctacggagggcgaagaatcgcgaggctagccgccggtgaagagtcgcccgattcaagcccgattcatccccgatgcagagattcaaccacgattcaggaacaaaaacgagacaacctccgattcgtatcggtagcagctggaatcttatcgaatcgtgagataagtatcgtgaatcgtacgatactaactaccatgcttgtaactattggtaccatggtgtaaacctaaagcattggaagaactgaaaaattgccttataaagactgtgggggtaagctcctgtgaagtgacattatctctaagataaaattctcaactcagaaatggagattccactgtgcctcatctcgctatagtgattatgtagatcttgtttttaagtggtggcaacatggcggatttttgcctaaccggcataggcgatttatgaagggaggccggctatggaggcgccctaggctgcaatggcatgtttatatgatggaattttggccttccgcagttgataacacggtttgggggctggccgttcctcgtggctgtttggaattgataactatgggtgcaagtataagaaaaatgatgttgtttttttccaggatggtcatattctcaataagtaatgccagatatacttatgtgcatgatcagaaatatccctctgaagatgttgacatacaccatgtcgtatcaaggaggagtaatgctaaatatctttttgtgcacgcctcagcacttcttgtattagcatgtgccttgtatctatatgttcttaaggaaaaagcaatcagtctagtgtattacagcttgctttttgacatatttcttgtcaatttgttacttgggaagcctgttaagaaagagtctgttgtgattatgccagcttttggagtacagcttgagactcattatgtgagtggaaaagtcatccgatactttgttcccattgacaagattctgaaacctgttctaatagaatgtgtgactccagtgacttgttattggactctatcattgattattcgtggggaatcagaaatggtgttagttttcaagaacttacgccctccggtgaaaatgttggcctatgtctggaaggccctgtgtgctgcaactgatagtaaagaagagacctgtactcatgcagaatgaataattgacagttatggcttatgtactggtgtctggtgtacccccatcattgaacgccaatcctgtgtgagagaaggattggattcaacatacatttggaaagtgaaatttttgctaaaccacactcttctcgagttgatagtttgggattgtgcgttgattatcagcacgacaaggcattaaatttagaggccaattggctctacctttttgaactgcataataggtagctaatgtgaaagtaggggaaaattttgtatcatgacacaggactgatagaactagtatgtttccgtgagtcttttgtaactaaaatagagcacagcttcataattttttgctccctcaatgctgctgtacactcaattacaaaagaatgattttgcagtgaaacatgcattctgtcaaactaatttcaccactggtaatagtaacaaaccacttttttttcaaagataaaaaaaaaaaaaaaaaaaaaaaaaaaaaangaaaaagngngaggggggg

SEQ ID NO: 107563 - DNA, 1702 bp, Glycine max
  unsure (1)..(1702): unsure at all n locations
  Clone ID: PAT_MRT3847_68143C.1
cacaccacaaccttcttcttcttcttcttcaacttctggttcaaaacctcaacagtttgttgaattgcgcgttgaaatacgactcaatattctttcgcgagctctgttctcacttcaaaggttaggttcttcgacagtttctttgtttccactccgtcgcttgctgagaaggcgtgagcgagagttgtagaattacgcaacgagtgtcgcggatgagagatctgtggtgaggtctctggaccatgaaaaggtgttacaaacttctcagacacatctgaaagatattcaagcaaaatctcatagtggttctgctagaagttgcactaaagttcacaagaaggggattgcgctcggtaggtcagtggacctcacaaaattcagtgattatggggaattaattgctgaattagatcaactattcgaatttggaggtttattaacttctccacaaaaggattggcttattgtctacactgataatgagggagatatgatgcttgttggtgatgatccgtggcagtaaggatatctaacaatgacatatgtgattattctgtaatggtaaaaaaaaatcttgacaatgacaattcgtttgcataattctatttttaaatcagggaatttgttgcaatggttcgcaaaatttatatctaccccaaagaggagattcagaaaatgagcccgggtaccttgagttcaaagaatgaagagaatcaatctgctagtgaaggtgccacagacacacaagaaatcaagtgtcagctcaataattcagcttcagatacctgataatttgtagatttgatttccatagcttccagattccggactggagtggaaagtaggtgactgtcataaagccatccagttggagaatatgacctgatgaagaaaattctaattctgaatctgactgctttatcaagtgactgcttgtgtttggaatctgaatatggatggcatgaatgagtatccatccaattttggaccgtgtcgtggaattagtagtagtagtagtagtatatatatatgccttccctgttatacactcctaatatagtcgtatgttattgtgccttgtgcaaggtgatagggggtgtatcggccttgcatttttcaacattcctaccttgtacatagttttactcgcatccttagtacccaaactcgttaatgtaattaagtgtcatatacaagggcggtttatctgattttaaatatgattgtctcttattttagtggggtaatttgtgccagtatgcctaatcattgtggatattaaaatattagtatgcgtttgggtagtagatgtattattaaattttgcctctaagtcttggcatgtgccttgcagccttggtgtttgcgaatgagtccattaccgccatatcttgtcccagggttttcgaaccagcggcgtagttgaagtcatgtaacgagtgaagaaagtggacacttggggtctctggaaaaccgatggtttgaaaattccttggtgaaatgtatttgtggtttatcgttgcgatgacactgctagttgtggtgtagtcatctctctctgggatatgtgtagcgtggttacgtgatagaacttcattctttgaaagcaccatcgttgaatgtccaataatggtttttgaaaaataaataaattgattgtacttttctgctagagaaaaaaaannnaaannnnnnnnaaaag

SEQ ID NO: 107564 - DNA, 2026 bp, Glycine max
  unsure (1)..(2026): unsure at all n locations
  Clone ID: PAT_MRT3847_68144C.1
nngatgggatgaaacatcaaacataccacgtcctgagagagtttcacaatggaagatagagcctgctcttgctcctcttgctctgaatcctctaccaatgcccaggcctaaaaggcctcgatctaatgtggttccatcatccccagattcctcggttcttactcgtgaaggtatggataggttgcttttaaatatttgatatttatttgagtttcatctttgcttaacatatgtaattatgtgaagcctgatctgttatcggtgattaacagcttctaaagtaagcgtagatcctttgccaacaagtgggtttcaaagggtcttgcaaggtcaagaactttcgaccttgagaggtaattttgctgaaagcaacgaatctgatacggcagagaagtctggtgtgtggccacctgccacggatgatgaaaagattgatgtttctacctcaagaaggtatgggtcagacagctggatgtcaatgggaaggcatgaaccaacatatccagatctactttcaggctttggggcccacggagatcattcatcccatccatcatttgttgatcaaaatggtcctgtagctaaccttagtagaaaacatttgctggatcgtgaaggcaaacataatgttcttagtccttggcctggagtgccatctagcctatcactgaatctcttggactcgaatttaaaaggctctgctcaaggcggtgatacagcttaccaagtacgagggaatctgaggtatagtagtgcatttggtgagtaccctgtgcttcatggacataaagttgagcattcccatagaagctttttgatgccaccaccaccatcaactcaatatgagagtcctcgttcaagagaactgttgtccaaaccaatatcaggaaaaccttgtgaggtttcaaaactgaaagacagtgactgtaagctatttggcatctcacttcttagtagccgccccattgcatcagagccttctctatcacaaagaaatgttacaagtgagtcagttggtcacatgcatacagcatcacaccatcaacgtgcaattgaaaacgatcagaagtctgagcattctaggggttcaaaaccagctgatggtctgctgattgatgaccacgaaaaggtgttacaaacttctcagccacatctgaaagatgtacaagcaaaatctcatagtggttctgctagaagttgcactaaagttcacaagaagggtattgcacttggtaggtcagtggacctcacaaaattcagtgattatggggaattaattactgaattggatcaactattcgaatttggaggtgaattaacttctccacaaaaggattggcttattgtctacactgataatgagggagatatgatgcttgttggtgatgatccgtggcaggaatttgttgcaatggttcgcaaaatttatatctaccccaaagaggagattcagaaaatgagcccgggtaccttgagttcaaagaatgaagagaatcaatctgccagtgaaggtgcagcagacgcacaagaaatcgagtgtcagctcaatcattcatcttcagatacctgatagttcgtagatttgatttccatagcttccaggttccggactggagtggaaagtagtaggtgactgtcataaagccatctagttggagaatatgacctgaagaaggaaattctaattctgaatctgactgttttatcaagtgagtgcttgtgtttggaatcagaatatggatggcatgaatgagtatccatccaattttggaccgtgtcgtggaattagtagtagtagtagtagtagtagtatatatgccttccctgttatacactcctaatatagtagtatagtacggaattgtgcgttgtgcaaggtgataagggagtgtatcggccttgcatttttcaacaatcctaccttgtacatagttttactcgcaaccttagtaccggaactcgttaatgtaattaagttgatatacaagggcgattttaaacaaaaaaaaaataaaaaaaaaaataa

SEQ ID NO: 107565 - DNA, 418 bp, Glycine max
  Clone ID: PAT_MRT3847_68145C.1
agaagacgacagaaggggaaaccaaatcgaatcacttgttagttcaacatggctggcagtggcacctttgcagagatcatagatggtgatgtgttcaagtactatgcacaaggccattggaacaagtcctcttctggaaaattcgttcccatcatcaatccaaccactaggaagacccacttcaaggtccaagcttgtacacagaaagaggttaatagggtcatggaatcagcaaaaacagctcaaaaatcatgggccaagactccactgtggaaaagagcagagttgcttcacaaggctgcagcaatactgaaggagcacaaagcacctattgctgagtgtcttgtaaaggagattgcaaagccagctaaggatgctgtcactgaggtgatcagatcaggggatttggtgtcatatt

SEQ ID NO: 107566 - DNA, 794 bp, Glycine max
  Clone ID: PAT_MRT3847_68146C.1
aataaatcaattcatttaatccactagctaacccatgatggagtgagtcatgatgagatttttttaactcaccagaaggtgagtcaaattgaactaatatgtttcaaacctcaaccttaatagccgaattaactcaccttggcaatattttctcttgagatcggtagaaaataagggtttgaatttatttggaccaagacttcgaagtcccaatctcataattgtcatttcaatttcatcttcgaaaattgatctgtccaatttagcaagttgatcctcatccaaacttggaaaacaccctgaaaggtagaggattgagggagttgtttttttagtaaacaaaagcttgtggaaattactaaattagacaccatgctctctagctaaaatctctacataatccaatctccatttttgttgtgaaaaacttcataatagttgtgattccttttgattgcttcaaacccatgaaaacaaacagatattcttatccacataagccatccatttacatttagatactgataccaaaaaaattcattcgtaaatgccaatgtttcatgttcttcctacatatttttaagaatgaataatctatatacacactttccttgcatgaattaatgtttttgggtgaggaatgcatattagtatctaagtgtgggctatggtccgcataacgcttaccaaatctccaacggcttgaaggccaatattataaagtgggtattatatatgcataagcaccttttatatatataatacatttccaacatggaggcatgaaaaatttc

SEQ ID NO: 107567 - DNA, 374 bp, Glycine max
  Clone ID: PAT_MRT3847_68147C.1
agcatccaaaaaactttcccctataacccgaagaaaaaaatggtgaaaaaaaggggaccggtcgcttaacaccaaattaggccccctaaataccccaggtaaaaatcacgagcgtaattttaaccgggaataaaaaccactttggacaagggaggagcgggcaaaaaatgggcttttgggacccaacaaggggcccttttaaatattaaaccgcggaaatgccccctttaaactcacctcaagacccttaaaaaccgggggggtaaaaagaatagtacctggtttgcccaatttggggggaccgccttggggggtggctttgaaaacccgcagggggtgcttcccttggaatctggggacggtggtccagaaaa

SEQ ID NO: 107568 - DNA, 472 bp, Glycine max
  Clone ID: PAT_MRT3847_68148C.1
tcgtccacgcgtacgtatacgcgagcgacggcggattgggtggctggtttccattcagcagatacacacgatagtggaactgggtgcggagattcgcataaacaaaatagcgtggtgctggagaggtcattcgcaaggcacagattgggggtgggagcggtaacaagaagaaagggcatgatgttggtaggatcgggaacaacaacaaggagggggggctccatagaagcggccacaaccacttctaatggtggtgccatggaggagctggtttgggaacgccctgctgctgtcaaaagggacgagaattgccaattgatcggcgcataacaaagattcaagcggatagcaatagcattatatctatccatcacaccatgaataatagcagcaccttgcgttgtgtagagcctttgcattttgagggcatagcttgaagagcatcaactgtgtggatctaaacagggccccg

SEQ ID NO: 107569 - DNA, 500 bp, Glycine max
  unsure (1)..(500): unsure at all n locations
  Clone ID: PAT_MRT3847_68149C.1
aattcggctcgagaaaataattggagcaaaatatttccgcatggatggttcatttggagaagatgacataatatcacccagggattcaaatggccatggaactcactgtgcatccactgctgctggaaactcagttgagtccacaagcttctttggccttgcctcagggacagcaagaggaggagttccatcggcacgaatcgcggtgtacaaaccttgttggtcatctggctgcgatgatgccgacatccttcaagcattcgatgaagccatcgcagatgatgttgacgtcatttccatttccttgggacctgtgagtgtcgatcaccgcaactattttgaagatgtgttcgccattggggctttccatgcaatgaagaaaggaatattaacgtcccattctgctggtaatgagggtccagagctttctacaatgtctgtttatgctccatggttactttctgtggctgcaagcactacagacagaaagctttntaccc

SEQ ID NO: 107570 - DNA, 620 bp, Glycine max
  Clone ID: PAT_MRT3847_6814C.1
ggaggcgactatctgtttgcttttcgaatgataatggttctatttcgacgagaattctctttttgtgattcattgtacctttgggaggatgttgatgacaaatcagaggaatctaaaggaagattaaagtcattgcgccactatggaaagtacgagagagaaaatatgaaaaatggaggaaagaatggtgaagatcctccccttcccatatctgtttttcttgttgctagtgtgcttaaagacaaaagcacaatgttactccagcaagcgcgaggcttggatgatgttgtcaagatattgaatgatgtaaatggaaatcttgatgccaaaaaagcttgtgtggctgcattaaaacttcacaagaaatatttgaaaaaggccaagaatccttagcaccaaatataactcgcaatatttgtttttccactgaccaacaatggtgttgttgtgccctttgtttggaagacaatattgaatcttttaaagaaaactaaattatttttaatagaaagttgaaaaagggtttcaaccattgtgtataagatgaaaaacaattgttgtctattaaattaatcttaattttggtatatatatatttaaattaaccaaatgttgttcat

SEQ ID NO: 107571 - DNA, 204 bp, Glycine max
  unsure (1)..(204): unsure at all n locations
  Clone ID: PAT_MRT3847_68150C.1
cccttncgggcaaaaaaaaaaaggggggtttatcactcaaagggcaacacaggactccacaccccccggaacacagaccaatacaccaccataggcaccatgcagagtctggaggagtttatgcgagcaactagcaacaactcacaatgtaacaaccagacggcgaagaagcaagtctcagggcaggtaggcccacccaaacca

SEQ ID NO: 107572 - DNA, 267 bp, Glycine max
  Clone ID: PAT_MRT3847_68151C.1
ctctgatcctgtaacatcaatgggcctagtgcagcatgaaggcggtccctgtggcgtattggcagctattcaagcatttgtgcttaaatacattattttcttcagtgatgagttgaaagatgtgtcatgcatgtcacagaagggtccgggtgcagcatttaaaagtcagtctgttccatcaaataatttttcttcgctcactgaaggtgaaaaagtaagagctcttgtaaaaagtatgggtgaaattttattttcatgtggaagtaa

SEQ ID NO: 107573 - DNA, 386 bp, Glycine max
  Clone ID: PAT_MRT3847_68152C.1
atcttctaccaatggcgattttgttcaaggaaaagatctcgcaatggttaaagttaatgtagcatgtgctgctgtaggcttgacatcaagctacactccaactccattgctggaatttggtttgctaaaagacagtgggttcattgttcattacttccgtagttcattttatcctaatttatttccatatttcttctaatctttatctttcttcttatctttcttctctctatcatattttctttattttttcatttactatatttatttccatttttcattattaatctattatcactctaaatttctatatctcttacacttcttattctactatctccatctcttactctcttttcttaataacgtctactatcttatcctaa

SEQ ID NO: 107574 - DNA, 339 bp, Glycine max
  Clone ID: PAT_MRT3847_68153C.1
gggactcaaatattatatgcagagatggataattcacattagccgaactttttacagaagcgaccaattaccaaaccttaaaaacagaaataggaagcatccctgagcttaacacacccctaacaggtccaaaacacttgaacttgctgaagggcaagacatgaccactttattttaaggatgttagtttaacacaaaacaccagagtgcgcgaaaaccattacagacatgtgtacataagtttttagctacacattaattggttatcattattactaattaagggctatttttgattgaagcttgctgtaccaacaccttatttgcaagtgcacgggt

SEQ ID NO: 107575 - DNA, 351 bp, Glycine max
  Clone ID: PAT_MRT3847_68154C.1
atcggtctagcgtatcatcgtatcgtaacatcgtcccaatggtccatagtcacatgctaagctgctgaaatcgacccggtatctttcgataacatgcagcatctatgtaccagctggtgcgagcatacagtattggcaagcatctgcgtgtggcgaactaccgagtttgcgatacctaacctggcgttgcgcaccataggtattaacattaatagccgtagccgtggtccaaacagtataatgtaacattaatccgacgatgagctaaaacgaggctgttctacatatagccttcatcaaaggccatggtagtgtgcagcagcgctcgaggcacgtgcataaagctacctg

SEQ ID NO: 107576 - DNA, 347 bp, Glycine max
  Clone ID: PAT_MRT3847_68155C.1
gtatccatgcgtatcggagccatcatgctgcatggaggcatagtacacgtagcctggtacacttgcatcaagcaagtacggtttcaattgggaatgggcatttgaatccgactacggagcatcaatagtatgaccctaggtacacagccaatatctgactgaaatgcgttacttaatggcattaatcagagttatattacactggcacatagaaatctttgtgaaggccatgggcgaatggtaaagctggtgatacaaatactggtttttggaacactttataattggctccttactgcacgttcacatttcctttatttgcttaagcactgctgaccttgatctta

SEQ ID NO: 107577 - DNA, 378 bp, Glycine max
  Clone ID: PAT_MRT3847_68156C.1
gcatacgcgataaccatcagaatggttccgttcccgtcagagaacggcgttgtaggagactactagagagaagagggagactaataggaagaagaagaagaggtagacgaagaagtggtggaagatgaagaagacgaataggtaccgaggctcaagttccagagaatgggaggttgcatccctttgcttctttgtaattactcggcgtcgtttatcttcgtctcggatcgcattattttttttgtttcttacggtttttccgtttacatactttatttttttcggtttcatgtttaggaattgttttttcattgctttttggtttgtatttcctttttttttttttaattaacctttttttttttttagtttgttttt

SEQ ID NO: 107578 - DNA, 535 bp, Glycine max
  Clone ID: PAT_MRT3847_68157C.1
ccacgcgtccgcagcaataacaccaagccgccaccgccgccgctaccaagagtctacggcgacgactgcaaccaccacgacggcgacatcaaacaaagctttcacttccacaaccacacgtagtcacgtaaaacaaatttctgcagccctctcctctcttctcccttctgttttttttttttttttctttttccttattcgctatatcacatccacagatggttaccacggcggtggcggcaccactatgcaccgccaccaatcacatatctaaacagagaaaatgaggccaaattacaaatatttcagatctataagagaatgcaaaatgaaaaaagttcgcaatcaagacttgattaagctcatatcttcatattctgatatgtgaaatacatttgattttgatgcaagaaacttggggcggaaaagaaagaacaacgagcagatgggaacaagggtttgcttgagatgtgagtgaaagccggatgaggccaggagctcttggggccgggggcgggggggagggaggaacggg

SEQ ID NO: 107579 - DNA, 138 bp, Glycine max
  Clone ID: PAT_MRT3847_68158C.1
gaatatacacatttcgttacgcacattctcaaaacggtcaatggcggaagcattaacttttatctattccacgtcttctttactgatgaaacacaaaataaccggtaactagaaagcttctattagtgaataatcaaa

SEQ ID NO: 107580 - DNA, 426 bp, Glycine max
  Clone ID: PAT_MRT3847_68159C.1
ccatccaaatccattttatttataaataaaaattaaatccaaaggaaaaaaaaagattttaaaagaccctaattataaaaattggaaagggaaattaaaaagttataaaaggattaaccaattttttcccaccgggcccgggaaaaaaaaaagtcccatcggttcttgaaaagctcccttaaaaaggacttcggctcccccagggaaggcctgggaaaaaaaaaaaatttctttgaatggaggttaattcgggttaaagaaaccccgtaccccaacaaaaaattcccttcccggcccaatttctaaggaatcaaaaaacccatccgtcccagaaaaaaaagttattatcggtcctcccacggaaaaaggacctgatgggaattgttaaaccaacccgcccaatcggggacctctggctaatggatt

SEQ ID NO: 107581 - DNA, 832 bp, Glycine max
  Clone ID: PAT_MRT3847_6815C.1
cacgcgtccggcttgttctactcgcctaagttttttttttttctttttcccctcgaacttcttttcccctttgagtcccttgcttgaccctgaaagccacacaggacacagaaaaaccgaagaaattgaagggaaaagaaatcggggagaaaaggaaccgaacactgagctgagaatcacgaaagctgattccgattgtagtttagagttggaaagttacttcaattttcgctttgatgagtgagagagtgaagaaagaaaagcaaacgggggagaaaagggagaggatgaagaacatcttcaagaagctgcacataggtagcagccacgatcctcatcgatccaatgaggcttcaccgtctgtgccgtcgccgtcgtgcgttgccgatcagtcccagagctccgccgccactccggcgagtccttcgtcggcgtcggcgtcggcgtccacggtggtggtgactcccggaggaggaggcggcggcgcgagtccggtgatgaatcggcaggactttttcttcgtcggaggaggagtttcaagttcagctagccctagctatcagcgcttcgaattcggagttccgtgaggctcctgagaaggatcagatccacgcggcgacgcttttgagcttgggaggccatcgaatcgattcggcgcggaacaaggatgatgtggcggaggcgctgtcgaggcagtactgggaatataatgtgcttgactatgaggagaaagtggtagatggttttcatgatgtatatgggccctataatgattcagtaatgcaaggcaagatgccatctcgaacagatcttgaagcaaaccctggaggtt

SEQ ID NO: 107582 - DNA, 793 bp, Glycine max
  Clone ID: PAT_MRT3847_68160C.1
cctccattgaagcatcctctccaagcttcttatccaaggctcatcttggtagtgaagctccttcttccatggcttattccctagtggatggtgcctcctctcacctcttctcctttgtcttccgttgcatctccacggtggaaaatcaccattaaaggacctcattgaagctcaagatccagcctccatagaagccccacaagcaagcttccatcagtattgacctttgcatgaatctctgaattatggaatgaatgcatgaatttaaggatgatgaaggccatgtttgattataaatagccacttagccaaaaatctaaccatgtgcatgaatgatttatcccttgcactcagtttgagctgaatgaatgtttgattgattgaaccttgagcctgcatagtttatcttctgctaccttgtcttaggttgtaggagagcatgattcatagaaagatttggttcaaggcaaaatttgccctaaatttgggggagtcacatctcaaagcaagtttgccccaaatttgggggagctactgggtaaaaaggaatggaatggtaagagcagagcaacacacacagtcaaatgtattaaaaaaaacaacaattgtaagtataaaataaaaagtgtgtgtgtgctgctattgattgaaaagaaaaagctaagtgccaaagggaaagtaataaggttgggaataaaaagaaaagggttgatctatggatgaatgctctcctagaatctaagcttttgcatcctagaaaaaccatgaattatttgcagcacagcctcattac

SEQ ID NO: 107583 - DNA, 528 bp, Glycine max
  Clone ID: PAT_MRT3847_68161C.1
agatcactaaatccacatgatcaattaaacttaactgcacgtatatacaacaacacgcacataaagttcgacacccatatatatccccttaattaaaaacttctcacacaaaagtaacctcttaccttctctttgctacaacctccaaaccctaccattaaacctaaaaacaacccattagtattagattttaataaaaaggtcatctaaacccaactttttcttcttcttgtttttactaaacttagcaaataacccaaacccacccaagtaacccaacaacacccataaactaaacagcaaccctaggcacagccttgcaagcaagtggcttcttcatctccatagaaagcttaagaaactcatccaactcaacagaaacaccatcagatgaaacccaatgaaaattttgaagcaactgagcgagccaaagatgaaccgagggtttctgtttaggtttatgtgtgttgttgggttgagttggtttggtttgtctgcttaggtttgtggatgttgtttggttgagtt

SEQ ID NO: 107584 - DNA, 424 bp, Glycine max
  Clone ID: PAT_MRT3847_68162C.1
aagagaaacttggtgttttgtttaatgttatgtgcgtggattctgaggacaaggcgagtttatggtcacaacttcattatgtttcgcgtaataatctggaaatgcaagaagcttatcttgtcaatctcgtaaatgtgttacgagaattgtctttgcatcagtcagaggaagctcgccaattgagaaggaaagctctttctcgaattgaatggctgcaaaaagctgacgtgcctaccatagcacagattgaagagttccattctatgcagaggatgatgaatgctcctgattcaaatgataatattgaactacctgtgagcattgatttgtgggtttacaaggagcatgtaaagctttccaaacaagattggtttagatgataagcttgacgtggcttacacacaataattctttgttgaaattt

SEQ ID NO: 107585 - DNA, 452 bp, Glycine max
  Clone ID: PAT_MRT3847_68163C.1
tttgtccgctctaagcagatgtctaatgtttggtgggtggctcctgaggacaaggcgagtttatggtcacaactacattatgcctcgtgtaataatctgggaatgcacgaagcttatcttgtcaatctcgtaaatgtgttacgagaattgtttttgcacagtccataggaagctcgccaattgataaggaaagctctctctcgtattgaatggctgcaaaaagctgatgtgcctaccatagcacagattgaagagttccattcgatgcagaggatgatgaatgctcctgattcaaaagaaaatattgatctacttgtgagcattgattttgcgggtttacaaggagcaggtgaagctattccaaacacgagagtttttaatgataagcccgtgttggctaacacacaaaaattctttgatgggaatttttcagaggatccttggtaaccaat

SEQ ID NO: 107586 - DNA, 341 bp, Glycine max
  Clone ID: PAT_MRT3847_68164C.1
acgcgtcaagcatcgcgtccgaaatttcttactcttcgttgtgatagagatacaatggttatatctaggaaagatgctattctatagacatgacatgggataagtttcaattcttgtccgtgagataattgttctgtatatgttgacgagatcgttccaagctccacttcccttaagtgaattactactttgcttcttcactttttcacttatcccttctgatctcatgcattttcccctcatggatctctttgacttgattctcggttggttcggcttaagctacctggaatatttctgtaccactttttatggtctatctatgttttagccatttttgt

SEQ ID NO: 107587 - DNA, 297 bp, Glycine max
  Clone ID: PAT_MRT3847_68165C.1
aaacaaaagataagaccaaagaatagataaaactaattacacatgttcgtgcttgctctaatatgagcacactacactacaaggccaaaccgaataactatgtatttaacaccatataagacactcaatgccaaataggatgacaggcccaatacttctaacacacgggggtaagacgcttgtcagcatcagcacatcggtgaccactacgtcatgcaaacttgtcgcatatcaagaatgtacccaaccgacagtattatatgctggtaacatgctggtgcttgatgccttttcgcc

SEQ ID NO: 107588 - DNA, 449 bp, Glycine max
  Clone ID: PAT_MRT3847_68166C.1
atatcctgctatctagactgaccctcaaggtggcaggggtgttatctcacactatattcttctcacttctaccacttgcttttaactactgtaacatccaaacgaatacttaactactcgttcacctgttttaaggaagggaaatttcatcagcaatgttatgtggatgatcatcttatgtcaatcattgtatcatctatatgttgatattggctccttcattcaaaaggaaaaatcaatctctttacttgatggccctaattcagatctaatcttaaacacgcttattttcatctattttgttctttgatcaagtttctatgatatatattcacgtgaaatgtattaaataatcgtatgtaaagtcataattgataactatatttttcttggagtaatcaatgctactagatctcttccaatcataataaattgaatacttgtaatct

SEQ ID NO: 107589 - DNA, 133 bp, Glycine max
  Clone ID: PAT_MRT3847_68167C.1
ggctcgagccgagttcggctcgagctttgaaaagcactccgctagaaggtgtaagcgaaatgctgcttctttttcattgcgtatagagagacatgggtggacataacaatgaccatgaacatcaacgaagctt

SEQ ID NO: 107590 - DNA, 272 bp, Glycine max
  Clone ID: PAT_MRT3847_68168C.1
ggggggggaattaaaaaccctcgaaggtaccgggggccgaaggataaaaaggtacacccgaataacagggggtttaatccccagggggggggtgggttttgctggggccaacccaataccctttgacaggaaccaatatcttctcaggcccaagagggccatcctcatgaaccaccaggttggcttcccatctcatgcccctgacaattttcttaaccctggtaagaacatcaacctcgccccgggtgatgattgccccttccggccctagg

SEQ ID NO: 107591 - DNA, 523 bp, Glycine max
  Clone ID: PAT_MRT3847_68169C.1
acgaggccatctccatcgccttcagtcacacgtgtggggcgtaatccagctacaccgcgtctccagccagttgtccctcctgattttccccttgaaacaccaccaaacctcagaacaacattgcctgctgataggcctgtctctgcaggcaggtctcgtcctggtgctgttgttactcttccttcgaagccaaactcagaaatgcaagccccagttaacatgtcaaggagacagccatctcctattgccaataggggcagactgtcagagtacacagcaaaaagccgcggccatgccaatgctgctgatgcctctgaggtagttgctagaagatctgctaagtcttcaactactgcctcagaaaacaatgtattgggaaggaccatctcaaagaaatcattggatatggctattagacacatggatgtgaggaacagctcaggaactcttcgttcagttccaagcgccacactctatcctcagagcattcgaacttcaactcccaagacacaccacactagag

SEQ ID NO: 107592 - DNA, 328 bp, Glycine max
  Clone ID: PAT_MRT3847_6816C.1
cggctggagctgtctatccctcactctaaccatggaggcgcaaccgccaaccccttcgactgcgccgacgactatgccgacacacctaagatgccgcgactccgtggaatactggccttgctgccgcaacaccgactggtgggacgagcccttcgcgccggcaggcaccaagcttcgactcatgtgcagctgcagcgggcacatcgtccgccgccctcacgacaagtccctctgctacatgggtggcgacacgcgcatgatcgggtccgagcgcgccagctaactagcaggcctctacatgcgcctctcgaaaactttcctgaaccga

SEQ ID NO: 107593 - DNA, 616 bp, Glycine max
  Clone ID: PAT_MRT3847_68170C.1
agaagcttgaaaatattcaatacatactttcaattatgggcatcctcaaagttcattagttatacaaatttcaaatagggtaactgacagtatcatacatgcatgaatggtacatggtaggataaaagattagtgccaagggattgttcacaaactccagatattgaatctatgaacaactttttggatattcatgtacttagtcatgcaaattctccttatcatatgttagtccatagccaagagggaataagcccttattccctcttggctatggactaactccaactggttgatcaagctgttcaactcttctgaaccaagtcattggtagttgacctttgaagtcatgatctccaaatatgacatctgtgattccctgtgcttcagtacctggcaaccatgcagcaacaagagcatctatcttttatcctaccatgtaccattcatgcatgtatgatactgtcagttaccctatttgaaatttgtataactaatgaactttgaggatggccataattgaatgtatgtattgaatattttcaagcttcttgactgacctagcagatcttataatgttgctgagaggacatgtcctttaccgtttcaaaaaaac

SEQ ID NO: 107594 - DNA, 738 bp, Glycine max
  Clone ID: PAT_MRT3847_68171C.1
attcccgggtcgaccacgcgtccgcagccaccgttttttgtgcataagaaaaatagtgatttttttttttttcattacacaaggctaaatttgtgattccaatttccacctatttagcactacatcacccgagaattgagatctcttcatggagtcggaatgagtcccggcggaatgttcgtgcagagacgcgaagcggcggctgcggcggataacggcagcgccgccggaaacgacaacatgacgacggtgatggtcactgtcgcccaccattcttcccatcaccacctgtacctccctaccaactccactttctgggatgttaagagactgcttgtacacagaactggtttatagcctgaagagcaacgactcttctttggaggaaaagaaaaggacaatgaagggcatttgcatgcagaaggtgtgagggacatgtcaaagcttttgcttttggaggatgcttgtagagaagagaggaaacatgaggaaattagaaaacacaatgaaatgttgaaggcttctgaagctgttgctgaagttagctatgaagcaccgacacggacactgacacggacaccggacacgacatggacacgggacacgtggacacctataaaaataactaaaaataatgtggacaccggggtgtcgtgtcggtgtcggacaccgaacacgcaaggggctgggggtgtccctgcttcataggaagttgaaaaaaaggggccaagctccctg

SEQ ID NO: 107595 - DNA, 291 bp, Glycine max
  Clone ID: PAT_MRT3847_68172C.1
gtaaaaggggaaaattggccctatcaccctttcgggatttaaaaaacaacaggtttaaaccggtggtggtttctttctttctgcaaaaattgtgacacctgttcctcttacgtatgcacatgattttttttctttccgttgccttcccttgaaatttttcccaatggggggctgttacttttttttctcatcataaagaagactaacgagaaatttccaatccctctcccaatgatgatattgaaaacttacggggggaaacattctttctatccatggaacaatacctga

SEQ ID NO: 107596 - DNA, 947 bp, Glycine max
  unsure (1)..(947): unsure at all n locations
  Clone ID: PAT_MRT3847_68173C.1
agaaattgaacataatgaatattgagaattttagagaacataaagggaattaacccaatgtgtcaactcatcacatgcagagcaaatttaggtgggttaatttgatgggttactacatgtaacccaacctgtaaaaaaaccgttggttggacccgccttgtctgttgtcatctctcaaggcttgacattgctactttagcacaatatgtggaataacctccacggtaaacaagaaaatggtgtacagtatacggtaacatcgagccccatcattcaaaagacagatggatatacaaatgcttgtcaaccattagcaattagctagtggttcgaagagtttccgtgttcataatctctgcatagtgtgagcagccaaaaagtgcataactcttgcacaaggaatttaaataacccttcaaaatttacagtacatgaggcgaagatgtctaaactcaattggatggatatgaattatcatttaccaataatcattgcaagagcatttcccatccttgatatgatgaaatcggtttgcatctctcaccacaatctctcttccagtgactattgatatatactttattgccgtatggcagtccccacaaacccgaagattcttaaatactctaataggttttggtttcggggtactaataagagcatatgccactgcaattttttcactgtgttggaacagatactgttccttctgttcatcctccacatcatgaagaacaaaatctgtatttgggatataacccaagttctttatttttaaagccaattcatcaagttcatcatatatctttcgagctgggggtggtgaagtatcccctacatggnaatttgtgcacctgattgtcaacttcaatccagctataacctggtttcttttattaattnttttctggtncatgcctttttcttaaggctgccacatcatccca

SEQ ID NO: 107597 - DNA, 1059 bp, Glycine max
  unsure (1)..(1059): unsure at all n locations
  Clone ID: PAT_MRT3847_68174C.1
cacgcgtccgctccgatccaataaatggcggaaccgtcgtccaccgccgccaccgctgccaccgccgccatcgcttccaccgccgccaccgccgccaccgcttccaccgcttccaccgcttccaccgctgatcctccggcgccagtgactaaaagctgggccgacgaagcagacganagaaaccaacaacacctccaccgccgagtcagaaagctcctccattaacctggaagcgttaaccatcgacgataaagacgtgggctcttccaaattcttggatgatcccgatgattccaatatccaagcggttacttctggcgacacgccgtacacctcggcggcgaggttcgaggacctgagcctctcgccggagcttttgaaggggctctatgtggagatgaagtttgagaagccgagcaagatccaggcgataagcttgccgatgatcctgagcccgccccaccgggacctgatcgcgcaggcgcacaatggctccggcaagactacatgtttcgtgcttgggatgctcagccgcgtcgacccaaaggtgcaggcgccgcaggcgctctgtgtctgccccacccgggagctggctattcagaacgtggaggtgctccgcaaagtggggaagtacaccgggattgcatctgagtgccttgttgaaaggcacacggctaagatcgatgtacattttagcactcgtgtaactgaggtgcgagcncaaagtgttcaagaatataaaactgctctcaaggaagccggtttactgcaatgatgtgaatctgcacaagttaaaggatgtgtgtaagcttaaaaaagccgttatgatgaacaattattatgataaaggtaattgtcctctttttgttattcaaaaaaaaaaagtaatgcttgcatgcatcataatgtctccatctgcccaaaaaatccttataaagacttggtcttcacactgacatgccattatttttcggtaattatttttcgtaaagtgtccgtttgttttagattttggcagaattggtcttgatttgttgaaaatgatcgagatgtgtgtcc

SEQ ID NO: 107598 - DNA, 458 bp, Glycine max
  Clone ID: PAT_MRT3847_68175C.1
gcaaagtctgcttcttcccatgcttataagttcttgtgtcactctttgtatccatatacccctttgttgggctttggtgttccagactggaatgaataatattggtggagcattagcaatgagcatttcaatatggttaaatgtgacttttcttggattatacatgagatactctcctacttgtgcaaaaacccgtgcacccatttctatggagctgttccaaggaatttgggagttctttcgctttgctatcccttctgcagtgatgatttgccttgaatggtggtcgtttgagctgcttatcttgctgtctgggctgctaccgaatccacaacttgaaacatcagttctatccatttgtctcaacaccattagcactctcttttcaataccttttggaattgctgctgctgcaagcacaaggatttcaaatgaatgaggggcagggaatccacatg

SEQ ID NO: 107599 - DNA, 477 bp, Glycine max
  Clone ID: PAT_MRT3847_68176C.1
ggctcgagttgctgctagaactcgttcttcttcttttgttgatctgtgtctgagtttgacttttctctcacctgaaaatgtcttgctgcggaggtaactgcggttgcggaagctcctgcatgtgcggtaactgctgctgaggctgctacatgttccccgacttgagctacactgagaaaccagcaccgaaacctatgtcatcggagtgtgccctggttacgctcaattagagggtgctgcaatgaaagtgccctctgagaacgatggctgcaaatgcagaccaaactgttactgcaacccctgcacttgcaagtgaagcgtttggagaacaagctccaggcaaagaatgccacgaacttggaataatgatggactattaatgtgcagctaaaaactaatgaattatgtctgcgatagttatcgtgcactctggtgttgtgagtttaacaaacatccttagaatagagtggtcatgtc

SEQ ID NO: 107600 - DNA, 655 bp, Glycine max
  Clone ID: PAT_MRT3847_68177C.1
ccacgcgtccgattttgtgttttgttattttgtatgttttggttccgttgacactaagcagacctcgtgtttcaattttgactagagagttgtttaaattgatgattggaatgatcatgttaaaattttctaaaaaaaaaaaaaaaaaaaaaaaaaaaaaaaaaaaaaaaaaaaaaaaaaaaaaaaaaaaaaaaaaaaaaaaaaaaaaaaaaaaaaaaaaaaaaaaaaaaaaaaaaaaaaaaaaaaaaaaaaaaaaaaaaaaaaaaaaaaaaaaaggggggcgccttttaaaagatccaaattttaaaaacccgtggtgcaaccaaatttatttttttttggggccaccaaatttaattcacggggcgggtttttaaaaaggccggaacggaaaaaccttggggacacccaaataaaatgattgggaaaaaaaccccttttttgcaggggggcataaaacaaaaaggccccgaacgttacccttttccaaaaatttccactcccaaaaggcaaaaggccccccccttttaatggctcatttaacccggggggggggggggtttccccccccggtaccctttaaattgggaggccccttagagcccccccttttagttttttaccttccttttaccccaaaaaacgcggttttccc

SEQ ID NO: 107601 - DNA, 295 bp, Glycine max
  Clone ID: PAT_MRT3847_68178C.1
tgtttgtttctcataaccacaggggaagaacacaaaatgatctatcaacatgcaacctcactcaccacacaccttcatttgcattccaagatatggtccttgaccatgattccgaccgcacctacgagaagagaaaggaaggcgaaagattcacgctagccacatgtgcgaaggccacgtataagaagcaagggagtgtgcgcgacacaactaataggggtggggaccaagatagactagtatcactaatgaacgtggaacatgcaaggccgaagcaaataacgtgctaacatca

SEQ ID NO: 107602 - DNA, 172 bp, Glycine max
  Clone ID: PAT_MRT3847_68179C.1
aattgtttgagtttgaggaaccgagtaataaaatgttcatttaagtctatttagggagaaattgacttagatgaacattgtataaattgtttgagtttgaggaaccgagtaataaaatgacgcttggtgctgtaatgttatttgcaagaatgattagccctactttttggtt

SEQ ID NO: 107603 - DNA, 436 bp, Glycine max
  Clone ID: PAT_MRT3847_6817C.1
gggcggacgcgtgggcggacgcgggggctgttacaagggcggacgcatgggcggacgcgtgggcggacgcgtgggctaagagtgaagaaagaaagaggatactaattcatgaagaggatggaaaatttgtagttgaaacttaacgagcgatctatatatggcgaacctgcactgttctgtcacgagagacacttttgagtcatgaagcaaagaacgcctgtttcaccaaccactgcaagaaatgcgtcgaagatgcaaggtgacaagtacgtgcagagtgctgcaccaccagcaccacgacgcctaagagcttattttaaggctacgaagtcaccggcagagattggtaatagggaattcatttcattaatcagagctaagtcagtgccttcagacttgaagaacgtttcaagggccaaaaggggtgttgtggtga

SEQ ID NO: 107604 - DNA, 447 bp, Glycine max
  Clone ID: PAT_MRT3847_68180C.1
cccacgcgtccgctttgtttatagtgaattaatgacgcacatgcataacaagtgaaggagtataggatttgttagactgtaggtcaatgacatttagaaatttattcctgatttgttatcaagaactctagccaaaatggaatatgtgaaatcgaactttgagttgatttacctgtttgataatgtatttcacataatttaccttcaccagtggtccttgacataataagttgagacctaaatagtgattcttcattttaaacagaatgatacaactttcagatatattttgttttttaaagtgacctttgttactgttgttgtatccttgttaccatgcaggctgcattttgttgtgtcatttacccatgcctagttcttcaatacatggggcaggctgcttttctttcaaagaatttatctgcagtgcctataagcttttatgct

SEQ ID NO: 107605 - DNA, 422 bp, Glycine max
  Clone ID: PAT_MRT3847_68181C.1
acatggacgagggcttgtcaggcttttgcattatatcatcatcaggaagtgtccgtggcaaaagtggcaccaagtgtgggcgttggaatcccaccactgaacaggttaaacttctaactgaactcttcagatcagggctccgaaccccaagcactgaccagattcaaaagatctccactcagcttaccttttatggcaagatagagagcaagaatgtcttctattggtttcagaaccataaggctcgggaaagacagaagaaccgtaagctctcctttgatgatcacaaggatctcatttgtagacaaaatgcaccttctacacaaagtaagtaatatatatcttcgttccaatatactttttcataactatttacaataaataataataataataaaatgaattaaacttctcatataatt

SEQ ID NO: 107606 - DNA, 257 bp, Glycine max
  Clone ID: PAT_MRT3847_68182C.1
ctcgagtctagagcggccccttttttttttttttttattttgagcgtgacacttctccactagataccaaggaaaagtggtaacaattccacattacacaaaagtactgtaccattgcctttatcttgaaggtttcggaaccctctacagttaataagttaaataaagggcttgagtacataaatatttgtctaggaaccctaccgtatctacaacacggtaagaatctacgggaggccaaacttttaccataccac

SEQ ID NO: 107607 - DNA, 746 bp, Glycine max
  Clone ID: PAT_MRT3847_68183C.1
atcagcaaaaataatatgtatattaattgaagtaccaggggtactaaaaggtacaagaaacttctcagtgttggtcccaagattagagttctcagaaccaccaactgagaaaatgattaaaattagtacaatcctttacttaagaacgctatacatcgctgttagaaaaagctgccctgatattagaagaccactgattgtaatgaatactaaaatccttctccagatgtgtgagccatgtccatattaagaagattgcttcatccagtattttgttagcattgaatgtcccattagaaaagatcatgttattcctttgcttccaaatggtccatgtcagtgctagccaccaccatttccatctactagctctcattcccgctgtcactccatatatatgttgaaggaagtgttgccttggatgatttgggaaaacccctaacaaattcacccacgacaatgattcccaccatacaggagctatcctactgcaatgaaagaatagatgggctgcgctctcctcggctgatctgcagaatggacatcttggatcgtctacctcaatttgcttccttcgcagatttgatcttgttggtagcctatctctgattagtctccatgcgaatatggtgattttagagggaagcttaagcttccacaactcctcgaaaactccatcttgctgctcctcgaacatctccccccataggacaccataagcagatttggccgtgtactgcccactt

SEQ ID NO: 107608 - DNA, 345 bp, Glycine max
  Clone ID: PAT_MRT3847_68184C.1
tggcatgccatatgtagaggggagtgtactggtgcggatattgcttgcagcaggagctggttcatctgcgcagggttcgcaggatgggtggtcagctttgcatacagcagctatggctgatgacgtggacttggttagggttatttgaggtgctggggttgatgtgagcattcgcggtgtgcagatcagtatacctcttcacttggccttagctaggggtgctaaggcgtgtgttggacggcttcttgatgctggagcagagtattgtttgagggatgatgatggtgacaatgctttccatatagctgcagtgtcggcaagtgtgttgtcgagataatcttggct

SEQ ID NO: 107609 - DNA, 549 bp, Glycine max
  Clone ID: PAT_MRT3847_68185C.1
cccacgcgtccgtacggctgcgacaagcacctgaaggggtacgtcgagtggtacaattcgcgtggcattaacgcacttaccttcgtcgtcgacgtcaaggagcttcttcgattcgacctcggccacgtgctcgagacccgaatctctctcctcgccgaccacctcgtttcttgggtgtctcgcgaggagcacgatgggagggaacgctgtctggtttttcacactttcagcaacacgggttggtttgtttatggttacattcttgcccgaatgctgggtagtgaggaactcatggagaagattaagggatgcattgttgattcgggaggaggagaacctttcaatcctaaggtatgggctgctggtttttctgcagctatattaaagaagcgcaactctttaggacccgtagttgaggtagaaggcaagcttaaatcagagactgaagttagcttgtcaaaggttcaacaaaacgaaccttccacaatcgaaacagtggtcttgtcactattagagaagttcttctcatttgttttgcagttgccagat

SEQ ID NO: 107610 - DNA, 275 bp, Glycine max
  unsure (1)..(275): unsure at all n locations
  Clone ID: PAT_MRT3847_68186C.1
acgaggcaccattcaaattaagatatagtaaaccattaagtgttttctaccagattatggcatataaaacagcctagatgcaatgttttagatttgagagtttgtcacctcggggggggggttgcgcaatgagatgctagaaatcacactctactattggttttagtttgctccaaatcacaaaaattgtgtggattccatttcttaaaaaaaaaaaaaaaaaaaaaaaaaaaaaccanaaaaaaaaaaaaaaaaaaaaaaaaaaaaaaaaaaaa

SEQ ID NO: 107611 - DNA, 580 bp, Glycine max
  Clone ID: PAT_MRT3847_68187C.1
ttttcttcaaatgaagccttattctcttgtaatttctcttctgcttttgtctctctttctcaccaaggctcaagggattcgcttggagaaagggtcttttgcagctcagcaacataaacaacacgttagtgatcattgctttgatgttttacgtactcaaatgccatgctttagttatatacttaaatattttttcactgaagttgatagaacaaaaccaaattaattctcttctgattgcaggatcaagaagaaagcaatttgttgaaaaaaactaataatggtgctaacaaggaagctattgtctgcaaagatgaacaatattgcacgggtacactgaagaaaagagcctctagagtatccagaaaaccaaagaaccagttaccccacattcatgaagattatagtggaccaagacatcatagacctaggcaccattagtttaatttctagcccagaaatttatttttctttgttattttgttataacacaagcatattcttccgaaaccctaacaaaggagaccttgtaattcttgattcaaatttcccaccatgaagatgacacatctaattttgt

SEQ ID NO: 107612 - DNA, 369 bp, Glycine max
  Clone ID: PAT_MRT3847_68188C.1
acggaactgccacgatgctgctaatctggacactatcactgctgctgggagcagtagtaggaaaagaagtctgcttcccaagacttggctgttttagtgatgactccccatgggcaggaattgtggagagacccctcaaaatattgccctgggcttcaaaagatgtcaatacccgcttactcctatacactaacgagaacccatataactttcaagaacttactgcagatccatcaattattacaagcttcagtttcaaaacagatagaaaaacccgctttattattcatggattcatagacaagggagaagaaagctggttggccaacatgtgcaagaaaatgtttgtagtggaaagtgtgaactgca

SEQ ID NO: 107613 - DNA, 654 bp, Glycine max
  Clone ID: PAT_MRT3847_68189C.1
gtcttatactattatgatgctgtaaattggaaactcacattttgtaaccaagggagtctagttcacttagttaaatagggtgtgtgagtgtcttgataccgtgttcaattcacggataaaaaaaaaaactcacattatgtaaacaactgaacattagccttacaggcatatatatcaaaaccaaaaagtgaaaacccttgtattgacactaatggaagttcaatggtcgagatgctaaaggtgagatgggagaaccgtcactactactactactttgagagtcccctctccatgcatcttggacttgagctgcaaactgcaaattccacaaaacatcctctatggatggcctctctgcttgctctttgactaggcatctcacacaaatctccatcattgtcttcaatgattgatccaagcacgccttgcgaactgctggatctataatgctcctcctagcttcaccattagttgttatgcttgcttgcaacagatcctttaaagtgtccacattccttgactttattgtccttcctagaatgagctccagcagtattactccaaaatcatatacatcagacttgtcttcatgttttactcttttcttaatgctaggacttctgcatccacttgaaggattaacttgcccaacct

SEQ ID NO: 107614 - DNA, 382 bp, Glycine max
  Clone ID: PAT_MRT3847_6818C.1
acgaagacgaccgaatgggggagagctctacaagtgtcgggctgctaggacaaccaacagatactgctgcaccataactggcgagagtccaggactctaaagcatcactagcttacgctctgaccatagttgaatgtggcacgcataatcccgtcgtgaatcacaaaggactacattgcaaggataaatactaccatgtgacctatcgcgaagtagtaccagaagataaggctgaaaaaaacataaatcgaagagtgaaacacaacataaagctgtcatctcccaagcagtactatgaggctcattactcttacctcgttcctgttgaataacaatcctgcgactaatatgcatctgtttgcctaatggaaacacaccacat

SEQ ID NO: 107615 - DNA, 300 bp, Glycine max
  Clone ID: PAT_MRT3847_68190C.1
atttggcctaattctttttaaggaggtgggtattggattggccgggtggcaaaggcattaacttggttttttggcaactaaagcttctacccccttttctatctctgggggggggggatatgatacccccccaccatcatatacacataattccattgctcgctgaataagcgacacaatgggggatttatgtaattttgacttttgagatgaatcggaagacctcgtctttaatgtacatagatcggtgagttatatttgtgcagaaaaaagtcgaatataattcatttatttgtgacc

SEQ ID NO: 107616 - DNA, 1868 bp, Glycine max
  Clone ID: PAT_MRT3847_68191C.1
gcgtctccaactctcttagaatctaaaccctaggaaatttccccttttctttcaatcaaacgataccttagaaattcgtcgttttgtcttccaaattttgacaaccttcctcatcctcacctaacttcttctcatttatccctcacttatccaatccccacccaaattccccgcatcgacctctcccccctaaattcccccatcgtcgtcctctctcaccgcggaattcatctcattagccggttccgctacagtgcgtatcccatgggtaagattttccgagaaaacgcgaagccgtcggcaaattcctcatcggcgtacccctctgcggcgcccgccaccacttcgtcgacatcggtgacggagacggtgagggggtcacaccagttcaagatgacggggtactcgctctcgaaggggatcgggattgggaagtacatggcctccgacgtgttttctgtcggagggtacaattgggcgatttatttctaccccgatgggaagagcgtggaggacaatgcaacctacgtgtcgctcttcatcgcgcttgccagcgaaggcaccgatgttagggcactttttcgagttgacccttttggatcagagtgggaaggagaggcacaaaggtgcatagccatttctgagaggaactcttgagagcggggcctatacaccgttaaaataccgtggtagtatgtggggttacaagcggtttttcaagagaacagctctagagacatcagactaccttaaagatgattgtctgtctgtgaattgtagtgttggtgttgtgaggtcacacacggaaggtccgaaaatctataccatagcaatacctccttctagcattggtcagaaatttggacaactgctggaaagtggtaaaggcagtgatgtaaattttgaagttaatggtgatatttttgctgcacataaattggtactagcagctcgttcacctgttttcagagcacagctttttggtcctatgaaagatcagaatacccagcgtattaaagttgaagacatggaggctccagttttcaaggcattgcttcattttatatactgggactcactaccagacatgcaagagcttactgggttgaactcaaaatgggcatcaaccttgatggctcagcatcttctagcagcagctgatcgatatggcttagagagacttaggctgatgtgtgaagcgagtctctgtgaagatgttgctattaatactgtggctacaactctagccttggcagagcagcaccattgtttccaactgaaagctgtctgtctcaagtttattgctacctctgaaaatcttagagctgtgatgcaaactgacggatttgagtacttgaaggaaagctgcccatctgttctgactgagctattggagtacgttgccagatttactgagcattcggacatcatgtgcaagcataggaatgaagcattacttgatggcagtgacataaatgggaggcgggtgaagcaaaggctctaatatgtgaagaacactgcacagctttctgtacatccctcttctactctccgttttaaaagatagcgagagcatggttagagggagaatatatataatcttttataggatcagaggcaatttttaattttcttagcttattcatgtgtaagagatgtaaatgtaatttgtgttgttgctgttactgttctgtttcacgtgtaggtttctgtaatatcttcagtatcactttttactggaaaacatgccttgcaagtgttgatcattactttttatattctgtatgcttattattcaaatgtagtagcgtaagtgcccttgaaacatttgactggcatcatctttttctattctctatatctttacg

SEQ ID NO: 107617 - DNA, 435 bp, Glycine max
  Clone ID: PAT_MRT3847_68192C.1
caaaattagcctcatttttaaacagggaaaccttgggtcataaaaacatttttttggggaacaaaaataagctaagacagcaaaaactcaaactttcctttttttttgattgggcaacagtgcggagtttttttttttttcccctaaacttttggcgttcactcccacaagctcagtgtaaaatatgagggttgccccccctggaataggggggggggaaccctgatctccatagccaagtttcgttggttttttcagcttccgcttttcaccaagacacatttccaaaaatccctggccccaacctttgatcacttgcccaggtccaagctaaaatttaattgtgttatttctttcaaagctagaaaccaaaacagttccttcgggggttttccccggaagggcccttgcctttgcccctttggggcaaaactt

SEQ ID NO: 107618 - DNA, 1819 bp, Glycine max
  Clone ID: PAT_MRT3847_68193C.1
aaacaatcatttttttttttcttctgccccctttctctctctgaagcgaaaccctagaaattcatcatctttcagaatctgacaagtttcctcaaccgaacctaaattctctcaccaaatcctcacttatccaaattcgatactccaatccccacccaaattccccgcatcgactcccctccccaaaattcccccatcgccggcgtctcccgcggccgaacgcatcacatcgccgattcggctacggcgctaacagtggctatcgtatgggtaagattctccaagaaaccgcgaagccgtcggcgaattccacatcggcgtacccctctgcggcgcccggcaccacgtcgtcgatgtcggtgacggagacggtgagggggtcgcaccagttcaagattacggggtactcgctctcgaaggggatcgggattgggaagtacatggcctccgacgtgttttccgtcggagggtacaattgggcgatttatttctaccctgatgggaagagcgtggaggacaatgcgacctacgtgtcgctcttcatcgcgctggccagcgaaggcaccgacgttagggcacttttcgagttgacccttctggatcagagtgggaaggagaggcacaaggtgcatagccatttcgagaggactcttgagagcgggccttacaccttgaagtaccgtggtagtatgtggggttacaagcggtttttcaagagaacagctctagagacatcagactaccttaaagatgattgtctgtctgtgaattgtagtgttggtgttgtgaggtcacgcacggaaggtccgaaaatctataccatagcaataccgccttctagcattggtcagaaatttggacatctgctggaaagtggtaaaggcagtgatgtaaattttgaagttaatgatgatatttttgctgcacataaattggtactagcagctcgttcacctgttttcagagcacagctttttggtcctatgaaagatcagaatacccagtgtattaaagttgaagacatggaagctccagttttcaaggcattgcttcattttatatactgggactcgctaccagacatgcaagagcttactgggttggactcaaaatgggcatcaaccttaatggctcagcatcttctagcagcagctgatcgtcatggcttagagaggcttaggctgatgtgtgaagcgagtctctgtgaagatgttgctattaatactgtggctacaactctagccttggcagagcagcaccattgtttccagcttaaagctgtctgtctcaagtttattgctacctctcaaaatcttagagctgtgatgcaaactgacggatttgagtacttgaaggaaagctgcccatctgttctgactgagctattggagtacgttgccagatttactgagcattcagacatcatgtgcaatcataggaatgatgccctacttgatggcagtgatataaatgggaggcgggtgaagcaaaggctctagtatgtgaagaacactgcacagcattctgtacaaccctcttctactctccgttttaaaagatagcgagagcttagttagagggagaatatatatataatcttttataggatcagaggcaattcttaattttcttggcttattcatgtgtaagagatgtaaatgtaatttgtgttgttgctgttactgttctgtttaacgtgtaggtttccgcaatatcttcagtattactttttactggaaaaacatgtcttgcaagtgttgagcattacatatttttatatatacatagatacatatatatatatatattctgtatgttt

SEQ ID NO: 107619 - DNA, 302 bp, Glycine max
  Clone ID: PAT_MRT3847_68194C.1
gagacccttcctatataattgtaccacttactttttcaatgtactaggcactctcaggacggatgttttcaaaccggggcggcttacatatactattctctatcaactaactaccgccaattcatacaacaacgtaatacactcgactttaacatatatggtaagcacgaacataaccttgactgtggtagtagctacaagaacttcatcaccgcgcacttcgatcacacgaaacagggcgaaccaactccttacagttttatgcatgctctacatatctgcggctacagaaccaatgaaca

SEQ ID NO: 107620 - DNA, 142 bp, Glycine max
  Clone ID: PAT_MRT3847_68195C.1
tgagaacgaagagggcgattggatgcttgctgagaaaggtccatggaagatgatcaccgactcttgcgagaggttgaggatgatgaagagtgctgaatcactaggactatctccaaaagccatggaaaaatgcaaaagtcgc

SEQ ID NO: 107621 - DNA, 401 bp, Glycine max
  Clone ID: PAT_MRT3847_68196C.1
ggggggaaaaccaacaaaaaaccagggaacccctgggaaaaaacccccaaaggggaggagatccccaaattgccccgtccaaaaggcccgggcccaaaaacaaaaggcaaccaaaattcccaaaaatgggcaaaaaggccgccaataaaaaccccccaattagcatttaaaaccccttgacaggggacccccgggttttattaaaaaaaaaagggaccccaaaacttcccacccccaaaggccaaaaaaaaaaccccctggaccgggaaaacaaaattttttaaaggaccccaccccccgggggtgaaacattcccaactcccccaaataaccgggggaattttcccgggaaaaaaccccttttaatcccggggaaaaaaaacccttaattccacgggggg

SEQ ID NO: 107622 - DNA, 461 bp, Glycine max
  Clone ID: PAT_MRT3847_68197C.1
aacctaacctccttcaatctctaagtccccttataaaattcctcatccctttcctcttgctacaacatagtgtcaattcacaacaacccccatccccaatgtcagcatacgaaaccgttggcttcggcttcggttttttcgacaaagatgacccaaacgtatttttgttgggcaatgcctcagtatctggtggggcactaaggctaaccaacaccgaccaacttggcaaaccggtcccacacagtgttggaagagcattgcatgtcacaccgatacacctctggaacaaaaacaacggagaactcgctgacttcagctctggcttctcctttgtcgtgaaccctaagggttcaaccccttcgtggtgatggctttgccttctttcttgcaccagccaaccttaacttccccaaaaattcaagtggagggtatcttggacttttcaacccggaaactgcact

SEQ ID NO: 107623 - DNA, 782 bp, Glycine max
  Clone ID: PAT_MRT3847_68198C.1
gaactgggcaatggaaagccaaagttctattcaactccagagataattgctttctgccgaaaatggcgccttccaacaaatcatgtgtggttgttttcaacaagaaaatcagcagcttctttcttcgctgcctatgatgccttatgtgaggagggtactgcaacttctgtatgcaaggctcttgatgaaattgcagacatctctgtaccaggttcgaaagaccatgtaaaagcccaaggtgaaattttagagggtcttgtggctcgtcttgtaagtcacgacagctcaaaccatatagagaaaactttgaaagaatttcctcctccacctgctgatggagtggcccttgattccggaccaagtctaagggaaatttgtgcagcaaatagaactgatgaaaagcagcagcagttgtcttacttcctgtgaattttactgaggatttcaatgaaactgtgtgggaacattttcgtggctacaccatttttcaatgatagtgtggggaaacattttccactgaataggcacctatcaagcaatatatattttccaagaatatcttgatgctttttcattcattcccttaaagcttaggaactaagctatatacctatggtattttgcccaatatgctacgaatatgactagttactatggtatgctgtcctataatatggtgttttaacagcccctctgtcacaaagcaaaaagtcgggttatttattagcactatttacattgaatcgcatctcttatttcaaggatactgcatacattacaag

SEQ ID NO: 107624 - DNA, 162 bp, Glycine max
  Clone ID: PAT_MRT3847_68199C.1
cacgcgtaaagcatgccgtccgttacgctgcggtactgctgcggaaagggaatcgcacggttcagtttgaatctcgtcaatcaccgggaggtaccgacacgcatgctcttctgtgctctccctcgcgtgggtgacatcaccatttcctcctacagattctcc

SEQ ID NO: 107625 - DNA, 437 bp, Glycine max
  Clone ID: PAT_MRT3847_6819C.1
aatactcctccgctcctctctccggttttcaattctcgttttgcctctggcggcggtgctgtgaagtgaactaagtaacaccgtgaaaacggctctctttccgtgcgttggtttcatgagcgacggtgataaatttctgcattctttgtatccatggcattgaaagttgaaacattgaattagtaagggttttgtttggggagaactggcatcagaagctagaatctgttgttatgggcttcaagaggggatttgccaaaaaagaaaggggcctcttcttcaaccccctatgtagtcaacctacttgcattatttttggattctcaagggttgggcatgcttagccattagaatcttgtgaattaaaagggttgaggcgggtttccttatgcccatctgcaactaccggaaatggacaggaaaaaaaattatttact

SEQ ID NO: 107626 - DNA, 781 bp, Glycine max
  unsure (1)..(781): unsure at all n locations
  Clone ID: PAT_MRT3847_681C.1
caaaatatttacagttctttggctgatcaccataaaatggccaacacaacattggaactccacaaattgaaggatggttcagtacttgctcctgcggacaccaacttgctattagcaggcttctatctttagtttcattcacaaactcagacggcaaaatcacggaacctaaagattccaagtggctttgcggactttgatttaaaagtaaagggaaaggaccaattggataaagagaagggaacatagaagatagagcattcataacatcaccctcaagttcgtcaaaagtgttgaaaagaatagtggagtttctctgaactttatttgcaacttcaatgaaaaattgcaacatcacatcatttagatccgttgtccttatgaagtcagagggaaaagagcataagttgatagtacctttgagtggtgtgagacctttctcaaccagagcgggaaagttgatgatggacaagaaacaacacgcactagcaggccaaaagagaacgttaggtactccaagttcatgagcagcttctatagtaaaggtcatgccaccgtcagaaactaagcaagtaacggnnggggatgagaaccttcagtggcagaaatggttcagctagcaagaaggtcgcgaaagggttggagaaagttctttctgatagagtcacaaagtgatgggtatgtgcctgagtaacattaccattatcatcatcatccaagggaggaaagaccatctgngatggtctcaaaatcgaaagtttgggcagccatcaagggcatt

SEQ ID NO: 107627 - DNA, 1625 bp, Glycine max
  Clone ID: PAT_MRT3847_68200C.1
gaactgggcaatggaaagccaaagttctattcaactccagagataattgctttctgccgaaaatggcgccttccaacaaatcatgtgtggttgtttgcaacaagaaaatcagcagcttctttcttcgctgcctatgatgccttatgtgaggagggtactgcaacttctgtatgcaaggctcttgatgaaattgcagacatctctgtaccatgttcgaaagaccatgtaaaagcccaaggtgaaattttagagggtcttgtggctcgtcttgtaagtcacgaccagctcataccatatagagaaaactttgaaagaatttcctcctccacctgctgatggagtggcccttgattccggaccaagtctaagggataattgtgcagcaaatagaactgatgaaactcgagccgaatcggctcgagtgttcgtgctttattcacacttgcagccaaggtctccccaactataatattcgtggatgaggttgatagcatgcttgggcaacggaccagagttggggaacatgaagccatgaggaaaataaagaatgaatttatgacccattgggatggacttttgacaaagcaaggggagcggatccttgttcttgctgcaaccaataggcctttcgacttggatgaagctattattaggcgatttgaaagaaggattatggtaggactaccatctgtggagaacagggaaaagattttgaggactcttttggcaaaagaaaaggtggacaacgaacttgagtttaaggaaattgcaactatgacagaaggatatactggaagtgatctaaagaacttgtgcacaactgctgcttatcggcctgttagagagctaattcagcaagagaggataaagagtctggataaaaagcagaaagcttccaggggacagaataaagatgtccaagaaagtcgaggacaatccgtagtaggaaatactcaagatgctctagatgaagaagaggaagttaaacaggaaagagttattattacccttaggccattgaatatgcaggatttcaaagaggccaaaaatcaggttgctgcaagctttgcagctgaaggggctggaatgggtgagttgaaacagtggaacgatttgtacggagaaggcggttcaaggaagcagcagcagttgtcttacttcctgtgaattttactgaggatttcaatgaaactgtgtgggaacattttcgtggctacaccatttttcaatgatagtgtggggaaacattttccactgaataggcacctatcaagcaatatatattttccaagaatatcttgatgctttttcattcattcccttaaagcttaggaactaagctatatacctatggtattttgcccaatatgctacgaatatgactagttactatggtatgctgtcctataatatggtgttttaacagctttgtctgtcacaaagcaaaaagtagggttatttattagcactatatacgttgtattggtgtttattgtagacttgtaatgtatgcagtatccttgaaataagagatgcgattcaatgtaacagaccttcaatcttgatgataaagtacattattttattgaccgcaaatcgcaatatgcatgtagtgcaatttatgt

SEQ ID NO: 107628 - DNA, 449 bp, Glycine max
  Clone ID: PAT_MRT3847_68201C.1
acggctgcgagaagacgacagaagggggtgcagccaaattttgaggagagagaaatgtgagaggagcaaaggctgtacaatgcatttttcattttgagcacttggatgcaaaggatttggagtgaattatttcagctacagagtacttcagttaacaaatccacatcttaccatccacaaacatccacaaactgatggtcaaaatgaagtggcgaacaagtgtttggaaacttaccttcactgcatgtgttttaggaagcccactagatggtctaaatggttatccctggctaaatggtggtacaacaccaacttccattcttctattcagaccacaccatatgaagttgtctacgaccaagctcctccgatccaattacccttcatgcctggggaagttgctaacccaactgttgacaggactctgtgtaaaagggaacaagtgattc

SEQ ID NO: 107629 - DNA, 339 bp, Glycine max
  Clone ID: PAT_MRT3847_68202C.1
ggctcgagctttttggacgttcttgtttaaaaccggcttccctagtcacaccaaatggaccgtcccggcggcatattaaacgacaccgtggacctgaacggctcggtggcgcatgtgtctgtgctggccgccacaaggctgtggagggctgtgggcggccaacgcattgagagcattgagaaagacgttttcggattcaccgttgacggatccgacatagggctgataactatcgaggaaaccgaccatggtggctgggggagggcatgcagagcaaagctcgttcgattcgacgctgatgttgggacacaggtcgaggaagcgcacaggctgtggggc

SEQ ID NO: 107630 - DNA, 174 bp, Glycine max
  Clone ID: PAT_MRT3847_68203C.1
taccgttcacgcttaccatttgagggggcagagagagagagagagtgcaagatacctaatgctgtaaaaaatgcggtcaacctcactgggtacctcaactattcctacctttatgaacacctcttagtgatcaccttttaaggttcatatcacgataccaaccaggtgcccatc

SEQ ID NO: 107631 - DNA, 262 bp, Glycine max
  Clone ID: PAT_MRT3847_68204C.1
aaacaattctggtaatacaatgagggatggaaggcgctggcttgtgggaaaatgaactcttctacgtcaaagagagttctaccgagagattgagtctgagtctatcccagccatgggatggacatttgaggagtagactgtagaactcttaactccaattaaggcatacctgcctggtctcttcgaagtgccctagaaaaaaggagtaacttgagagccttcataaccggttctgacggagaattgacctgaccacagagac

SEQ ID NO: 107632 - DNA, 441 bp, Glycine max
  Clone ID: PAT_MRT3847_68205C.1
tgtacatcaaagatagaccgattcctcacgatcatggagtgtctagtgggaaagacatcagcttaccattgatggggggcttatcttaagactgggtgcatgacataataatcatgggctgtaatgagccattatggtaaaccaattacaaatctgaacctctatggtctaaaaaatggacctgaaagggggaactgggtcatgggggctgctcaaggtctccagatactacagatactcactgttactgcctgcactactgtaaccgatacacgcattccagccattactcaaggtcgcatctgcctgaatcacttgcgccttataccgacatgtctcgtgcctgacaatggcttggacgcatttgccaaagctcctttatctctcgtatgtctgcacctggatgagtgcaacacgaacactcactctgtgattattggt

SEQ ID NO: 107633 - DNA, 207 bp, Glycine max
  Clone ID: PAT_MRT3847_68207C.1
aaaaaaaaaaagaaaaaattaaaaaaaaaaatataaaaacaaaaggacggacgatctaaagagaccaatttaaaggacgcgtgcaaccggccggatggcttagagatccaggcatccaaacgcaagcctgcggccgcctatctacaacgtcgggacagctaaaaccatgcagtggccaacttaatcaccttgaggacagggaaaacc

SEQ ID NO: 107634 - DNA, 385 bp, Glycine max
  Clone ID: PAT_MRT3847_68208C.1
aggaattaaatatttcttttcatgtatacgaacagatcagaaaaagattggtctgacatacaaacccaacgtgacgggagagaatatatacacacctaaaatacagaatgaacccagttcctaatccgaaatgactttaacagccataaactataacccttaaagttataacaacatctgtgatgtcctggaaaaataagtagactacttgcagacccttgagacagaaaagacttgttcatggcctctcaaaatcccgctctcatttgttccaccaaccggttgaacgggctgtgcgctccccacgatcgataatgtgcttgggaaagtgcccatcactatacatgcaggacttcctccgtgatggttcaatagacaccgcagg

SEQ ID NO: 107635 - DNA, 558 bp, Glycine max
  unsure (1)..(558): unsure at all n locations
  Clone ID: PAT_MRT3847_68209C.1
ggaaaaaataatttttcccgacctgccctcgggggatttagcccattggggaaccccaggattggggtcataccttgacacctggggttctggggttttaacgccctttgggggggggcggccatcctttttttcccttgggttttgatcccccggggtttaaaattggcgattgttaaaagggggtcctttgttttgacatttttggccggccccaaaattcccaccggccgaagtttcgctaatcttttggccccttttaaccgggggcgaaaggggggcccttttttcttcctctcgggcggctttgccgcgtttcgtttctcttgattcgggtcccttggatcataaatctcccgtttccnggcggttttttccccctggggggaagcaccccggttctaaatttcccttcctgggggcttcttttcggggccgtctacaccggggggggggtttactgggaagtttgtccggcaaatttttttcctggggaccaggttccccccccttgggggttttttggggcccgttgggggggaaatatggccaaattgc

SEQ ID NO: 107636 - DNA, 245 bp, Glycine max
  Clone ID: PAT_MRT3847_6820C.1
gggtttcgccaaaaccatactaaagccattgagggttaaccaagtttcaagaaatctttctacccctagctctcctataacaatatgaaactaattacaccatcccctccttgccctgaaataattcaactatggctagcccttatgatcgtctttgaagggggaaagggacttaaaacatattacaaaccaaactttgctaatataaaggacaaatgttggttaccatgatcaacagcccccac

SEQ ID NO: 107637 - DNA, 736 bp, Glycine max
  unsure (1)..(736): unsure at all n locations
  Clone ID: PAT_MRT3847_68210C.1
ccacgcgtccgctactggctgtctttccattcccccttttccttcattgttccatctgggtcctttgaccaatgcgaaatttgtgatcttgatcaatgatcacctttcagtcacaattttgatgtttatttatttatgagtcccagtgcatgtaatttttcgtgagttcactggattctccattttgtgtaacaatttccactatccccttttgatatgcctccgtttttctagaagattcaactgttctagcttggaagttacagttttttttgtttattgccactaggttctttgttggtcaccgtgtatattgatattctgcttattgtacaaggaaaagattgaaccccttttttaagtttaagcgccaattttccactttttgtgttcataattgcccttgagaggaaatttgtgcaaaacccatatattggtttgcactttgcagtctatacagcttatagcatgcatagtctgtaggcacaatgtcaatcctttgtggccttcctcttgtggaatgcgtgtactgtctggcttgtgcgcgttgggcttggaaaagatgtcttcatactgcaggccatgacagtgagaattggggctttgccacggcagaagaatttgagcctatacctcgcctttgtcgctacattttagctgtgtacgaggatgatcttcgccaccccctttgggcacctnctggtggctatggaattagccctgatttgttacttct

SEQ ID NO: 107638 - DNA, 141 bp, Glycine max
  Clone ID: PAT_MRT3847_68211C.1
ctataatactcgtggtctttgatggaaattttgcctgcctcatattcatcatacgaagatgcaatgtacagttttaggagtaggccgtatattctctaagcagcattaggagtattggactgtagcgaactcgatctaatc

SEQ ID NO: 107639 - DNA, 503 bp, Glycine max
  Clone ID: PAT_MRT3847_68212C.1
cgtacgtattgctcggaattcggctcgagagtaccttggcgacgaggatataaaggtgaaggaggctgcagggggcattttggcaaatttagcattgagccgcgttaaccacgacatcatggttgaagcaggtgttatacctaaattggcaaagttcttaacatctaatttggaaggatctaaagttattaggaaggaagcaaggaatgcattgctggaacttgttaaggacaagtatcatagaattcttgttattgaggaaggtctggtccctgtgccattaattgatgctgcagcctttaagtcattcaccccgggcttacatctgtggcccacgttacctgatggtacagaaattgaaaggacttctagactgccatccagatatggtgcttcggaattacttcttggattaaatgttgatgacaagaatgctaacttagaggaagcaaaagtcaatgcaattgttggacgaacacaacagcaattccttgctcgtgttg

SEQ ID NO: 107640 - DNA, 581 bp, Glycine max
  Clone ID: PAT_MRT3847_68213C.1
ctcgagccgcttccaccaactgctgtgcgaggaacgacgacgagcacgtgaagctgcagagaccaagccatcgaagatcgagaccaaattagccgaaagaacgacaaaagagcacgaaactgcatcttcctggcagactgcgtccttaaaagtttggactaaacggtgaagaatagaagactttaatctgttgaaaaggaagaaccacaatgatgaagtttgtccgcttttttgcaggtcaaggattgacattgaagagtttgctagaggtccactctcccgagtgtattatgttcccaattggatcacgcaggacgaggaggaagccattttggagcaggtatatgcggttccggatgcttgtgacatttgggtgaagctgaagcatcgccgtctgcagatgtggggaggagaagtcaaggaaccatttgatgctaaaccactgcctcaatggctcatgcagatcagtcacgcactcatagatatgggggcctttactgacgagaagaagcccaatcacgcattgataaatggtgagaaacctcatgtgttggaagttcaagcttttgatttacgagcgt

SEQ ID NO: 107641 - DNA, 1470 bp, Glycine max
  Clone ID: PAT_MRT3847_68214C.1
gcttgtttgattaattttttttttataatgaataatctcattttttggaaagcttctaaaaaggaagtaaaaatagtctatttcctaacaagaactaagtcctagtgagattgtagtgtccttgcagttgcagattattcttttatggctatgtgcttatgttccttgttctctccctaaaccaacccatttatccgaaataggaatgcttcccaagcctttaaaacttcagctctgtgttaatgggacattcttgcctgttcggtgaggtcttccttttcataaatcgctaggctaacatgtttgaatcgcatgttttttattttgtctttgtgaagaagttatataacctttccttgtgattatacatccttttagtggtattattacaattgaagaggggatttaattatacctatgaaacttcagtccttagtgtgcatagcataatttatggtgataaattgtgactcacttgttttcacagtcagtaattgtaattacttgtttgattaaatttagtttgaatgaaaactctcttttttttcagcttttttcgctcccttccagattttaaatatgttcgaacaattatttattttttagcatgatcttcgctagactgattttttcctgcattttagagaataaatagcaataataacagttaatttgaaaatcaattgatgtgatcacaattaccacggttgattttgaaatcaatggctattatattattgtactttattttctaaagtgtacctctacacataagtggagacaaaccttcgctttcacatgtttacaatgtaacaaaacggaagaaatgtctatattcattttagaaattggttagaatctttattacttggagctttttgaagaagctcaagggagtgccttactctaaatatgtcattttcttcaccatgtggtctaaaggtctttgcttgtttctttcctgaaaaggtatatttggaatgtaggtttccaagaggtaggcaacacactgcactccacctagttgtactgtatgtaggtcttggctgcatgaaagtcaataaaagggagtccaacttgcaagagaatcatctagctgatgtttaaggggaatctggtatcaaaatttcctgtgtatttgttgaatgaaatcgaagtaaagcagaatcggataaggcaatttgggtattattcggagcacaaagtttgattctaggaacggtatgtacatattgagtaagtagggtaataatgtagggaagcgtcatcaatccaaggatattctgacatttcatccaaaaatcgtattccctcgttcacaattttctcatgctcgatttagcattctatattcatattcacttctcgctagcgactctgttgccccgacgcttaatagtggaatcgtgttacgtttcaatcctgtaaaagtagtgctacaaagtaacaaaaaatattgacctttagttt

SEQ ID NO: 107642 - DNA, 203 bp, Glycine max
  unsure (1)..(203): unsure at all n locations
  Clone ID: PAT_MRT3847_68215C.1
aagcacctgagtgaaacaaatcaatctatttcacatanaaattttaaacacagaacgggcttaacacaccatggctaattcacaacagggagagggagaccacaatcttctttttacgtcactactaaacaacacacctcaactaaaacttttccttgaaactttagctatgaggacctgccaaatatttctgcttccatata

SEQ ID NO: 107643 - DNA, 495 bp, Glycine max
  Clone ID: PAT_MRT3847_68216C.1
aattcggctcgagcagacgacagaagggggaagcaaacaaacgcgctttaaacatgattatttcattgcataatagattgaggcggtgaaagaccgaaaggctaaatctttttgaacagacgaaggaaaaacgcagtgattaagcgcagacatgtatcatccaacaagaggtggcgttcgtggcggtcgagatcgtaagtcatgttcaatttctcgctatttcccaaaatttctctttctctctcttttgggtattgaatcgtttcggaatttgtcaaattgaaactagcaatttcctctctgtgatccaatttcataaattttttattgaaattggtgtgatggacggtttctgcaaattggggttttgtctttttatttttattctgtatgagttggtcatgttgagccctagaattatgattttcacaaaattcatgcttaggagtaaaaaacttttgtatataacttcaatgatttatgtatgatatcgat

SEQ ID NO: 107644 - DNA, 881 bp, Glycine max
  Clone ID: PAT_MRT3847_68217C.1
cggctcgagtgcattcgccagatttcatttccatgggccgattcaacctcaagcgattcactctctttagacatcgattccttatctccttcacctcaggaacatatcatcagaacacgtcatggttccgtatctgttgctgtatatggagaccaggataagccagctcttatcacatacccagatttggctttaaattgtaagttaaacggatttttcgttttatgtatatcaaatgatcctcccccctccccctttaattttgcatcagagcattgcacttagtttgtcttaaaattacagcatttacagatttatttcaattacggtaaaaattcgtcctagtagattcaatttaaccagttttaaaatcttgtacttgctggtattgaaatatgtataacagtatttatacaaaatcaaatctaatattgtcattttataaattttgccaaacattttttttcttttttgtcgatgcactgatattctaaccccattgttttcatgcacgtggtttcatcagatgtctcctgctttcaggggttattattttgtcccgaggcatattaccttctgctccacaatttctgcatttatcatattagtccacctgggcatgagttgggagctgctgcaatcgatcaagatcacccaattctttctgtagatgatttagctgatcaaatagccgaggttctcaacttttttggtcttagtgcagtcatgtgtatgggagtaactgctggggcttatattcttaccttatttgctatgaagtatagacaacgtgctcttggtttgatacttggttctcctctatgtaaagaaccgtcttggactgaatggttgtacaccaaggtcatgtcaaatttactata

SEQ ID NO: 107645 - DNA, 140 bp, Glycine max
  Clone ID: PAT_MRT3847_68218C.1
ctcgagcttaactcaacttctgctaccacactctcgttttacaagttcaatcacgcttttctgtacagtcatgggcaaggtcaagatcggaggcaacggaggtggaagaattggccatctggttgccagagtcattctgc

SEQ ID NO: 107646 - DNA, 260 bp, Glycine max
  Clone ID: PAT_MRT3847_68219C.1
ggccaaaaaaaaatttgatttcaaaaacaaaggtggggaaataaatcttacatactacgggggaacatgatagaaaaaacaaaggaagggggataccattcttattaaaaacgaaaactagataacgcccacatacaacacttaaaaaggcataaaacaattattatatgccggcataagcttgcatatttactcgccaacaaaaaagggaacgtaggtttgaaaagaaaaccacacataaaccccctctggccttaaaa

SEQ ID NO: 107647 - DNA, 255 bp, Glycine max
  Clone ID: PAT_MRT3847_6821C.1
attgagttctgttttggttattacatacgacttcactgcatagaacacttcatcttaacaaatagatctaaaggctgtaccggatgccccaaacttcatagagtccccctttccattatgcacacccccatacaacatttaaaactcatacatgaaaatttcatagacaaaaactccattattggtatgacattaagcacaaaagcacaacaacaaacaaaggagcaaaaaactaaaaagcatccaaaggccttc

SEQ ID NO: 107648 - DNA, 417 bp, Glycine max
  Clone ID: PAT_MRT3847_68220C.1
cccacgcgtccgcccatactttcaagtttcaactgttttcccctccgcatggaagggaaatccagggcacaggcacactttctctatcaactgagtgggaaatgctttgccctctatcatcatcttctctctaaactttcacttttaccattgaaccatacaacgatgcacacaagaagggtgtccaggtaaaagtctcaatattcaagaggaagattggaaattaatttgtgtaagtggttattgatattgaaaaacaagttcctgaatgctgccagggctcaatagggttgaagacatgacagtgagatgaacctcatttttgcgtacaaaaccctgtcagaaaggcttatttcttctttgacagtgattttaattttgcaatcttatttattcaaattatgcacggataattgg

SEQ ID NO: 107649 - DNA, 167 bp, Glycine max
  Clone ID: PAT_MRT3847_68221C.1
gcgcccacgcgttcggcttcatggacaggagacatggctagtcatgccaactacgttctcacagttgatcctaccattgatcgagctcatgccagtgtcatcccatgtggctactcaactgcatatgcagctgcttgcaaggactccaaggttgaatgtggatccac

SEQ ID NO: 107650 - DNA, 422 bp, Glycine max
  Clone ID: PAT_MRT3847_68222C.1
tacggctgcgagaagacgacagaagggtacggctgcgagaagacgacagaagggtacggctgcgagaagacgacagaagggtacggctgcgagaagacgacagaagggtaggtgtccctaatgactcatcagggtttccaagtttatgccattattgtaaaccacagctacaatgttaaatgaaatggataaagttgatatctttgtccctcatcctctcacaaacgcatgtttgcttattcaactttcaccggaatgtgggtgtaagccattggtctgtttgctcaagcaacctgcgctcctgagtgttgacttccaagaccgttcaatcagagattactcatcttgcacgttggtgggggtgccgtaaagcaacgagcaaagttcaaaacaaataagtttcaaaataaaaaataagtttc

SEQ ID NO: 107651 - DNA, 614 bp, Glycine max
  Clone ID: PAT_MRT3847_68223C.1
tacggctgcgagaagacgacagaagggtgatcccctatccactcgataattcaatggtagccataaccccaaccaaggttcctcaacctccatttctccgagaatacgactcgaaacgcaacgtgtgcttgtcacggaggagccccggggcattccattgagcattgtatgaccccgaagcataaagtgtgaagtctaattgatacgggctggctgaaatttgaggagaatcgcttgttgaatcctaacattgacaagcaacaccatacatggggcaattctggaagctgttgttatgactcatcaggattttcaagtttatgccattattataaaccacagttacaatgctaaatgaaatggataaagttggtatctttgtccctcatcctctcacaaacgcatgtttgcttattcaactttcactggaatgtgggtgcaagccattggtctgtttgctcaagcgacctgcgctcctgagtgttgacttccaagaccgttcaatcaaagattactcatcttgcacgttggtgggggtgccgtaaaacaacgagcaaagttcaaaacaaataagtttctaaaaaaaaaaaaaaaaaaaaaaaaaaaaagcggcc

SEQ ID NO: 107652 - DNA, 633 bp, Glycine max
  Clone ID: PAT_MRT3847_68224C.1
cctgaatcctatttggaatgagaaatttaagttgattgcagaagacaaggagacccaattactcattcttaggttcttgataaagacattgggcaagataagcgattgggaatagcacagttaccccttattggtctagaaatacaaactgaaaaggagatcgaattgaggctactgccctcacttgatacacttaaggtgaaagataagaaagattgaggaaccttaacaatgaaggtcatgtattatcaatttaacaaggaaggcagctggttgcgctagaagcagaaaagaagattctagaagaaaggaagaaactgaaagaagcgggagtgataggatgcacaatggatgtactagatggagcagtatcagtggtagggtctggtgttggactggtttggtgaattattctgcatagccatatttgtttttatcaaatagcccttgatttgtgtttttttttgttttgttttttgtaccaaatataaaataattctagaaagtattgcaagaggctctgtgatttaatttcgctatttgtttcttatctcctataggaatggaacatattttaatcattctttgaattgagatgctcatgtttttataaatatcataaagttgatgagg

SEQ ID NO: 107653 - DNA, 505 bp, Glycine max
  Clone ID: PAT_MRT3847_68225C.1
ttaaattgaaggtattcgtgttcagagcttaaccaaaggtcaaatcataatggatattgatttccgttggggtggtgatcctagtattattttggctgttgaagctgcacttgttgcatcaatccctatacagttgaaggatctacaggttttcaccattgtccgtgtgatatttcaacttgctgaagagatcccctgcatttctgctgttgttgtagctctgcttgctgagccaaagcccaggattgattatactctgaaagctgttggtggaagtttaacggctattcctggaatctcagatatgattgatgatactgtgaactcaattgttactgacatgctccaatggcctcataggattgtggttccacttggtggcattcctgttgataccagtgaactggagcttaaaccccagggaaaacttgcactgactgttgtcaaagcaactgctttaaagaatatggaaatgattggaaagtcagatccttatgtagttgtg

SEQ ID NO: 107654 - DNA, 1522 bp, Glycine max
  Clone ID: PAT_MRT3847_68226C.1
tacggctgcgagaagacgacagaagggtacggctgcgagaagacgacagaagggtacggctgcgagaagacgacagaagggtacggctgcgagaagacgacagaagggtacggctgcgagaagacgacagaaggggactgaaagaaacatatgaggagacaaagagaaaaaaacgtagtgtcccaaatcacccaatattcagagtgcaagaaggttcttcttcctttttttcttcatcgtaagccaacaccgattcgtttttctctctctgcgtgaaaattctgaggttgtggaggctccgaaaccatctgggtcgggtgatggaagaagaggttatttgccaatggagcgtgtttagatctctcttggcaatacttcaatggtgggctttcaatgtcactgtcattatcatcaacaagtggatcttccagaaattggatttcaagtttccactgtcggtatcatgcatccactttatctgctcagccattggaggatatgtggtgattaaggtgctgaagcttaaaccactgataactgttgaccctgaagaccgctggagaagaatctttcctatgtcatttgtgttctgtattaacattgtgctagggaatgtgagcctaagatacataccggtttcttttatgcagacaataaaatcattcacccctgcaacaacagttgttttgcaatggctagtttggaggaaatattttgactggcgtatttgggcttctcttatacccattgttggagggattcttctcacatctgttacagagcttagctttaatgcatttgggttttgtgctgccttacttggctgtttggctacatctacaaagactatccttgcagagtctctgttgcatggatacaaatttgatagcataaacaccgtttattacatggccccttttgcaaccatgatcttggcaataccagctttgttacttgaaggcaatggagttcttgagtggctaagtactcatccatatccttggtcagctctgatcatcattttcagctcaggagttttggcattttgccttaacttctccattttttatgtgattcattccaccactgctgtaacatttaatgttgctggaaaccttaaggttgctgttgctgtccttgtttcttggctaatttttaggaaccccatatcatatttaaattctgttggatgtgccgtgacacttgttggatgtacattctatggttatgtgaggcatatgctctcccaacagccaccagttccaggaactcctcgtacaccaaggactcctaggagtaagatggagttgcttccacttgtaaatgacaaattagatgataaggtctaataataattaattggtttagtttaggctacaaatgaatgaggtttctgccgtttgtaaaggcagtgatagctaaatggtatacaagttactataaaagtaaagtgactttgattattttgttccgttagattttccacagtttttaatacatagttcttttttgaagcccttcc

SEQ ID NO: 107655 - DNA, 257 bp, Glycine max
  Clone ID: PAT_MRT3847_68227C.1
ggtgatttgttcactttgtgggactgaacaagaggtgagtttataatttcttcaatgtctttctgtgtggtttgtatagtggtatacgaattataaaggaggatcttgatctttaagcttttgaaggaaaatctttaatattgtcaaataaaaaagagaatcacactgcatgtgaatgcatgtgtgcattcacaggcataaaggagaaaaattggtgcatttgataagggaaatataaagtttattacttctgaagg

SEQ ID NO: 107656 - DNA, 495 bp, Glycine max
  Clone ID: PAT_MRT3847_68228C.1
ggcaaggagtacggccgaaaggttgacatctggtcattgggtatcatgtccattgagatgatcgagggagagccgccatacctgaacgagagtccgttgcgtgcactctggctgatcgctaccaacggaacaccgacaatcaaggaagagcatgccttgtcccctgtattccgggacttcttgggcttctcgctgaaggttgatcctgacaagcgagctagtgctcacgatcttctggtgcacccctttatccagaccgctgaaccactaggcacattagcgccactggtgcaatcggcgaggaaagcaagggcagaagagagacggaagaagggtggtctgtgattttcttatttcgtcatgaaagtctcttaacaccggaacttatgtacgggcaatgcgcaagccaacggccacgattcgtcaactacgagtacggattcgtttgctgattggtatggcaagacgatggaattataaggtgatggcatggtg

SEQ ID NO: 107657 - DNA, 800 bp, Glycine max
  Clone ID: PAT_MRT3847_68229C.1
cggctgcgagaagacgacagaaggatacggctgcgagaagacgacagaaggatacggctgcgagaagacgacagaaggatacggctgcgagaagacgacagaaggatacggctgcgagaagacgacagaaggatacggctgcgagaagacgacagaaggctacggctgcgagaagacgacagaaggggaaccgttgcggaggttcaagcataatggcttccgcggtgaggttggcttcaaggtccttcttcgctaatcgttctagaagcttcgtcaagagctcaacgacgccgtttgtcttctcttcgtcttccgcatcacgcatctctcgtgcttcgagggttctgtcggttgtgataagcgttgagtcgttgatgcctcttcacagtgctattgctaatgctaggctcacctccaatatcgccttcgattccacctgctggagctcgctttctcgaggacttaaaaaaacattgtgacaggcctgctggatccattcaagatgaaagaaaaaattaaaaagaaagaatcataacttttcttttgtctcgccctaggatgggaaaagatcatcaaacatttaaattgtggtcagttgtactctgattccctccaactgcagacttgtataattggatttcctcattgcctgaaaatagatgaccaacatgctcccaattgctctttctcaaaatcttcttgaatggattaacaataagatgtcagcttccttaaggatgttaaaatgaagtttcgggtaaaaaagttagaaatcaaagagtgtatttactccctatttt

SEQ ID NO: 107658 - DNA, 521 bp, Glycine max
  Clone ID: PAT_MRT3847_6822C.1
cttgggggggggggggggggggggggggggggggggggggggcagcacggcacacaaagcaccacgaacaactgagaggtggatggcagaaaaggacagaagttatcgacaaagcgtatcagaacagttaaccgggtactaaagaatcaaattttacataaagggtttattgtattctgggtgggtccagcagcccagaagtaaaggcagagcaataaagcataaaaatactgctattgaaaggaggaatggaggtctgcagagggttatgggtggaatgttagggttggcctaatggtacaaggggtacaacttaagtgtgttggtaaggcagctaggggactgcacccgcgggtacgccaaaaacagttagtattaggggttatgcccatagtagtagagggagggctatgcttagagttaggctgagaagggctaaacttagggcagcggaatggctagggactttaggggggagccttgcaaatggtttggcgaggggccaaagttatgcaaataca

SEQ ID NO: 107659 - DNA, 1086 bp, Glycine max
  Clone ID: PAT_MRT3847_68230C.1
cgagaagacgacagaagggaggagatgatcacaataataatagacacattaccagtgttttactaggaaaaatggtggggtacgcgccttcaagctttgcaaatttggtcttcgccagagaaaggatcgaagtgggtctgaaaagaggcaaacttaatcatcctgcttgagcgaatgagaaaactggggcaaatgaagaaggtgaggatgagggagaaacccatgctgtgactgtcattcctatacggccaagtttcccaccaaaccaacaatgtcattactcagccaataacaaaccctctccttacccaccacccagttatccacaaaggccatccctaaaatcaaccacaaagcctacctatcgcacttccaatgacaaacaccacctttagcacaaaccaaaaacaccaaccaagaagtgaattttgcagcgagaaagcctgtagaattcaccccaattccagtgtcctatgctgatttgctcccatatctacttgataattcaatggtagccataaccctagccaaggttcatcaacctccacttttctgaggatacgactcgaacgcaacgtgtgcttatcgtggaggagccctggggcattccattgagtattgtatgaccccgaagcataaagtgtgaagtctaattgatacgggctggctgaaatttgaggagaattgcgtgtaaatcctaacattgacaagaaatgccacacatggggcaattttgaaagctgttgttaggtgtccctaatgactcatcagggtttccaagtttatgccattattgtaaaccacagctacaatgttaaatgaaatggataaagttgatatctttgtccctcatcctctcacaaacgcatgtttgcttattcaactttcaccggaatgtgggtgtaagccattggtctgtttgctcaagcaacctgcgctcctaagtgttgacttccaagaccgttcaatcagagattactcatcttgcacgttggtgggggtgccgtaaagcaacgagcaaagttcaaaacaaataagtttcaaaatgtcaaataaaaaggcatttgattaaaggagtgttcaagt

SEQ ID NO: 107660 - DNA, 916 bp, Glycine max
  unsure (1)..(916): unsure at all n locations
  Clone ID: PAT_MRT3847_68231C.1
aaaagagaagttgaaaatttggttgcagttcagcttgaggactctcatgtttgtaatctcactaaaggtggaagtgatggggacatttctaccaagattcaacttacacaagaagaagaaaaggagagtggtgatgttgggtggaagccattctgtgactatattttcttccccaagggatctttgcttctatgtttgagcatattattacaatttgcttttgtaggttttcaggctgcatcaacttattggcttgctctaccacgcgtccggcaaaaagtaactagcagcatcttaattggagtttatagtgtgatttcttttttaagcattgtctttgtatatctgaggtcttattttgctgcacatcttggtttaaaagcttctaaagtttttttctctgccttcactgatgctatctttaatgctcctatgttgttctttgattcaacccctataggaaggattttgacccgagcttcatcagatttgagtattttagattttgatatcccttttaccaccatctttgtaacatctgaaatagctgaacttctgacaatgattgggataatggtttcggtcacatggcaagtgctcattgttgcagttcttgccatggtggcctcaaaatatgttcagggctattatcaagcttctgctagagaaattatacggatcaatggaactactaaagctcctcttatgaattttacagctgagacatcacttggtgcagttactatcagagctttcaacatgactgacagatttttcaaaaactaccttaatcttgttgacacagatgccacaatgttctttcattccaatgctgctatcgaatgggtaattctgaggattgaattacttcaaaatttgacactcttcactgcagctntgctgcttgttctacttc

SEQ ID NO: 107661 - DNA, 2571 bp, Glycine max
  Clone ID: PAT_MRT3847_68232C.1
tccgggctgcgagaagacgacagaagggtacggctgcgagaagacgacagaagggtacggctgcgagaagacgacagaagggtacggctgcgagaagacgacagaagggtacggctgcgagaagacgacagaagggtacggctgcgagaagacgacagaagggtacggccgacgtccgggagggagagaagatgaacgcacaacactgaaagtaacgttagaaacgagaaaactttgcattattcacagttttgaaaactcactcacagtgtagaagggagtcctacatcttctagcattaaacaagaagaaaaaatcaacattttgggtttttcatttggctgcaacttttggtctctctgcagaatctcattccaattggagttcatcctctaaagggaaaggtggtgtttggactctgggaaaatgggtttgttttctgggatttttatgggggtgttgttcggcatcgcattgatggctggatgggcacgcatgatgaggtaccgaagtgccaaacgaattgcaaaggcagctgacattaaactccttggatccctttacagagatgatttaaagaaaatttgtggtgataatttgcctgagtggatatcttttcctgtatatgaacaggtgaaatggctaaacaagaaactgaccaaactttggccatttgtggcagaagcagcaaccatggtgatcagagaatctgttgaaccactgctagaagagtacagacctccaggaattacttcattgaagttcagcaagctgtcacttggaaatcgtggctccgaaaattgaaggtattccgtgttcagagcttcaccaaaggtcaaatcataatggatagtgctttccgttggggtggcgatactggtattattttggcagttgttgatgattttgttgcttcaatccctattcagtggagggatctcctgcttttcaccagttttcgtgttgatgttccaactggctgaggacatcccttgcatttctcctgttgttgttggtctctttctcgagccgattcggctggaggattatactctgaaagctgttggtggaagtttaacggctattcctggaatctcagatatgattgatgatactgtgaactcaattgttactgacatgctccaatggcctcataggattgtggttccacttggtggcattcctgttgataccagtgaactggagcttaaaccccagggaaaacttgcactgactgttgtcaaagcaactgctttaaagaatatggaaatgattggaaagtcagatccttatgtagttgtgcatattcgaccattatttaagtataaaaccaaggttattgataacaacctgaatcctatttggaatgagaaattcgagttgattgcagaagacaaggagacccaatcactcattcttgaggttcttgataaagacattggacaagataagcgatggggaatagcacagttaccccttattgatctagaaatacaaactgaaaaggagattgaattgaggctgctgccctcacttgatacactgaaggtgaaagataagaaggatcgaggaaccttaacagtaaaggtcatgtattatcagtttaacaaggaagagcagcttggttgcactagaggcagaaaagaagatactagaagaaaggaagaaactgaaagaaactgggctgaataggagataggaagtagcccattgatgcactagttggtctagtaagccatactgaaaagcagatcgaattgaggctactgccctcactcgatacacttaaggtgaaagataggaaagattgagggaccgtaacaatgaaggtcatgtctgatcaatttaacgaggaaggcagccggtggcgcgagaagcagaaacggaggtaggtggtgaaggactggttggtactggtgttggtgcataggggtgccaggtggaaagtggcattggtgctggagccgggctggttggaggcggcatcggtgctggagttggtattgttgggagcggtgtttggagccgttggtagtggactgagcaaggcagggaagttcatgggaaggacaatcacaggtcatagtggctccagaaagagtggttcttcgactccagtcaacaatgctcaggagaatggtggtggtgcaaagcctctttgattcctttcctttgtattgtaagactaatgaatggacctttgcaggctcaagctttgataatagatagattttctgtgtatgtgttgctttctttttttaccataatgttttctccaaggctgttaatctacctagattggcaaaatggtagcagaaatatcaatttagttctgttgtatcatctttgtctgtaattatgcttgacctaaaattgtgataaaactcatcaattgtaaacatccttattagttcaggtgcatgatgcaacttgtatcatccttatttataattgtgttttgaggctttgagctggatttgtaatgaaacatgaatattgtaaaaattccttatttactggaaatcaatgtggttcaaaaagaaaagaaaaagacatttttagctactcgat

SEQ ID NO: 107662 - DNA, 334 bp, Glycine max
  unsure (1)..(334): unsure at all n locations
  Clone ID: PAT_MRT3847_68233C.1
ggcagcaggtgagacacagacgaccgtagttcangnaccngangaagaggcaaaccnnnncgccacgcaacaaaccaaagccccagaacaccccacggcccgcaaaccagcaacggagcccgatccgtaggaaaacacagccaaagccggccctgggggacagaaaacacccaccgacattagcgcccggctcccaacacacaacccagaagcacccgcaacgaaggaccgcaaattggcccccccggggggcgagaagaacccagcacccccccagcacacacccccccaaggcaaggccgagaggcaccacggacaaaacccagccgccaaa

SEQ ID NO: 107663 - DNA, 260 bp, Glycine max
  Clone ID: PAT_MRT3847_68234C.1
attccaagatgcttcattattcatgtgtctctaaaaggttaaggaaaggacataactttggttcatcgcttttgtgtatgtgtaggctttctcattgaacttatacttttacttgcatagtctacactgagtcaccacctttgcataattttacccagataactagagcttattggcgatttactgatacttcaattatgagtacaaaaacacattacattaactattcacatctgttatgaatgtgaaattctattact

SEQ ID NO: 107664 - DNA, 202 bp, Glycine max
  Clone ID: PAT_MRT3847_68235C.1
gtgacagttccgttctcatcatcttacgcgtctaattacatcatctccacactggtccaacaaggcttataatgccatcacattctcaccttatagtgatcaccattacttagatcgacttaacaggttatataaacctgcattttatatacttgaatacacaaatactattacacactcatatggaatatagtcttaataa

SEQ ID NO: 107665 - DNA, 320 bp, Glycine max
  Clone ID: PAT_MRT3847_68236C.1
ctcattgaacaaccccagacaagcgcttatggtattatattgttcaaagactttattcttacattacttaaccataacaagtgggagatgcttgcttaattataaataagcaaatatataaaaactttcttgatcatggatcatgcatttgcaaaggtgaaaaggtcaccacatttgactccataccagtgcagtgatgaccatctaaacccgaccttttgccttgcaagaacgaataccatcagcttattttacaactggccgttgcctaatggaactttaacattatgctgcattttatttcattaataaacacccaa

SEQ ID NO: 107666 - DNA, 612 bp, Glycine max
  Clone ID: PAT_MRT3847_68237C.1
caactcaacctttcctttctgtccctccagttctgtcaactctcccttacctttctgcccttccagttctgttaactcttccttacctttctgtccttccagttctcgcaactcttccttacctttctctccatctagttctttcaattcttccttacctttctctccatccagctctttcaattcttccttacctttctctccatccagttctttcaattcttccttacctttctctccatccagttctttcaactcttcctttgctttctctgcatccagttcatttcaactcttcctttcctttctctgcatccacggttctcaactcttccttccctttctctcctttccgttctttcaactcttgaaccttcaactcttcctttcctttttctccctccctttcacccagtaccaattctttattatcccccaaatatattggaaaaccaccaatggggttcgccccaattcgctttgaaaagaaaacaacaaaccatcccttggggaaagcccagctacctttcaaaaccttccccatttaccattccactttttccccctttttttccacaccccaaatttttccgcaacaaacccccttttttt

SEQ ID NO: 107667 - DNA, 513 bp, Glycine max
  Clone ID: PAT_MRT3847_68238C.1
gcggtggaagactttgaatttatggtgaaggaagagtaaaggcttttttacaagtgaaggcttgattttggggtggaagaagaatcgaaggaatttgggtgggggtgcgggactttgaaagaacttacagaagtgaaggcattggaattgcttagttttatactggggttagcgccgctacactagtgcccattctcaattaccgaaacaacaggagtggcagcactagttcaatctccaaagccctcttgccagcttcaatcggtggcgccataccatctacaattttggtgtttcaggtttatgaattctatggtagttaataggaagaatcagaatgggttttgctgttttgattgagtgaatatttagtgatgcctttcaaaagaaatcagatctaggcaggtgtagagaatcaaagacagacataaaactgtgaagaaaattaagttagactgcgcacgtgggactctgtaagcatgcacccaaggcttgattatgtttcgcaatttc

SEQ ID NO: 107668 - DNA, 271 bp, Glycine max
  Clone ID: PAT_MRT3847_68239C.1
agaacgaagaagaagaagcatcacagaaccgaacccattcagaagcaaatccgaaaacctctcactttatattactggtattcagctgttcatgacaaaagcctgaaccaatcatgtcagaaggtgcagaaattgatgagcgtgtgtacctttctgaggaaaattatatggaagagatggatgatgatgttgaagaacaaatacacgatgatggagtggatggagttgaagacgacaatgctgaacgtagttttgaagaagatgaatatga

SEQ ID NO: 107669 - DNA, 797 bp, Glycine max
  Clone ID: PAT_MRT3847_6823C.1
gtttagcatctgtattctaaactcactttctggactttagttatcttggtgattggcccaacatcactcacccaccccactcattttttggtttcactctttacttttactctcacaaactccttccttctcatgttcatgtctcaacacccctgaagaaggtcacaagtgtattccattgtgtttgtgtgcaaccacttcactttaatagtactttgttcttgcacgaaatagggactcgagcacaacccttgaacctccatggctgatgccaccaagtatgttcccatcggtggtggcaatgtggccacggacctcaagagcctctctttcattctcaaaaccaaaaaaacagtggctgctgcatacgctttcatactcgccttcgtcgctttcactgttttcttagccttttctccttccccaaacgcttcctccccctggttcaccaacatattctcccccgcatccaccaccgatggttcctacaagcctcaaattcccaacattttctctctccttttcccaaactcctctgatcccctgcacaataacactaactcttctagatctccttatccaaacacaaccactgaatctcaaacactcaaagaaacctctttggaaaacagaacacaaacaaccttagtgaattcaacccaagatgcagttcctgttccaaccacccagaccacggattctcacgcgccaagtttggaggaaattccaccaccccttggaaccaccaggtgtttgtaaaaaccagactttaactctggtgaagctaaacctatgag

SEQ ID NO: 107670 - DNA, 581 bp, Glycine max
  Clone ID: PAT_MRT3847_68240C.1
cgaaacacgttcatactttaaattaagatcaacgcttaaccgaggcaaatctgtataagaaattaagaatcccttctcagttttcagaacagaaacacttcttcagtaaaattgcttcagtaaaatactgagtggatgtttcaatggtggttaacaaaattaatttgaatgaaattaattatggcttgattttaaagatatatgatttagtttaaatgtttttatcataaaattaaattataagtaaattttaatacaaaattttagatttaacacataaattacttattttaatccataattaattctaaatccaaaaagtatttatgaattcttttacaatataaaaatgtatctaaaattaattataaaatcaaaatcaattcttgaccatgaaatcaaaagcacattgaattcttaaaattatactggtatttcgattgggcaagcatgatcgcttcagcttaaattaagatcaacgatactcaaaaaattaagaccaactcttaaccgaggcaaatcagtttaagaatcccttttcacaaaagaaacacttgtgcagtaacatactaaattcttaa

SEQ ID NO: 107671 - DNA, 503 bp, Glycine max
  Clone ID: PAT_MRT3847_68241C.1
gagctattatccggcaattggagagaagggatagacgactaaggatggctggggaccgagatacgcataccatgatcatcatcatctgacatacatgcatcatcaggcatcaactgatggactatctgagtggttgggggacaatactgagacgcatgatctctctcacactctctaaatgctaatcttcaatgtctatgctatctgttcttcggtctcaggtgatcaatgtgatgccaatgatccagtggctactcaaactcaattcaggcacaaagggcaaggcttttcagctcaaggctggattctgggaatcaattaaatcggggttgatgaagaataactcaatgcaagtcatggatgcagcctccacagatgaagaagatgtacaggctgtgcctcaagagttcggccttgagcaaaagacagaacccgatggtgcaattgagcagatgatattctcttcaggaggagaagtcgatgtgtatggatcctgaagctct

SEQ ID NO: 107672 - DNA, 349 bp, Glycine max
  Clone ID: PAT_MRT3847_68242C.1
tccatttgcatttgctctctctcagtttccaagaatcttaagctatgggaaagtcttgtccgaccgtgagcgctgattaccagaatgccgttgagaaggctaagaagaagctcagaggctacatcgctgataagagatgcgctcctctaatgctccgactggcatggcactctgatggaacttacgacgtgagctctaagaccggtgcaacgtacggatctatgatgattcagtacaaactatttcaaaaccttttcgacgttacagacatctaccgtactctgatcatgcctgtcggactcgacgcatatataatcagtttgctcgctgttgaataccgaaactaatg

SEQ ID NO: 107673 - DNA, 607 bp, Glycine max
  Clone ID: PAT_MRT3847_68243C.1
ggctcgagaatgtcgaataaattttttaaattttaggaatttatttgatatttttctaattcagggactgctataaatacgcccagcatattcagggagtattgattaaaatggggtatactcatttctcaggtgacgctggggatttttatcttgtacagaatattgattttgaaatgtaattgtattgggcttcatgttctcacttattttctgcactttatgcaatgccttctatttctacattttactgtgatagattctcttgcatccttctctttcacatttatttgaatccttcatcctatctttttgatggcagagtttgaaaggaagggatgaaccggttgacatggcgggaggaaattcaccacatgttccgtatgcctcagagtcatatgtagatgcccctgaaagatacccaattcctcaagctgaactacatgatattgatgatccagcagctttctcttctaattaccaacacatatcagttgaagagaggaaagagcatcttgtggttgctcgaaacagtctcgaattgctctctagcatattgaattctgatgcagagcctaaaactttgaaggaagattaaccgtgagct

SEQ ID NO: 107674 - DNA, 450 bp, Glycine max
  Clone ID: PAT_MRT3847_68244C.1
aagccctattacatcggccggtttctaagaatccaaaaaaatcctcccccaacccacaacaggcaccaaaaaagagcttaaagcgagaaacaggggaacaacacggggtaccaaaaaccgggggagaaaaactttttaatttttgcccaaacatgacaccaaaacgaaacttgaccagcacataaggccaaaaccacctgaaaaaaaaaaactttttgaaaacactttcaggcagggaaaagacacgggaactggacccccacccggggccccccccagagacaaccccaacaaaattcctacacaaagcaattccagcctgggaaccaaaaatacgggatcaggtatccccaacaaagaccccggaaaccacggggggcccacaggaaccaaaaagtccctccaaaatgccccctgaatcccccctgagagcacttttaattggatcat

SEQ ID NO: 107675 - DNA, 418 bp, Glycine max
  Clone ID: PAT_MRT3847_68245C.1
gtcataacaggagcactcctccaagtgactttgcatttaatttagaatttaaatagcatcatatgaagttgttcttttgcattatatatgtctattttgttgagacacttataatgcaaaagaactgtttataaatggatcttccccacgaacatcattgagacactttgtctgagcctgcttagttgtcaaagtttcccttcaattaatgacattagttttagttggttttactaagcaaaactttgacttattcaataattacacagagatggaaattagaagccatatagaaatgtgatgtaaccgtgtacaccaaaattttcctgaagtttccatatcagttctggccaagtggacccggaaatgaattcttcatatatgctcacgatcaaagaggctactacacattttggca

SEQ ID NO: 107676 - DNA, 264 bp, Glycine max
  Clone ID: PAT_MRT3847_68246C.1
caatcgacgccttttttgcgaataaggaggcaaattgggacgaggtgaatgagcatgatgtgtcgctgtaatcgaactattttgcagccagacggcctgttgtcacagttgctcagagcctagacgacggccatgactaccaggagccggcgccggcgcgactgtttgtcccttcggagtatacgtcatggtactttgactgtgctgggatcgcagagtttgtggtcactattctgttgtgtacatcaatgtctcaaccgtcat

SEQ ID NO: 107677 - DNA, 695 bp, Glycine max
  Clone ID: PAT_MRT3847_68247C.1
ctcgagccgctagaagctagttaaactgagagtcaaatactcaaatcatgccaaagtaattgatcttatttggggccatttcccttgagattgattggaatgtttgatgcataaagcaatgggactttcatatatcaaaatgttttgacttctatccattttaaatcatgtgaattgaagtaacattttcctgttgtagcttaagatgaatatatctcatgcagatagtatctattacactacctggttctaacactcatctaataaaaatctggtcttcaaattctaatatattgtcaaattgagaaacccacttttgtaactgagaattcatattatttcttggatggggcagtggcctcaaggatgcctatttatgattatgagaaattgagaatgtgattgaaagtctagagatttatttattctgtgtttcttgccagttatggtgcattgattgtttgtttcttttttcacggttatcttaaacagaccgctaactttataaattcatttactttgaatgccaagttatctatatgttacgatgtatgatttttttctgatcattggatctcagactaattaattcttcaatgattgatgcataatgctataacagatagcaggttgacccctattctaaagttgtgaaaacacattgcataatttatacttcacatttatagatgctg

SEQ ID NO: 107678 - DNA, 1562 bp, Glycine max
  Clone ID: PAT_MRT3847_68248C.1
gcaaagaacaaaaaacaattaatcacccacatgctaaagggttcccaattcaacagtaaccaaacacttccttaattacaagtcttttcacccaactccattacggactaaataaccattatatatgtacaagccatgtttacaaatgtttatagctaccatatgtgtcgaattttatgccactctattggcttgctcttgggaactttctgttttggacgtggaaattgaactcttctattttcagtattttgggcccagccaatcgcgattcctattcctagaatcagcaaaatcatgtacagtgacagagacattttatgaaccttatccataaccttgcttctctgaggaaaatgtctgtcggcatgtgcaagactatatcttagcattcgaattatggcagactcagttgctggacaatcacagtctgggatatcaaaaatttgcttggtgggtggaattcccaataacgttcccaaatgttcacgaacaagagcacgctcagagaacgaaaggagatccccatgagtgaaaacaagtacaggtttgtcatctttaaatgacaggaatgggcaattgaaagtagaaacaattgattgaacacactgtgtctccaaagcaccatcattctccattgctttcagaaccaaaagaccattaacaacatatattacaaaattaacttttctggtcttactggataagtaacctttcttgtgagctttccccttcaaacttttcctcaatctctgattatctgttttcctgacaacaagctctccatggtgaacaccttttgtcatccaactcttcagcattctaatattctcatctttttctgagttatccgacaaactacgtgtatcatacagacagatagaatttgaatatcttggaatcatatactcctggaggaaggatgttccgtcccctaaaagtgaattatatgattcttgtgctcttgctggtgcaaatctgtcatcctcaaccaccttagagattctatttatgagactacttttcccagatcctcttggaccaaccaataagaggcatgttgtctttggcacatcataatcacttatctttaagccaccagccttctcaatccatgctccaggcttatatctcaaaattttttgtttctcccttttcaaatccttgctatgaatcttcaattcatcacaacattgaaggatttcttggtagttaataacccttctcctttcattgacttcaaaatcaactctagaaggatgtatgatttcttcatcagtttcactacaagttaacccattctccgctttcattctgttgtcttcatcctgcaagcccaaattatccctgagagcaggtgaggagtgagatgaaagcaagggaaaattctcctccaaacaagaaccttcgtctgtaccatgagaaacaatagaatccccacccatgttgatgctgatgctgaaaatgccttctgttcattcaatgcttctggttttggggtgaaggcatcttttcatcactacttactactctctggtttctggccaagtcagaagaaaaat

SEQ ID NO: 107679 - DNA, 226 bp, Glycine max
  Clone ID: PAT_MRT3847_68249C.1
gaaaggcttctgatggacatctcagactgggttatggataagtgctagtggtgctcattgccagagtgagagacaagatacatgggatggtgatgactctccactgatggaccaacattgccgattgcaatggctgtgggagactggttgtccgaccggtaatactgtcaaagctgtcgactgggcttacccctgtgacaatacatgccataatctggtcttcaat

SEQ ID NO: 107680 - DNA, 572 bp, Glycine max
  Clone ID: PAT_MRT3847_6824C.1
ccacgcgtccggatttttttaggaagctcatggaagtttttagagtttgtgaagacttggaaaatatggatggccttcacctgattttcaaaataatcaaagggattgttttgctttaatagtacacaaatttttgagcgaataatttcagtgatgagtttatgatggacattgttggtgcccttgagtatgatccagaggttccccatgttcaacatcaccgtaaattcttaaaggaatatgttatttactaaggaggccataccttataaaaaatacaactgtattatcgaagatacatcagacatatagagttggttttttgaaggatgttgttttggctagagtattggatgaggctactgttgcaaatcttaactccataatacatgcaaacaatgccaattgttgtttctttattgaaggatgacagtacatttatccaggaagttgtttgctaggttaaaatcacccaccacctctcctgaatcaaagaaaatatggtccgtttcttcatgaatttttgtagtttaagcaagagcttacagatggttcaacagcttcggcttttt

SEQ ID NO: 107681 - DNA, 2021 bp, Glycine max
  unsure (1)..(2021): unsure at all n locations
  Clone ID: PAT_MRT3847_68250C.1
tgcaaatctgtcatcctcaaccaccttagacattctatgtatgagactacttttcccagatcctcttggcccaaccaataagaggcatgttgtctttggcgcatcataatcacttatctttaagccaccagccttctcaatccatgctccaggcttatatctcaaaattttttgtttctcccttttcaaatccttgctatgaatcttcaattcatcacaacattgaaggatttcttggtagttaatgncccttctcctttccttgtgcgttgcgtccgactcaacgcgtggactgacggtgaattttgtgttatttgacagttaaaggaagaaatgggtgtctctgcagattagacattagagtgtgaactccaaactctgaaaccctcaactcaaatccaatcctttggtgggtttcgaattggagtccaaccaaattctaaacacatggactcagctctgtcgcggttgcatctccacaatctccctcctctttcctccgccgctcaccgccctctcttgcagcctctcgccgccgccgcttctttctaccgctcttctcctcctctcccacgcctccgtctctcgccgcttctcgctgctaacaccctcaccgctaatgacgtctcgccaagaagtggactatacactgtcggtgactttatgacaaagaaagaggatttacatgtggtgaaacccacaacatctgtggatgaagctttggagattcttgttgaaaacaggataactggttttcccgtgattgatgataactggaaactggttggtgttgtttcagattatgatttgttagcactggactctatatcaggtcacgggctaaaggataacaacatgtttccagaagttgacagtacttggaaaactttcaatgaggttcaaaagctgctaagtaagaccaacggaaagttgattggtgaattgatgaccactgcccctatggtcgttcgtgagaccaccaatctcgaggatgctgcgaggttgttgctagaaaccaaatttcgacgcctaccagttgtagatgctgagggtagactggttgggattatcacaagaggaaatgttgtaagagccgcactgcacatgaaacaagcgaaccaaaagaaagaatgataggattcagaagatcattaaaaaatttgttgctggatttccgtgcagtagttcgattcaagtgttcacagaatttgtccaaaaaaagaaaaagtgttcacagaaacttgcttgaattagaattaaaattttagcttaggcatgtatatcttattgttttggaatttacacgaatgtttgtcacgggcaatattttgatagggctattattattcttcttaaaatatgttcttgttgtaatttatatgggcaaccttggtgataatgatgttgaaaatgttgtgaattcgcagcattaatcatatgtcaaagactatagataattcagacacaaatttcaaccggcattaattcaaaatcaactctagaaggatgtatgatttcttcatcagtttcactacaagttaacccattctccgctttcattctgttgtcttcatcctgcaagcccaaattatccctgagagcaggtgaggagtgagatgaaagcaagggaaaattctcctccaaacaagaaccttcgtctgtaccatgagaaacaatagaatccccacccatgttgatgctgatgctgaaaatgccttctgttcattcaatgcttctggttttggggtgaaggcatcttttcatcactacttactactctctggtttctggccaagtcagaggaaaaatcaaggtgccttattcattagttatcatccattaatttccattgaagtccgaaaacagaaaccaataatacaggatgatgaaatctcaaaaagcaaaaacaaatgggaatgtagtttaagtacaaacaaagaaagtggggtggcggtaaagtttgacagagccactgataagagacatggttggatgtgagtaggcgtggcgcaacggctggg

SEQ ID NO: 107682 - DNA, 493 bp, Glycine max
  Clone ID: PAT_MRT3847_68251C.1
aaactaacaaaccctgatcagctggagttctgttcaactcttttctatgtgtctgcacagaaaatagtattttttacataatagcaaaatcagcatctaagacttggtagctgagtcaggcaggagaaaagcataggagagacaggcagacagattttgtgtatcatttatattattctaaactataagagaacacaattttgataactttaagaaacacaaatagtaaaacaaaatcaatagcagaccatgcatcatatattctatactgaaacaacttaaaccagcaaaataagtttttgcctaatacacaggtcccaaacagttcccaaatccatgaaagctgaaaactttgtgaaatccaaacaagcattcaaagccatcatcacttccccttccatgtttatcaactcacaaagttgaaatacttttgaaaatacttgagcttataggaaaggaaataaaaatgctcagtaatagtcttaataatttc

SEQ ID NO: 107683 - DNA, 674 bp, Glycine max
  Clone ID: PAT_MRT3847_68252C.1
ctcgagccgctcaattttgctttgtaaaccaactcacacacgcagatccatcgattcgtcaacgcgtaatttttggaaggaaaagcccacccccacccaggtgagtgatgtgcaatgcagagatcacgtgaagctcttctacatagaagaagagctaaaactgggtctggctataaactctctctctcattgctttttcttttgtggcctctaatcttccgcgctcatggttaccccgcacccacagagtctaattggaagcaaaataagcaaggacagtgtaaaacctctaattttgctaataaatgtttgctcaaagaaactcatgattacattctccctgaccctgaagatgctgagtcagtcccaaatgatagtgatactcccactagagaggatgtgcaaaaatctgatcacttaccttgggctgtgcctcttggtcttgatgaattcaagagcagggcaattagttctaaaattaactctggcactgctggttcatctggaagtgtaatgcatagagtggagcctggtggtgcagaatacaattatgcttcagcctccaagggagcaaaagtattaggttctaacaaagaagccaaaggcgcctctaatatcttaagcggagacaaagataagtatcttcgcaatccatgttcagccgaagagaaatt

SEQ ID NO: 107684 - DNA, 673 bp, Glycine max
  Clone ID: PAT_MRT3847_68253C.1
aaccatactcacgaccatccattcaaaccatttgcaaggacaattgatgaattgaaccaatgctaaactaaaaaattaaccctagttcacaaacaaattgcacacaacacaaagaaaagatcaattaccggccatcgcccatatcaaaatctcgctccctgtctctgtccctctcaaagcgactcctgctccttggggatctctccctctccgctctttccctctctcgctccctatccttctctcttctctcgcgctccctgtccctatcacgggctctcctatccttatccttatccctcctctctctatccttatccttgcctttcctctctccgtctctttccctcttgctcctgtgacgcccaaaggaacgttcggggtcatggtttccctctcgctctttttgtcatcggcgtcgagatcgtcgtcgacatcgcagggctttcggtaactcctctcgctctttagagttgctaattctaaaaatccattttttattttttcaagccacgaggggataaggatgaaatgaattttttttttacttttacctacactatgacaaacaattgtaggtataagtattttttgacttttacctacactaattttggggattattttttaagtttttccttatggccaggggtcatcttatttaccttcttaa

SEQ ID NO: 107685 - DNA, 557 bp, Glycine max
  Clone ID: PAT_MRT3847_68254C.1
ctcaattttgctttgtaaaccaactcacacacgcagatccatcgattcgtcaacgcgtaatttttggaaggaaaagcccacccccacccaggtgaggtgagatgagatgagatcccttattattgtatgatctgatctgaataaaatgaattgaatgttaattgtgttgagcagtgatgtgcaatgcagagatcacgtgaagctcttctacatagaagaagagctaaaactgggtctggctataaactctctctctcattgctttttcttttgtggcctctaatcttccgcgctcatggttaccccgcacccacaggtaaataaattgcaattatgggtcttgcttttgagaataatcaaaacaatattcttgttagtcactttattatctatggatgtagagtctaattggaagcaaaataagcaaggacagtgtaaaacctctaattttgctaataaatgtttgctcaaagaaactcatgattacattctccctgaccctgaagatgctgagtcagtcccaaatgatagtgatactcccactagagaggatgtgc

SEQ ID NO: 107686 - DNA, 2356 bp, Glycine max
  Clone ID: PAT_MRT3847_68255C.1
ccgtcctttttttttggggggtttttttaaaaatatcccacacaagttaacaacatatttaaaaaatggactatcacaaagttaatataaaaataacaatgatacaattcaataataggagaaaccaggatgagctaacggcacaaaatttcctggagcaatctgttctattaacactcagtactactctatagacgctcgtagccatatctagagacagccgtaatataactaacaatgaaaaaatacaacacactaagaacactagcacacccttgttttctaaagatgtttgcttcccccaattccgacttctccaccaattctgacacggaaatgctttgatccgtccatgtgtcgacttgtgagggtatttttcagaatttaagtgcttaaacaacacacactgatccatcgtttcttgaaaggaaaagcagtgatgtgcaatgcagagatcacgtgaagctcttctacaaagaagaagagctaaaactcaactctctctctcgttgctttttgttttatggcctctaatcttcctcttcagtcgcgctcatggttacactcctacaccctcaggtaaataaatagaaattatggtcttgcttttcaataatcaaaacaatattcttattagtctcactttatcatctatggatctgaagttcgattgtcaaattggaaggaagataagcaccgacagtgtaaaacctctaattctgctaataaatgtttgctcaaagaaactcatgattacattctcccaaattataaggaagattgtgatactcccactgtagtggatgctcaaatgtctgatcacttaccttgggctgtgcctctcggtcttgatgaattcaagagcagggcaattagttctaaaattaagtctggcacttctggttcctctggaagtgttatgcatagagtggagcctggtggtgcagaatacaattatgcttcagcctccatgggagcaaaattattaggttctaacaaagaagccaaaggcgcctctaatatcttaagcagagacaaagataagtatcttcgcaatccatgttccgccgaagacaaattcgtcatcatagagctttctgaagaaatcttggtagatacaatacaagtagctaattttgagcaccattcttccaatttaaaagcttttgaacttcttggcagtctgagctttccaacagatgtttgggttttctttgggaatttcactgcctcaaatgtgaggcatgctcagaggtttgttcttcaggagccaaaatgggtgagatacctaaaattgaatcttcaaagtcactatggttctgaattttattgcacactaagcgtagttgaagtttatggtgtggatgctgttgagaggatgctggaggatttgatacatactcaagataatctattggcacctggagacggtaatgctgataaaatgacagtatcaccccatcctaatcctcctgagagtgaagatgctcatcaaaatacttttggagggatcaattcttatcctgcttcagatatctcttctgcaaatcatgagaaactaaatagtaacgttcctgatccagtggaagaaatccgtcaacaagttggcaggatgcctggggatactgttctcaagattctgatgcagaaagttcgtactctagacttaaatttgtttgttttggagcggtatatggaggacttaaattctagatatgtcaatattttcaaagagtacagcaaagacatgggaggaaaagatatacttatacagaatatcaaagaaggcattaggaatctcgttgaccagcaagatgctataacaaaagatgcaagtgatctcaaatcttggaagtcccatatttccatgcagttggatcatctactcagggacaatgctgttttgaggtccgaggttaatgaagtccgcaggaagcaaacatctttagaaaacaagggtgtgttagtgttcttagtgtgttgtattttttcattgttagttatattacggctgtctctagatatggctacgagtgtctatagagtagtactgagtgttaatagaacagattgctccaggaaattttgtgccgttagctcttcctggtttctcctattattgaattgtatcattgttatttttatattaactttgtgatagtccattttttaaatatgttgttaacttgtgtgagatgcttggtgattgtgttgtttctttcaatatagatatagaaactttcttctagtgtataccatcattttaattactgaaagtgtatagttttattacattagtatttgaaattagaatcttcttaaataagtttttaaaaagtgcaatttttcccttttt

SEQ ID NO: 107687 - DNA, 350 bp, Glycine max
  Clone ID: PAT_MRT3847_68256C.1
ccacacatcaattgacttattatgcattcaaaaccttcatagcctattttgatacatcattaatcctcgggaggccccaaccaacccccccaaaatatattttacacaaaaagcatccatgactggggtccatatttctggggccagggaattcaccaatgattaacaaacatgactggggtttgttctcaaacatcgaagtcaacaaatggcgcaggcatttgggttctcttcagcactttgaccataaaaggggggggccatggggggattatatgcttttgaaagcttgacaagctcctcaatttgctgattgggatctttcttattctctggctttttggcgggcc

SEQ ID NO: 107688 - DNA, 556 bp, Glycine max
  Clone ID: PAT_MRT3847_68257C.1
tttccagcctgtttttttggtccctgcttttttttcggttttaaaaaaggaaaaaaggggggggtttttcagggcctccccctggtccggcctttattttccaaaccctatcaaacctaccttcactttttttgcttggagggccaaaaggaaatccaaccaaaacctttgtcctggaagggccaaaccaggggttccagcctttccaccagttcccaattttcccccaaaaggcaaaaaacctttgaggaaggccatggtggtaatacctgggcctcattttgaactagccctgcccactgttaaggctttggttaaaacgggaaattggcttgtattattggcctgcaggaataccttcaaacttgcagaacctccaaaatccgttgccttggttaaggaaaactccacattcttccacttgaacttggctctcttcgaagtgtccgccaattggttgataactcagaagaacagaattcccgttggattcctggtttccaagcctgctgttaacttgccacctgctaagaaccctactttcactgctagaggc

SEQ ID NO: 107689 - DNA, 185 bp, Glycine max
  Clone ID: PAT_MRT3847_68259C.1
ctcactctttctatcacctttattttgaactactcaacggctatgcaggcttttattgatgggccatgtcatagacatgtacgtaaagcacatgctgattcatgaatcacactgcatcttacactgggattcatctactatgcatttacactctgcgataatggcctaagaagcttatctctgcc

SEQ ID NO: 107690 - DNA, 322 bp, Glycine max
  Clone ID: PAT_MRT3847_6825C.1
gttactcgtgggccggccaccagacttttttatgaggcgcttgtgattccgcttcacgcccatcggctcttccaaaacacacttatccctttgcatccaccaaaccagtactcccaaaacacacagacaccacctgcattggggctatcacgctacgccgtgactaagcacctccttctgcacccttagtctctcaatacacacaccctcttatagcctttgcccttgactaactctcggtgtacgacaaagatgtgttctttgtgcaccttctccatgagtaatcctggactcaaagaatattatgcagctccttcccccc

SEQ ID NO: 107691 - DNA, 352 bp, Glycine max
  Clone ID: PAT_MRT3847_68260C.1
caatgaggaaattatgcctcggcttctgttgaaacaaaaaggcattctggccaggctctctttacgggagatcaatttatttgccgagtggccaatctcctgatcgcaaccgccaaagggttgtattttcatggacaacactgcttttgttaaaattccttaaccgagtgcttatactcaatgtggttctctgacgagtcaagaccttaacagctatcttatgcctgatttctattgcagccgcaggtactatatgccatatgaatctgctgatgtttttgatccaacctatgctgcacaactaaaaactgttttctattatgtaccatggctatctgtgctgcctggaata

SEQ ID NO: 107692 - DNA, 1656 bp, Glycine max
  Clone ID: PAT_MRT3847_68262C.1
attatttggtgtagggattgcgggaaacaagtctatttgggtatggatttttaatttatgaatttatgaatttcagtgtttattttagggtacatagtttttgtactatctgaaatcgtattctatggtttactattttaagcatcttttgacaaaattggtatttgagcttgtaggtggatttgacacggctcatgctgctgccagagcctatgatcgagccgctattaagttcaggggagttgatgctgatatcaatttcaatctgagtgattatgaggatgaccttaaacagatgcagaatttgtccaaggaggaattcgtacatatactgcgtcgccaaagtactggtttctcaagaggaagctctaaataccgaggagtaacactccacaagtgtggccggtgggaagctcgaatgggacaatttcttggcaaaaagtgaggacatatttttatatatcaacttacgtagtgatctactgtggttatgaaatattatgaatttaagcacctatggggctgcaaagtgaaattggtttcagcttaattctcaatgcatctttatgcttttttccatgtttggagaaacatgtctaagatagtaatatagagatgcgttttggttatagagattgcaatgctttcatgcaggtatatatatcttggactattcgacagcgaagtagaagctgcaaggtcctagtgatacatgaattacattctacccgcactgaatttatttacatgaattatcaaagctcattaggctccatccaacacgtatctcccttttgattttctggaaatcagggcttatgacaaggcagctatcaaatgcaacggaagggaagcagtgaccaactttgagccaagtacttatgaaggagagctgaaatctgcagccattaatgaaggaggcagtcagaatcttgatctcaatttgggcatagcaaccccaggacctcccaaagaaaattgggggcaacttcagttcccctccttcccttacaatacacatggtggaagaagttcaatgatggaaaccaatgttagttctggaattggtaatccatctttgaaaaggatggttgcaactgaagatcgtccttcattatggaatggcatgtctcctaatttctttcccaatggggaaagagcagagagaatcggcgttgatccttcaaacggactccccaactgggcgtggcaaacacatggccaggtcaatgctaccccagtaccaacgttttttgctgcagcatcatcaggattttcaatttcagctacctttccatggggtgccatctttccaacaagttctatgaactcaattccccagagtctctgttttacttcatccagcatgcctacccgcaatgcatctgaatattattactaggttaagcccccacaggcaccaccatagctgattttgcagtacagattaaagacaaactaaaaaaaaagtgttttcggtccaaattctgtgtataattcagccactgattggtgtatactgagattcgacaccttattgctgtctcttttgcttaaactctaatgccccatgtttgaagcaaatgctatttttagtgcactggcacaacgatgtttctgtttcccacaaatttgttggcaatcaagattcatggt

SEQ ID NO: 107693 - DNA, 971 bp, Glycine max
  Clone ID: PAT_MRT3847_68263C.1
cggacgcgtgggcggacgcgtggggcagtgaccaactttgagccaagtacttatgaaggagaaatgaaatctgcagccattaatgaaggtggcggtcagaatcttgatctcaatttgggcatagcaaccccaggacctggtcccaaggaaaattgggggcaacttcacttcccctccatcccttacaacacacatggtggaagaagttcaaagatggaaaccaatgttaattctggaattggtaatccatctttgaaaaggatggttgtaactgaagatcgtccttcattatggaatggcatgtctcctaatttctttcccaatggggaaagagcagagagaatcggcattgatccttcaaaaggactccccaattgggcgtggcaaacacatggccaggtcaatgctagcccagtatcatcgttcttttctgcagcatcatcaaggattctgcaggaaagagcagagagaatcggcattgatccttcaaaaggactccccaattgggcgtggcaaacacatggccaggtcaatgctaccccagtaccatcgttctctgctgcagcatcatcaggattctcaatttcagctacctttccatcgactgccatctttccaacaagttctatgaactcaattccccagagtctctgttttacttcatccagctcgcctacccgcaatgtatctgaatattattaccaggttaagcccccgcaggcaccaccatagctgatctagtagtacagattaaaggcaaacaaaaaaaagtgtctatggtcgaaattctgtgtaattcagtgactgattggtgtatactgagatttgacaccttcttgttacctcttttgcttaaactctaagatctttgaagcaaatgctatttttagtgcactggcacaacgatgtttctgtttcccacaaatttgttggcaatcaagattcatggtatgcacggcaatcttgagatt

SEQ ID NO: 107694 - DNA, 2510 bp, Glycine max
  Clone ID: PAT_MRT3847_68264C.1
aataggggtcgagcgtctctgctctctctctctctctctcttccatggaatccaatagtcggcgacgctttcactctctccggcgacgatgaactcatcgccgacgaaatgagtttgcgccggtttcttctctctcctcgttccgtgagttccttcctctcactccttctccgttctccggtcgccggaaaatttatccggtgttagcgatacggaaaactcatcgcgattccgttttcttcttcgcttcgttttctacttctctttatctttcacttacattacctctctcattcggttgtttccgatcggatccatttcgccgtcgccggcgaagttagttggaacaggctttagctaagttgcgtaaacctcagaaattataaaaatagataatcggaatttagtagttagttcggtttttagttacttaaccgcttaacgatataaataaataaataaaaagaagcgcgacgatgttagatcttaatctcaatgcggagtggaccgattcgtttagtaacggtgagtcggagataccgttagagaagtttccagatggtttaaggaaccaaatggccgagtcagggacttcgaattcctcccgtggtgaatgcggacgggtacagtaacggcggccgcgacgatgaggatggactccacacgagctgctgatgacgtgtacaccactttcaattacgatatctttaacctctaccgcacgaatgctgtcgtaattgaaacagctcatcccggtgatgagtgcatgagttatagtacacggtaaatcgtccttttgaggcatgaaaggcttcgtggtgttctcgatctatgaatttgaacccaccactccagtgttgaagttgcatcagcatcaggatcagattcagatttaaatgcgatctcagtcacagcgacctgccaaaaacattgggagaggaccgacgtctcagatcaagcaatatatagaggtgacttattacagatggacgtgaagatgagaattgcataactgggattgcgggaaacaagtctatttgggtggatttgacacggctcatgctgctgccagagcctatgatcgagccgctattaagttcaggggagttgatgctgatatcaatttcaatctgagtgattatgaggatgaccttaaacagatgcagaatttgtccaaggaggaattcgtacatatactgcgtcgccaaagtactggtttctcaagaggaagctctaaataccgaggagtaacactccacaagtgtggccggtgggaagctcgaatgggacaatttcttggcaaaaagtatatatatcttggactattcgacagcgaagtagaagctgcaagggcttatgacaaggcagctatcaaatgcaacggaagggaagcagtgaccaactttgagccaagtacttatgaaggagagctgaaatctgcagccattaatgaaggaggcagtcagaatcttgatctcaatttgggcatagcaaccccaggacctcccaaagaaaattgggggcaacttcagttcccctccttcccttacaatacacatggtggaagaagttcaatggtataattgaaactcatcttcatttattttaagtttcttgtaaattaagctgaatgaggtggatagcactttttatgctctcatgttagggtgcgcttgattgatcgttaatcgttcagttctatttaacagcaatgaccatagagatatggattgacgttagaagtgcattagaaagtgggagacgaataaaacaatgacacttaatttataacataactcttcatatcatgataactgttgagaatgcttgtctggctgtaacatttttgtagctttcgtgggttttccttgtagctaattacaacctgtattcctttgatttccttgattttttgtggaacttttggtttttggtattgttttatcaactctagatgtcatatattaacatggttctctttatctgcagatggaaaccaatgttagttctggaattggtaatccatctttgaaaaggatggttgcaactgaagatcgtccttcattatggaatggcatgtctcctaatttctttcccaatggggaaagagcagagagaatcggcgttgatccttcaaacggactccccaactgggcgtggcaaacacatggccaggtcaatgctaccccagtaccaacgttctctgctgcagcatcatcaggattctcaatttcagctacctttccatcggctgccatctttccaacaagttctatgaactcaattccccagagtctctgttttacttcatccagcatgcctacccgcaatgcatctgaatattattactaggttaagcccccacaggcaccaccatagctgattttgcagtacagattaaagacaaactaaaacaaaagtgttttcggtccaaattctttttataattcagccactgattggtgtatactgagattcgacaccttattgctgtctcttgcttaaactat

SEQ ID NO: 107695 - DNA, 400 bp, Glycine max
  Clone ID: PAT_MRT3847_68265C.1
gcccgaccagcgcctctcctccaaccacggcttcggtggtgacagggaacgcgccttcgaggcaggcaagaagggcggatcgacccagcccgatgaggtctacaagccatctgaacacgacggtctccgagaggatggccagcccgaccagcgcaagagctccgagcacggattcggtggtgaccgacaggctgcctccgaggctggccagaagggcggctccaagtaaacaactttccacgagcatcaagtactagggagcagctatcagatcttgcgcaatgtttcgttagctagtcaataccttagtcaaagtcgaatgttcagtgccaccacatactcgccatgattcgctctggcgtagctgaaatgtatcctgcacaattcatcagctttcctc

SEQ ID NO: 107696 - DNA, 241 bp, Glycine max
  unsure (1)..(241): unsure at all n locations
  Clone ID: PAT_MRT3847_68266C.1
agaccccccnccggcaccggcgagcgacccagaagacnncacacaggggccccagaacccagccgccaaaggggagggcagaggtttttttttttttcaanacaccaccgtgttaaccattattggttataagacacagagtgacaccaaaagtttcggtaaaacccaatgtgacggagttgacattttgggcatagcttgggactacagaggaatgatcttcatcccttgtttactgtac

SEQ ID NO: 107697 - DNA, 642 bp, Glycine max
  Clone ID: PAT_MRT3847_68267C.1
gccctgtcactcgcaccagcgaaagcaaaaatcgaattgaaggcaaagagcgcggagcggagcgtcgtagttcagaggctcccatcccatacccatgagatccttctcctcttccctctttctccttctcttcttcttctcttcttcactctccaatccccaaaatgcccctctctcactcaaaggtgttgatattgaaaggccggttttggagttctccccttccgttcttcccggtatttcgggttctctaggtgttaaggacgctttacgatgcgagcgtgttcgggtttcgggcatctcgagagtgaaacttgggagctacgctaattcgaccatgttactttggctccctccgtttcgatccccgagaagttgcatagcaaaattcaggtttgcttccacaggaatgaaacagttggatggtgtcagtgtgagaaagatgagtggaggggggtgcagaagggggtctggaatgctgttatgtcaccttatgaaacgagatatgttgatgtgagggatcatggagaaatattggggtctgttaccgttgctattgaaagagattttccccaaggcgccttgcttgtcttgccgtaagatagatactgataggtggtggctccaactgttaccagatgg

SEQ ID NO: 107698 - DNA, 291 bp, Glycine max
  Clone ID: PAT_MRT3847_68268C.1
taataatatatataaataatactgaataaggacagtggcatctatatatacagccaggattccccctccccgaataaatcatggcgtttgtacttaattattagtctttggatgaatattgcagtatatataaattcatcctaatataatcacacaacattgtacatcttcaattaatctcttgaagattatcatatatatatatatatatatatatatatatatatatatatatatatatatatatatatatatatatatatatatatatatatatatatatatgtatat

SEQ ID NO: 107699 - DNA, 552 bp, Glycine max
  unsure (1)..(552): unsure at all n locations
  Clone ID: PAT_MRT3847_68269C.1
agtctacnnaaaatgatttaagcaaactccaccatgagataagcacggttggagatgcttccgataaatgaattccatatgcacagctttgcagcaaaaactaccaaaattacagaaagtaatgaacatattcaaaggaggtcatctaaaaggaggatatggcctagagttaccacagtaatgtgttccagtgtttccagaccgagccacacccatagaattagcaggaacaaagtaggctgcgggtaaaccaaactgcggggcaccgggcacaggcataaacacacgctggtattggggagaaggagtgaaccgagggtgagttacagctgtccgaggacgtttgctgatgttgccccactgattattaatggggaggagtaccccagtatcacgtttcttttcttcaggttgctgcacttcaactttggaggaaggtcctgaggctgaacgaacaatattttccttctgctgctctagatcaacaatgcgttcattaatctctttaactagatcctgagattctaggttgttctctgaaatgcactttag

SEQ ID NO: 107700 - DNA, 379 bp, Glycine max
  Clone ID: PAT_MRT3847_6826C.1
gtgtctactctggcctgggtttagcagtcgtgcgaggaggttgtggcgtctgctgcttccaggcgatttgaggtgagggagccaggtggaggaatccggagtcggggaaagggaacccctgaagtctcgattcagttgcctcccagtcctcgctttgtgttgctccagccaggatgatcgaggttgtttgcaacgaccgtctgggaaagaaggtgcgcgttaagtgcaatacggatgacaccatcggggaccttaagaagctgatcgcagcccaaactggcacccgttggaacaagatcgtattgaagaagtggtacacgatttttaaggaccatgtgtctctgggggactatgaaatccacgatgggatgaacctgga

SEQ ID NO: 107701 - DNA, 506 bp, Glycine max
  Clone ID: PAT_MRT3847_68270C.1
aggccaacctttacaaaaaaaccttaaaaattgaatttcagaagaaaagcccctccgccccctattaggctgttataaggataaaaatgaaagggggcattttttatttttgaaccacttggacctaaaaacaaagaaagagggacttcccaaggccctaataaaaaggcggcgataatataacctttgagacctggccaaaggaaaaattggaatataggcggatgccaactgcgaccacctcaagtcataacgttaagataaccgaccctgttcacggataacccctgggggcctaacaaatacaacgttgcatcgttatgcatacctcaattcttcattgatgctaatgatcaaggaaaaaatgtttttcttctgaaaaacatcataaacaccctttatatgtcttttgttcgcaccccaaagagcttgtatgagctcccattcggagacaaggcaatgcatccatattagagcctgtgtttgaggcttattaaaaacattca

SEQ ID NO: 107702 - DNA, 493 bp, Glycine max
  unsure (1)..(493): unsure at all n locations
  Clone ID: PAT_MRT3847_68271C.1
gtttggattgaaanggttngnggatntnannaangaggagtanagggnnaagtanttgggaannaagatngatnnnaannggagggtnggnaagaannngagnaanngatangngnnangtgtnggngaaaaattanntgaatnggttgattggaggattgaaggtgttgttnntnnagtnaaagaanaaggaggttgtgggagntgttgggnattntnagnaattggtggagtggaaggaataaataagatagtganaggtgaantgattttgttattagaaaaagaattggtggattgtgatanaggatataaagaaggatgnaatggagganttatggantatgnatttgagtttattattaaaaatggggggattgattttgaagaggattaannttaangtggtgttgatggtagatgtgaaanatataggaaaaatggtaaggttgtttttattgatgaataggaagatgtttttggatatgatgag

SEQ ID NO: 107703 - DNA, 429 bp, Glycine max
  Clone ID: PAT_MRT3847_68272C.1
aaggaaaaactggttttttcatttcccctatctattttacagggttatttggcccactaaaccaagaatttttttttaaattttaaccctaatgcatggggaacttgaagataaaaaaatggggaaaaaaaaaccaccttcttgcctttgctggtgaaacacccagcttcaccccctttgaggaaagaggccctcttggtgatttcaccccctggcttatttgggtacctgaagaaattataggcccaaggaccagccccaggttcaagagttggggacaccaaatatatccatattcctttgtacccattgggcccaatagcaggccctaaactttttgctggattcattgatgcccccggggttggcccgggaaacaattcatttatgggtggccggagacccaactggaagcccctgcccactttt

SEQ ID NO: 107704 - DNA, 253 bp, Glycine max
  Clone ID: PAT_MRT3847_68273C.1
tggaacctttgggctgatttatgtgcttgcatggtcgtgagtagatgatagaacgccacctatataatcaatcaacaaagctccttgcagttttttaaaatcgaagagtattactcctctcgtctctccctctccccgagttcctattattctacattcattcctcattactgccgaccctttctctgactacgaatgcaatttctccgtaaacggcagtttacaccacacctcgctatataccatacttccc

SEQ ID NO: 107705 - DNA, 249 bp, Glycine max
  Clone ID: PAT_MRT3847_68274C.1
gtttgaacacaaaaacctttggctagtttgagcgcggggcataaacaggatcacagatcagcttgctactacaatcatatgaattaacacacttgaagtgctagctggagcaaacagcatccataagctgctgatgctgtcgaaatgcactgctctccctgcggaatagaagaaagagaggatgtcacttgacaacaatgcatgtgcggactacccttcgcccaggcattttatggaaaatataaccgg

SEQ ID NO: 107706 - DNA, 421 bp, Glycine max
  Clone ID: PAT_MRT3847_68275C.1
aatgggaaaaagaggagatggaaataatgggaatcgctcccagtataattctgcgattcttgaccactgaattacataaattaaatcaccgttcttttacaattgcaaagaaaaccctaagggaaatttggcttgggctaaaaaatcatatgggtggaaggggcaatgaaaaaatggaactaaaattcctaccaccctctaaaacaatcaatcttgaatgccccaaacaataattaaaatcaatttgatctaccaacccccatgtttcccggggggggcaaagagattgagagaagagaccgattttgatggctgcataaaccttgttcctaattataaaatttcttgggttgaggccattgggccaaacttctggacaaaaaactgagaaatgaccctctagtgggaaaccttttctttc

SEQ ID NO: 107707 - DNA, 447 bp, Glycine max
  Clone ID: PAT_MRT3847_68276C.1
cttggaatttcgcttgaggctggttattaacttcaaacctggcttttccttaattaccttcttgggattaaaacattagacaaaaccttgctttccttaactggcaaacaacttttcttcttctaattcttctattaaaacaactctaaagccaaacctaaaccctctgctgggggctgttgcaactttaaggccttgttctctaccctggaaaagaaaaacttgctttactaccaaagcctttctttattccaccaaagaagatgtctggaagcttttcagcgagcgaaaagctctcaagattatctaaggcctgcagaatttcattaaagacattgtggcctgggtggtcactgttgctgacaaggggggagcaactcacgtggttttagcctgtgacccggagttgggaaagctggcctttgcttaactccttggccgggtggg

SEQ ID NO: 107708 - DNA, 347 bp, Glycine max
  unsure (1)..(347): unsure at all n locations
  Clone ID: PAT_MRT3847_68277C.1
naatagacncnccncnnnnagcnnncnacacgantcgnnnntcnctncantccnngactacaggcagctccnancnacnactcaanntannatcancnnnanancacttnccnccnanaancccnangnannnncatanaanagactcanggncnacagcnccananncnccnntnancnnnncaccannnantaanntnccaannnnancaaattnncaacannttacagtcnancnctnacanacgncatntntccccatatnngtccagnncnnaanntggncatacanngaaactngnnncncctnacttaggncnnnnnaggncatanncnnntcnannant

SEQ ID NO: 107709 - DNA, 244 bp, Glycine max
  Clone ID: PAT_MRT3847_68278C.1
cttttaggccatctggttctgacttcccaagttcactacatatgtgacatcagtctccggggggttgctttagttgctgtctgaggttgtagctggtgatgtgctctgcatctattccaatccctatgtcctctcgctcctcagcgagttctggtggcaactacatgtttcaactgtcggatgcctggatccctttctcaaaactcatgcttggacgaggtcctctgcgctcccaggagatggg

SEQ ID NO: 107710 - DNA, 276 bp, Glycine max
  Clone ID: PAT_MRT3847_68279C.1
cttcagcaccatgaccctcaacctggtcctcctaatggccatggacgccaccaacatcctctccctctaccacctctcctccaccctccaatcccccaaatcccccaaaccacacccaccagtccacgaccaactcctccacagctccacaccatacgcgccaccatcagtcacctcactcgcctccagaacacccacaacccagcacaaaaatccaccatcccctcagatctactcttatactcccacctctccccaatagcctcttcttgccac

SEQ ID NO: 107711 - DNA, 1204 bp, Glycine max
  Clone ID: PAT_MRT3847_6827C.1
ggtaggaaaacatggtaagttcgcagatgttaagaatgtgcgagtgacatgcacacacacatgttctttgtttgattgaggcttctgaacagtttctgacaccgaaattcagccacaaagttgaccatcttgggatggatgagaatatcatcatgttccaccattgttccccatttccccacattgatacaacaaggagattccaacaattgaaaactccttatcatctttctcttgcaacatcgtttcgcggttcctttgccgtgatttcaattgttgcataagaaaacatcactcactacttctttcctctcctttttcattcaatttctctgattgacacaattgccgcccatttctgtgattgacccaattgagaaaaaaaccttaaaagttccgggttttttttttctttaattgttgctggttttgcaggtggcccagttgggtgcattggactggttacagatgacacgattggaaacttgaaatactacccgagtgagatacttcgatttaactccctctgttgatggctgaaactcaattgaagtgattcactggactactttatcatcttggtctgaggttgaagctatttaatttctgaatttccgtgagtttcttaatccctgagtatggccgggagccaagatcagttagagatcaagtttcggttgagtgatggtacggatattggccccaaaagttattctgctgctactagtattgtaacactaaaagaaagtgttcttgctcaatggccaaaagataaggagtatggaccaagaactgtaaaagatttgaagttaattagtgctggaaaagtattggagaacaacaaaacagtgggagactgtcagagtccattgtgtgatctacctggtggagttacaacaatgcatgtggttgtgcaaccaccttctgtggaggaagatatgaaagtagcaagcgaagcaaagcagagcaaatgtgtttgtgtgatattatagtgtccagattgaatagaaggtgtcatctatttaggtggttaaaagttacacttgtattcattttaaaagtaatctatggctttcaaaagatttcctcatacacaaactgtttcgttgcatgcctcattgtctaattgatgtaaatgctgattgaaatgagaactctaaaattattctcgtgcttcagctagatgcaaagtgcacctagagtt

SEQ ID NO: 107712 - DNA, 468 bp, Glycine max
  Clone ID: PAT_MRT3847_68280C.1
ggcccgagacggctgcgagaagacgacagaagggcattcaaatgacaacatttttttgattatcaatcggattcggaaaagtaatccaatcacactcgcagcagaaaatcgaaagaaaatgcaagtattctatggagtattgttgcaatattttgctgttttggcaaataaggaacctcttaatgttgagctactcaatatgctggtgaaaccgttgatagagatgagtatggaaatcccatactttgctgcaatatgtgctcgtcgcagaatataaactactagaaaacaattcattgagagtatcaaacaatcagaaagtagcagttggccttcttcaaaaacgttgtgcctcttgcgtttgtggtccatgatatttccatgctctgactttaggcatccagttatgactcctgtgatattgttgatgtgtgaatatctgatgcgttgccctatagtatctggtcg

SEQ ID NO: 107713 - DNA, 487 bp, Glycine max
  Clone ID: PAT_MRT3847_68281C.1
gaaagtcgtcaaatgcgccagaaaaggattattctttgaaaggtgatacaacaaatcgcttatttggaatctttaatgccattcccatcattgccacaacttatggtagcggaataattccagaaattcaggtttgaaatagccagatgagttccctatgccatgccagagtatttgtttcaattactaagaaaatccacatgattacactttctttggatacaggcaacgttagcacccccagtaaaagggaagatgcttagaagtctatgtgcttgttatgttgtagttctcttcagcttcttttgtgtagccatttctggctattgggcatttggaaatcaagctgaaggcctcatttttagcagctttgtagatagtaacaagcctttggctcctaagtggcttatttatatgcccaacatttgcacaatagcccaactaatagctaatggtgcggtgagtaactaactaatgattgtttata

SEQ ID NO: 107714 - DNA, 1520 bp, Glycine max
  Clone ID: PAT_MRT3847_68282C.1
cccttcaatttattcatctctgacaccctcttaattctgcttccagatcttctccatgatcggttcctatcacctgattgattttaactatgtctctccaaactcaaatacctttatgtttttcttttcagtttattcgtctgatgagaaccttttaaagtctgcctccaggttcctccagaatgatgggtatgatcactcgtctctcacgcaatcaagtccatatcctaatactcatcatctacttctttcataataaataatagataagaatccactcacttgcacaacattttgcctttcagccaaggcaagttgctatatggttccaaaaccgaaggacaaggttcaagaccaagcagctagaaaaagactatggcgtgttgaaagctagttatgacagactcaaaagcgactatgaaagttttgggcaagagattgagatgcaaaatccacgggtgatgatgattacgattattcaaccaaaaaacaagcaaggcgcctattttggatttattaatttcaaaaaatgcaacaacattctagaaaatggaatcgaaagtgtcaacacttattatttatcctattaatgtaacatggaagcgagtggcagacaattcttcctaaagagaggtgcatgattcggagagcaaacattgcattaaagatggggagaagcaggagcattcggatgaaaagtcatctcctgatgatgctgtcaattcctcttcaccccacaacaacaaggagccaatggatttattaattatttcaaaaaatgcaacaacaacaacaacatctgaaaatgggaccaaagtgttgtcaccactcccactccctattatggtaacatgctgcaagcaagaagatgccaactcagccaaaagtgatgtccttgattcggatagcccacattgcacttcattcgtggagcctgctgattcctctcatgcctttgaaccagaagaccactcagaagacttctcccaagatgaagaggataaccttagtgaaaaccttttgatgaccttcccttcttcttgttgcttacctaaggttgaagaacactgctatgacggccctcctgaaaactcttgtaattttggcttccaggttgaggatcaaaccttctgtttctggccctattgaaccaaaccaaccaaccaaccgctagcaatgttttaaaaaactttgcagttgtaaccatgtactagaaagcaataaaaatggtattgttacttctactattcgttgagcctgctgattcctctcatgcctttgaaccggaagaccactcagaagacttctcccaagatgaagaggataaccttagtgaaaaccttttgatgaccttcccttcttcttgttgcttacctaaggttgaagaacactgctatgacggccctcctgaaaactcttgtaattttggcttccaggttgaggatcaaaccttctgtttctggccctattgaaccaaaccaaccaaccaaccgctagcaatgtttaaaaaactttgcagt

SEQ ID NO: 107715 - DNA, 803 bp, Glycine max
  Clone ID: PAT_MRT3847_68283C.1
taaaaacacttcccatgcgtccgacctaatctaacccttatcaaggagtttaacacagtttgtttggcattgtatacgagttgttgtaattattcttgtacttgagtttaattccggcgaataaaaaaacctaatctaacccttcgctctgctctcgcttcaactattcacaccaagatggaagctgtttgtcttcactgtggcgacagaggctttccagaaacattggttttttgcagccagtgtaaggcttatgcgctgcataggtactgtttaaaggggcctgtgatttttactgatgctgttacatggttttgtgaggattgtgcaacaaagctatgggtgccacctgctcttgaccaatctacacctatctcatctgtaacaagaaaaaattgcgtactgggagtgaagaaacacaataaacagcaaaaaaagaaggttaaaaagaagcagaaggaaggaaaagctaactctgtcttagttgctgaaacaaaggttgtattatctggtagtcacagttcacctgggcctgagcatcctcaatgtagcaacagaggtgaagaatatgaggtgaaaaatgactgtggaccagctccaagggatgtagctaattttgttgctggtgaagaagaaagtgtggccagggatatagctaattctgatgaaggtttcaaatctgttccagtttctcaaggagctaacaatagtgattcaggttgggtagaataggatggtatgtttatgcacagcctactattaatccaatctggaggggaagtatggatttctgccatgaaact

SEQ ID NO: 107716 - DNA, 1692 bp, Glycine max
  Clone ID: PAT_MRT3847_68284C.1
tacggctgcgagaagacgacagaagggggaagaatctctctttatttctttcactctctcagaaccaaaattttgaaactcctcaactctcatagggtcaaccttctctctctccaaactctcgcacctttctgctctgcccttcaatttattcacctctgacaccctcttaattctgcttccagttcctctgagtggttcaaaatccgtggttgattttgagaatgttaatgggagcagggtgacggataggcccttttttcaagcgttggagaaagaagagaactgtgatgaggattacgaggggtgtttccatcaaccggtgaagaaaaggaggctcacaagcgaacaagttcagttccttgaaaggaactttgaggcccacgacaagctcgaacccgaaaggaaggtccaacttgcaaaagagcttggcttgcagccaaggcaagttgctatatggttccaaaaccgaagggcaaggttcaagaccaagcagctagaaaaagactatggcgtgttgaaagctagttatgataggctcaaaagtgactatgaaagtcttgttcaagagaatgacaagttaaaagcagaggtgaattctctggagagcaaattgattcttagagataaagagaaggaggagaattcggatgacaagtcatctcctgatgatgctgtcaattcttcaccccacaacaacaaggagcctattatggatttattaatttcaaaaaatgcaacaacatctgaaaatggaaccgaagtgtcaacactcccactccctattatggtaacatgcaagcaagaagatgccaattcagccaaaagtgatgtgcttgattcggatagcccacattgcactgattatgggaaccacccttcctcattcgtggagcctgctgattcctctcatgcctttgaaccagaagaccactcagaagacttctcacaagatgaagaggataaccttagtgaaaactttttgaccctcccttcttcttgttgcttacctaaggttgaagaaccctgctatgatgaccctccagaaaactcttgtaattttggcttccatgttgaggatcaaaccttctgtttctggccctactgaaccaaccaaccaaccaaccgcttccaatgttataaaaacttcgcagttgtaaccatgtactagaaatcaataaaaatggtattgttacttctactaaggaataaaaatcagaaggctaatgcaatgcatcatgctatcatcactggtggtgttaatagttagcagtgaaagtgtaacacaatgttactactagctaaaattcaaaaacttggttcaggtgtgcgcgtaggtatcccaaaatttcaggtggggtacagcaaccaatcgttgttttactttcggatgtggaaaatggaaaccctgttttctctttctctctgcactcctctggatcacaccgttgttttactcatgtattaggaagaccctttcatcatgattcacctgtcctcactgctcagcataaagttacagttttatatgcgtcccagtaatcattagagtcatcatagcaaccagagtttgagtagattaaataagatctcacattcaaattttcctgttgttattggacactgagaaaaacttgtgtctaagttgatgatgattatgtaagaaatatttggcatattttaatgaaattg

SEQ ID NO: 107717 - DNA, 1594 bp, Glycine max
  Clone ID: PAT_MRT3847_68285C.1
ttaagagggaatctctctctttatttctttcactctctcagaaccaaaattttccaaactcctcaactctcatcagatatcaaccatctctctctctccaaactcaaatacctttctgttctgctcttcaatttattcatctctgacaccctcttaattctgcttccagttcctctgagtgatgggtatgatctctcctcactcccacaattcccacattatagtaatcctcatcacctgcttctttcgtcataaattctagatcaaactccactccctgatcctcccttttacttcttatgtagcatgtatgaactcaaatcatcaaatgaatatgaccctttaatctaagaagaagaaaaaaacacacacatacacacacacactttaaagtccaaagtctaaaccaacccaccaaaagtcttgttcccatggcgagtggcaagctttatgcgggttcaaacatgtcacttctcctccaaaacgaaaggctcccttgctcctctgaagtccttgagtctctttgggctcagacctctaaccctgcttccttccaaggttcaaaacccgtggttgattttgagaatgtaagtgggagcaggatgacggataggcctttctttcaagcgttggagaaggaagagaactgtgatgaggattacgaggggtgtttccaccaaccggggaagaaaaggaggctcacaagcgaacaagttcagttccttgaaaggaactttgaggtagagaacaagcttgaacccgaaaggaaagtccaacttgcaaaagagcttggcttgcagccaaggcaagttgctatatggttccaaaaccgaagggcaaggttcaagaccaagcagctagaaaaagactatggcgtgttgaaagctagttatgacagactcaaaagtgactatgaaagtcttgttcaagagaatgacaagttaaaagcagaggtgaattctctggagagcaaattgattcttagagataaagagaaggaggagaattcggatgacaagtcatctcctgatgatgctgtcaattcttcttcaccccacaacaacaaggagcctatggatttattaattatttcaaaaaatgcaacaacaacaacaacatctgaaaatgggaccaaagtgttgtcaccactcccactccctattatggtaacatgctgcaagcaagaagatgccaactcagccaaaagtgatgtccttgattcggatagcccacattgcacttcattcgtggagcctgctgattcctctcatgcctttgaaccagaagaccactcagaagacttctcccaagatgaagaggataaccttagtgaaaaccttttgatgaccttcccttcttcttgttgcttacctaaggttgaagaacactgctatgacggccctcctgaaaactcttgtaattttggcttccaggttgaggatcaaaccttctgtttctggccctattgaaccaaaccaaccaaccaaccgctagcaatgttttaaaaaactttgcagttgtaaccatgtactagaaagcaataaaaatggtattgttacttctaaaaaaaaaaaaaaaaaaaaaaaaaaaaaaa

SEQ ID NO: 107718 - DNA, 479 bp, Glycine max
  unsure (1)..(479): unsure at all n locations
  Clone ID: PAT_MRT3847_68286C.1
ggctcgtgcaagcaagaagtttccataatagggagtgggagtgttgacacttcggttccctattatggtaacatgcaagcaagaagatgccaattcagccaaaagtgatgtgcttgattcggatagcccacattgcactgattatgggaaccacccttcctcattcgtggagcctgctgattcctctcatgcctttgaaccagaagaccactcagaagacttctcacaagatgaagaggataaccttagtgaaaactttttgaccctcccttcttcttgttgcttacctaaggttgaagaaccctgctatgatgaccctncagaaaactcttgtaattttggcttccatgttgaggatcaaaccttctgtttttggccttactgaaccaaccaaccaaccaaccgcttccaatgttataaaaacttcgcagttgtaaccatgtactagaaataattaaaaagggattggtacctcacct

SEQ ID NO: 107719 - DNA, 290 bp, Glycine max
  Clone ID: PAT_MRT3847_68287C.1
aattaccacaattgatcacctcaaagaacttcattatttctcaaggtgtacttgtttagattaagcttttatagtttagagaatgttatacttaaactaccgaataatttttggtgtaaaaatccaaacattcagggccagtcttgtattattcttagccaccaaaataaaccctaaatagttattgatcgcattcaatatggaaattcctgaaaattacgattattttcccaatataaaagaaaaacggtaaggggcgaagaataaaaaacattaaatagggcggccgc

SEQ ID NO: 107720 - DNA, 670 bp, Glycine max
  Clone ID: PAT_MRT3847_68288C.1
ttctttttttttttttttttttttttttttttttttttttttttttttttttttttttttttttttttttaagggaaaaaaaaacaaccccttcaaaaacatcaaatggaaggggaagcccaaggcccccaaaaccccccggaaaaagggggatagggggggggaaaaaaaattttgttttttaggccaaacaaagcttaaaggaaaccaatccccacttaaaagggggggcaaaggaatcccatccttaaaacaaaaaaacccccgggggggggaagcaggggaaaaatctgggccccggcccccatttccaacgggaaaaaaaagaaattcagggcaacccaaaaaggggggattataagaaaaaagaaccccggggaaattccggaaaagggggaaaaaacccaaaccccatcggggggcggcccaactgggggggggggcccaaaaaacaaaaaagcagggggggggaaacccaccggcgggggggcaaaggaagcattcaaaagcttcttaaaaggggggcttccctgggccccgaaaaaaacttttttcccatcctacaacatccgaatcacaaattagcaaaatacccagggtaacctcaggatttcgggatatccagaaaactataacaaattcaaaatttacgaggccaaagggtattttt

SEQ ID NO: 107721 - DNA, 324 bp, Glycine max
  Clone ID: PAT_MRT3847_68289C.1
tacggctgcgaaaaaccaccaaaaggttccgcctccaaaaaaccaccaaaaggttccgcctccaaaaaaccaacaaaaggttccgcctccaaaaaaccaacaaaaggttccgcctccaaaaaaccaccaaaaggttccgcctccaaaaaaccaacaaaaggttccgcctccaaaaaaccaacaaaaggttacgcctccaaaaaaccaacaaaaggttccgcttccaaaaaaccaactaaaggttacgcctgaaaaaaccacccaaagggaaatttctccaaccaaaaaaaaaacaccacaaaaaaaaaaaaaaaccgccgctct

SEQ ID NO: 107722 - DNA, 271 bp, Glycine max
  Clone ID: PAT_MRT3847_6828C.1
cttagtaaatgaaaatgttagcagtcaatcagattatttaaagtttgtctgtgattcaactttacggacaagagagagtgaaattgaaaatttgcaatctagtgatgatgttgcaaaacctgctaatccaaatagtagtacagtgaaaaatgaggagtttgtaccatatgttgctgagaatcaaattgatgataatgatagttcatcagggggccaacagggtttgccatctgaagatttgggtattgtgaagcctgagcctcagttggca

SEQ ID NO: 107723 - DNA, 1491 bp, Glycine max
  Clone ID: PAT_MRT3847_68290C.1
ctattttttatttattattaattaatggcagtgacaaactgaagcatttgtcgtcaaagaagcaaaacgagatagcaagtttggagaaagagatagagtcactgatctgggagttggtggaggaacgcaagagggagtgctcagggacatcctcatcagagaaggatttgatgcagttgctgttggaagcagcaatgactgatcagagtctggggaaggacttctccaagcgtttcattgtggataactgcaaaaacatttactttgctggccatgaaaccacagctgttgcagcctcttggtgtctgatgcttcttgctttgcaccctgaatggcagacccgtataaggactgaggtggctgaactttgccccaatggtgtaccagatgcagattctgtccctctgttgaaaactcgagccgctcgagccgaatcggctcgaggcaaaatgagatagcaggtttggagaaagagatagagtcactgatatgggagttggtggaggaacgcaagagggagtgctcagagacatcctcatcagagaaggatttgatgcagttgcttttggaagcagcaatgactgatcagagtctggggaaggacttctccaagcgattcattgtggataactgcaaaaacatttactttgctggccatgaaaccactgctgttgcagcctcatggtgtttgatgcttcttgctttgcaccccgaatggcaaactcgtataaggactgaggtggctgaactttgccccaatggcgtaccagatgcagattctgtccctctgttgaaaacggtggcaatggtgattaaagaagtgctacgtttatacccaccagcagcctttgtttcaagggaggcatacgaagatatccaaattggaaacctcaatgttcccaaaggcgtttgtttatggactctgatcccaacactgcacagagatcctgatatttggggaccagatgcaaatgagtttaaaccagaaaggttcagtggaggtgtctccaaggcttgcaagtttccacatgcttatgtgccatttggattgggtactcgcttgtgcttgggaaagaactttgcaatggttcaattgaaggttgtgctagcacttatcatctccaagtttagcttctctttgtctcctagttataggcattctccggcatatagaatgattgtagaaccgggacatggtgtacatattctcattcaggagatttgatcggctcatagctaatgacacaaataattcaactttttttttcattaacgtgcaagcatttagtttttcttatgacacaaagatttttgcatatgtttgtatgtgtattgtagacataaaactattgtttaggtttataaaattataattcttttatagctagtaatctagtatatatcactgtttgatcacacacatatatatatatatatatcaagtgtcaagtggtgtccaacctattagagtacaagtgtgagataaagtct

SEQ ID NO: 107724 - DNA, 279 bp, Glycine max
  unsure (1)..(279): unsure at all n locations
  Clone ID: PAT_MRT3847_68291C.1
ntcgcatgcagcgtacgtaagctcggaattcggctcgagcngcctttngcattgnaagcnctctcttnctttnctttnncttncnccttnnnnnttnnncnaanncngcaactatncatggnaancngctggcncanacncgaggngtatccactgttcncnncggttngtgcngctgttgggatctgtggacaccaattngttngtaatatctgcatcaaccctgaagtcagngtgaacaaggcgggaagaaangcatgantgtnggagnatttgctg

SEQ ID NO: 107725 - DNA, 263 bp, Glycine max
  unsure (1)..(263): unsure at all n locations
  Clone ID: PAT_MRT3847_68292C.1
gttctcgaggcactcctcctgcgaaacgacgtcgtttttctccccaacttcctcactttcancattcntctgcttttccacctcattngccaccaccttcgccggagcaaactcttttcgcttgcctccggcacccaccttacttcctggcacangccggcgacctcgacctccgacnagaaccctcgccggcgtccccccggancgaggcggggcccacattgcgnttccgattcgncgacgtaccggagtcctaatttcct

SEQ ID NO: 107726 - DNA, 2735 bp, Glycine max
  Clone ID: PAT_MRT3847_68293C.1
ttcttatctcgtgctttatccgtccattctctctctcaatctcatttctctgtctctgcttcctcttcttcgatctcaccctgaattccctggacaatcatcatggctgacaaaggaggaaaatcatgtcccatatgcactgaggagatggacctgactgatcagcagctgaagccatgcaaatgtggttatgagatttgtgtctggtgttggcatcacataatggaaatggcacagaaggatgaaactgagagccgttgtcctgcctgtcgttcaccttatgacaaagaacgtattgtgacaatggcagcaaactgtcaaagattggtagctgaaatgaattcacagcataaaaagaaaatgcagaaattgaatttgaagcctaaatcagtggatggaaggaaacatcttagtgatgttagagtcattcaacgtaacctagtgtacataattgggctgcctctaaaccttgcagatgaagaactacttcagcgcagggaatactttggcaggtatggaaaggttatgaaagtgtcaatatctcgaacagcaaatggcataatccaacattctgcaaacagcagctgttgtgtgtatataacatactctaaagaatctgaagcagttcaatgtattcaatcagtgcattgttttgtattagaaggtagacccttgagggcttgttttggaaccacaaagtattgccatgcatggttgagaaatgtgccttgcagcaatagagattgtttatatctacatgatcatggttctcacgaggatagctttaccaaagatgaactagttttagcatttgctaggagtagagtccaacaaatcattggtgctacaaataatttgcatcggcgttcagggaatgttttacctccaccagtagataatcctaaacatatgtcatcagccaccaaactagtgtcccaaagtcctttagataaatgtgagaaccagattaaaggatttgcttcaggtattggggctgtcacttcaactgtgcttcctgctgtgacctcttgggttaggtgtgtgtctggcaatcttccacatgatacaagttcatcatgttctggtaatctggcaaatagaaagattgaggcatctaatgatccacaagcccttgtgtccggagttgcttccactgaaaggtctattaatataagaaaatcaggggaagctgaaaatagctctgatgtgtgttccaatggtgccttcgtaccttcagagacgaacaaccataatagtggtggaaattctaaaacatcttttatggacaatgatcaagatactgtagcaccttctgtgagcacaggcttcctggagctctccaggcaacatgatttcaatattgatactgcagttggcattaattcaaatggggatgttcatggcttatgttcagggttatcatctattagcattaatattcatctagaagattcatatttaactcctgattcagacggattaccttttactcgtaactcaatcgattcctctctagggcagcatttacagcaagataatgagtattcaacagaacattcatccacaccagcattttgggaagatatcattgtggatgacgtactaaacatagactctaaacaacaaaaattcagcaaaggcatcaattattcgtcatcatctgggctccattctagttgtctaactcagaatgtaaaccactcaagccatcaaccatttcagcaagatcaaatttgtcaccagaatcatttcagaaaaccttctactgagtcttttaatgaacacttggagacaggacatgttaaatatggggagagtaaagataatggtgcaggtgttgatagtatggttgcttcagacatgggagagaacaacattatatctgatattttgtctttagaattagatgcatgggaaggttcattagttaatttgttgggtgagagtgatgaactgtacagaccctttaaagcacctattttgcggaaagtccaagacaaaaatcagtcaaggttttcctttgcaagacaggatgatttcatgaatggggcatctaatttgctgcaatcatttgcggttactggacgggatcctgaagggaacttttcatcaggtgctttaatgggaaacaaagatacactcactggaaaatacccacatgtcttcccatctggcaattctgtaccatcagataaacttgttggaagtcagtctttggtgccatctaatttttcctgtgagtgctgattaatgacatgattaagtgctcctttttgtgagtgtgggggatagaggtccatttctttcaggtttttgttgttatcatgattggttatacttatctgagtctgtatacacaattcttgccgatatatttcgtgtttggtgttctaatttctatttctctggtttggcattcttatttactgtgatattctgtttgttctattagtattacttggttgttccatctggcttggcctcagaggattttatgttgggtcacaattagtttatgccatcaaactgcagaaattgacaagagccaagatgataagcgttaatgaatggggaattcctgcttagagtggtgaaagagcccatagatttgatgttttcttcgtccccgaaacagtttgtcctgattttgttactaagtcgaacttggaattatacactggtaatgtacttcatttatgtgtgtgaatatatataaatatagattttaatttctt

SEQ ID NO: 107727 - DNA, 137 bp, Glycine max
  Clone ID: PAT_MRT3847_68294C.1
ggaaatgggcttgcctgcaaaggcaaaggtgaagacacaacatggggatgcccctttgggtggttgcgctcacactgagaaagggaacctgagaatgttcccttggaaaaccttctaacatacccatgtgttagaga

SEQ ID NO: 107728 - DNA, 2747 bp, Glycine max
  Clone ID: PAT_MRT3847_68295C.1
acgggatagctttaccaaagatgaactagttttagcatttgccaggagtagagtccaacaaatcattggtgctacaaataatttgcatcggcgttcagggaatgttttacctccaccagtagatgatcctaaacatatgtcatcagccaccaaattagtgtccaaaagtcctttagataaatgtgagaaccagattaaaggatttgcttcaggtattggggctgccaattcaactgtgcttcctgcgatgtcctcttgggttaggtgtgtatccggcaatcttccacaggatacaatttcatcgtgttctggtaatctggcaaatagaaaggttgaggcatctaatgatccgcaagcccttgtatcaggagttgcttgcactgaaaggtctattagtacaagatcaggggaagctgaaaatagctctgacgtttgttccaatggtgccttcgtaccttcagagacgaacaaccataatatcggtggaaattctaaaacatcttttatgggcaatgatcaagatactgcagcaccttctgtgaacacaggcttcctggagctctccagacaacatgatttcaatattgacactgcagttggcattaattcaaatggggatgtgcatggcttatgtttagggttatcatctattagcattaatgatcatctagaagattcatacttcactcctgattcagacagattaccttttactcttaactcaatcaattcctctctagggcagcatttgcagcaagataatgagtattcaacagaacagtcatccacaccagcattttgggaagatatcattgtggatgacatactaaacatagactctgaacaacaaaaattcagcaaagacatcaattgtttgtcatcatctgggctccattctacttgtctacctcagaatgtaaaccaatcaagccatcaaccatttaagcaagatcaaatttgtagccagaatcatttcagaaaaccttctactgagtcttttaatgaactcttggagacaggacatgttaagcatgtggagagtaaagataatggtacaggtgttgataatatggttgcttcagacatgggagagaacaatattatatctgatattttgtctttggaattagatgcatgggaaggttcattagttaatttgttgggtgagagggatgaactgtacagaccctttaaagcagctactttgcggaaagtccaagacaaaaatcagtcaaggttttcctttgccttgcaaaggaaaaccttgactgaggcatctaatttgcagcaaccatttgcggttactgggcatggtcctgaagggaacttttcatcaggtggtttaataggaaacaaagatacagtcactggaaaatacccacatgtcttcccatctggcaattctgtatcatcagataaatttgttggaagtcagtcttttgtgccatctaatttttccatgtcaaaagctcactcatcagggccgccaggattttcattgtccagcagaatacctccagggttttcgtgtgggagagtagaacaggatagtaatacttctgtgaaacatttgcagcagcagtatgtttcttcaactggaaatattggcagcatgggagatgaatttaacaatcttgcagtattgaactttggtaagggcatgttggctgaaaggctgaataatgcttcttttgacatgaggcaaacttcgcttccacagtttattcctggtgaagatgatcctagacttaagctgttaatgcaacaatccacacctacccagaatttaagatttccagatcatgttggaaataggtttctcccccaaaatgattcttatagaatttcctcaaggtttcttgatcaatttccgcctaacagtccatcaatttacgaacaattacattctcaacagttcagtagtaatactcttccatcaaataaccagtggggtggttggaatgatgccaagaatttcagtgacctgtccatatcagaagtattgaataatgagagagtgggatttagtaatttcatgcctaattatgagaatatcaagttttaaccacctgcagtcactgatctactactagatcagtgatggtggcagttttgtctgatctactagattagtgatggtggcagttttgtctcaactgaaattcctcgtcaatgcactatgagcctcagatgacagtcgatgtgaaccaaaccttgtctaaaaaatcggagattccttgatttgtctgaaattatgttctagtaatgtcatgtaagggtatcttgagacccgtttcaaatcagtttagaatttgaatactctgaattccatacacaattctgctatcaaatggccagtagtatcaaccaccctgtgcttagcttcattgccaagctctagaatctgtggtttccctcgttatggtaggcggacattactggcaaacggtgtcaatttttctctgggttacacatctggcttggcctcggaggattttatgttgggtcacaattagtttatgccatcaaactgcagaaattgacagagctaagatgataagcgttaatgaatggggaaattcctgcttagaatggtgaaagagcccatagatttgatgttttcatcatgcctgaaacagtttgtcctgaatttgttaccaatgtcgaacttggaattatacactggtaatgtacttaatgtatatgtgtgaatatatataaatatagattttaatttcttaacacac

SEQ ID NO: 107729 - DNA, 273 bp, Glycine max
  Clone ID: PAT_MRT3847_68296C.1
gggcaagagagaggttgggaaagactgcaatatattctctcatgcaaaagaaagcaccaaaaaaagtaagggagaatttaattccttcccacccttcaacaaaaactggcatgagggggagcaacctttagaagagacaacattttcttttccacttctatttaattattactactttaaattcatctcttatatagctcaacctatatctcagtcttccccggtccatcttgttcggtttctgttccatttcttttttatagcagcataaga

SEQ ID NO: 107730 - DNA, 570 bp, Glycine max
  Clone ID: PAT_MRT3847_68297C.1
cttatttcagcttatggttggtctctgttctctcaatttattgactaattttatttggtaaaaaaaacttacatatgaaaccacattcacaataacatatttttacatgaaagcaattttaggttgacagatattttaatccagaaaatatgaataagaaaacctgtgcaactagctgaagaaaaagatataagtagacaatctaaagagaactgataaagaaatataggagaagagagaaaaggaagataagaaatatggggatattgccaaatttgtatccaacaatcaataacataatgagaagaagtaatttataagacctatgaataaaaaaaattgagacacttcaagtcatcagttcaactgtgaaatgatccaacgaaccatattggaagccaaaatcaaacgatatccttaattccttataaaaatattaaaacaagtcactggttattgaaagccctattaattagaatctatgtgcctagaaactgaaatcatttgaacctgttcccactacttcaatgccttcttttatttggatcctcctttattatgtgtagtact

SEQ ID NO: 107731 - DNA, 855 bp, Glycine max
  Clone ID: PAT_MRT3847_68298C.1
atggataatgaagagggagtgcaagaacagatgaaggccaacctatcggccttaaaagatcaaatggcttctatcacggaggccatgctaaagcttcagaaaactatagaagataatgccacggtggccgcctccaatacagctagggaagcggaaccggtgctacagcccgcaataaacttgggccgagacaaaaacatgacggtcttcagtcggagatatagtcctcaagcttacccttatggtttgcctccggacttcactccccgaaccgctccgaacgatttgagccaagcccctaccttcgagggacaactccctccttatgccgactatcccctgcaagaagatgatgaaggagatgcccatctaggcactctacttcccctcaaggatccggccccccatgaattgtcccaaccaaacatagtccgccatgtcccgtctccacccgcacccgttaaagagtttgatccctttgcaaaagataagggaaagattgatttatttgaagagaggctgagagcggtagaaggcctcgacaactacccgttctcggatttagcagatctgtgtctggtacctgacatcgtcatcgctcccaagtttaaagtaccagatttagataaatacaaagggacgacatgtccaaaaagtcatctttggatgtattgccgaaggatgggagcatatttgacggacgaaaagctgttaatgcatttctttcaagacagcttagccggagcagcagtggcatggtataccaatctggaagcttctcagatccggtcatggaaagacttggcaactgccttcattaggcagtaccaatacaacacggatatggctccctga

SEQ ID NO: 107732 - DNA, 599 bp, Glycine max
  Clone ID: PAT_MRT3847_68299C.1
cccacgcgtccgtccaggcgtgcgaacaggtgagaggaggaccacagaagggcgctagcgatgtagatttctgacaaaaaatggacagctagcacagggccaagctggattgacatacacctctaacattaagatgaaaggctctttgggaagcgaccagacaggcttgtgaggggggcaccctatacttcctcataaagcactaaacgaggcggctatcatacagaacatgttgtgggttgacaacagcgccaaaactggttttcttgctctcccataatgaggacatttacaacatcgttctgagccatctcgagcataaccaaatgtggtgctccgtggtatgtcagggtcatagaagagtaagactgtaacagatgattgccaaaatacaaacactgatgtaattgacttaccgtactaatggatcaggctgtatcatatatgagacatatgtactagacttgaacagataagcagctgagggcactgaatgccatgagtcttggaacgccaatacaaagtccactgtgtgggttgatgattctttcactgacgggggttctatgttgagcctatctggcaggagggacatctat

SEQ ID NO: 107733 - DNA, 167 bp, Glycine max
  Clone ID: PAT_MRT3847_6829C.1
ctgacgcgtgcgccgtacccgtctgcaatgcctggttattcggtcggacctgtcgcgcgacggcgaggaagataacgataacaagatcgagacgacggtcgagccggcgaacgcgccgcaccacctgcggcagcagaagcggacggatgcggcggcgcaggtgccga

SEQ ID NO: 107734 - DNA, 771 bp, Glycine max
  unsure (1)..(771): unsure at all n locations
  Clone ID: PAT_MRT3847_682C.1
ggacatactcttatcctgagattatgataaaaatgcattaacttcacattgaaaatgaataaggtgtgacgcctagagtctattcatttatgtgttttcacttcatcatatgcagctaccttagtttgtaataaaagctccatataggcgatgcagttctgtccaataatattagaaaatatggaattaacgcctgccctttaacattgattttaataaaaatcgatattaatataaagtgtcatgataatattaattttaaaataaccaatgctataagtataaagttaacattgatcatcttaaaattctcgagccgctcgagccgttaagattgattactgtgtctatcacgttaacatccattttttaaaaatcaaggttgtggatgtcatgtttctaatatccattttgcattccctcgaatctcggaacccctcacgtttctaatatccgttctgcaacttcccaaatgttgcaacgtcgtcgctgtcgtcattgtggccaccgcgtctgccattcactgcttccctctctgcaacggcgcttcgcagtctcataggtgaccaagcttagtacgtgaccaagcttgcctgagttagctccgctgcaaggatttacatgtgaccaagctccgctgcctttgtttggtgctgcttgcctgttcgattaaatgccccattgatcctttggtcacagaatagcttgccacatatagattctgatatgctgatatgaccagagctcatggaccaaacgtnctgtagaagt

SEQ ID NO: 107735 - DNA, 249 bp, Glycine max
  Clone ID: PAT_MRT3847_68300C.1
aatgaaaattccccttccaataaagggccccccggaaaggatcccccaggggcccatacccacggggcccgggactccacacccaacaaacgaaacgtaaaaaaggggccctaaccccttgttccctttacccaacccaaatcacggcaccccccaaaaggacaaaccctaaaggccaaaagcccagagggccccccaaaaaagggtcccaaaagcacagttctcctgtaaaaccccgaaggtgaaacc

SEQ ID NO: 107736 - DNA, 200 bp, Glycine max
  Clone ID: PAT_MRT3847_68301C.1
aaaaaaaatttatttttaaaaaaaaaaaaaaaaagggcggacagatataaaagaaacaagcttacatacacgggcatagagaagtcataaactttaatatagagacacctaaaaaacaatacactggcacgaagatatacaacaaacccgactgaaaaaaaccctgggggggcccctctttaatggactaacatttcatc

SEQ ID NO: 107737 - DNA, 317 bp, Glycine max
  Clone ID: PAT_MRT3847_68302C.1
atgccgggggagaaagtgttggtttttaacttttacaaaatgttaccgacccttaggaagattgtgggttcgacgtgctttttgacaaactttgggggagtacaaagtctccaaagcgggattatatttggcggggccaaaaatttctccctgtcatcgggggaagagctgcggaagacataagcacttggatggggattttttgaaagacttttttcttttgcgaggggggaaattggaagggggaatgctgtcccaaaccgaattttttgaacccggggggggaaaagatcattcccttggccaaaaacgggggt

SEQ ID NO: 107738 - DNA, 552 bp, Glycine max
  Clone ID: PAT_MRT3847_68303C.1
aggatcctctacagcggccagctgttttttttgttttttttttttttttttgaatttaaatagtatgtatttagttataaagagaaaggggttaaataattgcttattgcatgcttaactactttctgtttctcttttctaaattcacttactccatatatgcatgcattttatttttgaaacacttttagtttcttcacggttcacaaacttatactttatttcctagcaagtacattagatctagcaccttctatttctattctttggtaatttaatctccctgccaattttcctactatttactaaacttaatttttgttactttattccttgttaatctacttttcttcatcggacagttgactcactaagtaacccgctatttgattcactatcccctaactaactaactaacggacctatcaaacagcctcttaagttgcactgatagacaaagagctttcctgctaattgaagttgaataagactactacattaataagaggaactcctccctcggctgattccaaatgaacatgatgaataatc

SEQ ID NO: 107739 - DNA, 335 bp, Glycine max
  Clone ID: PAT_MRT3847_68304C.1
aattcggggccgacccacgcgtacacggaagcgtgggaaaaaattgaagaaaaaaaaagaatatgttaatttaacgggttagagaaaggaggggagtccaaaaggatagagacagatataggtgtacatgagaggtgatagctcgtataatgtgagataaattcaggacactggagagtggttataataacagcttttaaccaggtgaaagaaatggtggttattaaacttaatcggcttggtggaaaacggtcttttgtgagctggcgtaatagggaaaaggttagtactgaatgggcttcgcaatagttgcgcatcatgaaaggtgaatggga

SEQ ID NO: 107740 - DNA, 349 bp, Glycine max
  Clone ID: PAT_MRT3847_68305C.1
gactcctcctgctcaatacatattgcagccatacattgctgccaatggagggcacaggctacagaaatcaacaaacaatgcgcctgccatggggaaagggaggatgacagcctctgaattaccgaccacaaacacggtcacacccagacctaactcctccacggccaatcaatctggtgggtttgtcttgagacaaacgaacccatacatgaggtatagctagctctctcttggcgccagcaacgctcacgccgcttgcaaagacacactagtctgcccacacacgccctggctggttgctcacgcaaccaaacgaccaggccggccctaccgaccagccctggacggt

SEQ ID NO: 107741 - DNA, 408 bp, Glycine max
  Clone ID: PAT_MRT3847_68306C.1
cgggaagagaagtcagaaatgtgtttcactgagaaaaaatacaaaggttttgaaagttgaggaaagaaacagcaattggagctgccttcaatttaactattaaagggtgctctgaaacagaaatcaaatggttttctgataatgaaatgcaaaaggaagaaaaaggtttcttttgatgattcaatctatgtgtatgctcgtgattggcttcacgggtcctctttcattctaaggaggaataaagaagattggtaggtcataggtggcaaggatataaacgatcaagtattagaatcataatagagaaacaattgtattgttcctactcatgtaagaaaaaaaatttaacatagcaaagcttctttgtttcctttagtaagaaatcaaataacttaataatgaaacttc

SEQ ID NO: 107742 - DNA, 349 bp, Glycine max
  Clone ID: PAT_MRT3847_68307C.1
gtcttacgtggggtccgatgtgattcagccgcgtcagaaatatttgctgccgggaaattgtacccttgcatgcttaatctcgctctggattggaaaaagttggctcttcacaagcggaaactgtcggcggaacaaacttttcttttgatttaattggcgctggtatccagtgcttgatatccatggccgtgatcggaccatcactaacgacccacggagattgacgccagggtgcgacaaaagatagatcctctctacaatgacgttcaagctcatatggaaacacaaatgtttcaatcgtctgtcgaagatgcttaaacccctaatggttccctgctggatgtgaaaa

SEQ ID NO: 107743 - DNA, 354 bp, Glycine max
  Clone ID: PAT_MRT3847_68308C.1
aaactcaattataaaaacaatgcaaaaaagaacaaaaccgaatattatagaaaaccaaaaaaatggaggacgatgcctacaaccaacgacatcaattaataaaggtctaccaacaacaactgtcctcgtgtgccaccctatcaagttcggtcgggtccttgtagggacctattttaagcacatcatctgctccatcttaattcggcatctcaatacctacagatttcgacagatacatacagagcgatgggaatatgctaatgatgagtttctgccagatcctaaacatgttattccgaatatacatagcaggaaacctatccacagtcataggcattctgcaagttcacttgt

SEQ ID NO: 107744 - DNA, 485 bp, Glycine max
  Clone ID: PAT_MRT3847_68309C.1
cttcttaaccagcaataacttacagagttatgtaagtttgtttcctattaatctactgcaataacagatgagctcttaattactgctttctttatcgtggcttgtgttttggcaaaaccgatgaggtctatgatcttttttcaggagtaggctatttttcttttctatattattttcattgaatttggttggttattaaaatgataatatatttttactttaataattaggaatattactatttttattataaattacccaacagtcaatcccagaaatgaaacccttttatcatttgacagatatttattgaacatctgttaggtaccaatccagtgatgaatgctagaaaaacaaagttaaataagatacagtctgtaatacagattaacatcctcatatatcaaatatcaaaaaaaattaaaaatcttgactagaataagttgagtacctgaaggaagcagtttaaatgctgtatttttctg

SEQ ID NO: 107745 - DNA, 228 bp, Glycine max
  Clone ID: PAT_MRT3847_6830C.1
accacgcgtacgtccatccgtttttccactcatccggtcaaccgaaggtcatatcgggctaacaccctcgggaccacgcggcgaccctgcactgctacacacaacagacaacccgattcttgggctcttcaacaatcatcatgaggtaaataactattacactgctagagaccgcccaatcagcgccaaggcaaacgaagagaagtcagaaaccctccctaacctgcc

SEQ ID NO: 107746 - DNA, 486 bp, Glycine max
  Clone ID: PAT_MRT3847_68310C.1
ggcactcgtgcgttgatggtgttttcggaacaacatgccccattccagcaaggacgaattggacttacatcctttaagcgaaagatcaaactgggaccttttactacttaccatccctagcattccacacagccgatggcggctttggaggcattagaatccttagcaggccaagaattccagagccattccctgatccaagtggggattacactgtcctcattggagatcgatacaagtccaaccacacgactttgaaagcccgcttcgataggggcaagaagctgcctttctccgatggaacactataaaggctgccgcctaacggagtgtgtttcaacgttggacatggattgacttagaggctgagaatataatacctggagcggccacactgccttaactttaaaatgcagaaccacaacatggagctcgtagaaagggaatgaacacacaccctttagaccatgtactactctcttgacg

SEQ ID NO: 107747 - DNA, 619 bp, Glycine max
  Clone ID: PAT_MRT3847_68311C.1
aagcctacgtaattctattcctacgcataacattggcacaatatccgcttgacatatcaataatatacaaatttctcaaaagttaaaaacttgtacagatcaacaagatgcagtaagtagcaacttccagagaagattatatcatggaaaacaagtattgttctcggtgtggctggcacctagtactctctaggacacgctaaccataatgaattaagagctctaagccgtgaaacgtaatcatttatcacaagtagcgcacgagcagcttggaaagtggtcaaaattcgacgcatctgttgcagagtttgttgcctcaataggtcagcctgatgaaggaaattctctagtgtggccagcttgcccagtgcaattgccatttggcccatgtactcagcaacatttccagaaccagagggccctaaagaggaggaagaaagtgtctctgaaagagactgctgcaatgcatccatgccttgtgataatgcatcctcagcctgctgggaagactgctgcagattgtaaatgcccatcaactgctgttcggttaacggctcaagctggtttctaactatcttgagaagttccgaagatcgaaaccaccgagccatatgaagca

SEQ ID NO: 107748 - DNA, 1909 bp, Glycine max
  Clone ID: PAT_MRT3847_68312C.1
agccttgatctaagttctgtttccaccatggatcttcaacccctctacttcacatccattttatccattttcatttttatgtttttggggcacaaaataattacaaagaaacctacctcaactccaaatttaccaccagggccttggaagatacctatcatagggaacatacacaacgttgttggctcacttccccatcatcggctaagagatttatcagcaaaatatggacccttgatgcatctgaagcttggagaggtttccaccattgtggtttcatccccagagtatgctaaagaggtgttaagcacccatgatcttatcttttcatcaaggccttaaatactagctgcaaagataatgtcttatgattctataggtatgtctttcacaccttatggtgattactggagacagctaaggaagatctttgcattggagctattaagttccaaacgtgtccaatctttccaaccaatcagagaggaagtgctcacaagtttcatcaaaaggatggctacaatagaaggatcacaggttaagattacaaaaaaagtgatttcaactgtatttatgttttcatcgatcagcccttttttactgagttacaggcaccataagaagttaatatcggtggtaaccgaagccgcaaagatttctggaggttttgacttgggagatttgtacccttctgtgaaatttcttcagcacatgtctgggttgaagcctaagcttgagaagtatcatcaacaagccgaccagataatgcaaaacatcatcaatgagcatagagaggctaagtcaagtgccacaggagaccagggagaagaggaagttcttttagatgtgctcttgaagaaggagtatggcttaagtagtgacaatagtatcaatgtggtgttttataacatgtttggaggtggaactcagacatcagctaccataacatgggcaatggcagagatgattaaaaatccaagaacaatggaaaaggtacaaactgaggtaagaagggtatttgataaagaaggaaggcctaatggaagtggcacagagaatctaaaatatttgaaatctgttgtgagtgagacattaagattacaccctccagctcctcttttgcttccaagagaatgtggacaagcctgtgagataaacgggtatcatatacctgcgaaaagcagggtcatagtgaatgcttgggcaattggaagagatccaaggctgtggactgaggctgagaggttttatcctgaaaggttcattgaaagatctattgaatacaaaagcaatagttttgagttcatcccatttggtgctggaaggagaatgtgcccaggcctcacatttggcttgagcaatgttgagtatgtgcttgcaatgttgatgtatcattttgattggaaacttcccaaaggaacgaaaaatgaagatttgggcatgactgagatatttggaataacagtggctcggaaagatgatttatatctcattcccaaaactgttcataattagcctactccatagactctacacgtgacctgtggacctactctccatttggcaatgtatgttttggacttttggtatagaataaaggatgtccagcattgctgttatatctctaaagttttaaacttttaaatgattgattttccccttctctagaatcataaatactttaaggacttgaagtaattattctcaatattcctatctaataataaattaccttcatttcatgtcatcttctcgcagctctccaataattagtaaaagtaaaagagctgagaataaagaaaacttaatatcaattgaattgatgttttgatcgatcaccctttttcctctgccttaaaataaagaaaagtgtgtatttgggtacaactgtcagatactttgctaaaaa

SEQ ID NO: 107749 - DNA, 467 bp, Glycine max
  Clone ID: PAT_MRT3847_68313C.1
aatattgttatatttattttttttttttttttttttttttctggggaggaaacaaatcttattgttttcctttaaaatcaaaccctatatggcaaggttgaactatttccttaaaaaagggttctttgttttgggataccacaaccccccaaaaaaaatactacgatttttggatattattaggggccttccccacaaaaggcattctgttgatttccccgggagattttttcgttagggggttaaaatcttggggttgagggacttgttgaaccaaggctttcagttccaactccccctttttgtgggagaagagggtgaactttaattttaatgccgcccacctttttgttttttaaacaagacaaaattcctcaccccaaggggtccaatctttctcccaggcctcaaaggctggaaaccaaaaggggggccttaaacccctaaacccggggtgttgtttccca

SEQ ID NO: 107750 - DNA, 1204 bp, Glycine max
  Clone ID: PAT_MRT3847_68314C.1
gtaaaccaaatacacacttttctttattttaactcagtaaaaaaaggctgatcgatcaaaacatcaatacaatagatataaagttttctttattctcagctcttttacttttactaattattgtagagcttgtgtaggctaaagatggaaagtgataggaatgaggcacaaatcatcttttctacgagctgatactccaaaagcctcggtcatgtccaaatcttcattcttcatttcattgggaagtttccaatcaaaataatacattagcaatgcaagtggaaactcaacattggtcaacccaaatgtgaggccagggcatattcttcttccagcaccaaatggtatgtactcaaaactattgccttggtagtcaacagaacttccaatgaacctctcaggataaaatctctcagcttcactccaatgatttggatctcttccaattgcccatgcattgattatgaccttgcttttgataggtatgtaataaccattgatctcacaagcttgtccacactgtcttggaagcaaaaggggaccagaaggggacagtctaatgtcactgtcacaacagatttcaaatactttagattctgatgtgccacttccattaggccttcctactttaccaccaaatacccttcttacctcagtttgtaccttttccattgttcttggatttttaatcatctctgccattgcccatgttatggtagcagatgatgtatcacttccacctccaaagatatcccagatcacagccttgatactttcatcacttaagccaaactccttcttcaagagcacatctaaaagaacttcctcctctccctggtctcctgtggcacttgacttagcctctctatgctcattgatgatgttttgcattatctggtcagcttgttgatgcaacttctcaagcttaggcttcaagccagacatgtgctgaagaaatttcacagaagggtacaaatctcccaagtcaaaacctccagaaatctttgcggcttcggttaccaccgatattagcttctgatggtgcctgctcttgctgccaagggctgtccttgcagttattgtaaagacagttgaaatcacttctttggtaacgttaacctgtgatccttctattgtagccatccttttgatgaaacgtgtccaatctttccaaccaatcagagaggacacgtttggaacttaa

SEQ ID NO: 107751 - DNA, 565 bp, Glycine max
  Clone ID: PAT_MRT3847_68315C.1
aaaaggaaaagggaggcaaattgccagttgcaactatggctaataagaatatcttttttaaaccccaaaaacttgaaaaaattgccaagggctttttgcttttaaataacaacggccttaaggctttttcattcacattgggatcgattttggcccccccacaatttactcatctcccgtaaaaaccccctgattttacccatatgatctttttaaccaaaaccctcccagggcttcttaaaaaaaaaccccaatttgtttgcagccaacaacaggcccacctggggggggcccccgttggctttctttttgcccttggaggggagggaactctttttgcccattgcttttgcatgggaggccccccccttgaatctgaaccaactgataatatggccatttgttaggccacccacttgcatgaaagtataaatgacagccgccccaaccctcctgaatcctctcctcacaagggctttacttaaaaatcccccctttggaaatttgacagggacctgacgggggtccccgaacgggctgactatagtcttagggcccaaaaagt

SEQ ID NO: 107752 - DNA, 313 bp, Glycine max
  Clone ID: PAT_MRT3847_68316C.1
ggtatctaaactagtcacaactaaactcatcttaaaggcatgatttttctcataatgtcaactaccaaggagaaaatctaacatataaataccatatttctaatttctttatccactaacaagctgaatgatctagttcaagacataactcagcggaaacaacacaacaatggacctgtgatgagtcgcacacaactacttaacatgatatggaacacgcactggacaccgtcccagaagccattatgcatctgatatataacgattctagcacgctcattgcttcacacgacctaaccatatcgacgcctcg

SEQ ID NO: 107753 - DNA, 3729 bp, Glycine max
  Clone ID: PAT_MRT3847_68317C.1
gtgggtttttgagtctacattcaaaagaggacaaataaatgctgttgaaggaatggaaactttgccgaaaggagttgacatttgttgcatctgccaccacaagcatggtgtatgcatgacgtgttgctatggccattgtcagaccacattccatccatcctgtgctagaagtgctggaatatacatgattgtgaggactactggtggcaaggctcaacacaaagcttactgtgaaaaacatagtttggaaccaaaggcactggctgaaactcaaaaacatggaattgaagagttaaaaagtatcaggcaaattagggttgaactagagagattacgtctcctttgtgaaagaattgtgaaacgtgaaaaaataaagagggaattggtactatgttcacatgacatactggcctttaaaagagatcatgttgctaggtccgtgctggttcgaagccctttcatccttccggatggtagttcagaatcagctacaacgtcccttaaagggaacacagagggatacagatcatgcagtgaaccacttcaaagatcagatgatgttactgtggacagttcagtttctgctaagcgccgtgtcagagtcgccatatctatggacacagactcaaaattggacgatgactgctcaacctctcaaagtcgatacaaccacaggattccagatagattgcaattttctggcaagaaggttcctcatagaactgctgcatcacgtaatatttcagatgaaggtggatggatatccaaatctagaaatcattccgatagattcggaaaagagcttgttatgacgtcagatgaagcatctatgaagaattcaatgctacctaaaggatatgcatatgttcctgctgattgcttgtcaaatgagaagcactctgacgaggacgtatatgctagtgaaccagtggagcatgacaggtagagtgttggatcccagcctggttctttatttttccttcgaggctgacatccataatattcaatgccgtgctatttttcttcgagtggggaagttttatttgagaatggcggatatttttgttatttgcagcatgtactgctttctgtctcttattatgtgttagtggacatcctttgatatgacttacacagtgtggtactctccttgagagtaaagtttaccttatttgaaatgctcaaagaaggatgcaatctctagttacattcatccatacatcaacaagaaattgctgcagattcgtgatggggtgcccttggaggacattatatgttcaatcagtgagggaaattcttctttggttgaatcctttggggctagttcctgctcaagtagccaaaatcagaacttaactcgagttgatttttcaaagcctgatgaagtaaatatggagcagttggttagggctataaaaatgggactttttgaattttctccacaggatgaattggagggggaacttgtttattttcagcatagattattgcagaatgcagttgcaaaaaagaggcatattgataacttaatctacagtgttgccaagagtttgccacatgagattgataaggcacatcaacaaagatgggatgaagttattgttaatcaatatctgcgtgatcttagagaggcaaaaaagcaaggcagaaaagaaagaaagcacaaagaagcacaggcagtgttggctgctgcaactgctgctgcagcagcatctactagggctctccggaaagacaacttagatgaatcaatgcaacaagagaatttgttaaaattggatactctaaatggaagaaccggtgcttgttctcagccgatgtctcgagccaaaagacgacagaagggggtagctgtgacaagaacttcgtccgagaaatattcagaattttgcatgccaacctcagatttgtctaaggagcaatgtaaatcatgtgatatttgcagacgatcagagtttattttaaaccctatcctagtgtgctctggttgcaaggtttcggtgcacttggattgttatcgtagtgtgaaagaaacaacaggtccgtggtactgtgagttatgtgaagatttgtcctctagaagctctggggcagctgctatcaatttctgggagaagtctgttgtagaatgtgctctctgtggtggtactactggtgcttttagaaagtcttctgatggtcaatgggttcatgccttctgtgctgagtgggtttttgagtctacattcaaaagaggacaaatagatgctgttgaaggaatggaaactttgcaaaaaggagttgacatttgttgcatctgccaccacaagcatggtgtatgcatgaagtgttgctacggtcattgtcagaccacattccatccatcctgtgctagaagagctggtttgtacatgaatgtgaggcctactggtggcaaggctcaacacaaagcttactgtgaaaaacatagtttggagcagaaggcaaaggctgaaactcaaaaacatggaattgaagagttaaaaagtatcaggcagattagggttgaactagagagattacgtctcctttgtgaaagaattgtcaaacgtgaaaaaataaagagggaattggtaatatcttcacatgacatactggcctttaaaagagatcatgttgctaggtcggtgctggctcgtagccatttcatccttccggatggtagttcagaatcagctacaacgtcccttaaagggaacacagagggttacagatcatgcagtgaaccactccaaagatcggatgatgttactgtggacagttcagtttctgccaagcgccgtgtcagagtcgccatatctatggacacagacccaaaattggacgatgactgctcaacctctcaaagtcgatacaaccacaagattcttgatagatcacaattttctggcaagaaagttcctcagagagccgctgcatcacgcaatatttccgatgaaggtggatggagatccaaatctagaaagcattcggagacattcggaaaagagcttgttatgacgtcagatgaagcatctatgaagaattcaatgctacctaaaggatatgcatatgttcctgctgattgcttgtcaaatgagaagcactctaacgaggacgtatatgctagtgaaccagtggagcatgataggtagagtgttggatctcagcctggttctttatttttccttcgaggctgacatccataatattgaatgccatgctatttttctcgtggggaagttttatttgagaatatggcaaaatgtaaagataggctttttgctctggcgggggctagttttgttagcattgtacattccttatgagagtaaactgtacagtggatgagcatttcttgcatttacttgtattagaagggtatgcattccgttttattgacacatttgtgggaaggactaaacggaagcattccttgtaatcatacaagggaagatcggggaatcacctgtttttctgtaaagttgatgtgtacatattttatggcagtcttagtaattctgaaagggatcgtgctcgatatcagatccaccgagcatacaaattatacttaactcccacctcataaatttgtatttccccctttatcctgcatttctattatgatgattcttgcgaccactgaattcccttgttataatgtagatgtagttagtgataattgatcctgtttcatttgttatgcaaaaaataaaaaaaaaagaagacata

SEQ ID NO: 107754 - DNA, 659 bp, Glycine max
  Clone ID: PAT_MRT3847_68318C.1
tggatatccaaatctagaaatcattccgatagattcggaaaagagcttgttatgacgtcagatgaagcatctatgaagaattcaatgctacctaaaggatatgcatatgttcctgctgattgcttgtcaaatgagaagcactctgacgaggacgtatatgctagtgaaccagtggagcatgacaggtagagtgttggatcccagcctggttctttatttttccttcgaggctgacatccataatattcaatgccgtgctatttttcttcgagtggggaagttttatttgagaatggcaaaatgtagagatagggttccggtcactgaaattgttgcagaatgttgctttctgttctggcgggggcaagttttgttagcattgttgtacattccttgagagtaaactgtacagtggatgagcatttcttgcatttgtattagaggggtatatgcattccgtttttttgacacacttgtgggaaggactaaacggaagcattccttgtaatcatacaagggaagatcagggaatcacctgttttttctgtaaagttgatgtgtacagattttatgacagtcgtagtaattctgaaagggatcgtgctctcgacatcagatcccccgagcatataaattatatatatttaactccccccccc

SEQ ID NO: 107755 - DNA, 1821 bp, Glycine max
  Clone ID: PAT_MRT3847_68319C.1
tacggctgcgagaagacgacagaaggggacatttctgtagctctatggccgaaatgatacagtttgtttccttattctaaaccccaaagtagcaatagttagattagagtacatagtttttgtcacacctcacttctctccgatttgcgcttgttcttcttcttggtcaactcgatcgtaagtcgtagaactagaaggttaggttgagggcgatatgaaggtaaccaaagggaaggaaactaaaattgttctgacaaaacccttccaattggaaggtgaatcagatttagaaccgtcttatagagctcccaatctcctacatcgcttgttaagtttactcaagaacgtgcggccaggatcagatctcacacacttccaactgccacctgtgtttaatttcccaaaatctcaacttcaatgctatggtgaatcagtgtactgcacatcttcaaacttgctgagcaaatgcaacaatgggcagagtccactggacaggttcacatcagtagtagcatggagcatatctaccacacgccccacatcttttggtgttgctccttataattccactcttggagagacccaccatgtttccaagggcaatctcaacgtcctagttgagcaggtttcactcaatcctccagtatctgccctccatgcaacagatgagaaggaaaacattgagatgatatggtgccagcagcctgttccaaagtttcggggtacatctattgaagctcaagtgcatggtaaacggctgctgaagctccaaaatcatggagaaacatatgaaatgaattctcctcacctttcaattagaattcttccggttcctgggattgattgggttggcaatgttaatataaggtgcccagagacaggtctggtagctgaaatatcatacagatcaagccattcttttttaggatttgggggaagtcgtaaattgatcaaagggaaaatccttgactcatcattactcaaagttctcttcgaagttgatggtcattgggataagatagttagagtgaaggatacaaatagtggagaagtgagagtgatatatgatgccaaagaagccatttcaggtctcaaaactcctattatcaaggatgtggagagtgtgtggccaaccgaatcagcccttgtttggagtgagttgagccaagccattatgaacaaagattgggaaagagcaagagaagcaaagcaagacgtggaagaaagacagaggaatatgttgagagacagagccatgaaaggagaaacttggtttcctaagaattttagggtgtcttacagtaaagacacatgggaatgggactgttcaccaactcataaatgggtccctgaggcccccatcatagctcaataatttattgttatgtactttgtactgtgatgtctttaaataccagccaaaacacagttataggctgttcaaaaattgaaatgcacttatttctggttggacaccaaagggattgggagattcattgttgtactcatgaaattcatttaatcctaagtttgttattattttaaatttttaatgtatagtgagatagtttgatgaataaatccaaagtataattagtccaagtaaggaaaatgggcttgtctacaaaggatgctaaaggaagagaaaaagcaggaaccaaaggtcaaacaaagaagggtggtggtgaggaacatggaaaaagaagagaagaaacatagaggagaaacaaagaagttgtccaagagggaaagtagaggcagagaaagcaagaccaatggaagaaacaaactggaactaaaggagagaaaaagctgaaacca

SEQ ID NO: 107756 - DNA, 528 bp, Glycine max
  unsure (1)..(528): unsure at all n locations
  Clone ID: PAT_MRT3847_6831C.1
gaattcggcacgaggcatcttataacttccacttattgttcttttccaacccctattcaatatcaagtcgaccaagctatatggcatccatgtccaaggccatgaccccagaaatcaagaagcatgcatgtgacaagaaagacggtgttttgtatcattatgatcccacagcttgcgccgaaggagatgattataacgggaatataaattatgtttttgcatatatggaaggtgatgacgatgatgatggtggttatgattatgctcccgcagcataaattgggtttgctgagtagtcacctagtatatacaaagtaacaaaatgtctactccaaactttaattttggggttcctagttcattgaaagaccccaagttttgttcacaaagacaaataatggtgaccaattttattttgctgtggactaatttatgtcatgcaccctaatttactctataatttttgcaatagtaaccgacgctgccctgattagccatgttattcgcgaacactatcaagacgnnatc

SEQ ID NO: 107757 - DNA, 485 bp, Glycine max
  Clone ID: PAT_MRT3847_68320C.1
ggctcgagctcgagccgctcgagccgttttagaggacaaataaatgctgttgaaggaatggaaactttgccaaaaggagttgacatttgttgcatctgccaccacaagcatggtgtatgcatgaagtgttgctatggccattgtcagaccacattccatccatcctgtgctagaagtgctggtttgtacatgaatgtgaggactactggtggcaaggctcaacacaaagcttactgtgaaaaacatagtttggagcagaaggcaaaggttgaactagagagattacgtctcctttgtgaaagaattgtgaaacgtgaaaaaataaagagggaattggtactatgttcacatgacatactggcctttaaaagagatcatgttgctaggtccgtgctggttcgaagccctttcatccttccggatggtagttcagaatagctacaacgtcccttaagggaacacagagggatacagatcatgcagtg

SEQ ID NO: 107758 - DNA, 561 bp, Glycine max
  Clone ID: PAT_MRT3847_68321C.1
gttgcgtccgcgaaacttttggtgatttttccgttgccttccgcgttgaacttcttcccttccccgccacctcttccgccgtccacggcggtttccgccttactccgacggccaagctccgcggaagttgctaactcttcatagtcctctggcatcacaatgatgacaccagaatcagcggaggagttggaaaaacatgcaatctcgggtcatcatgtgagggggaatagtgaatatgttagacttgccatatcggatgaaccgagggctgttgaaactgaaatgctacagcctctagcagactcaagaatgaaatctttcatgtggtggataaaagtctttttatggtgctttgtcattgttgtacttggtcttgttatattgaaatggggagtgccatttacttttgaaaaggtcctttacccaatcatggagtgggaagcaactacctttggccgtccagttcttgcccttgtacttgttgcttctctggctttattcccagtattttttatcccttctggcccttccatgtggttggctgggatgatttttggttat

SEQ ID NO: 107759 - DNA, 693 bp, Glycine max
  Clone ID: PAT_MRT3847_68322C.1
tgcatgcctgcagcatcatctctagggctctccggaaagacaacttagatgaatcaatgcaacaagaggtaatagatgcattgtttttttctctctctaataattagctaattgtattgacatcagaatacgatctttttccagaatttgttaaaattggatactctaaatggaagaaccggtgcttgttctcagccaatgcctcgagccaaagagacactttcaagagtagctgtgacaagaacttcgtccgagaaatattcagaattttgcatgccaacctcagatttgtctaaggagcaatgtaaatcatgtgatatttgcagacgatcagagtttattttaaaccctatcctagtgtgctctggttgcaaggtttcaggactcagcccttgtctcttttcatgtttttgtttttctgatttatgttccattgtaattcttttcatattgcaggtttcggtgcacttggattgttatcgtagtgtgaaagaaacaacaggtccgtggtactgtgagttatgtgaagatttgtcctctagaagctctggggcagctgctatcaatttctgggagaagtctgttgtagaatgtgctctctgtggtggtactactggtgcttttagaaagtcttctgatggtcaatgggttcatgccttctgtgctgaggttaattattctactttgattact

SEQ ID NO: 107760 - DNA, 485 bp, Glycine max
  Clone ID: PAT_MRT3847_68323C.1
tttgtttttttctgttctttttttttatcatacctttttttacttcttctttctttttgggccaaaatggggaataattcttgaagttattatagctaccatcatggttatcttacctccttatcaaaaaaattttttccttgcccaacagtgaattatctctgccacgggttcataagcggggggccaaaaaaaaaaaacgggggttgaaccataaacacttggccgaaaaaagatggccccctccaacattttttccaataaaaccatgacctacacggtggaggctgaaaactgctgaaagaaaaagacaagaccccccaaggggggaaaaggggttcaaacatttcttgggggttagcaactgaattcccccggggcctaaggggggaaaggggtttataaacactttttttgtccaaccaccaatttttggtctggaattgaccaaagcaagaaatcgggggggcgctgaaaaaacccca

SEQ ID NO: 107761 - DNA, 582 bp, Glycine max
  Clone ID: PAT_MRT3847_68324C.1
aggaaaagatgaagaaggatagaagaaaaataatattaattatattgactttaaactgatgagataattgttttgaatcatttaaaaataaataaaagagtaatgcatttttaaaagataaagaaaaataaaataaataataatattactgttgagaaatactactataattattttttttatgcttatccgcgcgtggattcatttgacggttcaccgaacgaacgaacatacatctgcaaattcctcctaactcctaagattcggcgagttgttttgttccacttgagagtgaggaatgaagaagctgatcttgcattcgcatctctcactgcttctcatttattgtcaggttttaggttccacaacaatagcttctctttccatctgtctttgcacaaatggctgcaatcttagctcggaaatcacttcttgctcttcgaacactccaactggctgtaagtggtcaagggctacacaacttccaaaactatggcctgccattaagtgcacagtcctactctaccaaaaaagaggatgaagcaagggagccacttgccaaggaaatgtcgaaaggaatgg

SEQ ID NO: 107762 - DNA, 244 bp, Glycine max
  Clone ID: PAT_MRT3847_68325C.1
aacatacccttattatttttccatctcctacgctgaaattacaacctaaacatacccttgacaatccatcctttgtctttccaagagcaggatcttagatcgtccaagatgtgataaaatacggccatattttttttattaacacttttgtggggggggggggccaattccagatctgccttcccccttaaataaatgccgggcgggggatatctccaaaatcagaggggcggaaaggagaaag

SEQ ID NO: 107763 - DNA, 340 bp, Glycine max
  Clone ID: PAT_MRT3847_68326C.1
ggctcgaggatggctatagttccaaaagctcaagagtggagtcattcatgttaaagtgaattgctgaaggctcgaagcttaattcttaacaaattcactatcaggttgttcctcctgctctttgttctatcacttgtcgattgcttacaagaatatctgatgttcgtcagatgacatttatctatatgtgaagctctaatgacctatcctgtcatttttaaaacatatcgcatcgaatgtcaacgccatataatacatccatgtacaataaggtatacacttgctactttctaggttcagagtcgagctaaagcttgtatgggattaactgatacttaaa

SEQ ID NO: 107764 - DNA, 114 bp, Glycine max
  unsure (1)..(114): unsure at all n locations
  Clone ID: PAT_MRT3847_68327C.1
tttnagaggnatgttgtgactggtngtgcatatgagctatttagnggatnaggatgttgtcacgaggnttnttcagaaaggtcnccgcctaagatccagagcatcgtgnactgt

SEQ ID NO: 107765 - DNA, 339 bp, Glycine max
  Clone ID: PAT_MRT3847_68328C.1
cccacgcgtccgcccacgcgtccgcccacgcgtccgcccacgcgtccgaaaaaaaaaaaaaaaaaaaaaaaaaaaaaaaaaaaaaggaaagaaaaaatataaaaaatacaaaaattacgaacacgggcgtgcagatgtaatagctcttttcttgtgtaggctgccttcgtttcaacgggccgcttttttacaagggccttactgagaaaaccctgtcgttaccctgcttagtcggtttggttaacagcccccttttgccaaccgccgtggttgggaaaactttggggcttttcgcctttaccggctttggcgcaccccccttttcgaaagggggcccct

SEQ ID NO: 107766 - DNA, 257 bp, Glycine max
  Clone ID: PAT_MRT3847_68329C.1
atcacacccaccataataatatctttattgttctcatctactctggtaccatatcaaacacacacacacacaacaacaacaacaatagaccatgtcggagtgcgagcaccacaacgggaataacaggaagatcttccggcaagtgatctggtgcatagtgcgtgttcctcttcctcgtgctgaccacaactcttttgatatgggcaatccttagacccaccacacccaccttcagcctccaagacgtcacggtctac

SEQ ID NO: 107767 - DNA, 301 bp, Glycine max
  unsure (1)..(301): unsure at all n locations
  Clone ID: PAT_MRT3847_6832C.1
nntacganngtacgcgtncgtnagntcggnattcggctcgaanggatagnngattgaggntnaatcggtgnnntgntgtgngnnaagntnaggaanatangngctagatngnagnangcgattttnttatatganattnnaaagagtngantggatnatctcaatcccatgaattagcnattgagtttnagctgaatcggacatcgttgacgatntcnctcantcacacactactgnntcggncagnttacaagtnaacncgngctgctcagnnnaccctanntattaggggntngntgtg

SEQ ID NO: 107768 - DNA, 484 bp, Glycine max
  Clone ID: PAT_MRT3847_68330C.1
ggaacgaggccacacaaaattttttttacttatataaacacaattttattaacaaatgggaaaggggaggggggggcccactgtttttatacatttttccccccaaatggaaagggaaggacttcagccgaataggggaaaaattttccgggggggaaggcaataccctccggggggggggaggataatagaaaaacccccccaacaatttaaaacgttggttaagggaaagttttggggggcacacgggaaaagcaaaaaaaccctaggggtatcaccttaccaggggaaaaatttcttcttttttttcttttgggaaaggggagcttgaagctccacttggggagcagggggataaaaaagggacttttgggaactatccaacttttgttccagggggttgactttgtaaaaaacattattaagaaatttttccatttaaggggggatggggggtttaataaaaaggacattcacctttttt

SEQ ID NO: 107769 - DNA, 360 bp, Glycine max
  Clone ID: PAT_MRT3847_68331C.1
acttcttattttttttttttcttttttgtgttctaataacaccgtgtagctggttttttctataggggccccccccaacagcgaggaagccgtcgaaaatggtgaggcctacgaccgaaaaaaaggcggataccgcctggtcctaaaaaaataataatagggggttgcgagccacactgcacatggaactcgagatggacctatgccgttccacccccactatgctaaaccccttctttgcaaagaagaaagggtacatgatgtgggaaattttatattttgtatggaaaacacagtttcctaaaaaaggtgagccaatatcccaaaaaaaaaccccttcctttttggaacagaacttcc

SEQ ID NO: 107770 - DNA, 382 bp, Glycine max
  Clone ID: PAT_MRT3847_68332C.1
ataaattaaatgccaatttaagacattccttcttagcagcaaaggaaatggacttaaaccctatggctggttgggaatttgaaaatcttaaacttttaccattaaaaccaaaaacagtacttattaaaaaccaaccgcaaccaattttttaccggccatcaagaacccaattttgaaggcttccggttccttaaatcggcggaccctttaaaatattactggtaaaaccaaccccttaaaattttgaaagattaactacttgaaaggaaccagtttttttgaaaccaccttgatgaaccactgggcttaccaaattggccaaatggcattccttttttttgggcggaagctttgggaaccttgcttccgggggggtcttttt

SEQ ID NO: 107771 - DNA, 234 bp, Glycine max
  Clone ID: PAT_MRT3847_68333C.1
agcatccattactcgtttggttttgcataacagggtttttcacacatagtgaatactcccgcgagcaaaacaagctggaacagcccaaaagctttttgattggctgggctaagcccccttgatgaaaaaaaaaaagccttgcacattggaaaccccgggggacgcctgctgcttgtgttccccacaggtctcaaacccttacaccgaactaaagggggtttttttgggacctca

SEQ ID NO: 107772 - DNA, 323 bp, Glycine max
  Clone ID: PAT_MRT3847_68334C.1
ggggcttttggtgacagaaaattcgaaaccaaacccttatattattccctaatcacaatcacagcatcagatgaaaggtctctctccgatagtttaatatcatcatttcattccttactatatcctagtattcttcgtttgctgagtcctatcacttttcttctcttaatcatcgcgttttaccacttcaacgcttcgcaggaccaaaaaaacttttaatttgtgtacaatactccattctattatgtaagaagatgttattgttttaatattttccccttttccatatacgttttaacccttgtaatcttataattattctc

SEQ ID NO: 107773 - DNA, 178 bp, Glycine max
  Clone ID: PAT_MRT3847_68335C.1
ctctgcaactataaatacgcttcgaacgtaacgctgatcacaacatcatcatcaacaacaagcagatcaatctctctctctctctcaaccataacagtcatgggtttgcaggaggcttttgacccgtctgctgagacagcaaaaactgtgccaccgactcaatcacacgacgccttgc

SEQ ID NO: 107774 - DNA, 177 bp, Glycine max
  Clone ID: PAT_MRT3847_68336C.1
atgccgatctccccctgcggatgtatcagttggtctgtgtcgtcccgacatagggatcgtgctcgcaagacacccagtggacccggagaagttcaacagggtcttgaggtttccagctctgattacgggcttctgtcagttctacggagtgtctgtcaccctcggcaaggtcatcag

SEQ ID NO: 107775 - DNA, 491 bp, Glycine max
  Clone ID: PAT_MRT3847_68337C.1
ctactaacccgacctcccgaacagcagcacaaatctccgcgaggcatctcagcccagaggtttggtcccacgacgctgaacgttcgcccttttccattccttcgtcgacactccggttccggcacgaagaaatcaccatgtcctccttcgagcaggtggtcgtcatcgacggcaagggccatctccttggccgtctggcctccatcgtggccaagcagctcctcaacggccagaagatcgtcgttgtccgcgccgaggctctgaacatctccggcgagttcttccgcgccaagctcaagtaccacgcctacctgcgcaagatgacccgttacaaccccacccgcggtggtcccttccacttccgcgccccctcgaggatcttctacaaggccgtccgcggcatgattccccacaagaccgcccgcggtgccgccgcccttgagcgcctcaaggtcttcgagggcgtcccccctccctacgacacccagaag

SEQ ID NO: 107776 - DNA, 309 bp, Glycine max
  Clone ID: PAT_MRT3847_68338C.1
gacaccaacatccaaacaaacccactaagatggcgggctgggtatcctcactagtgctgctactagcaacccttatcctcatgcctcaacgacttgctacttactacaaaccaattaagaagccaccaatgttcaagcctttaacactcactccagcaacgtacaaaccaccggtttataagccaaaaccaccgctttacaagccgaaaccacccgtttacaagtcaccatataagacgccaccatacaagaaaccaccttatggaaactacccttcagaacaagacaacacccattcctaaagcaagc

SEQ ID NO: 107777 - DNA, 215 bp, Glycine max
  Clone ID: PAT_MRT3847_68339C.1
tcgccctcgcgtgcgcccacgcgtacgcccacgcgtgcggaatataggtgttgaaagattgttaggggtagtagatgaggggtatgaatctttgattggtggaattaaaaaataagctactatcatgatgccgctagatgaagaaaagtgtttataaggttgtacaaaatttggttaaggaaagttttgtttgaaactataaggaggattaatta

SEQ ID NO: 107778 - DNA, 264 bp, Glycine max
  Clone ID: PAT_MRT3847_6833C.1
catgactcaaatggtctaaccacttggttgatcggactaagtccaatatgattcgctctagtcactttatacaaccttccttgtgcaattgattcatctcaagtagtctgattatccagcaataagatacaagagaaggaaaaaagagttacacttgtgtttatgaacagtaactggaggcgtttgtcagagctataagtggaggaatgatctatgacttgtggtgtgcttgtggtgatataatatgtgcggtatacgtttcat

SEQ ID NO: 107779 - DNA, 613 bp, Glycine max
  unsure (1)..(613): unsure at all n locations
  Clone ID: PAT_MRT3847_68340C.1
aaacacttagtgcaaaataaaaaaaaggggggaggggggggacacattaccatcaattgggcaagccagccttccatcatgattctaggtaacttggctctggcttttgtcaatttacttctgaagaagggtcttaatgaaggaatggactacatgtccattataacatatcgacaggcaatggggggggggggcatntcanccttttcctncatctatnaaagggaacacaaactggagggtcacataatatgtctccttcccctcagggctattcttggagtaacaattcctcaatacttatttcttcttggacttaaatatacgtctgccacattctcatgtgcgttcctcaacatggtgcctgtatttacgttcattatggcagtgccatttgggtaagttaaacaaaaggagagaaggtgaacgtgcaaagcaagagtggtaaagccaaagtcatgggaacttttgtgtgcattgggggagctttgttattggtcctttataaaggaatgccccttatcaacccacaatctcaacacatagcaaacaaaattacaagcacgcttccagctgccaagttagagaaatggattgtaggctccatacttct

SEQ ID NO: 107780 - DNA, 197 bp, Glycine max
  Clone ID: PAT_MRT3847_68341C.1
aacctctcggtctcccttcactacacttcattcattcattcaccagtcagaggcagaggccacagagtgtggtgtgtgtgtgtgtctctctctttctctgcttttgaggaattaaatgagagccaaaatgacgctcaaaacagccgcggggtgtctatgctatagggggcagatctgcccttaacatcactgggggg

SEQ ID NO: 107781 - DNA, 466 bp, Glycine max
  Clone ID: PAT_MRT3847_68342C.1
gtaacaattcctcaatacttatttcttcttggacttaaatatacgtctgccacattctcatgtgcgttcctcaacatggtgcctgtatttacgttcattatggcagtgccatttgggtaagttaaacaaaaggatattaaattgattgtggaatacaagaacaataatttttatcctttgggttgaaattttactaggatagagaaggtgaacgtgcaaagcaagagtggtaaagccaaagtcatgggaacttttgtgtgcattggtggagctttgttattggtcctttataaaggagtgccccttatcaacccacaatctcaacacatagcaaacaaaattacaagcacacctccaactgccaagttagagaaatggattataggttccatacttctgacactaggttgcctcctgtggtcttcttggttcattatacaagcaaagattagcaaatatacccatg

SEQ ID NO: 107782 - DNA, 135 bp, Glycine max
  Clone ID: PAT_MRT3847_68343C.1
aaagaattggagacacgcaaactgtgtcggagagtatatttgctatattctgccggaaatactcgtgttttcccattataattattatgtaagaccagattgcacgttataaaatatcccttgaataaaaaacac

SEQ ID NO: 107783 - DNA, 621 bp, Glycine max
  Clone ID: PAT_MRT3847_68344C.1
atccctatcaagacactcctatcctataaatattcccaagccttcctccccccagttctcactagtggggagaccaagtcttccccctccattagatgccatctccgacccacctccacatctccatggtaccaccatggagaacatcgagaagtctggcccctatgaacaagctatggggacctcttctttccactgggatataccaaaccttaatccattctccaccattaaccatctctacgaggcggactgaaattctgtaagagtcaaccctgaacagaaggtgccatcctagaagcacctggcctgaggtgccacaacaaacaactgagttcatccaacctcaacacgctacctttgaaggtacacctgagaaccccaaagatcctgccgagaaagagaatcaccaaccatgtgacatcccaacgctgctaccttcacatccgacctgcatcgatgcattgaaaggtgatgctgaacaagacatccactacacgcattctgaatacataggataatgctctaagaaagacttcatgatgctacaatccttgcttgagcctattcaagactgaatgcgatattagactatatacacatcttgatgcaagattcctg

SEQ ID NO: 107784 - DNA, 579 bp, Glycine max
  unsure (1)..(579): unsure at all n locations
  Clone ID: PAT_MRT3847_68345C.1
ccgttctttcncattttgggttattaaagcaacgagcattgatcttcagcaagtcttaagcctgtcagagggttttcatatgtttctttactatgtttttaatacaatgctcataatgctgctcatcttccatatatattggtggaagctcatttgtgcgatgatcttgaggcagctgaaaaataggggaaaagttggcgaggatataagatcagattcagatgatgactgaatagacgaagaagggttttgttgagttttctttgctcccgctagttggtggtggtagctctgatggatactgtttttgacttgtctatagatttctaggagttcagttggttaatacaaccagtggaggagatctgaattttcgttagtttcaaaattttcattgattaccaagtaaaaagggagtaggaaaccgtccaaagcatattttgattcttatatttttgctgtataaatgataggcattcctgtataattgtttttccaaacgaacccgtttaggttaactaggggttgaatgacaagtggcttataacaaatatgaaggagaaagaaaaacttacagtc

SEQ ID NO: 107785 - DNA, 284 bp, Glycine max
  Clone ID: PAT_MRT3847_68346C.1
gaccccccaactcttgaacttgcatgctcttcttagaatactagaatatgaacatccacatggagatcataatcaaactaactatcaacttgaaatgacatggggataaccctgtgacggtcaagacatatctaccacaatacaatctaaactggaacacctcgcagacaaacaagcataaatggattatcaagatctccaacaagtccatacactctaccaccccactgcacgaaaaataacataccatggaacattctctatcgggattctatacaaaacca

SEQ ID NO: 107786 - DNA, 1026 bp, Glycine max
  Clone ID: PAT_MRT3847_68347C.1
tggaggggatggctggtctttcatcactttctaactggaataactccctgccggcacctactagtccatcagttggtgattatacccacgagttcaataggcttgcaggagtgcaacctactaacggggacgacatttttgggtctcagatacagtatccagccagaattcaagtgcatcaaaatgtgaatcagcaactgagaggctatccttccaacccttacaattcaagtgtgattggatcaccctcattcagggttgatccatctgggactgcagccacaatgcctttgaatccaagaaatgctgcctttgctaatcggagccagagctttgttgagcctaatatggttaacattgattctgactttccttctgctacctctactgctgctgagccttctaccttctctggttggggtccctctgatggcaagttagattggtccatccgtggcgatgaactaaaaaagccgagcaaatcttcttcttctggatttttgaagcagtagtccttttacaatggctacagccactgtgctaccaagtgttgatgatccagaggtgtctttgcttcattaacttgtgaactatatagtgttgaagagcagctgcaatgctataggctatagcaattgtacatggttgcatgaatgcaatgtcaaaaatgggattgaatcctctatgcaactctaggctagtttatttatttattattgttattttttaatttcataaatattctttatatgtaggcgacaattagtagaaatcgtggttaaatgtttcccatgaaacagtgtagaagttgggcagaatgcaagttttctgctccagtaactaccttctagggtatttgactccattttttcccttatttttttttcttttcctgttctttgtcatgctctattgagttgtaacttcccagcaaccaagaattggaactaatgcactgagacttttaattttcagttcaaaaaaaaaaaaaaaaaaaaaaaaaaagcggccgctctagaggatcca

SEQ ID NO: 107787 - DNA, 493 bp, Glycine max
  unsure (1)..(493): unsure at all n locations
  Clone ID: PAT_MRT3847_68348C.1
ggcacttcattgcttggtgatgtccctttctgttctcttcactcttggtcttacaagaaaaagccataccagagacaaaaatttttggcatgctatttaaccaaacactcccattccaagttcattgcgaaatcttctaaaacctagccctacaagtattaaaatcaataatcaccctatacaaattaaagaaacacagtacccaaaaaccttcttctataaagaagaccttcatccgaacaaaacaataaaagtacaattcagcaagcctccctttcaacaaccataaatattaatacataattaaagaaaattaaagacactactaaaagaaaatatagttttgaaaaactatgcatcaagaaagaaaccagttaagaaagaaaagaagttgtatgcagaatgctggggaacantaattagtgttagcatttcgaagctgggaaacaacatgcaaatactttgaactgccttgttcaataagcaagaccag

SEQ ID NO: 107788 - DNA, 129 bp, Glycine max
  Clone ID: PAT_MRT3847_68349C.1
acgcgtccggccgaacatccgaacgtgcgtggtcagtgcctgtttgtgcgtcaccactgacgtggctggagtgcggctcgtaatatcgttggatcaaacagtgattaattgtttgatcattctgacctt

SEQ ID NO: 107789 - DNA, 709 bp, Glycine max
  Clone ID: PAT_MRT3847_6834C.1
acgagccgaactcgaacggaaccgtaaaccgttcctctcgttgtgatggatgcgtgctgaagttgttcgccacgcgtccgggcagcgtcttcagcctccacctcaactcacgtcgtcgcttccatcgccgtttcaatgccaaaatcaaaatgtcctcctccgacgccgcgcttccttctcttcccgataaccgcaccgtcgtcgggttcggaatgacggcggtggatttcctggctaccgtggacggatttccgaaaccagacgacaaggtccgaagcgcttcgttgaaggttgaaggaggcggcaatgccggaaacgcgctcacctgcgctgctcggctcggcttgaagccgaagctgatctccaaagttgcagatgactcgcacggcttcgccatattgaaggagttagaagccgatggcgtcgatacttccttcatcgtcgtatccaagggtggtagttcaacattttcatatgtactagttgacaaccaaacgtaagagttgcttgcttgcatgttttgcctgtgacttccttccatgattaaagatagtatgggtctctcttaactatatcaagaaacctgctgattcaaggcttaaaatgacatgatgatcttatgcctgaactcaaggaaaaactcgcacaagtatctacacccctggagatcctccaatgatgccagatgacctgtcccagtcaacattat

SEQ ID NO: 107790 - DNA, 147 bp, Glycine max
  Clone ID: PAT_MRT3847_68350C.1
tcttcttgttgggtttaataagacggaaatgtaaccaaaaagataggaacactctcgttcaatagccgatttttagtgtacctagagaattaataagtgacaccttttcgggcgatcctgcctctgaaacactaaaaagagggaact

SEQ ID NO: 107791 - DNA, 150 bp, Glycine max
  Clone ID: PAT_MRT3847_68351C.1
cccacgcgttcggatttatgaatttacaaacaaactgcaaaagcatttgccgggggtggctctaaatgatccagacctacggccgcgggcaagatagctcagacttatgtgcacgtgccacctaaattagataacctgtccgttgtggac

SEQ ID NO: 107792 - DNA, 116 bp, Glycine max
  Clone ID: PAT_MRT3847_68352C.1
ggaataccaagatgtacacataattcacatctctagggaccccagaatgctggggggtaagcatgtatgagcctgcaaaccttgccttgcagccctttaactgattgggatattac

SEQ ID NO: 107793 - DNA, 663 bp, Glycine max
  unsure (1)..(663): unsure at all n locations
  Clone ID: PAT_MRT3847_68353C.1
nnnntttnttttntnntcnttttttntgcaataaacaatcctgctattatttctttcattaaaattgaatttatgtacaaaactattggctgagttatccatgaattaagcatctatatattaacaggctcaaaatgagcaaaaaataatatgcatctacgctactttttcacattcaaaaagcatcccaaaattccctttccctttaaacataatgttatgtaagggaaatttgaagtggaatgtgtgcacttttttaccaaggcaagagttgcaagacccatttccagacttatactattaacagaaaatgaagttgcacaagttaatttgatgcaggtcaatcctgggatgtggcagaatattcaaaaagaaggcgtttggatgcagcagattgtaggagcactcgcaaacgacttgtaagcagatagctcaatgtccattgctttgccatctcggactccttcatttgcctaacgattgtggcccgaagacgtttcccaagctgaacttcaacttctgtaccaaaagatatattactggcgagtgactttagaggatctgctgtaggatcaacagaaactaaactaggaatctgaggtgcatacactagcctccacctagcccggccggctcgagggtcacgggcgccctatagtagtc

SEQ ID NO: 107794 - DNA, 162 bp, Glycine max
  Clone ID: PAT_MRT3847_68354C.1
gcgtaactacgtaatacggcagcatactgagcatgggagcccggagcagtcaagggatcttgcatatctacatgatggccaaatactgacgtagagtttgcagatgtatgactctcgcgcaatccaataggcacctaaggttattaaactttagcagagagc

SEQ ID NO: 107795 - DNA, 431 bp, Glycine max
  Clone ID: PAT_MRT3847_68355C.1
ggacaaaaaaacccaaaaaaagttttggctaaattctaggcttcaaaaaagcaaacaataacatcatttttcaattggggattgggaaagggaaacggtttaatccttttttggaaagaaaaaaaaagaaagaaagaaaaattgccctaatagttaaacccttcacattgccccggattttgaaagtcccttaaaaggatggggaatcttggccccagttgtttcactaaggcttgcaacaagaggaccctcatggggaacaacatcctttttaggggagcttccgggacccctaagtattcctttggaaccattaaacacaacacccttaaatataaggggcttgggagttccaaaaataaactcttaaaaaacaggggccccagttttcccaaaaaagacaaacatgttggcaacattcagtccccaac

SEQ ID NO: 107796 - DNA, 1637 bp, Glycine max
  Clone ID: PAT_MRT3847_68356C.1
ccccatcctcattctctttccaatcctaccatcatttctctttctctttctttcataaacttcaccctttgaaaatcctttctttatcttcatccatccataggcacagctcaatggccacaggatttgttggtgaaagcaatagaagctattgtggtgccaaaaacatgtccaaaggatcagcaaagtaagtcaaggccacagaaggaactcgactttatctttccatggtgtcattcaattaacaccaagttcagctactacaacaactacagtggcactcagcctaattgtttatgcaatgcttgtagatagtattggactgaaggctgaactaccttcaacatccctgtaggcggtgcctccaagaaaaaaagctattcatcatccaaggtgtcctcacattatcacaatcaccttaaacatcattcactacattctcacatactttctgaatttgtccaagagttgtataaggtatggcacactcaaaaccctaatagcaataatgctattcatcaatgccaagatctcaatctggcttttccatcctccaccccagatttcagaaaaatctctgaattggtccaacaaaacaacaacaacaacaatagtagcaacaacagcatgtcagcttcagcttcttcttcttcaaccacaactacaacttccacttctcacctttctgcattggagcttcttactgggatcacttcaagttccagtgctggtttgacttctttcatgcctgtgccggttccatctgatccaaattctatctacacatgtgggtttcctctgcaagatttcaagccaaccttgaatttctctttggatgggatcggaaacgggtacacaagccttcagaatgttcaaagtgggaggctcttgtttccatctgatgacttaagacaggtttctagctccaccatcaccacaatggatcagaaacaacaaggagattcaactgggtattggactggaatgttaggcggaggatcatggtaattaatcatcaagagagtcataaagatatatatttatttacttaatttcttctcttgctttctactaagttaattttccttttgaacttttttcttttgggttttaatgagtttccgtcagatcatgtggggacttcacttgtttggatttcttcataactggctaacagctgataggatcgattcatacatgagtttcttttcctcttctgtcaattccttatatgtatatctggctccgcttatatctcttcatgaccaagtttattttgggatcttgaaatgaagcttattttaggcaggcttcagtagtacttggaaaattaaaacaagggttacattacatttgattatatgtaatgatagaagagatcaagattaactccatttttttagggttaacaagtagctagaaaggggggccgggtaaattaagtgttattgctgttatagtatttcatgtaatttcttctatcactgaagaagggcaacatcatcaattgatttgattgtctagcttaccggattcgaaaatgtataatgtccaagaatatattattattattattaaataaattattggtatgctttttttatgattaataaattggcgtgttatgtttccattgt

SEQ ID NO: 107797 - DNA, 404 bp, Glycine max
  Clone ID: PAT_MRT3847_68357C.1
gcgtccgattcaattggctcgatgctgtctcagcacctcatttagggtacaatatgctgaggaactgaccaaaggtccctgaacagtgagagatagggaagagcagaaatccgttcctgtaccaagtgtctaacacttaatataggtgagagctggcgtgagattatctgtgctgtggaaaaatgaggacctatcgatacctctaagtatataatcactgccgtgtcacattttaattagctccttgaggctatagaaagaagttcgcttcttatcctccaaattaagcatcacttttacaaacaatcaatgttccattttcaaaaccccaagtagagcaatgtttgattttcattactttccagctttgaaaatgtttcatttttagcaatatgttataggaa

SEQ ID NO: 107798 - DNA, 1075 bp, Glycine max
  Clone ID: PAT_MRT3847_68358C.1
atgctaagagaatagcttctggaaattttggaagctgccctatctttcttttcttttctgttaatgcaagtggtcaattttgtggggttgcagagatgattggacctgttgacttcaataaggacatggacttttggcagcaagataaatggagtgggagcttccctgtaaagtggcacatcataaaagatgtgccaaatgcaaattttaggcacattatactagagaacaatgagaacaaacctgtcactaatagcagagacacacaagagataatgtatagtaaaggtttggaaatgctgaaaatattcaaaaaccataatttgaagacatctttgcttgatgactttatgtattatgaaaatcgtcagaagatcatgcaggaagaaaaggccaagttgctaattagaagttttaaaaatccgttagtgttacccacattagaaccacctcgtaagttgaattttgtcgttgacatccctccagtcagtgttgagaagaaggcaaagatggatgatgagtttgatagcctaaaacagacttcaagtgctggacatattgttagtagttctgaggtcacaagcaccgcatctgtggatgaaaaggctgagaaaggttcagttgagaaagaagatattgcttctgtccttaagattggttcagttactattaccccaaaacaggtggagactaaaccatctggcattagtgttgctaataaggaaccgcttgatgttatcacagtaggctcaatgcaagtcaaagttaatggatttgccgagtcttcgggtcttttgaagattgggagtatcccacttgatccaagaacactacagctggacggaggtactcgtgttaaaaatggatcttaaagttttcttataaatgtcgaggcacgttttggatctttatgaaaagatggatcaatgcatgcctgattgtgccactgttgggaagttgggtttctattcaatcttttttttttactgcttttttgtttgctactgattgatataaagggtcatactgatgtcatggatctttcgagcggtgttgattcaaaatgcttttaatg

SEQ ID NO: 107799 - DNA, 345 bp, Glycine max
  unsure (1)..(345): unsure at all n locations
  Clone ID: PAT_MRT3847_68359C.1
ctgattattgcaaagcagaaaacgaaagcanccccctcgctcctaagcaagcaattgccctgaaccctcaaaatctaccactttctctcacagccatggaatctccagggacgaatcggagcaaaacccgaaggagaataaccctaacgagcaaacaatcaccagaagagtctcctcgtcctcttcaacgaccaggcgccacgagacagcccaagacggcccggagaacggcaacaccccctacacaaccgcagaggacgggggcccctccccagaccaccccgggccagcgcagccccgagaaccgatcctcccgcgacgccgggggcgacagggccaagaagc

SEQ ID NO: 107800 - DNA, 3311 bp, Glycine max
  Clone ID: PAT_MRT3847_6835C.1
gttttaggtggggatggagaaaagagcaagacgcaagcatagttgccaatagaacccgaggtcaagcatttcaagtcctggtagcttcaggaaaggaaggttcaaaagatgatgtggtcatggttgatcctgtggaagccaagagattggctgccaaacaaatggaaaaaattaaagcaaaagagaaactcaaggtgaaagcagtcttatgtttgaatttgaatcacatatttggggttattgtcttttattatagaagtatacaagaagtttgaaagtcattgtccttccccgaatccctgtaattgtcagtcaggacagaagcaaactacggatacagaggcagcgacggtcaaggtccagaatccagaaccgaatgaataacccactgcccacagattatagaattttggacttgcacgccgtcgtctcccaccactcaatcaccatgccttctccttctgcagatcaatcacaatcccaaccaaaacctaaccccaacctcctttccctcttcctcaagcccatcatcatgctccttctcacctccctcttcttcctcttcctcggcttcgccgccttcctcctcctcaacctcttcctcctcggtggcgccttccaccgccttcgcttccgcccctccgttacctccgcccccgcctcctccatcggcctcccccctcgtgatatcaacaacctcccccgctttcttgtcgccaatggatccgcgacccgacccgactccaattgcgtcgtctgcctggacgcattccataacgcccaatggtgccgaaagcttgctgcgtgcgggcacgtgtttcaccgcaggtgcgtcgacacgtggctccttaaggtcgccgcatgccccacgtgccgcacacccgtgggattcaatgccggtgctacggtacatgacccgcctcagcggtctgaccatttgcatacctgcggaactgactccaatgctctcaccacccttttatagcttgtaagttttcgtttttaagcctttcccaaaccatgtaaggatatcaagtaattgtttttttaatctatgtatatgaattgtagcaatagttttttctcccatttcgacgactattgggaagaaatgaaccaacttaattcacgaatgttttggtaagtttttacttttaagaagaggagaatgctggacccccttcaggaaaggaaacccgggtccgtggttgggtcctgtcgggcctcctgcttttaggatcggccctgatcgggtcaaagttggaacccttattgggcggtcaggattcgttcccggttaaggataaagcgggtttaatagtttcttccggattgttagtgctgtggagttacgttgttatccctgtcttttccggggcctgtagaaaaccccccccaattagggacccccccccagatgattatgcccccccccaccaacaactttttgtaatataaaataatgtaattcaccctcatgatcccctttttccaactttagtttttgtatttccagttttcccccacctccccccaagaaagataccaaaaaaaattaaatgtcttttccgggaattttccctaaaaaaagtttcgcacttcgcaaccaggggaaaaagaggtgtagcaagtacgggagggcaatgcaatggccaccattctgaccgccaagcaacgctcagtttgtttcctttcatcagcttgccaaccgctacttcctctcccacttctcccaaaggtggtgatggagaaaagagcaagacgcatgcatagttgccaatagaaccctagccgtcgaagcattttcaaacctcctgcttcgctttcacggaaaggataaggatcacaatgatcgatgtggtctttggcgtgatacctgtaggaggcccaagatattgactgccaaacaaaatggaaaaaatgaaagcaaaagccaaactcaagagaagacgccaaattgaggcaattaacggagcatgggcaatgattggtctcacggctggccgtagttattgaaggccaaactgggaaaagtattctgactcagctgcaagactacttgggtacaattcttagtttctttgtgcggtagacttcttccacgagttccatggatacatattaaggactccaggttctttctcacattctttgtactttatatttgttaaaagtatccctgcgagatttttcttcacatacctagccatacaattttcacttctcaactttcgtcgttgctcggttaagctacatatggatcataaatttttgagctgcaagccagtttatgaagtttggtttttttgtttgtctatgtagatgaaattcggaccgatatcgggctaccgagagaacgcatgattcaaggggcgtgtgttagtcgcggtttagggctaaatcggttctgataattcctactggatcgttcgtgctgaggtgttaagttatgaaaaaaaaataactctgtcactaaaggaaaaatgatcagagtggagttatccattcagaccttgtctttattactgatgagaaacctcatagtctcttaaaaagggatggcaatgatcttgttgtcacccagaagatatcgcttgtagaatccttgacaggttacacagtgcaactgacaacccttgatgggcggaatcttacattccccattaactccactattagtccaacatatgaagaagttgtcaaaggagagggtatgcccattccaaaagaaccttccaagaaaggaaacttaagaatcaagttcaatatcaagtttccctccaggcttacatccgaacagaaaagtggcatcaagcgattattgacatctccttaagcaacagcagtagctcttcctaccatttagctaacattgtaagatgtcagttattttatgcttggtttatttgttttcaaatggaaattgctgccgctgtgaactggatttcagttagaacagtttattagaggatgatatttgttaattgtttcatgtcttaagtatttggtagtgaaaattttcttaaccacttattcacttgtttatgtgaaaagtgcctgtgcaagaattgaatttctttgtattagtattattcttaccccggtgatgcttttccttatcacataccgaatcgtgtaagattggaattattttttcaaatgtaaattctttccctttgcgagatggttttcagttagaacagtctattggacgtttgatatttgtttgctgtttcatatttatgtagtttctggtcttgatgccaaaaaaaaaaaaaaaattttttttttaaagcggccgctttagagga

SEQ ID NO: 107801 - DNA, 351 bp, Glycine max
  Clone ID: PAT_MRT3847_68360C.1
cccacgcgtccgaaagtagttgtggcagcacgtaactgaagagatggaggacaaccaaagacgactctaacaaaatttggtcaaagggtagaaatttttttatacaacctggtccgatacaaagattttctatgtcaatggacgaatcagatgtttctaagctagagagcctaataacgccaaaaattaaaagagtttctttcagagattctgtcaaactctgtacttatgaagatatgccagagacaactactgtagatgcaattgatgacaaaagaacatagtctgagcagatcatccagctgacttcaagaggtgtgaactgtatcaacagtgattgcattggaaaaa

SEQ ID NO: 107802 - DNA, 714 bp, Glycine max
  Clone ID: PAT_MRT3847_68361C.1
agaggaccaaattttcaagatcgaaattgtggagcccatttcttcaggtagtatcttctaattgaaaactatttttttccctgctatggctttctgtttctgatctaaatatctgacttgtgcttccttagtcctgcacatgttatgccgcttctggaaattgtacgtaccaagcagacctctgctcaagtggtagttgacgtgttagatatttcaaagaagataaagaaaactccagtggtggttggaaactgcacaggatttgctgttaataggatgttcttcccatatacacaagccggtctctttcttgttgaacatggtgcagatgtttatcaaattgatagagtaataaccaaatttggaatgcccatggggcctttcaggtactaattattcgataagttcttaatattttcaatcagttcttgaagtgcctgatttgtcacgtatttactaatgcagattggtggaccttgttgggtttggtgtggcgattgctactggcatgcaatttattcagagttttcctgagcgaacatataaatcaatgcttattccccttctgcaagaagataagagagctggtaaagctaaactctgcatcaatttgaattggaattctgacgagatttctgtgtggaatatatttatgtaacagtggaatgctctgttgtattctgccaaactaattcactgaaatctttgtttaac

SEQ ID NO: 107803 - DNA, 234 bp, Glycine max
  unsure (1)..(234): unsure at all n locations
  Clone ID: PAT_MRT3847_68362C.1
aacactctctctcataacatctcgtccgttttattaaaatcnccatccccccatttaaaaaaatttaccatttaaataaccaaaattccccttcaaaaaaataatcttcaactttttcctatcaactatcctttcatcaccactnattacattacatacattttcaaatacaacaccattcattnccaataaaaacatttttatattaaattaaacaactctaatacccttctc

SEQ ID NO: 107804 - DNA, 1429 bp, Glycine max
  Clone ID: PAT_MRT3847_68363C.1
ccctagcgcccgtctatcagacctggcttccactgtgaagcatcaggccactcatcgatctccaaggccttcatggccccagtccctctggccgaaaagttagtgctggtatcagacatggcttccactatgaagcaggttccctctaatttcatcaggccactcggtgaccgtccaaatcttcaaggcgtcgtccaatcctcagatgtttgcattcctctcatcgatctccaagaccttcatggccccaatcgctcccacatcatccaacagattgaccaagcttgccaaaattatggattttttcaggtgacaaatcatggagttccagagggtgtgattgaaaagataatgaaggtgacaagggagtttttcggtttaccagagagtgagaaattgaagagttactccactgatccattcaaggcaagcaggctgtccactagtttcaacgtgaatagtgagaaggtttccagctggagggacttcttgagacttcactgtcaccctatagaggattacataaaggaatggccctccaaccctccatctttaagagaagatgttgcagaatactgcaggaagatgagaggagtatcattgaaattggtggaggcaatttctgaaagcttaggtttggagagggattacattaacagggtagttggagggaagaaggggcaggaacaacagcacttggcaatgaactactatccagcgtgtccagagccagagctgacatatgggttgccagggcatactgatccgacggtgataaccatactcctccaagatgaggtaccgggattacaggttctcaaagatggcaagtgggtggctgtgaatcccatccccaacaccttcgtagtgaacgtgggtgatcaaattcaggtgataagcaatgacaagtataagagtgtactgcatcgagcagtggtgaattgcaacaaggacaggatttccattccaacattctattttccctcaaatgacgcaatcataggacccgctccacaactcatacatcatcatcaccatccgcctcagtacaacaactttacgtacaatgaatactaccagaatttttggaacaggggactttccaaagaaacttgcctcgatatcttcaaggcctaagtttgatcattccaatgtatgtgtggtgtgtttctttatttatgatagaaaaatgagaaataaacaaactcattgcaaaataaagtgtgtaatgtcttatgggacataattttgtaccactaggctgggccagttgtttgatgattaaggcactctcaatcttaatcatttatgctaaggcactcgagattgtgagattgtgcttttttttctatcgacaatattaattgttagtttgtttgaatgaataatttgtttgaattagataagattcgatgatttttttttcttg

SEQ ID NO: 107805 - DNA, 164 bp, Glycine max
  Clone ID: PAT_MRT3847_68364C.1
gctgagagatgacgagagaagggattgaggatgatagtaaaagatagctaaagtatatgagatgtcaatttcatgagaattcagtcagagaaaaatagttagtattcaggcaacagtgatggtttgtatggagggagcacattggatttggatattttgatgta

SEQ ID NO: 107806 - DNA, 1205 bp, Glycine max
  Clone ID: PAT_MRT3847_68365C.1
gcagaaagaaagaatcatgtcagtttggctccaaagagacgtggaagctgataattatcgcaaaacaaaacattgaatagcagctagtaatgccaagcaaaagaaaccattttgatactaagcttaatttatcagttaacattggtataatttactggcattacttctatgggcacaaaaggattatcctgcacagatcttctatatactacttagacaccaagcttaagtgcttaacacataaagctttctcaaactaaactttaataaaatcgaacaagaagaaaaactggaaatgaacaattcaaaatttctgctaatttttttttttttttttttttttttttgtccaggatagatcttgatgtaataatatatttttttttctaaaccatcaatcatccaacagaaacaatattgtcaacctattataacagaaacactcaattcaaaatattcattgcataaataaccgagtaagtaaattgtcagatgagcaactattgggagaggggaacaactactattaactccaatgacagccaaaactgcaaaaattagagcacataacattatatttaagaaggaatgtttgaactagttggtgcaccataaccaccggaaccacgaccaaaaccaggccttccaccaggaccacccccaaaagaaggcctgtagtcagcaggagctccacccttgtcaccgaaatcaccaccaggtccgcgtggacctccacggtatccatcacggtcaccaccgaatctcctctctccgtcaaagcgaggtgggcccctggggcgatcaccgggtgggccaccgaatggtcttcccgcgggcttggcctgcttcttgagagtggcagggacaatttcggaaggaaggttgaggtatgtcctgaggaactcaattccatcgttggtgaggaaccagtaatagtgcatccacgcaaatgtctccctcacatactctctggatttgaagctctgcatcagctttatcacctgcagattcggcacatcaatctctgggtgctttgccagattgaagtccttcttcgcaaagcaaactccctcttggaagaggtatttgcagatctctttacggttcttctcgggaatgatcatggttgctacggtgggtgaagcggcgacggaaacaagctcagctgctgctacctcgagccgctcgagccgattcggctcgag

SEQ ID NO: 107807 - DNA, 957 bp, Glycine max
  Clone ID: PAT_MRT3847_68366C.1
attgtcacatgttaaatttattctcttaaaaattcgcaacaatatataaaacatcccaaaataaagttacttttttatttaaaaataaaggcttttcccagctatttttcactttctaaaccatcaatcatccaacataaacaatattgtcaacctataacaaaaacacttaattcaaaatcttcattgcataaataaccgaataagtaaattgtcagacagaacaaacaacttttgggagaggggaacttctattaactccaatgacagccaaaactgcaaaaactagagcacatataatttatatttaagaaggaatgtttgaactagtcggtgccccataaccaccggaaccacgaccgaagccaggccttccgccaggaccacccccaaaagaaggcctgtagtcagcaggagctccacccttgtcaccgaaatcaccgccaggtccgcgtggacctccacggtatccatcacggtcaccgccgaatctcctctctccgtcaaagcgaggtgggccccctggggcgatcaccgggtgggccaccgaatggtcttccggcgggcttggcctgcttcttgagagtggcagggacaatttcggatggaaggttgaggtaagtcctaaggaactcaattccatcgttggtgaggaaccagtaatagtgcatccacgcaaatgtttccctcacgtactctctggatttgaagctctgcatcagctttatcacctgcagattcggcacatcaatctccgggtgcttcgccagattgaagtccttcttcgcaaagcaaactccctcttggaagaggtatttgcagatctctttacggttcttctcgggaatgatcatgttgctacgctgaagcggcgacgtatacaagctctgctgctggtaccacactatgcgcgatataaaccctaattctacctcgagccgctcgagcggctcgaga

SEQ ID NO: 107808 - DNA, 1896 bp, Glycine max
  Clone ID: PAT_MRT3847_68367C.1
cattcggctccagatactacacataactacataatctcaaaacctagtctgaaaccatagcacaaaatcaaccatgtctccattgattgttgccttggctacaatcgcagcagcaatcctcatatatcgtataataaagttcataacacgcccatccctccccctcccaccgggccctaaaccatggcccatagtgggaaacttgccacacatgggcccggtgccgcaccactccctcgcggcgttggcccgcatccacggcccgttgatgcacctccgcctcggcttcgtcgatgtcgtggttgccgcgtcggcctcggtggcggaacagttcttgaagattcatgactctaatttcagcagccggccaccgaacgccggcgcgaaatatatagcttataactaccaagatctggtgtttgccccctacggcccacgctggcgattgctccggaaactcacctccgttcacctcttctccggcaaggccatgaatgaatttagacacttgcgtcaggaagaggtagctagattgacatgcaacttggcaagttcagacacaaaagcagtgaatttgggacaattattgaatgtatgcaccaccaacgcattagcgagggcaatgattggacgaagagtgtttaacgatggcaatggagggtgtgatcctagggctgatgagtttaaggctatggtgatggaggtgatggtgttggctggagttttcaacattggtgactttattccttccttggagtggctagaccttcaaggggtgcaagctaagatgaaaaaattacacaaaagatttgatgcatttttaaccagcattattgaggagcacaataacagttcttccaagaatgagaatcataagaatttcttgagtatcttattgtcacttaaagatgtgagggatgatcatggaaaccatctcactgataccgagattaaagcactacttctgaacatgtttacggcaggaactgacacatcatcaagcaccacagaatgggccattgcggaactaataaaaaacccacaaattttggccaaactccaacaagagttggacaccgttgtgggtcgagataggagtgtcaaagaagaggacttggcccacctcccatacttacaagctgttatcaaggaaaccttcagactccacccatcaacccctctttctgtgccacgtgctgctgccgagagttgtgagatatttggctaccacatccccaagggtgctacactcttggtgaacatttgggccatagcccgagacccaaaagagtggaatgacccattggagtttaggcccgaaaggtttcttctaggtggtgagaaggccgatgttgatgttaggggcaatgactttgaggtgataccttttggtgctggacgaagaatttgtgctggacttagtcttgggcttcaaatggttcaacttctcactgcagccttggcccattcatttgattgggaactagaagattgcatgaacccagaaaagttgaacatggatgaagcgtatgggctaaccctacaacgggccgtgcctctttcagtgcaccctaggcccaggctcgcaccacatgtgtactcaatgtcttcctaatttttaagttctacattttggagtttttcttccttataattgttgtcttttcttttgattaacaaggatcctagtaacaataaaaacatacatggtgatatagtatgttagtgtgtgaagatccaaaaacatgaaaaggtgtcatttcatatgtttttggtagtgcctttaaaatttacttgtatatgtatatgaataattgaatatatgctatatggatgggattcaatgattaataaaaaaaaaaatttacctgcgagaaaagctcgaaatatataatg

SEQ ID NO: 107809 - DNA, 426 bp, Glycine max
  Clone ID: PAT_MRT3847_68368C.1
aaagacaacaccgatatcacccattccaaacaaaggccgattgcgtaactactgcggaaagtcggaagctcttgacatgtaccaattctgtctcaaactctcgctcctaatttcactcttccatctctcctttgctgctaggagactcaaacagctgcatcaggaccagtcacagctactccattaccacaacgatcctaacctatacggctaaaacgtcttgaacctaatctggtatgatcactttaaaccatgccaaactgccatcatcatcgacgacggtacctgactggcatactcatcgtctcacagcagtcagtcttgtcgtgccacctggtctaaaaccacggacaaatactaccacctgtattccaaaaacaagaatgctgcatcttctcttgatctatcactgggcgatcagtttct

SEQ ID NO: 107810 - DNA, 308 bp, Glycine max
  Clone ID: PAT_MRT3847_68369C.1
gggggcttaatattttttaagactgtctttgttttttatacaaaaaaggccgagccccaccacggggttattcggcagagacctgccacccaaggcaagcagcccctggggagctgttcctgttccctcaatttcggcgaggaagccgttctcatttaacgccgagcgaaccgaaagggggtttgtggaaaaaagatttaacgagggcggcctacttgataccccgacaaaagccagaaccgagccagtgcttgggggcctgcgcttccttaaagacgggggacccgagcgcaccgtcgagattgccg

SEQ ID NO: 107811 - DNA, 465 bp, Glycine max
  unsure (1)..(465): unsure at all n locations
  Clone ID: PAT_MRT3847_6836C.1
gtggagcacaaggttgtggcaaataacaaaatggaaagatactccatagcatatttcctatgtccttcttacagtactgtcataaacggctgcaaaggaccttctgtttataggaagttcacgtttggagaatacagacaccaaattcaagaagatgtcaagaaaataggacacaaaattggactatcaagatttctactttaagatacatgcgcacattgggataaagcattaaacatcattcacatggaggaactaatattactattttgcctttgtagtaatagagaaaagagggagttccaatattcttttttttttatatatatataaataatgtttttctgtttagatgcaatatatgtaagaaaaagagaacagagccagataaaaaaaaggtggtggtttatgatacacccagttagaagcacctgaataaaaaagtgtttttttttcctcannnna

SEQ ID NO: 107812 - DNA, 300 bp, Glycine max
  unsure (1)..(300): unsure at all n locations
  Clone ID: PAT_MRT3847_68370C.1
tnnctgcacgcgtacgtaagctcggaattcggctcgagnnngcntggaaganatttttaagtacanagctgaagctcancaganagttanngagagataccgaganagcaagtacaagcagcangtggtnngggtgttcatctngataagtttgaagagnagnnggattcantgctggaacagaacncgagngaagaacangagaggtaganggangagcgtngcccananaggagtaacnnagaagttgtccgagtgggncatagnngcnnagatgcangaccntggcagnnacaacat

SEQ ID NO: 107813 - DNA, 240 bp, Glycine max
  Clone ID: PAT_MRT3847_68371C.1
ggaacaagcaagaaggcagggggcaacaggaagccagcccagagacatgatcttgaaagaagaggggcaagagaatctcgagctgttcctgcacctgatgccaatgctgaactgccactgtcaatgcagagacaaagccaggctcaatcaaaaagcagaagtgagaaggttaatcctcatcttgaagaagcttctggatttcccatcgctccccccagaccgtcccaagctgccgaagca

SEQ ID NO: 107814 - DNA, 1254 bp, Glycine max
  Clone ID: PAT_MRT3847_68372C.1
atttgtgtgcggctccgcggggacggcggaggagggagtgagggaataatgttgcggattgctcccaaattcttcaccacggttcctcttcggaccatttcacccttcgcatgtcgcttctcagtccgttccatcgctgactcttctcctttcaacaaaatccgcattcaaagggatgatactgttagtcataatcacaacccattcaaagggttgcggattgctcccaaattcttcaccacggttcctcttcggaccatttcacccttcgcatgtcgcttctcagtccgttccatcgctgactcttctcctttcaacaaaatccgcattcaaagggatgatactgcatttgatgcatatgtcgttggaaaaaacgacgctcctggaatcgttgtgcttcaggagtggtggggtgtggactttgaaattaaaaatcatgctgtgatgatttctcaacttggtcgtggatttaaagctcttattccagatctgtacagaggaaaggttggtctagatgttgcagaagcccaacatttgtttgatggtcttgattggcaaggtgctgtaaaagatatcaatgcttcagttaactggcttaaggcaaatggttcaaaaaaggctggtgttactggattttgtatggggggtgctctcgcaattgcaagctcagtcttggttccaaatgttgatgctactgtagctttttatggagttccttcttctgagcttgcagaccctgcccaagccaaggctcctgttcaggcccactttggagagctggataattttgttggcttttctgatgttacggctgccaaggccttagaggagaagttgaaggcatctggtgttccacatgaggtacacatatatcctggcaatggacatgcattcatgaacaggtctccagaaggaatcaagaggaggaagaatatgggaatgcccgacgaagacgaagctgcagttcagcttgcatggtctcgcttccagtcatggatgacacattacttatccagctaaatagtttcttagtaatgccacaatggtatgataacatgatatacttctaattctgcatttgattagtagtttggtataactcttaatggccccatcaactctaaatatggtgctttgtttccttatgggtggatacatacacccttgagaaatttggcttggaaataattagtttgtctataataagtaaatatggtctttgtttaaaaaaaaaaaaaaaaactttccctcaac

SEQ ID NO: 107815 - DNA, 253 bp, Glycine max
  Clone ID: PAT_MRT3847_68373C.1
aatcatatacatacaccttcgatggcctgaagaggctactcacccacccactgtgaacgctgggttgcctgaattcatctactcctcgatctccaagttcgccggatcaggtgacggcctcgactactccatgctcaccaacgacggtgcctcctctccctccggcctcatttccggtttcatcccccatgctgccggcctatatggatccgtatggatgcgagcaaccatgttcgggggacacttaagcgct

SEQ ID NO: 107816 - DNA, 170 bp, Glycine max
  Clone ID: PAT_MRT3847_68374C.1
agtagctgctgattgcgcttctggacagtcattactatcatgcctgtcctcagactgatgcgaactctgcacctcacagtgatgaacaatctacgtgggcagtgacaacgccagcacaccttgcactccctgccgttggtactacaagtgctgaccctgcaggtgcagac

SEQ ID NO: 107817 - DNA, 726 bp, Glycine max
  Clone ID: PAT_MRT3847_68375C.1
ccacgcgtccgcattcaaaatgcttgcagaagttgaagcagcgtttaaggttgccgggccggcattgatttttccagtttgagagagaaagagagaacttgacacttgacagcgtcagacacgcgcctaattggttgttgtcctttgagctggtttctgcagtgtggtgtggttcattgcattgccatggcttctaaattcaagagtgtgtcctccattcggaagatcacgcatctgagcggtgatatggatcaggaggatgcgaatgggggaagggctagtcttgataactactcagttcacattcctccaacgcctgataaccagcctatggagatttcgctggagaggtcgaattctcggagagtggaggaccaatacgcttctagttctttgttcaccggtggctttaatcagctcacacgcgctcatttgaaggacaaagtgactgagtcagaatccagccacccccagatggctggtgcaaaagggtcctcttgtgcagtgcctgggtgtgatggaagtctcatgactaaagagagagggttggatgtggttccttgtgagtgtaattacaagatttgtagggattgttatatggatgctttgagggctggtgaggggatttgccctggttgtaaggacccttacaaggagcctgaggttcaaggaggtgtggccaactcacaggcactgcctttgcctccgcctcctggtgctaataag

SEQ ID NO: 107818 - DNA, 285 bp, Glycine max
  Clone ID: PAT_MRT3847_68376C.1
ccacgcgtccgggaaccaggatgatcatcctgatgatagtgaaagtgaggacgaggcacctaggaggtcaagacatggagaggggaaaaagaaacacaaaatatagtcattagctagctaatgctttcaccaagcactacatattgatgatccactaaccaggattctagtttccaatgctttttatttttgacagattgctttgtataagttcttttctcccccctcttaagagacctggggactgggttgcttcaaaaagatttaaaattctgttcaccgatc

SEQ ID NO: 107819 - DNA, 365 bp, Glycine max
  Clone ID: PAT_MRT3847_68377C.1
tatatggtgtgacaacctcaaccaacgccgaattatatcgttgcgatcgttttgatttgagcaaggacgaagaggaaagattcgctcacaacaatgacaatgatggctctttcctatttcagttcccgttgttgagaaccttctccaaacattgtcatgcatcttcatcctcatcaacgtactcaagctcacccacactatcatttacatcaacattgtgtttgaaagagaggaaatctttgcggaggctctttttgtgtataagaaaatgggagcttgtttgtgcataatgctttggcctccatgtatggcaagtttggaaaactgcatgttgcacaccacttgtttgaaatatgccaagtaga

SEQ ID NO: 107820 - DNA, 700 bp, Glycine max
  Clone ID: PAT_MRT3847_68378C.1
ccacgcgtccggtttggtgcttttacaaaaccacagcctttactcgtttccttaccaaactccccaataccattcaaaatgcttgcagaagttgaagcagcgtttaaggttgccgggccggcattgatttttgggttttgaaaaatccttatctgtgttggactcagtccagtttgagagagaaagagagaacttgacacttgacagcgtcagacacgcgcctaattggttgttgtcctttgagctggtttctgcagtgtggtgtggttcattgcattgccatggcttctaaattcaagagtgtgtcctccattcggaagatcacgcatctgagcggtgatatggatcaggaggatgcgaatgggggaagggctagtcttgataactactcagttcacattcctccaacgcctgataaccagcctatggagatttcgctggagaggtcgaattctcggagagtggaggaccaatacgcttctagttctttgttcaccggtggctttaatcagctcacacgcgctcatttgaaggacaaagtgactgagtcagaatccagccacccccagatggctggtgcaaaagggtcctcttgtgcagtgcctgggtgtgatggaagtctcatgactaatgagagagggttggatgtggttccttgtgagtgtaattacaagatttgtagggattgttatatggatgc

SEQ ID NO: 107821 - DNA, 344 bp, Glycine max
  Clone ID: PAT_MRT3847_68379C.1
gacggtttggccaacctgtccatccatccaaaattccccatcccgcaactaatttaattagttacttttccgttaattatcttccttccctggctcgagcatccaaaaaggttggttttttttttttttagaagaagaacaagataaggaagatgattatgatgactatggatgggatgatggacgaaggggtgttggatcatttgataagaaagcttctggaaaggaaaggaaggaaacaagtgcaactctctgagtccgagatacgttaactccaagtcaacgcccaagaaatcttcctctctcagccaattcttctcgacctacgtgctctcatccgcaac

SEQ ID NO: 107822 - DNA, 574 bp, Glycine max
  Clone ID: PAT_MRT3847_6837C.1
aggggctccgccgcggtgctcaacttccccgtggagaaggtgaaggagtcattaagagacatgaattgcactctctctcagcttgatgggtcttctcccgtcgtggccttgaagaggagacactccttaggacgcaaaatggctgctaagaagaagaaggtggaagagactcatggtgatgttcggttagagaatgtggttgtgttggaagacctaggggctgagtatttggaacacttgttgatgatgtcctctcatgatactactagttgttcttggtgaatctaattatgtacaagtagaaccattgtttaatctttcatgagttgcaacaatttctttttcctacatgtttttttctttaaaagcaattctgtttgaatcttgatttatcatgttgcagaaaattaacttgagctattaattgtttagttaatatatcctatgtacttttttcagtgaccatggtcattatggtcattgaatttttctttataggatcttagagtttaaagcttggataatttgtaccgagttatcttggtggcacccatctcctatgttcttttgttct

SEQ ID NO: 107823 - DNA, 356 bp, Glycine max
  Clone ID: PAT_MRT3847_68380C.1
ggtgacaaaaaaaagaaggtttgttcaatcttttggaggcctgagtgtcatctccaatccatagcttgcaattcccggcaagcacagtgattggtgtccagaaaggcttcagcttgctcctcccttctcaacttcaacaatttcgctgtaacacttcttctctcattctcgcagtttcacatttttacaacatttctccaaattttatgttttagtttatgggatatggagattgtgttcacatgtgatttgggtctgattttgattttgcgtttgtggggttatggttcccaggagaacatgttttgtggtgcactaatgttgttcgatgaaatgccccactgtcgtgatatttt

SEQ ID NO: 107824 - DNA, 554 bp, Glycine max
  unsure (1)..(554): unsure at all n locations
  Clone ID: PAT_MRT3847_68381C.1
ccacgcgtccgcaattacaatgttggaatctaagatcctttagatcnataaccacaactatgtcggttttaccaagcatggagcttcctacaactgatgtggaccttgagcctaagaagattgaacctgagaaaaacgaaggtcccttgttccattgtgatttttgtgatacagaagtagttcacaagctggctcaaatgttcctgccaggactagcctgtgcctgtgttgataacaccacaggcggtcccttcaagacccctggttcagtggctgttgatctgagaaaggaaatgatagaatttgtcacccaaaagagcgaatcgtttgttgctgagtctgttatcttagagggtggtcctgatggcggagcattggaacacccttttgatatcatttgctattttgttgatgagtttgttagttcaaagaggaatttgttgagccaggtttcggggtggctgctgagtgataagagagaggacaaaatagacgattttgttcaggagatggaaatgaatggtttttggccgctggatagaagagaaacactt

SEQ ID NO: 107825 - DNA, 458 bp, Glycine max
  Clone ID: PAT_MRT3847_68382C.1
tcggcttcgaggtaattaggtgaataaaaaatatattgtcattcttctttgccactctacttgtatatactgcggcattgcttcatgtttgcctgtgatcccttcgtgagactgaagttctcatactacgtaatctggggatggcagattcggtttatgttcatagtcctattataatccataatccaagagaaccttcacttgcttcacacatgctctgtgagctcatccagatgtcgagatacggtattcatttatagatgctgcaatctctgatgttgggagattagcctgagaaagcacagcatctgtttgttgaagacttgcttccaaggtcttctggacaacagcagtatctccagccttatcttaatttaatccatgattcacatcttgggctcgatcacatgtctttacaatttggaagtacttgctaaaaacccaatctgttctattat

SEQ ID NO: 107826 - DNA, 371 bp, Glycine max
  Clone ID: PAT_MRT3847_68383C.1
ggctttcatagagatgcaaggacataaaatctaaaaatataactcaaagggggaggataataacattggtggtgggggaactcagtgactaatatttactcggagactttatcaatccactacatttttacgaggattacagggaacgtgataactctatgatgtgcactacttctaatgcattcgacaaccggtgagccatagtaatctcccaggccttgctgtagacatattacactctttctagtagcagtagcacactatattatctgccaagatgctgtatactatggagctggttatgtagacacctctgctaactacatatgaggctcaatcatagattgtattaatgctatcatctggagagg

SEQ ID NO: 107827 - DNA, 399 bp, Glycine max
  Clone ID: PAT_MRT3847_68384C.1
gggggtacggcttcggggctttgtgttttggcgaggttgtgtaccgggggtagttttgcggtctcgggttttttggcgtccttgtggacaaggggtagtattgcggtggcaaatgttagggcgacctttaggtcttgtgggagtattggggtggatcatgtttgggcgtcgtttacgacttgtggatggcgtgtggggggtttctactggggtagctattttttggtgctgggtggccgttgcccatttgtggttaggccggatggggagttgatagacgttgatgttttagaaaatgccggatggggaggggatttgggttttaaatctcttgcgtcggctcggtacggaatggccgtgagtgtgacgttttggactgttggtcgtggtgtcggatga

SEQ ID NO: 107828 - DNA, 107 bp, Glycine max
  unsure (1)..(107): unsure at all n locations
  Clone ID: PAT_MRT3847_68385C.1
ttttaccaaaanaccaacanngcatgaatacaaagacaaaatgaaacctactactagttccagttgattcctggcgtttacagcactacagttccacagnacntgcg

SEQ ID NO: 107829 - DNA, 324 bp, Glycine max
  Clone ID: PAT_MRT3847_68386C.1
atacctaacagaaattgctaaattaactgccatggctacattaattgatacttagatatcaaggaacatatcatgaccccaaaatacaaaggtgcaacatggacgcaatattcctgtcttcattttcactcaataagctcacacctgataaagcttgaacggaacattatttgacgacttgcattgctgacgagatgcatgtatcacacgcaacaaaggctgaccttactgacctacgcagttccgcgcatagacccgactagctgacctagatacttctgtgcagacaaggcaacagaacactttagtcggtagcagtgatat

SEQ ID NO: 107830 - DNA, 579 bp, Glycine max
  Clone ID: PAT_MRT3847_68387C.1
ctactttggcattacttccaaggtttttcttccagaaaaacacaaaaaaatcatctgatagtcaaatagttgtagtttcttggtacttgttttgggaagctttcacaagaggttctttctctggaaattcccgttcaactgggcaaatctcctttggcattttggagtctttgagtgactccttttatcctatcaagcaaatatcctttgccattaactttcctgtttcattagtcaagatatattgttaataaactggcttactatctgtgacaaacatcagtatcaatcagacacattttgcattgtgaacaaatatcctttgaagtcaatatccatacatctgttgtggacctcaataccccctggatttcaatgcttctatttgcttgagaaggcatctagtagatggatgctcacatgactgatttggattgggagactttcagtgacggcagcagcagtgaggatcaagaggatattgattttcaatatggtagacaagctcggagcatattatcaagtttagaggaaagcattgggaggatagatgattttctctcatttgagagggcattt

SEQ ID NO: 107831 - DNA, 290 bp, Glycine max
  Clone ID: PAT_MRT3847_68388C.1
tcctctagagctgccgccctttgtttggtctttttaacagatattccccaacaaccaaagcgatatactaaaagagaaaagacaagaaaaagtcccaataacacttatgaagccccatcccgacctagggtataacatcattttacatgggacagaacacaagcctttgctattaacgggtggggcgatcacaaaccacacttgtgtatacagaacctgctgacagaagagttgtactgtggggaaaacccctcagatgcgagagaaccatttttgcttttctctacata

SEQ ID NO: 107832 - DNA, 153 bp, Glycine max
  unsure (1)..(153): unsure at all n locations
  Clone ID: PAT_MRT3847_68389C.1
gaaaaaagaatcctattcaaacaagtttctccaacaagtacctttttattttatcctatctgttcgtgacacctgatcnntagcattaagtagggttgttttcttcctnattcaaaaccctaaagtcgaagacaaaattctacgtgaaatttt

SEQ ID NO: 107833 - DNA, 273 bp, Glycine max
  unsure (1)..(273): unsure at all n locations
  Clone ID: PAT_MRT3847_6838C.1
aaggattctaaccgccgctcgatnngaattgcgcttcaaggagtcncgnagggctaatnngcctcacgagggtnaccaacggcacgtgcctttagngggcagaagncccctaactgcctggtcggcaaacggacggngggcncacgcgcgcttctagctcggattctgactnanaggnntncantcatantccaacgcacggtannnncgcgcnactggcttttgaactcagcgcgatgaccaattgtgcgaatcanggnncctctcgtacta

SEQ ID NO: 107834 - DNA, 594 bp, Glycine max
  unsure (1)..(594): unsure at all n locations
  Clone ID: PAT_MRT3847_68390C.1
cggataagataactgaaaccagcaaagactaccagcttcagcaattggtgttagctggggtggtctcaaaataagtctgtcctgctaaagggtagagaatgtttacaactaagaacgacataatgctgctcaattagcagaattcaaaaagccagtggtcctcctcctggttaggcttaaggctgcctcaagtactatggtactacaacaatcaaagaggggtctggcacgtcttacactaaattggaaaccaagaaaatgtggtccatcctgctgagaactaactagtgtcagacattacgggactactcgaatccagtgctaatgcaaaaactgcaaagtgtgtagttcatttcttctgtctgttatccttgctcactgctcggttcattttgtccatctatttgtccttgctcactattcagtgtattctcgatgagaacactacatatttgctaaatatatctttaatgcactatcgaactgaatatccacatcaagttcacctactttggtttctaccaattgcattgnttttcccatgtttcttttctcttagaagtgtagaatttttatgatccaagaccacgaaca

SEQ ID NO: 107835 - DNA, 245 bp, Glycine max
  unsure (1)..(245): unsure at all n locations
  Clone ID: PAT_MRT3847_68391C.1
aatttatgtattttatttaattttnttcctatccaaatagctttttttaaagaaaaaattaaaattggttcactgttgaccaaaggctttaactgccagatccgacctgttccagtttggaacagtagttactggtttatagaattgaaaggaatttctcaagatgagaggatttgaaaatcccccattaccaatcttaaatatatcaaaaggtgctggatgaatttaattctttacttaataca

SEQ ID NO: 107836 - DNA, 275 bp, Glycine max
  Clone ID: PAT_MRT3847_68392C.1
aatagctgctgttgatatacagaacacctgaaaatgatagacgcaaatgttcgttaactttgcatgatgaaaagcatgtatgatgacgattgtggaaatacgcacaagctgcttctggggtgggtgctcccacaactacatatatggctgtactactttaatgggtccatctacccaccatgctccttctgatgccctctctcttaaacccgccattaattacatatatctctctagttaatcctcgtcttcccctgtctttaatctaaatccct

SEQ ID NO: 107837 - DNA, 481 bp, Glycine max
  Clone ID: PAT_MRT3847_68393C.1
gcttcggttgacagacaacatgcggaaatatgacggtcatgaggcagaaactgtgagagattacagcgatggtgttaccgaacattttcagtttgaggtcatcaaaggatgcgcggtcatccttgagcttcttgccattgaaaaagagtatcagcaactcgttgtggatgctggagccttgccctgtcttgttgattggttaaggatgcaaaagatcagtactattgctcaaccacttattgaccttctaaagagagtagctgatgcaataaccagcctagcccatgaaaatactggcattaagaccctagtcaggatggaaggtggtatagctcctcttgttgaattgcttgaattcaatgacataaaggtacagagagcagctgcacgggccttgcgaactcttgcatttaacaatgatgctaataaaaatcaaattgttgaatgcaatgcgttacccacctttgtactaatgctccca

SEQ ID NO: 107838 - DNA, 754 bp, Glycine max
  Clone ID: PAT_MRT3847_68394C.1
tttttttaacttcaaaaatccttgtggagaattaagcagcgtgaaatcacactcatgttcacttaaacaaaacagccacaatctatcaaagagtaatactagctaccgtgattactcacagcacaacccaaaaaaaaacattactactaatatgggattgtacttaaataactagtaaacaacggcattcaaagatcagcagagccaatcaatttggtgaggccaaatgttatggccatagccatccaacctccaaccagaaccctaagacaagacctcgtcaccggagtttttccaagaactgctcctactcctccaaacaccaacaatgccaagctaaccgcagcagcaacaactcccattctaatcttgtgattccttataaacacagcagctatcagtggcaccaaagcaccaacagaaaatgccagtgctgatgctagtgcagcctgaaatggatttggaagcttctccctttgagtttcttcattaactcctctattgttatttgcttccctctctcttttaatctgagtcatctctatgtcatactgagtgtacacagagacaaactctccaattgccatgctacaagccccagcaactaatcctgcaaaaccagcaagaagcatggcactgatgtctttcttaacagctccaacacccatcatcagtgaagcaacagaaaccaacccatcattagctcctaacactgcagctcgaagccactgggccctttgagagtagctcgtgc

SEQ ID NO: 107839 - DNA, 437 bp, Glycine max
  Clone ID: PAT_MRT3847_68395C.1
aaaaataacccacactttacacattattcccacaattaaaagaggggtggaaattttcaaattggccgagctttctcaacaagaggggcatgcctaatttccttttttgaattataccaaccaacaagcgaaagaaaacacaaattccaaatcatgcggaggattccccattttcaaaaaatctggccgcagcctgtggaacaaaaaaagctggcctaagagtatttccagccatttcaaaatctttagaaatttccaagagaatataaaaaactgtctactgtttgggattgtcaataaggaaactcaaatgccatgaattttgatttgccccctcagaacttcacattttaaaaccattattgggaccacccaccttttttggaaagatcaacttccaggaatggggttcccaatttgtccacttcatgcatcaa

SEQ ID NO: 107840 - DNA, 1418 bp, Glycine max
  Clone ID: PAT_MRT3847_68396C.1
cagaaggggagcgacgtacgcaactgaaaaggaaaaccctaagagatgaagagaactcctatcttgttccctctcttctttcttctttgtgccttcacctcatatctaccttcagccaccgctgatgatgatcatgtgtacgacactgacggcgataagcttcaatacggtgtcaattatttcgtgttgccagtgataagaggaaatggcggtggaatacaagtagcaaaagcaggaaacgaaacttgccctctgactgtggtgcaatctggcaacgagctctctgaggggttaccgataaagattgcatctcgatcagcaggagtcgctttcatcacccaaggccagcttttcaagagcattcagttcggtgtgtttccatccacactcagaccagggtgtcccccaagtccaattccttctaagtgggacccacctacggctgggagaagacgacagaaggggagccacgtacgcaactgaaaaggaaaaccctaagagatgaagagaactcctatcttgttccctctcttctttcttctttgtgccttcacctcatatctaccttcagccaccgctgatgatgatcatgtgtacgacactgacggcgataagcttcaatacggtgtcaattatttcgtgttgccagtgataagaggaaatggcggtggaatacaagtagcaaaagcaggaaacgaaacttgccctctgactgtggtgcaatctggcaacgagctctctgaggggttaccgataaagattgcatctcgatcagcaggagtcgctttcatcacccaaggccagcttttcaagagcattcagttcggtgtgtttccatccacactcagaccagggtgtcccccaagtccaattccttctaagtgggacccaccttccaagtggactatcgttgagggtctaccagaaagaggactcgctgttaagcttgttggttaccaaaatagagtgtctggttggttcagtattgtgaaagttgctgatgatgcttcttcttcttctgtgggctataagcttgtgttctgtctatggccagaagaagaggtgatgattcacttatgtaagaatgttgggattcgtaccgatggtaagggaatcaggcgcttggtgctgtctgagaacactcctttagtcgttcagtttcagaaatttcgatctgcactggccctgaataatcatgtgctttctgccagtgagtgagagacatgctttggttgtagtaacattggtgtcttactaaataaaataatcaaagtttatgctttttgcaaatgttttaatttctgacatattatatgtagtgatttcgtctcaaatgttatgtgcctggatgattaatattattaattgtataagtgatcgataaggacttatgttttttaataaatattttagaattt

SEQ ID NO: 107841 - DNA, 262 bp, Glycine max
  Clone ID: PAT_MRT3847_68397C.1
cccactaggatccatgaacgcctcgaccaacatcctagctcaacaattctgaagagatgctgacacgtatgctaagacattgtcatacaggacattagatgtaaacatttgatatgaatgtagcatcaggaacatacatctgctataccagatgcaccactggcacttaattcctatgctacagagcactacatatgttaacatctctgaaacctacatgcgaatggactcaaggaatagctgagcttactactaccttttg

SEQ ID NO: 107842 - DNA, 179 bp, Glycine max
  unsure (1)..(179): unsure at all n locations
  Clone ID: PAT_MRT3847_68398C.1
agcctatatacactgatatataaataacataagataagtcttctttatatttttccataaaaantttaatcgggtaactttattcctgtaggccgagcacggaccattatatcctcacataacacttcaattagttaatcaatcttctgatccattgcgaccttacacaatcgtttttg

SEQ ID NO: 107843 - DNA, 341 bp, Glycine max
  Clone ID: PAT_MRT3847_68399C.1
attgttaaaacaaaaaaatggaggaaagggatgggtggaaagcaaaactataaggggaaggaaaaaaaagataaagaaaagactaaccttagtcataaaagaaggacatgcaagggaaggcaagtttgtatatacagcggactttcccccagggaacaaaaacatggctttgtactaaataacaaactcctttgtcggcctacccctcccagcaaacaaatagtttatggaaaagataactgacccctttttttgccttcccaaaaacagcccaaagaaaagaaaagaactttgttggtcccgcccgcgcgggttgacccaggcaatcacgaaccggcccg

SEQ ID NO: 107844 - DNA, 580 bp, Glycine max
  Clone ID: PAT_MRT3847_6839C.1
ccacgcgtccgcggacgcgtgggccaaaatctacaaagccaaaactatcacttaaaacagtgatatttttggattctcattcttggttttgcttgcgctcccccatggctcttgcttggaatttagtcatcactttgatactacttcttctgcaacaatcttgtttccttgtcacctttgcctcaagcaatgttcatattgtgtatatgggtgacagaatgagccagagtgagcaacagttagttgaagactctcaccttgacatactattacgtattctcggaagcaaagttgctgctaggaggtccatcctgtatagctataagcatggcttttctggattcgctgcagttttaagtcagcctcaagctaagctcattgcagatttcccaggggttgtccgtgtgattcctaataaaattcttagtcttcacacaacaagaagttgggacttcttgcacgtaaagcaagatatagtaaccggtgctctttctaggggtcaatctggaagaggcaccatcatcggcatcatggacactggtatttggcctgagtcagagagctttagagatgagcacat

SEQ ID NO: 107845 - DNA, 449 bp, Glycine max
  Clone ID: PAT_MRT3847_683C.1
tttttattaaactttgctaacatttttacgaatacttccagccgacccccaccccacttgggacatcgctgaaatgctaacaacaacacctaattaaccctttactaaaacaaaattctaatgtacactcattccccaaacaaaacactcttatttaacccaaattgttttctataacacaaaccaacagatgtctttctccttacccaatccacccactcaaacataaattttatcgacaataaaaataataaaagctcaacttacttcttcctcatatctgaaaagtctaacaacaaaaattccaaaaaatgaaaattactcattcaatccgatttattaaacccatttcgtctatccctcactattcgcccataatcttaattacttaatacctccaattaacatgctggtattgaccctcaacacgcacactgatttaataagtc

SEQ ID NO: 107846 - DNA, 237 bp, Glycine max
  Clone ID: PAT_MRT3847_68400C.1
caagaagggtttcgtccgatacacactctctctccgtcgaaatggccgcttcttcttcctcgtcccgactagccttctcgctggggcttcctaggcgtctacatcaacaccgcctacgctcgcgcatgtctatcttactaggaatgaaagcttcgaggtccatctagcaaatgaatacatatattgaatgacggttccttttgcgcaaagttttacataaacatcactagcaagaat

SEQ ID NO: 107847 - DNA, 405 bp, Glycine max
  Clone ID: PAT_MRT3847_68401C.1
ttctcaaaactcaatgaagcaatgaagtaaagtcgcttgaaagagatagcccaactactagaaaacaaccgcaaaattcttgtgtctgaatcaaaatcaaaaccctccgataacaatgccgtcgtctccggaatccatctttctggaagacttcggccagacggttgatctgacgcgccgcatccgcgaggttctgctcaactacccggagggaaccaccgtcctgaaggagctcatacagaacgccgacgacgccggcgccaccaccgtctctctctgcctcgaccgccgctcccaccctgccggctccctgctctccgactccctcgcgcagtggcagggacccgcactgcttgccttcaacgacgccgtcttcaccgaggaggatttcgtcagcatctccaa

SEQ ID NO: 107848 - DNA, 328 bp, Glycine max
  Clone ID: PAT_MRT3847_68402C.1
acgtacgggtgtgagaagacgacagaagggggggcttgttttcaatccttatgaaacgaaggtggcggggatttcgggggaggcgacccctcctccgcaccgaaaatggaacttttataagatccagttctttgtgaactggtatgatccttcaaccggggctgctctgaatttcacgaaccaggctaagaggttgttcactttcatgacccccttttgtgatcaagaatccaaaaagtgcgtattcgaattatagtggtctttgatatttgggttaacaggtttggtgagaattagcttttttaagtgttgttttttagggctcaaa

SEQ ID NO: 107849 - DNA, 742 bp, Glycine max
  unsure (1)..(742): unsure at all n locations
  Clone ID: PAT_MRT3847_68403C.1
gctagctaaggctatttcgaagctagaagatgagtttaggcagttattattatcttacagcaaacctgtggaacctgagcgcctctttgactgccttccaaactcaatgcgaccttcatcacctggccatgagggtgatcctagtggcaagaatcaccattctgagtctcacaacaataatgctgaggctgttgtatacacacctcccgctcttataccgccaagatttttgccactgctacatgatttagctcagcaaatggttgaagctggccaccaacaaccgttactcaaaatatacagggatgcccgttctcatgtattggaagagagcctccaaaaacttggagtggagaaactcaacaaagatgatgttcaaaagctgcagtgggagattttggaagccaaaattggaaactggattcatttcatgcgtatagcagtgaaattgttgtttgctggtgagaggaaagtttgtgatcagatatttgaaggctttgattcactcagtgaacagtgcttcgcttgaggtgactacaaacagtgtctctatgctactcagttntggagaagcaattgccaaaagcaagagatccccggaaaaattatttgtacttttggacatgtatgaaataatgcaagaacttcattcagagattgaaactctttttaaaggcaaagcttgctctgcnataagagaagctgcaactagtttgacaaaacgccttgcacaaacagccca

SEQ ID NO: 107850 - DNA, 358 bp, Glycine max
  Clone ID: PAT_MRT3847_68404C.1
ctaaacccacacccctcttttttttgaggaaaattttttccccccccataaaaaactaaattttttaaaaagttttggaaaccatcccactaataaccaacggttttaaacccccccccaatcacgaggccaaaggacaggggttttttcttttgaattgggaagaactacaagggttctttttttctcaaattttttcccaaaaaaaaaaacccttctttttaccgcaggaagccctccttttccctaattttgacccgttatatgataaaaggctattaccttcccccccccaaggtattttttttcccccggaaaatccttgtaaaaaatttctttcccaccctcaaacccctcc

SEQ ID NO: 107851 - DNA, 221 bp, Glycine max
  Clone ID: PAT_MRT3847_68405C.1
tttttgtatgcccccttttacccttggaccccctggcgcaagatcaaatcagcgtgggaggaagctcccccttctaaattttttctccccccctgagattaaccctgaaaaccctaatgaaatttcctaatgccagagggtttaacttaggagcccatggttgccactttgggcccatgaaccggaaactcgggaatcttatccctccttggatggatgag

SEQ ID NO: 107852 - DNA, 361 bp, Glycine max
  Clone ID: PAT_MRT3847_68406C.1
gctacgtctacttcatacttctaaatacatctctccttactctctcgatgcaaaaagcttaggacagagagactttccgaatcgagcatgaccttcatctgaagctattgctgctgccttcttcacctctgctatcccttccattgtagcatcatgcttagtaaccaagtcatcgtatctatcttgtatatcagcatagcgctctaccattctatcatgttccataacaactctctttagggcatcatccatctacaacctttttgtacgatagccgtaagacttaaaaacaggcttaaacttaataataaacatagatccactcactttcatttctgtacatctctggctttcattctct

SEQ ID NO: 107853 - DNA, 227 bp, Glycine max
  Clone ID: PAT_MRT3847_68407C.1
ctaccggccactcaacaacgtacgaggatcaagatcatgatcatgatcatgaatatgaatccgatgatgttgagttgtttcctgtgtcgtcgcaaacaactagcttcattgtaagagtggaccgtggcgaccaacaacaacaagcagaatgcaaatgatatatgttttgtgcaaaaaaaaaaaaaaaaaaaaaaaaaaaaaaaaaataaaataaatataataaaaat

SEQ ID NO: 107854 - DNA, 505 bp, Glycine max
  Clone ID: PAT_MRT3847_68408C.1
ccaacaaagactaattggcacacccataaatttttgcgaaagaacaattccttaatgaaacagttcaacacatggaactaattgatcagttgcatgtgtgggagccaatattgtaagtttgcaacaatgggtccattgcacagtttgctaaacagagcattataagaagaatctaatcccaaagatggaattgatcaaaaaattcttatccttaaaataaactgcatcttcaggtattggcgtattgctcaaaagcataactggcatatatattcatttcagtttgcagatattaggaaaggatattcccaaaacaaaatattaagggaaagaaggcaaattccaaaagttcctttcctgactcaactcataagttttgctacaaatgaactgcaaaaagaatttgctacagggaggaatattttgaaacagaatttaaagaagaaaaattgaaaaatgatgagaataagtaacaaaactcctcctgagtactgctacaattcct

SEQ ID NO: 107855 - DNA, 244 bp, Glycine max
  Clone ID: PAT_MRT3847_68409C.1
ggtttttcttttttttttttttctttttttttcttttgggggaccaaaaaaaggtggatttttcctaaggggaaaaaaaaatggggccaactgtaatgggagaatattaccttttggcccccccgtgtgaccccctttttaaagaattaaattttcgcctggaccttggtcttagcaagccccatggcaatttttttaccctttggtcctcccccgtgaactggcaccccctgtttgggaattt

SEQ ID NO: 107856 - DNA, 539 bp, Glycine max
  Clone ID: PAT_MRT3847_6840C.1
ttcggctagaggagcgcctgcgtaaagctacccgttctgtccgttctgttgttctctaggcacgattacttctaattgaagaatatggagatgactttcatatgtacaagcttgtaagacaagaaagtgcaactgagatatgatatgccctaccactgattgagtaagcctgaagatggcacatttgtggagcaagatttcgttattaaaggacaattaggtcttgccatacaatagatttgacccagcaggcctgtttgaaattatttaacttactgcaatgaatcctagcttggtaaataattcttcaccgactcatcccagatggagaaaagtagcttatggtggtatgcaacctggttatgatgacaatcatacagatgaatctttccttgaaggaatggtcatgaatgccagtgttgtaaaacgggacatgctaaaggtgatgctggactcggtttccatttctgaatatttatgtattgttgctcttgttgtcttggtctggacttgtacacttgcatcaactattgatgaaa

SEQ ID NO: 107857 - DNA, 304 bp, Glycine max
  unsure (1)..(304): unsure at all n locations
  Clone ID: PAT_MRT3847_68410C.1
aantatnaanngtangaagngctcagcattcaganngagntcaanncntnagcnacagnacaagtttancacanntgttaancntagnggcnacataaccttataaantataccaaacnnggantcaatnaagctcnatntaatngggntccnngaatcnnactntcacagggtaacacaggcgattattanaacngtcctggactncaagaactgnttgancagctttcagctaanaacaggcanggtccnctgccggcatcaaagtctcnatcaatgcnatgccnaccannnangatcgngc

SEQ ID NO: 107858 - DNA, 501 bp, Glycine max
  Clone ID: PAT_MRT3847_68411C.1
cggctgcgagaagacgacagaagggtgggatcagttacatatatatacatcaaatacttattaactgtggtatatctgaagaaattgctatgcataggggactcatgcaaggagagattttcttgccccttttctttttcttcttgtagcgtaattaatgagaagggcatcagagttggggtttaattttaacatattcaaggtggcagtaattgtatatgtggtttcataattataatatgcagatgacacattgttcgtcagtgaaatgatcaatataattttatgaatgttagagctctaaaagctttacttagagacttcaaatagatgttgggttaaagtttgattttcataaagagcaatatcttactatcttataggagttaacgtacgtggatgattaattttcgccttctgcatgcttccaactttctttgctacaacattgtgcatattcctttcaagttccttaggtttacctatagctgttaacccttg

SEQ ID NO: 107859 - DNA, 179 bp, Glycine max
  Clone ID: PAT_MRT3847_68412C.1
ctctagccgattcggctgaggtttgttgctgtaactcgtacgtcttctggtgttgtgctgtgtatgtgtttgtttagtctctcacctgagaatgtcttgctgcggtggtaactgtggttgcggaagctcctgcaagtgcggcaacggctgcagacggtaacattttcgttgtagcattg

SEQ ID NO: 107860 - DNA, 395 bp, Glycine max
  unsure (1)..(395): unsure at all n locations
  Clone ID: PAT_MRT3847_68413C.1
gataaaatatatgatgctaaaagcaatgatggaacatcctatacattaactattacaantgttgtcacgaaattaagatagccgcttcctaagccacttgtacggtgacacatatgcccccgctatttatatcactcacaaatgtaaatgaaatggcggaaagaaacacaacggctcttgccttactactccagccccatacaccatataagatatgctagagatgccacaaaaggagataatctaaccacagacactgttgatgctgctggcatggccacgttcatgcttcttcttctgcttcatggaatgcttattctagacctcggcggtggcgccaccctactggccgtggatcttgtgcttgatcttgtctaggaacccctctttgtgct

SEQ ID NO: 107861 - DNA, 545 bp, Glycine max
  Clone ID: PAT_MRT3847_68414C.1
cactcttttagtctactgctagctcttcaaaatctcagaagaggaagcttctgctccctccatttcccaactccgtggcactactttgaaacttgtgcattcatttccttcagctgaggaaggaattagcgttgctcttagccattcaattcaaattgttttatttgaagatgactgaggaacacgagaatggcgccaacgcaagcgaggaggagcaaccgataggcccgggcccagccccacgggcccggcccaagcgaccccttcagttcgagcacgcctacctcgacgtcttgccctccgccaacatgtacgagaaaagttatatgcaccgtgatgtggttacgcacgtcgccgtttcggctgcggattttttcatcactggaagtgccgatggtataacatgttcgagttgacgaattatgatttgtgattgattatgattttttttgccagttgtaagtagactgcaggaaatttgaagctggaaatttgaatagagtgatcctatttgtgttaccttacctctactttttttttttaat

SEQ ID NO: 107862 - DNA, 496 bp, Glycine max
  Clone ID: PAT_MRT3847_68415C.1
gtcgatatttccaattaaatcttcttgttcctgtgaaggcattaatgataaagctacagggagaggaggatcatagagacagcatgaacgacgacgtttagttctatttgattggatggggatgaccttgtgtctatgagaccggaggggaatgccctgtggcttacaatccttactgcattaatgaagaccaggccttcttcgcatccaagggaaagtgaacttgcagctggtatctttgcatcacctgtgacaggaatgcatgttatttgtgctattcatgtacattgtatttgagcacagagggcatcaaagactctgtcatctaaaggggtagcgggaatcaaaggcttgcgtgagacatgcatgagaacggtgctgttaactggccagaacgctcaaggaaactacgggcgacaaatatatttcgatgacctaaaccgctgggactatgtcttcaacgactattacctagatctaatagacatactatctc

SEQ ID NO: 107863 - DNA, 1128 bp, Glycine max
  Clone ID: PAT_MRT3847_68416C.1
tagcgctactggaatacgtcagaagggggaacacggaaacagataagatttaagacaatggaggattaatctgaatttaagtcccgctggtctttgtaattactacgccatatcaagcaaaatcgaagaaacgcgacgatccacttgcacaaaatccgcggtggagataaatcacatagatggagacacagtctcagagcaacattcctaaccctaaccctaaccctaaccctaaccctaaccctaaccctaaccctaaccctcatcggaataattcggtagcgtcatcgatgccgctgcggccaacgatcgacggcccattgggcctgtcggaggaagagtcagtgggctacgctcgcaggttctacacgttttggttcgcccttctccctttcctatggtccgtcaattgcttctacttctggcccgcccttcgccactctcactccttcccctgcattcgcccctatgttgttggatctgcaattgggtttgcagtatttgcgacacttctcagttcttgggctctaacatttgccattggaggggaacgtctcttcggccctgtttgggatcaattggttatgtacaatcttgctgataggttaggcttaacaggctggagctagttttgttgtgtggcacctctgatacaaaatattttgatcctttattaccagacttaccttcttccctgctctgcttcgtgaatttcatctgcattacttatatacatttgactatattctgtcattgaattagtagtgaattttatcttcctgtcacagttgatagataacaagcaatgttttggaagatgatataaaaaaaaaaaaaaaaaaaaaaaaaaaaaaaaaaaaaaaaaaaaaaaaaaaaaaaaaaaaaaaaaaaaaaaaaaaacaaaaaaaaaaaaaaaaacaaaaaaaaaaaccaaaaaaaaaaaacaaaaaaccggggggggccccttaaaagaaccaaggtttcctcccccgggctgggaacttttaattttttttttggggccaccaaaatcaaatccaggggcgggtgtttaaaaccggggggaggggaaaaccccggcggttcccccacttaattcccctgggaccacacacccccttttttccc

SEQ ID NO: 107864 - DNA, 422 bp, Glycine max
  Clone ID: PAT_MRT3847_68417C.1
agcgtcaggacttacggacgtactcacacgatgcacaactaaggtttggactaatacacacacatgctgatatgaataacatagaccgtatgaaattgtacggagaagcctattgcctagatacaacaacctttgaacactctaatcatatgaaactgctgaacgagatactttcggtcatgctgcttattgcaggttattgcacggcttgacaacgtccagcagatcgcttctaggtctggaacactagtgccgtggcataagaagcgtgtgacgacgatagcgcatgttgtgccatgagataccctgatgagaccacgatcctgataaatgaatctacagggatcgagccgatatggaatatcgcgatagcagttgataaagaaggtattcctgtgacacaaggctcggacgaaagtttc

SEQ ID NO: 107865 - DNA, 1503 bp, Glycine max
  Clone ID: PAT_MRT3847_68418C.1
ggctcgaggtgaaggaaatttgagtgttatacctgacgtgaaggagtggatagttgatttggaggtagtttcattggggggaaacagaataaaagaaatcccagaaggcatatcacctaattgtccacgcttgtccaccttgattttatctggtaattgtatcggccacattccggagggttttttcatacacatgaatgctctaacagtacttaatatatcatataatgatttcttgacatctttgccgcattcgctgtccaacttgaggtctctcgtttctttagtgctccaaaattgttcaaatttggaatatatacctccattgggagagctacaagcattgtcaagattggacatttcaggttgttcgattcgccaagtaccagaaggcttgaaaaatctaataaacttgaaatggcttgatatgtccataaatgagcatttaacgctggcacatacatgctcactgcccggtttgaccaatttgcaatatctggatctccgttgtgattcagctataatagcagaagatgtacaagggatgagtatgcttgaatgttttggaggaatctttctcggcaaagataattacaatagttacgtgcaagaaattctggacagaggtcatggacctaaaacttatgatatccatgtagaagatgttagggatctgatatttgcatttgatattgatgatccagtttctctatacgaagatcatcaaaatgtacggttttggcaatgcgaaggattgctgtatttactacccagagacctttagaaattgagtatggaacgcaatgatcaatgggtgtgcttatgtggtgctctgtcatcaagtggtcctctttcttctttgaatcaaattgatattattggcggctgtaagctgaagagcttgttctgtttgtctagctcttgttccttatgcactaatatccaaaaccttcaagttttgaatatttatggtttagatagtttcactgcaatctgtgaggaagatgctgttgatttaacacgatctttgtctccaaggggtgtgttctcaaatctcaagaaatttcagctcagccaatgccatgaaatagagacgttgctgacaccattgttagtgccacaacttcaaaacctagaggttttatcggtcgagagctgtaggtccatgagagagatatttgcagtgagtaatagtggcaatgatgataatttcaacattatactccccaaattgatcagattgcggttgtggaatttaccagaattgacgaccgtgtgcagagaaattttagtatgtggatctgcggatatattgttcattaatcattgtcccaaattagaaaggctaccaagaatcgtcgtgtatgattgattgtgttgattctgattttgatattttattatgtctcttagtattcacattcctaattcatgtacatacaaaataaaattctgatttacttgctgaaatacaaaactgatttttactgttgtgagtcctaa

SEQ ID NO: 107866 - DNA, 262 bp, Glycine max
  Clone ID: PAT_MRT3847_68419C.1
gagtgctattgtgacgttgtgacgggtacggagggaaatggagggcggtgacggtgtgcattggttctctcacctccaaatgcctcgctgtacccataactgtgcatgcacctactcctgaaagtgcttcgactgctcccacttgctgactgatatacccagacttaaactacacttattctaccaccactgaaacaccactcattcgatgggtgtctgcccaagctcaatctgaagaccctcaaactcctgtacccactta

SEQ ID NO: 107867 - DNA, 332 bp, Glycine max
  Clone ID: PAT_MRT3847_6841C.1
ggttgagtggaagtggaaggtgaagaagaagaatatggaggatttcaagaagagaaagctggagctggacgaagcacgtggcgacggtgatttttcttccaaggaagagcttcgcttactcatcgaacctctcgctaaaccccagctcgtcgatcttcttgccaaactgcatttcaagagcatggagaaattgaggaaggagctgagatctatgataaagggacaggaaaatcccgtggctatggatttataactttcaaaaatatggaatcaactcagcaagcattgagagcccctaaccagttaatcgatgggagattggctgtctgtaa

SEQ ID NO: 107868 - DNA, 882 bp, Glycine max
  Clone ID: PAT_MRT3847_68420C.1
gcagaatttcttccgaagctagccaagataaattcacagtccgtaatgccccttcccctttccttttggtaaccaaaacacacaccgcataacaaagaatactacaagaaaacgaggagagagagaaaagtgaatggttgtcttttttacaactaatatacatttatactttagttgttcagtacttctctattttctgtgcttccacgctctatcttcaaacgcgttcaatcgtcgtctttgtcattaattcccatattgtttccacggcagctttttctagcagtcgatggaactatgaaagatggggtggatttgattccaatatcaagccgcaatgcaaagcctccaggtgttgaattgtgggcagttcttgatgtccctgtacattaggttggcgcttcttggaaaaatttaagccattcactatcaggtctcttttgtgcttcaatcaacttcatggagtcttctaccacttattctactcctgaattggcatttcaatcagctttgggcagtttaagatatggtacactgccacgtgaaatcgataaagtgtgggtgcctctaccagatgaaattctataatcatttgcaaaattttggtatacaagattggccctgtccctgaaatcggaaagtgtggttgcctctatgagatgaaattctatattcatcatctgcaaaatttcgatatgcaagaatgatcctgtccctggaatcgaaaaaatgtgattacctctatgagatgaaattctatattcatcatctgcaaaatttcgatatgcaagaatgatcctgtccctaaaatcgaaaaaatgtgattgtctctatgagatgaaattctatattcatcatctgcaaaattttagtataaaagaa

SEQ ID NO: 107869 - DNA, 501 bp, Glycine max
  Clone ID: PAT_MRT3847_68421C.1
ggacaaagggaacccatcattcccatcaactttattacgtacccaacgcttattataacaaaatggcttggatatatcagctagctacattcaaaagggacaaaatagggggcccatataattaaacaaaagcatttacccaaagcagcatttcatttataaaaggttttggaggggccaaaggggaagtagggaaaaactgaaaagggaaaaacacaaaactattggatgggcatcataaaccaaactcaaaaagaggggggcaaacttccaacttggcttaaccttaaccctttccttgacctttttgggcttaaaacttgggttgcacacgggcggaagccacgggtttggcttcttccctcttcttcttccctccccctttggaagaaaaagctagctttttttgttttttcagctaataaagcctagccctttcctttgaaaacttcccaaacgggagcccttccttggccgacaagcaacaagctcaactttaaa

SEQ ID NO: 107870 - DNA, 793 bp, Glycine max
  Clone ID: PAT_MRT3847_68422C.1
ccggtccggaattcccgggtccgacccacgcgtccggtcaacagcatgtcaaatttctcctcctggtactctcgttttcgtttttcggccaagtacttgtactgctaccaccgcactctccacaaaaacgcacccagcaccatcttcaacaaccacggaaccaggaagaacgcatggccaacctctctgcttcctttggcgctcgctgtttccgctggatcactcgctcttcaaccacacttcaatccttccttctgcgacaccgacgacagaggtgtgggtgttgggggcaaaggcagcacgcaatacgttgttaagggatcacagaaagaatttccgcgggagcttcttcaggatttgaaaatcgtctgtcaggataacatatctcttgattatgatgaaagatatatccatggaaaaccacaaaacagctttcacaaggctgtcaatatcccagatgtgattgtttatccaagatccgaagaggaggtctctaagattgtcaaattatgcaacagtcataaggttcctattgtaccatatggtggagctacatcaattgagggtcacaccttatcccctcatggaggagtttgcattgacatgtcattaatgaaaagagtgaaagaattacatgttaatgacatggatgttgttgttgagcctggcattggatggatggagcttaatgagtatttggaaccttatggcctattttttccacttgatccaggtcctggtgctagcattggaggcatgtgtgctacacgttgctccggttcattagctggga

SEQ ID NO: 107871 - DNA, 1054 bp, Glycine max
  unsure (1)..(1054): unsure at all n locations
  Clone ID: PAT_MRT3847_68423C.1
attatatggaagccattaaaaaaatgaattataggggatggcgcagcaaagttatagacataacttattcaaaggaatgtggtaagagagggttggacgaagccttggacaggatgtgtgcagaggcacatgatgcaattaatgaaggctacaccactcttgtgctgtctgatagagccttctcaaagaaacgcatctctgtgagctccctcctggctgttgcacccgtccatcagcatcttgttaaaaatcttgagcgcactagagttgccttgatagttgaatctgctgagccacgtgaagtgcatcatttctgcacccttgttggttttggtgctgatgctatatgcccgtatttggcagtagatgcaatttggcgactgcaggttgatggaaagatcccaccaaaagcaagtggtgaatttcactcaaaagatgagttggtcaagaagtatttcaaagcaagcaactatggaatgatgaaggttctggccaagatgggaatatcaactttggcatcatacaaaggtgctcagatttttgaagcattgggtctttcgtcggaagtgattgcaaagtgctttgctgggactccaagtcgagttgagggtgcaacgttcgagatgcttgctcgtgatgcttttcaactacatgagttggcttttccttcttgggttttctctcctggaagtgcagaagctgttgctttgccaaatcctgnggattatcactggagaaaaggtggtgaagttcacctgaatgatccacttgctatggcaaagcttcatgaggctgccagatctaacagtgtagatgcatataaacaatattccaagctcattcatgaattgaacaaggcttgcaatttgcgtgggcttctgaaatttaaagagacagcagttaagattcctattgatgaagtggagcctgctagtgaaatagttaaacggttttgcactggggccatgagttatgggtcaatatcattggaggcacacacagcattagcaatggctatgaataaaatgggagggaaatccaacacaggtgaggg

SEQ ID NO: 107872 - DNA, 407 bp, Glycine max
  Clone ID: PAT_MRT3847_68424C.1
aactgatgtagactccgaattcaatgtctttgaattttgtttttaaaattcatcaatgctggttgatgaggggttcagtttattttaattaatatcctaacctttttttccccacattaccggccattataatggatctttgttttccacctaaattctcttcatttgttggatctaaccacattctcctgttaccttttcttatttctggagggctcgacgatcacgtgttactattttggcagacctacttcttcaagattctttcataaaaaaaataaaaataaagctcatgataactaagatcttattgttttaaattcacaaaatcaatcttggcactctcaaccaaaacagttcaaaactaattctatcatgatcaattttatccaactctaaaccaattt

SEQ ID NO: 107873 - DNA, 323 bp, Glycine max
  Clone ID: PAT_MRT3847_68425C.1
ggggaaaaaaaaaggcttcagccctggccctttaacccaaggcgtgggcccccccataatccacaagggcttttttgttcccccaaacccttttggcatccgggggaaactttccccccgggaaaacaaaaacttgaaagaacaaaatccttttacttaaactttaaacagaaggcccctccctgaaatccccgaaaaaattgaagccccccttggaattgctggaccccccccccctaagggttaccctgggccgaattccggggtttcctacccgggggtgcgaaggtttaatttttttttaggggcccccaaattcaaat

SEQ ID NO: 107874 - DNA, 225 bp, Glycine max
  Clone ID: PAT_MRT3847_68426C.1
agctcgagccacgtgagtgctgctgcgcgccagaagggcaacaggctgccctattgctgccggttatttcttggttaaccctatcgtgtacggaacccacggtagacatggagaaagtgactgggcacactttgcacgaaaagtaggttatggaacgaggagctctccaagagaattggccgtgggattgcaaacatgtcagcggactagcctggaccccacgcg

SEQ ID NO: 107875 - DNA, 614 bp, Glycine max
  Clone ID: PAT_MRT3847_68427C.1
acttaatatcaccatgtctttcgactcctcaaaccacccaattagtcctgacttgtattgcactgaagtagctcccgaagtgattcacttggattccgatgatgaggctctgaagttcaatgttctatggggagactctgatcatgatgatagtgatgatgaaagcattctattgaacttgttagaatccgaacacaaccaagtgcaagcacaaacaaagttcctaggacaacaacttcgcaaaacaaacatggctgattaatgctcgagaagaggccataaattggatcctaaaggtgcatgcatactacagttttaaacccgagacagcgtatctttccgtagattacttcaatcgtttcctcttgtcacacacctttacgcaagataaagcatggcctctgcagctgctatcagtgacttgtctttcactagcagcaaaaatggaagaaagcaaagtgccacttcttttggacctgcaagtgatcgagtcaaggttcctgtttaagcccaaaacagttcagaggatggagcttttggttatggccagtctcaagtggcgattgcgcactataaccccttttgattttgtgcatcttttcattttcaagctt

SEQ ID NO: 107876 - DNA, 254 bp, Glycine max
  unsure (1)..(254): unsure at all n locations
  Clone ID: PAT_MRT3847_68428C.1
gtcngctacagtacagcttangaattcggctgcgannacnngatngcgccggggcnctcgctagctccggcgcnaggccggggcctggggggcccgcaccacttcaatggggagaagaagtaaaagacttcatccanacgtttcatncggggtacagagtgcgntatctgtaattactactgngngnaatggaggtgttcgaggtagtgtgagttggtcaagagagcatggagtaacacgacattagnacggtg

SEQ ID NO: 107877 - DNA, 454 bp, Glycine max
  Clone ID: PAT_MRT3847_68429C.1
aaagcattgaattcaaaaacttaagttcattccttgtgttatgctttcttcctcaggacggagacatgtcgaacacatgcggcaactgcgactgcgctgacaagactagctgcaccaagggaaacagctatggtgttattggagagactgaaaagaagtacctcgagaactggtggcatggatgttccaacagctgagcatgaagggaagtgcaagggcggcactaactggacttgcacggactggaactggggccattaaagaatatgtatgaaaatgtaattgccatgtgtttggcaataccaatatcccaatgatgtaaacctcggatgagataaatgtgtgtgctgttattctactctaaggctgtgtagtcatgcagactgaatcatttcaaggtcctggcttagataatataacacccatggttgaggcattctatggatcattagac

SEQ ID NO: 107878 - DNA, 365 bp, Glycine max
  Clone ID: PAT_MRT3847_6842C.1
cgttctttaattcaaataacaaatttttaaataattatttgattgaatacgttcttgtcacatctttaaatagtttgatattataatttgttttattgaaagttgaaaataattgtacctagaatgaaaataatagatgtaatgcaaaattaaatggaaggtgattcaatcatgtaacaccacacggtccactctcttttgcctcttccttcttccctcttctaaaacatcaaaattgatttcaaaggtttgcttcttttctaaaataataacaagaacacaaatttttagtttaaagataaaaggtgattcaatcatgtaacaccacttggtccattttcttccttctgcctcttccctttaca

SEQ ID NO: 107879 - DNA, 550 bp, Glycine max
  Clone ID: PAT_MRT3847_68430C.1
catttcgcaagaaagaagatgaaggtgaagaagtgttggctcgctgttcaagtggaagaagagacagaagaagctggtggagttgggtctcaaagatttgtgatcccaatttcgtatctttgtcaccctctcttcaagcaccttttggataaggcttatgaggtttacggctaccacaccgagggtcctcttaagcttccatgttcagttgatgattttcttcatctccgatggagaattcagcaagaatcctctacccatcatcaccataaccataaccataaccatcaccatcatcgccaacttcctcacgccttgtatttccatgcttgttaattcccacacttgtatactttctttctttctttttcttggttttgctagtgtttctttgtctgcctagctttaccttcttttttttttcaagaaagaaagattgacaccgctctgtaattacacacttgaagagaaatcttaccatgcttagataagtttttgtctatgctatgtgattttgcgtattgggaggatatataaaggattggagtac

SEQ ID NO: 107880 - DNA, 428 bp, Glycine max
  Clone ID: PAT_MRT3847_68431C.1
cttttgtgtgctaacgaagacgatgatttctgagtgctaacgctacaagaccattatttattcttgtgagtgcttgcacagcgaatggggttgaagaatggcaaacgatactgttagtcgactagttcgttaggatggccaacattggtgggtcgaacatcttagaactgtttgagcctaatgcacggcttaaaagcgttaccgatggattgagcctgagaggatgaaactatgacacaggattggcgggctacactcttgtgatgtgtgcgtagccagtcatgatctatcaactgaggattatgatgaggataaataaggagctagcaagatgataccttcaatgagagaggaacacatgaaaagtgcattagaggaactctgtggattatatttcccgttccaaagattggatagggtgtgctcgc

SEQ ID NO: 107881 - DNA, 389 bp, Glycine max
  Clone ID: PAT_MRT3847_68432C.1
cagcgtctcatctcgtgttcgaagacaactccagcgtccccttggttccggaagagaactggtacatcgaagagaactctgtgacccatcactaagccctgtcgtcgaagagaactctgtgacccatcactaagccctgttcaaggtgtgtcgtgccgcgatggtatcgtacgaattgacggacgaagggcagcttgcttgtggcttcaacatctgccaaccaaacccttagtcatctgggatttaaagggagggaccgttgttggttgtcgcatgtggaagagataccatttctactgcaagttccacaaaacgtttagcatctgaaaatgtttttgttgttcaggttctcgtatccttggtctgccgcttcctagttgcttaacctc

SEQ ID NO: 107882 - DNA, 281 bp, Glycine max
  unsure (1)..(281): unsure at all n locations
  Clone ID: PAT_MRT3847_68433C.1
tttcttggtcnncttgactaaannaaatcagaccttctctttatcacggctgtcgctatcatctcgttgagaaatgcccagcctanttcttgcagacctaagcaaggggattacagtgtgattggatgccctgtcatcggtgccttttgagccaaagcatggtnntatgataaaccagcgaatcccaaaaagggtttattattcannatccacttaataagttcctgtacctgcttgaaagttcaaaggaagaaaaccaagttattgaagctttgtgtaca

SEQ ID NO: 107883 - DNA, 290 bp, Glycine max
  unsure (1)..(290): unsure at all n locations
  Clone ID: PAT_MRT3847_68434C.1
tgatagaatgtacatncagtttcattaacccataatgcactgaatccatccgcaactacaattgctccagcaactggcctcacaatcactgtagccaaaagccggattcatttcaaaagttacattttcataatcggggaaaagagactttttcacaaacaaatcgcccggattcctacactttggtaaatcttgccctctttggcaccctccaggggtagtatattcataacaaaaatccgcctttacataacctttgttgccagataaccggccaattctactaaaaa

SEQ ID NO: 107884 - DNA, 114 bp, Glycine max
  Clone ID: PAT_MRT3847_68435C.1
aggaccactcaaggtgtagtcttataatatctaaatcgaggggtggtagggaatgctctcagaaatcctcccatagtccatcaatttataccacttcatacacctctaacaatc

SEQ ID NO: 107885 - DNA, 274 bp, Glycine max
  unsure (1)..(274): unsure at all n locations
  Clone ID: PAT_MRT3847_68436C.1
cttcattacttctttttatgattcttttatatttatttatgggtnnagtagacacttctttggaaaatatttaccattaaagaataagtagccgcatctttatacaatatctaacttttattccttcatgcaaagtatttagttgtacaaaatcttcactgaggaaatgaaattattttattaggaaaaactaatcctgatttgatgatacctttaatgagcctatatatgattttccttctctctccacaggttcctaacttacgggcatcaa

SEQ ID NO: 107886 - DNA, 253 bp, Glycine max
  unsure (1)..(253): unsure at all n locations
  Clone ID: PAT_MRT3847_68437C.1
cacaactacaagaaagaacttccttataaccaaaaccaacaacaactatggcaagttatcagangcactacgatgatcagggtcgcaaggtcgacgagtatggcaatgttgngaggcaaactgacgaatatggcnacccggttcatgccacnngtgtcacttatgtngccaccaaaagtgttcgtggtacaatgatgaccgctaatnagcnanatggtnttacgggtggtctatcccgagaangacaccggta

SEQ ID NO: 107887 - DNA, 2135 bp, Glycine max
  Clone ID: PAT_MRT3847_68438C.1
acggttggaaacttcatttttttttacacagattgttcatataatttgaggttctgattcaagcagaaatggaaactatagcaccacatgcacaacaaaatcgattagtccatcttcaattatctaccaacaatcaataggtcctcgaatgaagaatgtacctcgaaagtaaaaaaaaagttagacttaattgtaaatttcgtttctctattttgtctatttcactaaatcgttcatcttattttttaatttattatccgagtacccccatatttcaaaatttattatcttagtccaattagctgctaattttaaccgttgactaaccattgacgcataaattttaaaagttgactttagtagaaagtcgactaatattttcttaaaaaaatctgaacttaaaaaattacttgaggaatgactagaaccatgatcctgtgagtgaatgacacattcctttaccagtcaacggttaaaatcaacatttaaaatttaatattcaatggtaaaaagaggcgttaatgcaatagttaatgttttctatagtagaaggcagaacaaaatataatactccatcttcgattatctaccaaaaatcaacaacaaaacagagggataatgtagctctgcagtaaaaaaagtcatgcacaaacactaatccctagatatttacaatttttcaaaagtgtaggttgtcttgctctaaaactgtttacctaaatataacgttcctcaaaacgcttcaacttcaacgagacccaaaatccaacagaatccttaaccactaaatccatgaaatgaaattccagaactattcatcagtgacttccgaaggcagccgatatgtgcggatgactcgaatctgagccaaagcataaattgttcgcaagattctagcataatctgttccaagcatttgaatgacaagatcagccaaaaacgttccccaaagcacaggtccaagtaatgtgaccacgcttctaaagcccagatatcttgatgcagcaccaagaaaaccctgttttgctgcaagcatggctgctctggattctagattaatcatagctaactgcccacccttcttcactaactctttcttaacctggtaattggcagcttctacaagaactttcccagataatttccttgctaacaattggtatatcttggacagtgtaaatacaccaccctccctttaaaacaattgatggaatgtcttgggccccaacttttgactgcactttccattgactaagttcatgttgtagagtggcttgaccttgagacgaagttcttacaacgtcgaacaaggcagggtagttgccggattcttgttccctacaagactattgaagatttagatgattagagaaaataagataaaagagaaataaatattgttttgagttgagttagttgagttgaagtgcaaaaggtggaggaaaatttcaagttcaaggtcgtgagtaaacaattgggttgagcaaggaatatttaattttgtccttatttgaagcaagatatttctataagaaggcctccaaccccttaaggtagagcgggcatcagcagcaaggaagaagaatcgggactcgagagctgctataaattgttggcgtagtccaaggtcgactccaatcatggaacggtcgaggtcatcatttgtgtttgtgtttgtgaatgccaatgggatggatttgagcaaaggactcaagtagcttggcccgaaaaggattgtttcaatctcgtacaactcagaatcggtggcaagttcaagcacagatcgcagctctggatcaaactcatgatttgcatttgcagctccaacgcaaaaccttttttgaccaaaaccaaaacgcttcttcctactccgattgcgaatgcgcgttgtagaaaaaagcaattcctttacaggcactgggtaacagtaacagttagagaatgtccccaaccccaacgacacggccactccagttgcagtcatcttgaatcaatcaatcttcaccatccataatccattcatactactagcctagccctagggtaacagtaacacaatgcgattgctatagctattgttgcgcatcaaccacacatacaaatacaaatcttttcggtacaagtggtcctccttt

SEQ ID NO: 107888 - DNA, 451 bp, Glycine max
  Clone ID: PAT_MRT3847_68439C.1
aagacgacagaagggtaagtactgatggctaggtagccagctaaaaatattggataatttatgtgagaaatcttagaattctgatgagtgtttctctagacacgctaattaacttggcggaagacttagctagcagcaccaagaaaagaaaaggagagggtttatgttgttttcacatatatatacatgcacatgcatatgcagtcactaattatgaaatgtaccgtgattttggtatactgaaattcctggaatgggaggggttgctagctccctgtaaagattggatagtagtataggattatacttgcagagatttaagttagcttaattaattataggattcataaaagttggggagggggtatatatataatgtatattggatattgtgtagccagttatgtagatggatttgaatgatttcttttgatttgatgctatatatatt

SEQ ID NO: 107889 - DNA, 1348 bp, Glycine max
  Clone ID: PAT_MRT3847_6843C.1
ggccgccacgcgtccgctcgagccacgggttcggaggtgttgagtggaagtggaaggtgaagaagaagaatatggaggatttcaagaagagaaagctggagctggacgaagcaggtggcgacggtgatttttcttccaaggaagagcttcgcttcctcatcgaacctctcgctaaaccccagctcgtcgatcttcttgccaaactagggtcccaatatccttcaattgcagaagaaataaaaagtattgcaagtgcagatcctgcccatcgaaagctttttgtccgtggcttggcctggaataccacttcagaaactttgcgtgctgcatttcaagagcatggagaaattgaggaaggagctgtgatctatgataaagtgacaggaaaatcccgtggctatggatttataactttcaaaaatatggaatcaactcagcaagcattgagagcccctagcaagttaatcgatgggagattggctgtctgtaatctagcttgtgagagtctaagtggaacaagtagtgctcctgatctttccctgaggaagctttacattggaagcttatcaccagaagtcacaagtgaaattctccttaactattttgcaaggcatggtgaaatagaggaaggttcagttgcatatgacagggatacaaatgaatcacgtggttttggctttctcacatacaagacagcggaggctgcgaagaaggccatagatgacctagaaaagacacttgggggaaggaatatagttgtaaaatatgctgattcccaaaaaggtaaaactggccagccaccatttcctgctggagtggttccgatggcagcattacctatgaacccaggatatatgcagcagcctggaaaagctaatgttagttcaaggcccccaatcaattacagttacccccaaactgtagcaccatattctgcacttccttatccaaaccctcccactgctccctctccttatccgacacaagggcagattccttatcctcaagtttctgcaaagaaagaccgacatgggtttctgcctactcaacctgtaggaatgaacaactacccttattactatcccaagcaatgaatgtatttttaaaactaaagatgatgattttggtactcctttctttgctttccttttcaaatctttttagcccctagttatctcttccatgcagcttttgatctcttgtagaattttgacattcttatgttacttgtaatattgagtagaattttttttatatatttttttctgaaaattttaaacgggagtaacattttttctgcatttaagctaagtgaagtttcaaatcatttgcaactgtttgagtggtt

SEQ ID NO: 107890 - DNA, 416 bp, Glycine max
  Clone ID: PAT_MRT3847_68440C.1
gcttttccttatcccgacctaccaaagtaataccaatccgctctcatctctgtctctgtctctatgtctctatgtctcgaatcttctccgcatggagcaagacgaagctgcacctcatcttaatccccactcttttctcttcttcccccatcaacttcaatagcgggcttctacagcaatggggagttaccagaggattggcctcacgatcacgacgctgcttcggctatgcaaactccaattggaccctgggacgacatcaaagctgggtgggtcggagggtccaatttgcgtacggattttccaactccgaaggaaatcttcaagggtctcgacaagtttgttattggccagcacatggccaagaaggtcctctctgtagctgcttataaccactatcaaagaatctaccacgg

SEQ ID NO: 107891 - DNA, 134 bp, Glycine max
  Clone ID: PAT_MRT3847_68441C.1
gcgaatttgaatccaatttggaatgaggaacttatgttgtttgttccttaacaatttgtactagtgaatggcgtaatgttcaatgtcaaagagaaaaaaaaaaaaacaataaaaaatgactaccactctaaatt

SEQ ID NO: 107892 - DNA, 573 bp, Glycine max
  Clone ID: PAT_MRT3847_68442C.1
ggaaaacacatcactgcaatgcctagtacatgctgaaataacttgcaacaaaggcaggttgtctgaaaggtaatggtctaaggactaacaattgaaaatgaatgaagttagagcatgtgcttattaacaaattcaaaacactttgtattgatgggtctgtgagcctaagttgctgttgcaaattttttttaaaagtcagcaaacaccttgttcaaaatcatggctaatcgaattccaccctgagcaattcgtttcatgacaaatggcacccttgagtcgaagtaatcatctacaaaagcagctccagcacaaactctactcatcccccactgatatactaaaacttcaaactttttggccctggtgcagtttcatgaattagttatttagcatctaaaccacaatcttgttagttctgtgtctacatgtccttaaataactgtagtaaaattattcacctgccagagttgctccagcttcaactccttcgtaaccccatttgcaagctatttgtatgctctctttggcccaattatttacacattgagagatatcattacaatgtttccagga

SEQ ID NO: 107893 - DNA, 515 bp, Glycine max
  Clone ID: PAT_MRT3847_68443C.1
gcaaaagcaattattatgcatgggtatccactatcaattgcggatcaccttggctttaggagatactttactgtcctccaacttgtgtttcaggttcctactagaaatacaattaagaaggagataatgaaaatatatgagaatgaacgagcaacaaatttgaagttgttgaatagtcttgatggaagagtggtcattacatcagacatgtggacttcaacaaatcagaagagggggtatatggctattatggctcattacattgatggttgttggaacttgcaaagtcagattttgaggttcatttacgttcctgcttctcatacaagtgaaagactttgaaatgtattgactcactgtttgatggattggaatattgacacaaaactatccattatcaccctagataattttaccacaaatgatattatgattgataaaattaaggataaattgcgcggagggaggttgcttaaggtggtgtctttacttgacataggtttgttgtgcacaca

SEQ ID NO: 107894 - DNA, 779 bp, Glycine max
  Clone ID: PAT_MRT3847_68444C.1
ggctatctataaacaaaaggggattaaataaaaataaaagtaagtgtgttgaagaaataataaggtgtggttggggttgggagttagggtagaatcaattgagaatggggatccgattcgtactgatggtgaacaagcaaggccaaactcgtcttgctcaatattacgaatacctcactctcgaagagcgacgtgccctcgaaggcgaaatcgttcgcaaatgcctcgcccgcaacgaacagcagtgttcctttgttgagcatcgcaactacaaaattgtttatcggcgctacgcctctttgttttttcctcgttggagtcgacgatgatgagaatgagctggcaattttggaatttatacatctcttggttgaaactatggatcgtcatttcggcaatgtgtgcgagctagatattatgttccatttagaaaaggcgcattttatgttggaggagatggtcatgaatggttgtattgtggagacaagcaaatcaaatattttgactccaattcagctgatggataaaacatcttgaaggataaaaaagaataccctgtgattgatgtatcattagtgactcattgcaacctttctctgtacaatagataagataatctccaattttcagtttgaatggaaatacgagtgtaactatttgttttattttcctctctccctttgtatgaatgatcatgattatgaacttgatttttccaatggcacctgacattggcacaataccctaattatggaaagacttaaatatgtttctggccc

SEQ ID NO: 107895 - DNA, 622 bp, Glycine max
  Clone ID: PAT_MRT3847_68445C.1
aaaacaaatagttacactcgtatttccattcaaactgaaaattggagattatcttatctattgtacagagaaaggttgcaatgagtcactaatgatacatcaatcacagggtattcttttttatccttcaagatgttttatccatcagctgaattggagtcaaaatatttgatttgcttgtctccacaatacaaccattcatgaccatctcctccaacataaaatgcgccttttctaaatggaacataatatctagctcgcactgcaagtataaggggatgagacatataaaaaacttccacgagattctacattctagaaaggaaaggaagaaaatagataagtttggaaagcagaactcaccacattgccgaaatgacgatccatagtttcaaccaagagatgtataaattccaaaattgccagctcattctgcaacatcattcatagaaggtagaataagcagtcatgatgaatcaaaatatatcaacattatttacaaaagtggcatggatctggctcttctaaagtaagtgagagcttgatttcatagtggaaagcttaagaactatttttacttcctatcaaacgtgattttagtaaaaacagggatgctctgtta

SEQ ID NO: 107896 - DNA, 1102 bp, Glycine max
  unsure (1)..(1102): unsure at all n locations
  Clone ID: PAT_MRT3847_68446C.1
caagcttcaagtgatcataaccgagatgggtctaagaattcaacaaagaggagaggtcctcaagggtgtgcccttggttcagccaggggatcatttgttctggtttaacccaattgaagtctccctgctttttttgtctgttttttcataacagaatgcttttcagctggctttcttcgcatggtctgcgcttcagtttgggattaaatcctgtttccattcgcacacggaggacgtggtgatcagaatcacaatgggggtccttattcaaatcctctgcagctacgttactcttcctctctacgctctagtgacacagatgggttcaacaatgaagccaacgatattcaacgatagagtagcggtagcgttgcggaattggcaccagacagcgaagaagcacataagacagaaccgtgtggggccgctgtcgttgtcggggactccgacgtcgagcaggcccacaaccccaagtcaccacctgtccccggtgcacctcttgcgatactaccgctccgaaatcgacagcttccccgcgtctccgcgaaggtcaaacttcgacgataataatatggattctccttctccttcctattcgctccaccaattgccaccacaaacaacagcaacaaccaatgactccgccaatgataataacgccaccacacaccatgagattgtcgtggtgcacagcaaggagttttcgtttgataaaagacctaccagtagtagtggtaatacgtaaatatataaaatcagtgaccaaaaaacaaaatcaaaatatcttaggacaaggatgcatgggatgatctcaagctatgcttctcgatcaggcaaagcattaatcttattgaatttatttatggtgtttcatttgtgtaattaatggattattattattattattatgttaaattgattattatattcatgaagcaatataagttgatctttttctttttcgttgtaacatttacttgcctatcaatagttggcatatatggtatgtaaaaaaatatatatgcatgacgcattgtaaattattgtcatctgaaattccaaaaaanaaaaaaaaaaaaaaaaaaaaaaaaaaaaaaaaaaa

SEQ ID NO: 107897 - DNA, 191 bp, Glycine max
  Clone ID: PAT_MRT3847_68447C.1
aaacgggaaaaattattgaattctacacaaaaagagtagcttcccctaggggaatgtaactttcaaattggatttgggtcctaaccgggataataatctgaaatggatgggggggacctttatttttttccatgggaaactatttacaggaccttttttggttttccacgggaacaaacttactctttttt

SEQ ID NO: 107898 - DNA, 286 bp, Glycine max
  Clone ID: PAT_MRT3847_68448C.1
gtttaatgcatagtagtcaatagtgaatagcagggcagagtggccgcccccaaaaatgctacaatagatagcgttcatcatgctattttaaaccctgaatctgaaaaggaacagagaagaaaaagatgggtcttcataaacgctggagattggctggaaaactcaccaagaaaaagatgggtcgctgcttgaaaatcgcggaccaaggtggggatggcggagtttggccagaaaagatctcttgcagtactgggcttcggtaggcagtgcttattggagcttcaac

SEQ ID NO: 107899 - DNA, 384 bp, Glycine max
  Clone ID: PAT_MRT3847_68449C.1
aggcgtacgaaccgatgcaaagacgacttatggggccaacaccaaaacttaatgtatgggcactgtggactatgccttggggcaagactcacacactcactctctgtcacttccgatacactcctgcgctgccaaaccacgatatgtagtggaggattaccaaccagaaaagcgtccgccgaagggccaacgtgcatactactctgtctgaaccttgatgcttttaatctacatatatgacacgtgtcccatgaaactatcaacgtagtatctgctcatcaacaacatgtgttggaatttaatgaccaataccgtcatattgatgattgataatgactatcgagcatcattttcaaacacacatatacgtgaattctatgaaga

SEQ ID NO: 107900 - DNA, 203 bp, Glycine max
  unsure (1)..(203): unsure at all n locations
  Clone ID: PAT_MRT3847_6844C.1
tgctggtagccgcggtacggcggatattcgggtcgagagctccagtcggcggcgccattgtcttttcgcaagaaattcgcatttggtaacatgaaatctctttggccnaacctnccacgaaattnacatggctaattnnnngnggnnnccaaacacaagcaaccaactggtgtataaagcaataatctctgctcttgcacaga

SEQ ID NO: 107901 - DNA, 354 bp, Glycine max
  Clone ID: PAT_MRT3847_68450C.1
gtgtatggatatctcatcagatggagatttaattgtaaccggctctgcagataaaaatataaagatctggggtttggactttggtgactgtcataaatccatctttgcgcatgctgacagtgttatggcagtgcaatttgttcccaagacacattatgtgttcagtgttgggaaagatcgcctagtaaaatattgggatgccgataaatttgagctgctcttgacacttgaaggacatcatgctgatatttggtgtcttgcagtcagtaatcgtggtgattttatcgtcactggatctcatgatcgttctatccgacctctgggatcgcactgaagagcagtttttcattgagg

SEQ ID NO: 107902 - DNA, 359 bp, Glycine max
  Clone ID: PAT_MRT3847_68451C.1
tttttacaccctgctatcttaaatctaacgctgtaacatctcttgggtgcatctctcagcaccgaagcaatcactcatgggaatgcattaacctaaactgaattctcattatcaatacactcaacaaaatctcatcaacaatattcctaagcttctgcagattaacccaattcacatgacaatcccacctattctccataatgccataccaaattctaaatctgcaattctagagcactacattaatgagccctaaactgataaagctccaatcttaccctcttacccttatgatagaactcaagccaaattctccctagattacatttacacaaatgcgtatcacacttggaggaaaa

SEQ ID NO: 107903 - DNA, 1773 bp, Glycine max
  Clone ID: PAT_MRT3847_68452C.1
ccggaattcccgggtcgaccccgcgtccggagaagacgaacactactcgagccgaatcggctcgagcggctcgagctgacatggcttcttcactcagaatttcaagactcatctctcgctccttttcttctacctccttcttttcacgaggtgggaatggtttccttggttcaagacactgcaaatacagcacttcttctgccattgaagaagaacccgttaaaccatcagtgcaagtagaacacacccaactcttaattgatggaaaatttgtagatgctgcttctggtaaaacttttccaactttagatcctaggacaggtgaagtaattgctcatgttgctgagggtcactctgaggatgttgatcgagcagttgcagctgcacgaaaagcatttgatcatggaccatggcctaagatgacggcttatgaacggcaaaggatcttgttgcgcgcagctgatctgcttgagaagcataatgatgagcttgcagcacttgagacttgggataatggaaagccttatgaacaagctgctaagattgaagttccaatgcttgttcgcctgattcgatactatgctggttgggcagataagatccatggtctaacagttccagctgatggaccatatcatgtgcaaacattacatgaaccaattggtgttgccggtcagatcattccttggaacttccctcttctcatgtttgcctggaaggttggaccggcattggcctgtggcaacaccattgttctcaaaacagctgagcagacaccgttatctgctttatatgcagcaaaactatttcatgaggctggacttcctgctggtgtttaaatgtagtatctggctttggtcaactgctggtgctgctcttgctagaaatgatccaaacaatcagattgattcagatcaatttgagaaaatactgaggtacatcagatctggtgttgaaagtggggcaacccttgaaaccggaggagacaagcttggcaacaagggcttctacattcaacctacagtcttctcaaatgttaaggtatatctttttagtttcatttttgcactttatcgaatgagtctgaaaaatgaaaatacaactcctaaagaagtgttttctattgaatttgtaacaatcaccaggatggcatgctgattgcaagggatgagatctttggtccagtccaatccatattaaaattcaaggaccttggtgaggtagttcaaagagcgaacaacacacgttacgggcttgcggcaggagtgttcacaaagaacatggacactgcaaacactttgacgcgggcactgagagttggaacagtttggataaactgctttgacacatttgatgctgcaattccctttggagggtacaaaatgagtggtcaaggcagagaaaaaggagagtatagtctcaaaaactacttgcaagtgaaggctgttgttaatcccttgaagaacccagcatggctttgagaaacactagtgccttccttggatgatcaactatcagtgcctcaatgataatgatgataaaaacaaaatccttttttttttttgttacacgagttatgagttatgacattgttgatttttttttcttgatgttcatccttttatgttttatctcttttgtctatttctatcccctgcatttgcacaagtcagcgtgacacactatgttacatgggatgggtctcttaatacgtcaaactcttatggtctaaattgtgtttttaatggtacgtgtttgaattggaattttttt

SEQ ID NO: 107904 - DNA, 957 bp, Glycine max
  Clone ID: PAT_MRT3847_68453C.1
ctgggttttttttgttttttttttttttttttttttgggttttttttttttttcatggaaaaaacttacaaaaaaaatataattttaaaataatccaattcaaacacgtataattaaaaactcaatttagaccataagagtaacaagtgtgtcactcttctgacttatacaaatgcaaggaatagaaattgacaaaagagataaaaggatgaagaccaggaaaatatcaacaacgtcataactcataactcgtgtaacgccaaaaaaaaaaaaaaagcaggattttatttttatcatcattatcattgaggcactgatagttattgattatccaaagaaggctagtgtttgctcaaagccatgctgggtttttcaggggattaacaacagccttcacttgcaagtagtttttgagactatactctcctttttctctgccttgaccactcatcttgtaccctccaaagggaattgcagcatcaaatgtgtcaaagcagtttatccacactgttccaactctcagtgcccgcgtcaaagtgtaggcagtgtccatgttcgttgtgaacactccggccgcaagcccgtaacgtgtgttatttgctctttgaactacctcaccaagatccttgaattttaatatggattggactggaccaaagatctcatcccttgcaatcagcatgccatccttaacatttgaaaagactgtaggttgaatgtagaagcccttgttgccaagcttgtctcctccggtttcaagggttgccccactttcaacaccagatctgatgtacctcagtattttctcaaattgatctgaatcaatctgaggaccttgctctattccccccttgaatggatcaccaacaacacgcttaaaagcacgagcctttgctttctcaacaaactcatggatacactttcatgtacaaatgttcgagaccccacacagcaaca

SEQ ID NO: 107905 - DNA, 653 bp, Glycine max
  Clone ID: PAT_MRT3847_68454C.1
cccacgcgtccgaagcaatctcttcttcccagaatcatacgatcgatcaagcatgtatccttcaaccccccctctcctcctcctcctcctttcaaccttcataattttcattctctccatcatcttcctgcgtcgaaatcagagcaaagatggcccgccaggtccaccggccttgccggtgatcggtaacctgcacatgctggggaagctcccacaccgcaccctggaggccttggcccattgatacggacccatcatgtccctacgcctcggacaggtcccacacgtggtggtctcctcctcagaggccgcagaagactttctcaaagcacacgacgccgttttcgcgagccgtccaaggctcgaagcctccaagtacttcggctacggctccaagggcttggcgttctcggagtatggtccctactggcgatacatgaggaaagtgtgcacgctccggcttctgaccgcctcaaaggtggactccttcgcgcccttgaggaagagggagctggagctggccgtgaagtcgctccaagaatccgccgcagcgaaagaaggcgaggtcgttgtggatcttagcgaggtggtgcacaacgttgtggaggaaattgtgtacaagatggtgttgggagtagcaagcatgacgagtt

SEQ ID NO: 107906 - DNA, 508 bp, Glycine max
  Clone ID: PAT_MRT3847_68455C.1
aaaccgaacaaggaactttagggggatttttgtacaaagacacactttaacggggtgaaaatatgaaattaacaaaaaaattgtaaactagaggaaatttaaatagggcgcggacaaagatttttttgggaaaacgccaaaattaattagggttatgaaaaaaaaccaggggaaaaaaactggacactggccttccaaagtcaaaagactgggggtcggacaccggggaacctaatctggggaaaaaaaggggatctaaacccaggcattcacaatgccccgggtgagcacttggcaaaaaaaaggacgaggaccttgaagatggaggaaccttcactgaaccacaaaccctacttccatgcgtgggaaattggaattttctcctcaccaaaaaccccaaaaagaatgggtttcttattcctgggccccctcatgagtaaaaaaaggccaagaacaaccatggccacgggacatttttttggcaaaacgaaaacaaccaatagcttgg

SEQ ID NO: 107907 - DNA, 385 bp, Glycine max
  unsure (1)..(385): unsure at all n locations
  Clone ID: PAT_MRT3847_68456C.1
gcctaggcaacaatgtgaggtttatgcctgctgtggtggatntgggagcggcactgtgaattccatgccatatgggaattttttgaatggttatgagccaaatttacaatctgattggaatcttactgattactcatgtgggtgtgtgaataagaccaagtttcaatgttagaatccaaattcctctgacaaggaaaaggacaggttccttcctattctcaacatgaaattgcccaatcattcgcaatccatattatcctggactgtttggaatttgtttgcatatttcttaaatatcttttctttttcttggaatgcttatttcaatatattgttgttcaattagtcaatgttttctttttgaattttcaacaatctttacttt

SEQ ID NO: 107908 - DNA, 316 bp, Glycine max
  Clone ID: PAT_MRT3847_68457C.1
cccacgcgtactatgcttcagagctgatgctacacaaaagaaatggcttacactcaagcagagggaatggacatactcagttcagcatgcgtggccataaaaagcataaagcagtaactcggatgcgatgtattggccactcacataccatgcattcgcattagaagcggctgtctaactcattgctggatcatcatgtgatctcctccatgacttagacctgtatctcggacctgtatgatgctagattatcacattgcaccatatttcctgatgtctatattcctagcttttcaagctctgtttagagcttatc

SEQ ID NO: 107909 - DNA, 839 bp, Glycine max
  Clone ID: PAT_MRT3847_68458C.1
cagagaagcggaaacaagaattattagctgaaatggtgtttgaggagcagcgaggcagagaactttctaagattgttaatgaattggttccttctaaggaggacaatcctatacaaaatccatcaagagccaggaagagaagtaatgacagaagccgaatgtctatgcgcttgactgaggaggctgagaaatatattgaggattttatttcaaatgttgaagatacagatatttcatcagttgatggtgaaaggagtgatgcaagctcatccattggaggactaataaaaccagaaacatttaatagtcctccagtgccaagatctcttcctgttttgacggatggggttacattgccatggttgcaatgggagacaaataatgatgcttctcctatgacaagccagaataaggcacgtatgacgatcactccaaaaactgaaaatatcaaagtgcaagatcaaggtaacaattctataagcagtcgtggaagctggagcccggattaccttcaggagtatgttggaaaggatgtatacagtaaattaggagaaggttatggttacccagaccagtcattctcagctaaatccaaaggattgaggtatgatatggatgattacctcaaagttaaaagcaatgaagatttgttgattgagagttggaagcaacggaggagaattaattcaggcagtctcttattgtgtagcctaagattattttagacattctgtttttgaagaatggtaattccttcttctcccctggtatgaattctatgtacagataattgcaatttatctatttatgtttccatatataagttgataaacgatatg

SEQ ID NO: 107910 - DNA, 2309 bp, Glycine max
  Clone ID: PAT_MRT3847_68459C.1
cggctcgagcggctcgaggtttcgtcaaacttagccttcttgtttcatctaaaagagtagcaaccatgtggtctgcagtaacagatcccattagagctttttttgcaaattttctccgccatttcatccacaaagacttccatgaagcagtggccagaatgaccataatagatgctttcctcttcgttattgtgcactccattgataagttggggatatggccacgcttgccggttttcttagggctattgtacctggcgattcggcggcggcttcatcaggagtacaacctcttcaacgttggaacaacaccggtgggggttaggtttaaccattctgattttccatacagaacagctgatggaaaatataatgaccctttcaacgaagttgctggcagccatgggactttctttggcagaaatattctccctgtggatcagaaaaaaaagctattgaaacctgatccaatggtggtagccacgaaactacttgctaggaggacatacaaggatactggaaagcaatttaatgtgatagcagcttcttggattcaatttatgattcatgattggatcgatcatcttgaggacacaaaccagattgaactcatcgcaccaagagaagttgcaaggcaatgccctctcaaatctttcaaattctacaagacaaaggaaattcccactggcttctttgagattaaatccggatcatcaaacatccgtacaccttggtgggatgcaagcgcagtatatggaagcaatggagacgttttacagagagtgagaactttcaaagatggaaagataaagatatcaaaggatggccaccttcttcataatgaaaatggaacagcaattgcaggtgacatccgcaatagttgggctggtgtttcaaccttgcaggcccttttcattcaagaacacaatgcagtttgtgacaatctcaagaaacattatcctcacccacgcgtccgtacggctgcgagaagacgacagatggggacctcagctgtgattgcaaaggttcataccattgattggactgtagagctccttaaaactgatactttacttgcaggcatgcgtgccaattggtatggattattagggaagaaatttaaggatacatttgggcatgttggtggagtcatcttggggggattagtgggtcttaagagaccagaaaatcatggtgtcacatactctctaacagaggaatttgtgactgtttatagaatgcactcactcctacctgataacctacagctaagagacatatccgctactccaggacccaacaaatctcctccattagtcaaagaaattcctatgaagaatttgattggactgcaaggagaaaaaacattatctgaaataggagttgcaaggcaacttgtgtcaatgggtcaccaagcttgtggggcattagagctttggaactacccagagtggctcagagacctcgtaccacaaaacatagatggcacagataggcctgatcatgtggatctagctgctcttgaaatttatagagatagagagaggagtgtggctagatacaaccaattcaggagggcattactgttgatacctatctccaagtgggaagatttaacagatgacaaggaagcaattcaagtattggaagaggtatacggtgatgatgttgaagagcttgatgtactggtaggcctcatggcggaaaagaaaataaagggttttgcaatcagtgagacagcttttgttatattcctactcatggcaaccaggaggttagaagctgacaggttcttcacaagcaactttaatgaagagacatataccaagaaaggactggaatgggtgaatacaactgagagcctaaaggatgttattgatcgtcactatcctgaaatgtcacacaagtggttaaactcttctagtgctttctctgtttgggactcaccaccaaactctcaaaatcatatacctctctatcttcgtgttcctcactaatttgtttgccctcacaatatctctttgccattaatgcctttaatttaatcattgggtctattttgggtgtttgtatttcggtttatatccttttgttgtatttgagttaactcgtgtatactttatcttatctctatcccaaaattcagcccacttaggtgcttgtatttagtcttcttaaacaatattttgatgcatttgagtttatggatgaataatagtctgtttgtatcttgatgtattcaacaacaaaaaaatgtatttagttaattgtttttttgtaaaaaaaaaaaaaaaaaaaaaaaccccaaa

SEQ ID NO: 107911 - DNA, 501 bp, Glycine max
  unsure (1)..(501): unsure at all n locations
  Clone ID: PAT_MRT3847_6845C.1
cgaaaattttttaggcggcccacacaaaagaggcacccangangnnncncngagncccaggaagcacgcannaaccaacngnngcngnnccncaaaacncaanacgcnacacacncnncaacncnaaaacccnnccncgannccacnncnccggannagggnnnncnnncnnncagnagaaaaagaaaagggggggnagggagataggtggatcaancggngctggcactggaaaagcagcaagggggggagccagngnnaccaccaacgaacccacganggggggggngagcgccangggnnnnngcacaaggcggganagaacaacgctaccttncnctncctcnngnacnnagcacngcaagcnaaaaagagcnnccncaaacncncccanggccgcncnaaaancannannnccaaaaacgcnnccctcnggcngggcagcanccncaancnncnnnggggcnnnncccaggcgngggagngcncnccngggaaaga

SEQ ID NO: 107912 - DNA, 239 bp, Glycine max
  Clone ID: PAT_MRT3847_68460C.1
tgggacacataatagcttccaactgaaaccgaactcataatattcatcactagaagtgttggatccatgtctatatctaactaatcatgggccttattattattgttgacaaagaaaagaacggcaaatttaataaaattctgtgagttgaacacatgggccaagaatccttctgtcgagttaggcacttggcaagcttgacctcatgttgcatccaaaattttcaccacaaccattct

SEQ ID NO: 107913 - DNA, 536 bp, Glycine max
  Clone ID: PAT_MRT3847_68461C.1
gcacaaaactggaaacatttcctatcaatatggattgcggcggacccgtaaagacaccacattcattatggaaaaccggaattgtgaaacataaggggagaggggatgaggaagaaccaatggctcacagagcatgctcaagcacaccaatattccacacacggatattgacacagcccactctaaaaaataattcttcggtgcattatcaaagcagaaccaatgcacttgaacattctactttcttataccattcactgggcaggaacgccacggatgagttcagctgccgctaccatgtgggtgacggctggcctcacttcagagtacttgcgggtcttgagaccaccttcagggttgacccacgaaatgttcttctggagcactgcatgcatcttagtgatactgacagcgagaccttcagttgactgaattgctggggagaggatgacatacacacgcgggccgatcccagcaccatacttgacactttcacggaagactgacaggagcttgtcatgggagcgagaggtctc

SEQ ID NO: 107914 - DNA, 775 bp, Glycine max
  unsure (1)..(775): unsure at all n locations
  Clone ID: PAT_MRT3847_68462C.1
tggcatccgaagctctgctctccctccctccctcgtaaaacgcattcattactcgctcgcacgcacgcacgtacacacaaacgaaccaaggttcttcttctctgcgatcagatcgcacaaattttggaaccctaatctactacatttcgttttggaccttcatccgaatcgtaaaaatcactctctgcgaatcgaatcctctttctgacgtcgatcatttcgtcgactgagtcatttaaccctaaacattttacatggccatgaccggtaaccattcccctcgccattcctccgataaccaccaatcgcgtcgcgccacgcgcctccctgcttcttcgccgtggaaccaggtcgtctgcggcgaatcggagcccgttgcggcggttccgtcttcctcgacggaggatttcccctctgccgccgcgccggtggaagattttagctcctccgcgactgagagctcagacaatggcggcgctgccaagaggcctgtctggaacaaaccttctcctaatggcgcggcggcggcggcggcttcggaggtgaggccggagatggacgcgaactcgtggcccttgccgtcggagtccacgagagctgctacgaaatcggaatccttgaagggtctgttggatggatcttctgtgccacatcgcagggtttgggaagatggggttccttcttcccttcccaggagtgagggcgggcgtaatgcaagcaccacagtggnggtgccggctcggcagaaatcaacaagcatcacagttctaatgca

SEQ ID NO: 107915 - DNA, 374 bp, Glycine max
  Clone ID: PAT_MRT3847_68463C.1
gaaaatacttattttcttttttatatgaactgaccataaatgttggctatgtttacacagctgaggggccggggttcttaccttggactgctaaactacagaggatattggaccatggttctcttagacattctgaagaaacacaagggaaacatttctatcaaggaacagagtgatatgactgccataatagctgaagacatattaaccacttttcacagcctacaattgatttactacttgaaagggcatcatgttatttgtgcagatcctaaagagctggatcgccatcctaaagctgttttcatgggtggccttgtaagttgatgttttcaaattgatctcgacttcttaatgagaacaaagtttataat

SEQ ID NO: 107916 - DNA, 374 bp, Glycine max
  Clone ID: PAT_MRT3847_68464C.1
gccaaaactttcagaaatagcaaaatggtcagaattcctcatgtttctgggacttgactacaagacaaatcctaaccatgcagttttatacaggacacaagattgatgacttggattttctgaatcagattggggtcgatccagaaaaggttgacttgtcacagctatggtgaactcatgtagcaaaatcattgactgagctgtttgctgaaatgatatttgtacatggctacatacatggtgatccacaccctggtaatatattagtttctccggaaggttgtaatggtttctctttggttcttctagatcatgcagtctacacggtattggatgaagaatttagaaaagatttttgtcaattatgggaagct

SEQ ID NO: 107917 - DNA, 522 bp, Glycine max
  Clone ID: PAT_MRT3847_68465C.1
ttatttgttttgtttttcttttttattcttttttttgtgaaaaccaatcgtgggctccagaagaaaaatatcctttaaagaccctttgggaccattacacatatttaaccccgtaaaaaattaaagggtactaaactaaccccctctttttcccatttggagagggctaccttacatttactaccagctgttccaacacaccataaaagggggtatacgaattcaatattaaaaaaaacataggatagaaatcgaaccctgggatgcccttgtgcactccaagtggatactttttttattaaaaaaaaaagggaaaagaaaatctagtgtgtatttaccaaattatggggaaaaaagaaagtgggaaacccacgctatatttgagttatgggacttgaccagctttaactagtaaaaatgtgcttattaaatattaattaccccctttggaaaaaagccctgggtgtactaaaacttgaaccaattgccccaaaggatgtgattgggggtacaaatttaggc

SEQ ID NO: 107918 - DNA, 291 bp, Glycine max
  Clone ID: PAT_MRT3847_68466C.1
ttatagtgaagatctactgatgagcatagagctggtgggactacaaggcgcaggttaagtgtttcacaacatgatggcagatgatgataagatggggaaggctaacacacaacagtaatttgagggaaatttcgcaggggagtctgggttaccaaataaagggaattgggtatatcctgctagtcaagtacgctcagacgctgtgaaagttaacacaccatgttgaagtggactgatgagggtgacaaacgagtgctatttttaaatctgcagttaccaatcgctcctcag

SEQ ID NO: 107919 - DNA, 455 bp, Glycine max
  Clone ID: PAT_MRT3847_68467C.1
gaggctgccctatgcataccaggccgagggttcatcctgaacactgagggccatcctgggaggatcttgaggaaggacttgatgactttagccaaagtgtggagtgttctctcatactccaacctggcccccacatcgcacacctctgacccgacagtggatagagctaggctgatctttggcctagtctctcgcatggacatgaacataggagctctcatttttggccagatgacttctatagcccagtctaactcttctagacttgggtttcctactctgatcactgccctatgtcaagccaaaggggttgtctctgacagcctcacttttgagcgcctgagcccggtcattaacttagcctacatcaggaagaactgttggaatcctaatgatctgacagtttttatccgaggggacaaaagggcgagggcaaggccagctgatcttccttc

SEQ ID NO: 107920 - DNA, 178 bp, Glycine max
  Clone ID: PAT_MRT3847_68468C.1
gagtattcaacattgccgcgtactccttgttcccttgtttgcgggattttgccttgctgtccatgctcacccgtaaacgctggcgaaagttacagatgctctacatccggtgggtgcactaacgggttacatacaactggacatcaacagcgtctatatccttgctagcgttcaacct

SEQ ID NO: 107921 - DNA, 197 bp, Glycine max
  Clone ID: PAT_MRT3847_68469C.1
gaatgtttcttacacttatatcatataaaaaaaaacatgaatcacatgatgggtaacgatatggcgccactattgagacgctacacatacctaacggtacatagcacactcattaattaacctgactcaactgccagcgaggaggctacatcggttggctctcgggttattcactatgccttagctgattttgaccg

SEQ ID NO: 107922 - DNA, 351 bp, Glycine max
  Clone ID: PAT_MRT3847_6846C.1
ggtggcctcattgcaattggtttttatattaaaaattaatcttactttgtccctttcttaattttggtcccacaccagaaaccgtttaaaaaataaaaaaaaggggcccttagcccaatctctgaccaaaaaaaatatttgccccaacaaaaggggtttccttttgcccaacagttaaaacacgggctctagataaaacacctgaagagggcgtccccccccccggggggggcaccaccctcgggcgcggggttagccttaaaataaaaaaaaaggttttggccctccacaatcccaatggttggggaaaaaaaaaacttttttctttgggcggtccccccccgggggggg

SEQ ID NO: 107923 - DNA, 192 bp, Glycine max
  Clone ID: PAT_MRT3847_68470C.1
gcaaaatgaagaagagtttgggtactacattcgtttgaagatcacaggttgacacaatggaagaaacgcaatgagggacatctacaactgttgattgggaaatgatctatgacataagttgcgtatatgtacagaagtgaactgatttgcccatagtgtacaaacgatagaaactatgcgtctatacccacc

SEQ ID NO: 107924 - DNA, 578 bp, Glycine max
  Clone ID: PAT_MRT3847_68471C.1
ctcgagccgaatcggctcgagacctcatcgtcatcgaactacccacgttctgctccttcgcagatcatttcgcgtttagcttccacgaaagatggcagacaatgaggatggaggggataagacatctcgtgggaatgaatgggaggttgtatctctcacagcatcaacatatgcagctgctcctggtcctgatgaagttgagatgaaggatgatgggaaagaagatgtatatgggcaggatgaaggagaaacgtcacatgctttattcatgtctagacactttgtctttccacccagtcagcatgaaaacttgcccgtggaacctgactatggtgagattcatgatgattttggagacaaagatgttgcctctgaagagactcctgaagaagtgaccatacctagtggaaaggatgaagaaaacttgacattaccaggattagaagttgcagaggagtttgagggcatgcggtattttgacgagaaaatcaacagattatctgttcgtggtaaacagtttgaggaaggtacaactctaccagcatttggcttgactgaaaagggggagagtatgtatg

SEQ ID NO: 107925 - DNA, 216 bp, Glycine max
  Clone ID: PAT_MRT3847_68472C.1
actgctcacgcgtccgcccacgcgtagggggacgggttttagggaactgtctcaactcaacacacggccgaggcctgaattatccaaacttactgcaagggactgtgacacctaaatcaactaccagacttgcagatcagatggcaccagtaaggcgggtagcagaatgaccagggccagcgccgtcactgacacagaaagaatttagcagacact

SEQ ID NO: 107926 - DNA, 1641 bp, Glycine max
  Clone ID: PAT_MRT3847_68473C.1
ctcgcctcaaccgcagtttcaacctcatcgtcatcgaactacccacgttctgctccttcgcagatcatttcgcgtttagcttccacgaaagatggcagacaatgaggatggaggggataagacatctcgtgggaatgaatgggaggttgtatgtaccactacttcccaagttgtactcctttgcggatcgcgtatacaaaagatggcagacaatgaggatggaagggataagactactcgtgggaatgaatgggaggttgtatctctgacagcatcgacatatgcagctgctcctggtcctgatgaagttgagatgaaggatgatgggaacgaagatgtatatggacaagatgaaggagaaacgtcacatgctttatttatgtctcgtcactttgtctttcctcccagtcagcatgaaaacttgcctgtggaacctgactatggtgagattcatgatgattctggagacaaagatgttgcctctgaagagactcctgaagaagtgaccataccaagtggaaaggatgaagaaaacttgacattaccaggattggaagtttcagaggagtttgagggcatgcggtattttgacgagaaaatcaacagattatctgttcgtggtaaacagtttgaggaaagtacaactctaccagcatttggtttgactgaaaagggggagagcatgtatgaccctgcaaaatacacttctttcgacagtgaaactgctattggtggcataacagcttatggtgaaagcatagttgatcctgaaacaactgaatcagcagagcaagggtcaaacgtatctcctgatctatcattgtcaaactactcttccaaagataatgaatacaactcctcagatcttccttgtggagcttggtggaagcggagagctgcctccttatatgctcatgcaaaagaggcaaatgcattctggtctgtcttcattgcagctgctgtgatgggtcttgtaatgcttggtcaacgctggcagcaggaaagagctttacaacttaaatggcaaatcagtataaatgatgaggcgaggagcagggtgcttgctcccatatatcgactcaaagatgtgattgttggtggcaaccgtcgtggctccttgatcaggggaagctcctctggtgaaagttaagggaaaggtggctcagtgcatatgggctcctatccttgtggtaaaagtgaagatgatgacgaaaaaatgtatgtcagagagaggttgagaatgaaaagtgctacaattgtgaaatgcaggtttggtactaggattggttgacctttcccaattatgaatgccaatgttcaaacattttatgttatggattttcttctttgtattgattagcaatgtatagctcttgaagttattcaacttatgtattctgattgtgtgaaattggcagtttaaacacaaaaagatgtaaatgattgctttaatggtgggtgttcagttttctttttactctaacggctgcagagtctcgctaatgggagtgaaacctcagtttctactttctgaagtgtagtagattgcatgctggcatgagcacatgcttatgaattattgatagatactgttcaataagggcatcacatacatgaaaacaactacacttgtgacctttt

SEQ ID NO: 107927 - DNA, 1006 bp, Glycine max
  Clone ID: PAT_MRT3847_68474C.1
aagctccatgaagctaaagagaatcgtgcacaccctcatagtctcccacttgtgccgaatcattcgtgcactctccaaagtcaaagatgtaatggttgagattcttaaagaaaactcaaccaccatccacttccctcacaaaaaacattgcaatagacgcaagaagatcatcctaggctccttcaggctccactacaactggtgctcctccaaatcctcgcacgtgttgccggtccccgaaccgatttatgccacgtgccgcgacgacgacgacgaagattgcccctacctaaggtggcttgaggagaagaaggttgaaggtgaaggtggtggtgatagtaataataagggtgcaagtgcaacacgtaatgagcatgttgaaatgaacgagattgatgtgttagcagaaatgttcattgccaattgccacgagaagttcaggttggaaaagcaagagtctgataggaggttccatgaaatgctggctagaagcatgtgaaaccaaaaagctcaacacatgttttggtctttcttttgaaagttggtttcccacgttagaattcgaacttgttgttgactatttgggaaaagcttgtccatcatcatcgcatatcatatcaaatgtgtccagggttttatttattatttacgggtcatatatatattaatttgcctttttctttttatccaaacttttcaaaagactaaggggggtttgaagtttgaagaattgtacatgatatatgggagatatgggattgggaattgtgcaattcttctgtctgttgatacggtcccggtaggcttcaacttttaatttgcagatttattttgccaataattgagaagtgctgtttgaaattatgcagatctcaccttatagaaaaactacatgacctctctgcttagaagttgttttccattttcatatccatgtaaggtttgataataataagccgttttttctttttttaggaaaaaaaaaaaaaaaacagggcgcgccgct

SEQ ID NO: 107928 - DNA, 703 bp, Glycine max
  Clone ID: PAT_MRT3847_68475C.1
ttattagtcactctctcacacagtcacaaactgtttctctaaacaatatctatctacacctgcccccttaagaacaaaaaaaaaaaaaaaaaaacatgtttagcccttcgcatctcaaaaccttgtaccctcttcaacaagccttctcagtaaaaccatcttcaaccataagctccatgaagctaaagagaatcgtgcacaccctcatagtttcccacttgtgccgaatcattcgtgcactctccaaagtcaaagatgttatggttgagattcttaaagaaaactcaaccatgatccacaaaaagcactacaacaactacagacgcaagaataagatcatcctaggctccttcaggctccactacaactggtgctcctccaaatcctcgcatgtgttgccggttcccgaaccggtttacgccacgtgccgcgactcgggggagccgccgcgagacgaagaagattgcccctacctaaggtggcttgaggagaaggttgaagttgaaggtggtggtggtgataatagtaataataagggtgcaagtgcaacaaatgatgagcatgatgaaatgaacgagattgatgtgctggcggaaatgttcattgccaattgccacgagaagttcaggttggaaaagcaagagtctgataggaggttccatgaaatgctggctagaagcatgtgaaacccaaaaagctcaac

SEQ ID NO: 107929 - DNA, 367 bp, Glycine max
  Clone ID: PAT_MRT3847_68476C.1
cattcaatatataacatactggaaagagattgtcgttacatccattagcaggtttaacaacagaactataaaaatgtgaacaaacgcagtttatgtgaccactttaacagggaagcaggaaaggggttggagaaaagccaaaatgctcacacaagccatgtgccttaccattcattttcagaatattaacctaagccatgactgaggatattgaatatacaacactatgcacaagaaatatggcaagcgtaattaaacataagctacctaatgtcctctgtgaaaaacaatgcgagtgattgctgtacctaccttattaacatccctcatggatgattcagcacttgccctcatagtgcctttatac

SEQ ID NO: 107930 - DNA, 454 bp, Glycine max
  unsure (1)..(454): unsure at all n locations
  Clone ID: PAT_MRT3847_68477C.1
gtgcgagaaaattaatttgttaaactaacatgttagaatttaattttatgcagcacattttatacaggcagaaagaacaattcagtgatggagttggctatggttggattgatggccttaaagctcatgctgagaaacatgtaaaacatgatagaaaccttttattctctaatcccattttttctcttgttgtcaattatcatgcaagacatctcatatttttaattattggcttattaaattttcctataggtgactgatagaatgatgctcaatgctgctaacattttccccttcaacacaccaaccaccaaagaagcatactactatagaatgatatttgagaggttcttccctcangtaaatttaatcaaccatgcctagatatgaaaaaataattcatgttgatttaacaagagctaatcaaaatctgtgtcccttaatttggttttgt

SEQ ID NO: 107931 - DNA, 889 bp, Glycine max
  Clone ID: PAT_MRT3847_68478C.1
tggttactgagccgaaataagagaacatggcatttgcagttagggctttatgggcagtgagaaagagttgcagaggaagtcctcgccgttattgtttcagcaaacatgcgcattcaaattcaaattcacattcaaattcaaatccccttctcttgaaattgcttcaggttccgaactcgcacattaaaacgacgctggatcaggaaatggcttcccttcaaagctcgcaacgttcttgggacttccttattacctctctctccccttcttcctccgacaaagctcgattgattttggaatggattttggagaagatgctgaaagaaaatgagaaagatcgagatctcttctctgaactcatctttctatgtggaaaagtgaaggacgtgatgctaggaatgcgtgtgtttagttctatggaggctactggagttaaacccaattcactagttttcaattcccttataagtgtttgtttgtcttcccatgatattgttacagcagttagtttatttgagatcatggagtcgtctcgagctcgagccgctgattttcacacttataatatctttatttcagcattttccaagtcagggaatgttgatgccatgttagcttggtactcagcgaagaaggctgccagacttggtcctgatcttcaaatgtttgaatccctcatatcaggctgtgttaattctagaaagtttaagattgctgatagaatttttgaagaaatgatgatttctggaattgttcctagtgcttccataattgaaagtatgcttaatgggatttgcaagcaaaagagattgggtcgggcagaggagtttttcacgtttgcgatggattctggatgggaaatatatgagaacatggttggataagttag

SEQ ID NO: 107932 - DNA, 208 bp, Glycine max
  Clone ID: PAT_MRT3847_68479C.1
cttctttagcgagccgaagacaatcaccatgtcctcttcctcttcctccttcttccccgcccatatcaccaccgaccaagaattctacctcatcgatgccgacctcaccaacgtcgtctccgtgatgtacctccagctcctccagccctgaattccgtttttctaactgggggggcgctctttcttccgacagccttatgccaacacc

SEQ ID NO: 107933 - DNA, 527 bp, Glycine max
  Clone ID: PAT_MRT3847_6847C.1
ggggcaagggtcaatcaaacacccgttttgcaaatgcaatgacaatacaatatgaacaattattatttccatatattaaaaaatggcctcatggggttgcctggaaacaatcaagacattgtataaaataacaaaacaattccgagggtggtttgggtgcgtaagctgcaaaaattcaatagttaatttgagcgaatcctacatattatgcaagacctttagttgatggggtctataaatgaaaggctttaacaatagcaatgcaaaaaaattgattggtatccgcaagaaaagtgctagcaacatattttttaattaaaacaccctccttttcggccgcaaactaaaaggggggggtaactcagtataaacatgcaaaaggggaaaataggtttcatagggggggggggaaaatgtcgaggatattaatgctttggtggtagcgtatgagctggtcaggttggtaaaagacaaggtagtgtcggaggggccttatgcagtggcggattctggtgagtgactggcgg

SEQ ID NO: 107934 - DNA, 165 bp, Glycine max
  unsure (1)..(165): unsure at all n locations
  Clone ID: PAT_MRT3847_68480C.1
gcttctgaatcgtcttttacttctcagcagcttcggctagggttcaganacgaaaaaaggttccggttttccgttcccgattaaaacccaattggaaaaaaaaccttttaaggaggttaaaaaggaacccccaaagaataaaacagaaatccaattattccttta

SEQ ID NO: 107935 - DNA, 521 bp, Glycine max
  Clone ID: PAT_MRT3847_68481C.1
tcggtaaactcaagttaagttaaaaatttagctcgtgtgcttttgcttagagttttgaatttgtaagttaaggtaactttagatttaaattttgtatttttctgttgagcaggccctttatttttgttattctgcaagtagcagcaatgcaaacttaggagtagttcagaactaaagactaccttgcctcttaaatctttgaaaaatgctaattgctaggaatgcgtttctatgaaacaacttacagatagttagaagtaaaataagttgttgtgtttgttagttacccatttactttttagattctactatttttcctatacgaccatggttggttgtgaggcatttgtaacaaatttcatacaagagattttgctaaaaagcactgttgtaaatattctactttaaactggcgtcaaaactcaaaatgatttcaggtaagttcattaagggcaaacaagaaaaagggaaaattgcagcccatttcccataacggcttgcccaagtgcatgagaaacctt

SEQ ID NO: 107936 - DNA, 123 bp, Glycine max
  Clone ID: PAT_MRT3847_68482C.1
ttcttcctttttgtagagctctgcaaatggtgttcttctggttattctttcctttctggttcgccggataaggtgagagagactgatcatgagaagctgccttgtgagaagagtcgtgacaaa

SEQ ID NO: 107937 - DNA, 239 bp, Glycine max
  Clone ID: PAT_MRT3847_68483C.1
agaaaacccagcaaaaggttccatggggcaattatttaaaaaccgaccagggaattcaggcacctgtctttcaagattgattggggctaaagggcccaactgaacacaatgggttaagagggcggttggaacaaaaattacatttcagcattttttgctcaccataacaagcttagggacccccaaagtaattcccaagtcctacaaggagtttgtaaaagatgcttcctccatgtcca

SEQ ID NO: 107938 - DNA, 1917 bp, Glycine max
  Clone ID: PAT_MRT3847_68484C.1
gtattgacaatcaaaatttctattccttggattatggggttgaactaagcacatgtttttaaggaaaggttcatcaagtcaaggtcaagtatggaagaagaaagaagaaaaataatgaaagaaatgaaaagagaaaaacatgcctcctatagtagtcataactcttgcaagagcctaagtgaagaacttcgtgactattatgaaggaaggcataggtcacatcttaattgggaaaagaaggttgaacaactctttgcttgccatcatattagcgaagagagaaaagttccattggctacccttagctttcaagggtatgccctctattggtggacttcccttgttaggaaacaaaggattcatggggatcctccagtagagtattggaatgatcttaagagtgcccttaggaagagacacattccctcctactataaaagtgagcttatggacaagctccaaaggcttagacaagggagtatgagtgttgaagaatatagacaacaaatggaactactccttttaagatctagacttagggaggaggaaagaacaagcatagctaggttccttagtgggcttaatatgtaagtgagggataaggttgaactccttccatatagggacctagatgagctagtccaactttgtataagagtggagcaacaacttaaaagaaagccttcttcaaaatcttatggctttcactcttatccaaggaaggactaagcccaacaaattttgggggctgcatcttcaaaacccaaggaagataagggtaagaccatagagaaatccacccctacaactagttcccaagaaaggactagcaacattaaatgcttcaaatgtcttgggaaaggccacattgcctctcaatgccccacaaagaaaacaatgatcatgaggggtcaagacatttatagtagtcaagaggagaaagagtctagtgaggaagtctacccccatgaagaaggtgacctcttaatggttaaaaggctccttggaggtcaatcttgtgatctatctcaatcccaaagagataacatctttcatacaagatgcaaaattttagataaaacttgttctcacattgtggaaagtggatcttgctgcaattgttgtagcacaagattagtttccaaattgaacctcagaatcatttcccacccaaaaccttataaacttcaatggctcaatgagcaaggggaaatgatagttaaccaacaagtgaaggtacctttctccattgggacatataaggatgaagttaattgtgatatagttcccatggaggcaggacatattcttttaggaagactgtggaaatttgataggaagatcatttacgatgacctaactaatgagattacctcacccatcttggcactaaatttgtgttgcatcctcaaacaccttcataggtggccagagatcaactaactatgaaagataagagggatgaggaagaaaaactagaaaaacaaataaaagagttgttggatgagggtttggttcgtaagagcttaaatccttgtgctttgttggtatgttttattccattactttccttaactttttaaatagtgatcaaggccttcccatggatcctaagagaataaaggtcattcttgagtggcctactccaccaagtataagggaaatttggggcttcaatgacttaacaaacttttacaaaaaggtttatcccatatttttctatacttgtagcaccactcattgagttggtgaggaactatgttggatgggttggtgacctggcagcgatcgacgcttttctcgcctatcataaccacaaggaaagcccggttgtcgctatgatagccgacctatatgacaccttcgaccgaagatgtgagaagagcagtacgaggatttccctcatcctttcacaaa

SEQ ID NO: 107939 - DNA, 480 bp, Glycine max
  Clone ID: PAT_MRT3847_68485C.1
aattcgagcggccgctttttttttcttgaattgctggaatcggtatctctcaatcccacttactattacgtaaaacatgcaaatacttggggatatggggtagagacggttaaccaactgaaatatcctctacaaggctctaaaaattattatcagttttaacttttaattcaaaaaatttgattttttttataacttgtactccttttatataattatttttctctattattttcatctcattattttttgttctttccttattattttccccctttttttacctaattcacacatcataagcaagtatgaaaaaaaaacatttttcttaatccaattacaaagtacttgatagaacattatggcgaaagttgttccatgtagccgatcccacctaatgggataaagcgttgttgttgttggtttgccctggtaccaaaacagagattgtattttgaatttggccctttaattgattga

SEQ ID NO: 107940 - DNA, 1345 bp, Glycine max
  Clone ID: PAT_MRT3847_68486C.1
gcaacaacttaaaataaagccttcttcaaaatcttatggctctcactcttatccaaggaaggaccaagcccatggaattttgggggctgcaccttcaaaacccaaggaagataagggtaagaccatagataaatacacccctaagactagttcccaagaaaggactagcaatattgaatgcttcaaatgtcttaggtgaggtcacattgcctctcaatgccccataaagaaaaccatgatcatgaggggtcaagacatttatagtagtcaagaggagactacttcttgctcttcctctagtggaagtgaagatgaagtaaggggtcaagagtctagtgaggaagtctacccccatgaagaaggtgacatcttaatggttagaaggctccttggaggtcaatcttgtgatctatctcaatcccaaagagagaacatctttcatacaagatgcaaaattttagataaaacttgttctctcattgtggaaagaggatcttgttgcaattgttgtagcacaagattagtttccaagttgaacctcactatcattccccacccaaaaccttataaacttcaatggctcaatgagcaagggaaaaggatagttaaccaacaagtgaaggtacctttctccattgggacatataaggatgaagttaattatgatatagttcccatggaggcaggacatattcttttaggaaggccgtggcaatttgataggaaaatcatttataatggcctaactaacgagattaccctcacccatcttggcactaaatttgtgttgcatcctcaaacaccttcacaggtggccaaagatcaactaactatgaaagataagagggatgaggaagaaaaatttgaaaaacaaaagaaaaagaaggatagtaaggccttgtcttcaaaggccagggggaaggaaaaagagggaaaggattcctccaagaagattgttaagaaggaaaatcattttgcaacaaaaggtgatattaaaagagcactgcttcttaaacaatcttcctaccttctcctatcaagggaaacatcccttagcaataccacaattcctacacttgagacgttacccccaaaggtccaagaactcttacatgaatttggtgatatatttcccaaagggatatcccctgggctacctcctttaaggggaatagaacaccaaatagatttagtcccaggagcaagccttcctaataggccaacctataggactaaccctcaggagactaaggagatagagtctcaggttaaagaattgttggagaagggttgggtccaagagagcctaagcccatgtgctgtgctagctgttgttggtgcctaa

SEQ ID NO: 107941 - DNA, 332 bp, Glycine max
  unsure (1)..(332): unsure at all n locations
  Clone ID: PAT_MRT3847_68487C.1
tgcccattctgcatgctaatactttatagaaattttagcaattcctttcttgacatgnaatataagcaattttctgtctttcttgctgggggttattccactttttgcttcacttatatattcatagcccattgcatatcaagaatccctcatcttctcccacagttcattcagatatctatcttgaataattcgccaaagttagcaattaaagtatataaacggtcctttattctcgaatcatgtcttacaagatcatcatctacaatattccatccatcatctgtcaaattgtattttattcagtttttgaccacgcatgattctttctt

SEQ ID NO: 107942 - DNA, 354 bp, Glycine max
  Clone ID: PAT_MRT3847_68488C.1
taagattaatggacaagagtgttcgacggaccttgagaagatcaagcaagtggggttgtatgatcccatatccttcactctatcagacatatgccgtcggtactatcataaggaaacaggtcttgatgtagtcatgattatggccattacatcatagcgctcactgcttccttcaagattcagtgcatgcatggctgtggctgtcagagtacgaaggagtcgcagacagaccgatgatgacttctttattgcaaccgcacacctcaaagacgaaccaatggcacatattgtagcactttatatctagatgtcatcatgacagtactagtgtgtagacactaatcctcatatcag

SEQ ID NO: 107943 - DNA, 1105 bp, Glycine max
  Clone ID: PAT_MRT3847_68489C.1
gctagtttgattacctatcaaaaccagaaaaacacactgcaattgtttggactagttttaatttcttccaattccatggctgggaaagatagaatcctgattttgggacccactggagccattggaaggcacatagtctgggcaagtgtgaaggcagggaacccaacatttgtgttggtgaggaacacccctggctctaacaacagggtcaatctggtcaaagctgctaatcctgaaaccaaggaagagctcattgagagcttcaaaaattcaggagtaaatctaattcagggagatatgaatgatcatgagagtctggttaatgcaatcaagcaagttgatgtcgtaatctgcgcatttggtagactactaattgaagaccagttgaagatcattgcagcaataaaagaagctggaaacgtcaagagattttttccatctgaatttggattggatgtggatcgtcacgattcagttgacccagttagagaagttttcgaggaaaaagcaagaattcgaagaataattgaagccgaaggaattccatacacttacctatgttgcatgcctttactggttacttcttaagtaacctggcacagattgacatcactgttcctccaagggacaaggtattcaattctaggagatggaaatgtgaaaggagcgtttgtgactgaggctgatgtgggaactttgaccatcgaagcagcgaatgaccctaatgccttgaacaaaaccgtgcacataagactccctaagaattatttgaccataaatgagatcatctctttgtgggagaacaaaattgggaagactcttgaaaaaacttatgtttcagaggaaaaggttcttaaagacattaaggaggcttcttttccaaacaattacctgctggcattgtaccactcacagcagataaagggagatgcagtgtatgagattgacactgccaaagatcttgaggcttctgaagcttatcctaacgtggaatacaccaccgtcgatgaatatttgaatcagtttgtctgatttttgagtaattgatgcaatccctgctgctctgcaaagtgctcaataaaacctatgccttttcttttttgcg

SEQ ID NO: 107944 - DNA, 458 bp, Glycine max
  Clone ID: PAT_MRT3847_6848C.1
ttttattatttttttttttttttataggctattttacccataacttctattgttttttgttccttacctttttgttgtgtcacaacgctttaaccggggcctccctgctgaactaaacgcaattataaatctcaatcagttggacacaaaggaagcacatagcgcaggccactcaattttttcagcctgggggacagattttttaaatgcttgtggggcccacacccccccaacaggctggggcgcatattaacttagaaggccatttttgctgggggaaattgctccataaaaacacccgatgaccgtaagaaaaaaaaagtggatcctctcgcacccgaagacgcataaaacccacctgttaaggaaaaaggaagaacttcggctggggtgtttgcccccctccaacggggaaaaaaagacaagcggaaggaagtaaaagatgcaaaaaaggaccc

SEQ ID NO: 107945 - DNA, 332 bp, Glycine max
  Clone ID: PAT_MRT3847_68490C.1
gctcggaattcggctcgagctctctgtcttcttgttcctcgtaaacggggaaaaagggggaaatctttctttgggggggaaccttaatctttctctttccatctacacatccactcgattggaggttttcacggcatcgttggagtgaaacaacttacagtgtgtgacgcgaccccgtgttacatcagacagaaaagagacttacactcggccccaactaatccaacggcgggagcatacaaagaactggaagaacatcttctccaagtccttctcaagcttgtggaagctgcttggccagcggtggagcacctctcacctctacaacaggc

SEQ ID NO: 107946 - DNA, 456 bp, Glycine max
  Clone ID: PAT_MRT3847_68491C.1
accagcgcttttggttttctaattttttctttatgcgcaccgtctcatcagaaggggggttgatgcaacttgccggggaatacttcagacaagcaaggtttagaatcaaagtcctacagggtttctgctggtggcgcaccccccacgggggggccgcccggggcataaaagatgcggggggggcgaaaacggagggggcggaaggaacacatactgcgccaggcagcgagcgctccaaaaggggcgggccccaccagcggggggtgtctccaaacgcgcgagaagaggcggcggggcctaagggaggtcccggcgcaccacgcgcaaataaagcggcagagcggtgcctttggggagaggacagaccaccccaaccacgcgtgggagcggggggaacccccgggatgaaacccggtctcccgaggggccgcccaccgggcgctgggggagccccac

SEQ ID NO: 107947 - DNA, 437 bp, Glycine max
  Clone ID: PAT_MRT3847_68492C.1
cacacattctcattctcatggatgaccttcccactcccaaacaccgcctcctaactctcctcaactccctcaaagaagcttccaaagtccttcacaccaccaccaaccccttctccttccactccagaaccgattcacgcgccgccatcgacactctcctcgacctcgaagcaaaagcccacgccaccctctcctccgtcgacccaaccctccgcaacctctcccgcatgctctcctccctccgtaccctaatcgacaaactccacaagcaccacggctactccccccgatccctcctccaccgctacgtcaccgcctacaaaatctcccacctcgcacgcgccgtcgaatcccaaatccaatcctacatcgaccgcctcaacattcgcgatctcgtcgacacccttcaagaccaacaacagcagcagcagcagcag

SEQ ID NO: 107948 - DNA, 344 bp, Glycine max
  Clone ID: PAT_MRT3847_68493C.1
gggcaaaagcaacaaggtttataaattatacaaaaagcccccctgcgaaaaaaaagagatttcaacaccccctttttttttcaggggttccaaaaaacagggtttattttaattaggcccaaaaaccaaaaaatgtttggggcccccggactttattggggcttccattcccaaaaggtccttccggcatttggttaaaaaagggaaggggggcccccaaaaatgggttcaactggggggggggttttttaaaccctaaacttaaaaaccctttttttttccccggggggggttctctcacccaccggtttggggggggccctaaaaatcacccttgaaggggg

SEQ ID NO: 107949 - DNA, 297 bp, Glycine max
  Clone ID: PAT_MRT3847_68494C.1
gacacgcaactatttctgactacgtcttgctctaagcttctcactctctctcaaaaatcgttctcttcgagtttagggttttgttttgctgctgcctcgtgtatgaccttctcaaattcaacgcgttttctcctcagcttcatgatgctcccgttgtttaggatttggggtgattctaaggcttcaaaagattccttggagaattttaatccatttaaccatgcaggactgaatgaactaatggagtctaaaggtgggaaaaagaagtctagtagtagtagtagtatctcaatgctc

SEQ ID NO: 107950 - DNA, 218 bp, Glycine max
  Clone ID: PAT_MRT3847_68495C.1
cttcttttcttttattaagggttgcaacatgagaggcatcaaaatagggccgatgatctcaactaggttgacaccaggagcactactcaacctctgcatacaatcactcaaactatgtttacaaaaaaagaaggccattcctacacatcacatgccatctctaaaaaattctcattcctatctgaataggaattattcaaatcttagtgcagtctcag

SEQ ID NO: 107951 - DNA, 1622 bp, Glycine max
  unsure (1)..(1622): unsure at all n locations
  Clone ID: PAT_MRT3847_68496C.1
ggctcgagcggctcgagctcgagccgaatcggctttagatttcatcaacactgagtctcaggttaggagtaggttcctcaggtacaggatgcaggagctggagtgtgctgcgctggttcttttgttcgagctcctgacgtggaggtctgaggggcttgatccactctatgctcgggcggttctcatgatggaaaaggatccaggaaccggaaagatgaaagtcgctaatccggtaagtagtagcctcgttggggggacctgttggagagggtgtaagtccgttggggagagtcctgtacgagttccgtctccgaaatgtcatgtgttgaaggactttgcagcatctgtgtttccaatgctggaggacatcctgagctgtgctgcagtgatccaaatggtggtgttggaggacacgtttaaggtggcgtgtatggaggatccactggccagagaggttgctggaattgttcagagtgaggggttttggaatgagctggagggggtttattcgctggttaatctaatcggtgaagtggttctggacattggggcggagaggccattgattggtcggtgcttgcctctttgggaggagattagaaccaaggtggtgaaggagtggtgtgttaagtacagtgttgcggaagcacctgtggtggaaatacttgagaaacggttcaggaagaattatcaccctgcatggtctgctgcattcatacttgatccactttacttggttaaagatgcaagtggaaagtaccttcctccgttcaattgcttaactcgtgaacaagagaaagatgtagataagttattgacaaggctggcttcgcgagaagaagctcatgttgtgttgatggagctcatgaagtggagatcagaagggcttgacccactttatgcacaggctgtgcagatgaaacaacgagacccggttaccgggaagatgaaggttgcaaatccactcagcagtagacttgtttgggaaacttgcctcagcgagtttaaatcccttgggaagcttgcagtgaggctcatttttctgcatggaacctcaagtggatttaagagtaattgttctttcatcaggaagatttctgcaaataagcactccagagtttccttggaaagagctctgaaagtggtgtatattgcagctcatgccaagcttgaaagacgagacttttccaatgaggaagagaaggaagcagaactgcttgccagggaaggtagtgatgatggtatgctggctgaggtctttgctgatgcacccctgctgtaatgtgccacttttcaacccctatagaattctgtaattttaggatttatcatattttttttccagagctgttctattatttcccttattccacgtgaaaaatattttgtgacttgtgattgaaacaaaaaaggatattggaagacacctgactgttatgtcatcttttattcaaatgaatcatctccattttccccatcttttatttggattgcttaggtttgtaaaggaggaacaattgctcgttaattagcataacaacaattcagggaagaggatggcataaagcctctacttgaataatttgtaatgagaattgnnntgagccatattctaaaattaa

SEQ ID NO: 107952 - DNA, 478 bp, Glycine max
  Clone ID: PAT_MRT3847_68497C.1
ccgagagctctaggtgatccactccagctgggccatgctcggggccttgggctgcgactacctcgaactgtggtcccgcctcggggtcaagtaaggacaaggtgtgcggtggaaggccgggtaccatatcttcagagaaggtgggctagactacttagaccacccaaaccttgtccgcccccagagcaggctttgcatatgagccatccaactaatactaatgggtgctgttaagggatgtcgtgttgctgttgggcccctcggtgaggtcaatgacccaatttactctgctggcatgtgctactcatagtgccttgctgatgacccacacgctttcgctgacctcaaagtgaaggaactctacatcgggagattggccatgtcctctatgttggggatatctgctcaagctataggaacctgcccaggatcattgtagatccttgctgatcactctgcggacgccaggaacaacgat

SEQ ID NO: 107953 - DNA, 104 bp, Glycine max
  Clone ID: PAT_MRT3847_68498C.1
ccacgcgtccgaacacgcgtacacgcgactagtatacgactacatcaagactccgctacgcggagacctcagaaggatactccttcgataagacgacggtacga

SEQ ID NO: 107954 - DNA, 703 bp, Glycine max
  Clone ID: PAT_MRT3847_68499C.1
cgcttctcacccacaaacgtcccctctgcaacgacgtcgtttttcttcttcttcttcttctccggttaagttccccctcttcttcaaacgcgttttcttcctttgctcatagggtttcactcgagccgcgatctccatccctagctcgccgagttttctcctcttcgggttcttatctccgccgcgtctgaattcgctgtacccctgaatagaagaaaggacttcgaatttcgctgcttacagttagtagctggtaattgatttgggtctttggttccattttgaagttaacctctgtggtggaagctgtgtagtaattacctacaccagttgtatatcagtgtgtttcttgttgttgttagagttaataaaaaaagggggatttgaatttctcgcacttattgagtttgtttgtttctttaattttcggtgtcttgtcttcccccttttgtactagggttccaagtagcagagagcacggtattgatttttttttagtttgtttcattaatttaattactgtgtaactttcaacagtaatcctgaactgcacttggccgttggggttttgttggggagctgcggtttttgggtgaatgaataattgaacatggtgatattcgaaaagtaggctgtctgggggttattttgggaatgcactagatactggtggggaaatctgaggttctggtagctcgggaag

SEQ ID NO: 107955 - DNA, 258 bp, Glycine max
  Clone ID: PAT_MRT3847_6849C.1
gagagggctcgattcatttaattttttcggggcacctggaacttaaagaactccaagggatgcgggaaaggaacaagccctttttctgggggggggggggcaaggcacttcctggttccccccaaaaaaagggacactaaagctggcccaaaaaaggaggaatggaacccttacagcccctttggttttacattcaaaaaccgccttgcccccctaaaagccaaaaccgggcgggccaaacggccagctaaaagcccc

SEQ ID NO: 107956 - DNA, 408 bp, Glycine max
  Clone ID: PAT_MRT3847_684C.1
gaatgcttcagtttcataagggtctaccaaagataagaaaatacgtactgaaatgtgacaagtacttaatgaaccagagacattcatgtcattttcttatattgacattgtaccatacatgcactctggtatgcgagaggatgatccctgaactctcatttgggttgcatcgtctgatgcggacgagacttatgtccggaaatatccaggagcgagggtatatgggtaagactcataccaaattctgccctagccacgctacttttggcgacctctggcaaatcgctgtagaccagaacggaattaacactgactgccaattcctacatagcatcaccagaggctatgatcaatctgaacactctgaacccagtttgcattgagcttgaccagctcaaggctctgact

SEQ ID NO: 107957 - DNA, 1306 bp, Glycine max
  Clone ID: PAT_MRT3847_68500C.1
cagtcttacggcgcacttcaatgtatactgtttatcaggctgtgatatctggtattagacaagagaagttttttcctgtggcaattcttttctctggtggcctggactctatgatacttgcagcattattggataaatgcatggatcccagctatgaaattgatctacttaatgtaagttttgatgggcagttagctcctgatagaaaatctgccaaggcagggttgaacgaactaagaagagttgcaccttccagaaagtggagacttgtggaaattgatgctgacttgtcagacttggtgttcgaaactagtcatgttatgtccctcataaatcctgccaacacctacatggacctgaatattggaattgctttatggcttgctgctggtggtgatggatgggtatctgatgcaaatacatatgataatgatggcaatcatgtacgaattaaatataagtcaaatgcgaagattctccttgttggttctggtgccgatgagcagtgtgctgggtatgggagacatagaacaagttatagacgtggaagttggctggggttacatgaggaaatgagactcgacatgcaaagaatttggagaagaaatttagggagagatgatagatgtattgctgataatgggaaggagatttccattcttggatgaggatgttataaggcttttgctcaatattccattgtgggaggtagccaacctcgatcaacctagtggcattggtgataaaaggattttaagagaggttgctgaattgcttggtttatatgaagcagcagttctgccaaaacgagcaatccagtttggttcaagaattgcaagggaatcaaatcggaagaattttggaagcaatcgagcagcaaatcaggcatcggctggcagcgtaacgattcataggaaatccaatttttgttgattttttttttggcatgcggaacacattatcctttctgatccaaaccattaatagacgtagttgtttgaaaccgtgtgtgcctatatatttgatcaagaaattggacagcattttggaactacttgagatgttatgcttggtggtacctttactatatctgaagggttttgatcaataatatctgtaaggaggattcgacccccagagctctccctaacgccaaaatttctgcgagcttgacctcaaacgtgcttgtaaaccacttttgagtcttggctagatactgattttgagattaattgtatgacacgatacaagtttatggtgattttcatgaacaacagtgtaatcataatttaattaatttttcatt

SEQ ID NO: 107958 - DNA, 771 bp, Glycine max
  unsure (1)..(771): unsure at all n locations
  Clone ID: PAT_MRT3847_68501C.1
aggtatgggaagnttaaaggttggatgtgtggttttgatgtgaatggttgtgatgagtgaannaatgatggtgaaaggtgtgtgatgnaatgatgtttgtgtgaatgtagganngtgattattttatttgttgtagggtggagatgttttggagggggggtgtantggagtgaggaaaattgtgggttgtggtagnagtagttttgataaagaaatggggtggaaatgtgttgaggaaggtggtaataattgtggggtgaaggangaataaggtgagggggtgggggaggggtggggtggggggggggggttgggggatnggnnggttgggggtttgggggttggtggggnggtgggggngggggggggggggggggtgtgttttgnggngtggtgggggggtgggtgggtggggggggggggggggggtggggggggggggggggggnggggggggggggggggggggggggggggggggnggggggggggnggggggggggggggggggggggggggggnggnnggggggnggggggggggggggggggggggggggggggggtgggggggggggngggggggggnnngnngggggggggnggggtggggtggggggggggggggggggggggnggggggggggggggggggggggggggggggggggggnnnnagggggggggggngggggtgggggtggggggggggggaggggggngggnnggggggggggggggggggggggggggggnnggggggggggggtgg

SEQ ID NO: 107959 - DNA, 250 bp, Glycine max
  unsure (1)..(250): unsure at all n locations
  Clone ID: PAT_MRT3847_68502C.1
ttcggctcgagactagctaccttcatttactactctttcttataaaagtgaaaagcttgatgtgaataccatatcacaagtgcttgttaccgataataacatatgcaaagctgcggaccaatcatcattggagcatctcattcatctaataatcaaatggccaaagaatcatcagaggagcgattnctntacctcctgaactaggctataatcacatactgagctacctgcaatcaaatgatatctgcct

SEQ ID NO: 107960 - DNA, 259 bp, Glycine max
  Clone ID: PAT_MRT3847_68503C.1
ctgggaaccgtcaagctcccgaggatgccggctctcgatccgccgtcaaagactaccgaattcgaaagtctctcgaccacgacacgatccctcagaccggtgatgcccctgctaccgctatgagcgccgaaaaggccatgccccgcgccgagtctcttccaacaactctgccatcgagaaccccgcccaggccaaggctgccgagctcttgcaggaacctcaccagcccgagtcgttgcccagggaatcggcgctcgag

SEQ ID NO: 107961 - DNA, 177 bp, Glycine max
  Clone ID: PAT_MRT3847_68504C.1
ttcacctatcaaaaacatatctttctctcaccaaaaaaaaaaaaaactgggtgaattacaaaaatggctgcggagtcctctcaaccaaaaccctaatcataaaaccctaaactatactttatatgaaaacctcaatctaaacgattttccccttacacaacccaaattccttcctcc

SEQ ID NO: 107962 - DNA, 470 bp, Glycine max
  Clone ID: PAT_MRT3847_68505C.1
aacttctgcagcagcttccatgcttcagtctccttcattgagctcacaactaggaccagccaattcagatacggtccctctcatcaattctagcgttgcttataaccttaatgccctaaacttcacatcatcaagctatgatcagcagttttcaaaattatcacaacacttgtacttccacaactcatctatttcaacctctaattctcaccccacaatcactcttgacctcacctcagctcaaacttcacctcatgttggaaagttcaccccaggcttgtctttcataccaaaacattcatcaacaaatcttcatttttcctcagtactttctctcctttgcaatcaagcatgctacagtcaccttggagtccttatggtgattgcttcaactatgagggattgatcacccaaaatagtaaccaaaatggtttccttactaagactgggaaacaaccatttcaggggca

SEQ ID NO: 107963 - DNA, 275 bp, Glycine max
  unsure (1)..(275): unsure at all n locations
  Clone ID: PAT_MRT3847_68506C.1
ctctcttcgcctggtcttgggcatctccgcagcaccaccacccaccaccctgcttagaccaggtcctctctctctctagagagnnnnnnnnnnnnnnnnnnnnnnnnnnnnnnnnnttaagcttttaatagtaagncatggctcaaccccagttccaanggggatctgcataatanccagcagnagggtcaggttcagcancaacagccnncnngggtcngtgggcagcnggcggcgcagccanttcagttntcagcncgaatggatggcnttgc

SEQ ID NO: 107964 - DNA, 194 bp, Glycine max
  Clone ID: PAT_MRT3847_68507C.1
ggatcttgacacacatcaagactttactggctgttggagttctttctcataggcttctttgcggcttcttattggtgagagcaggtggtacagtcaaatagccaaaaacccctctctagaaattttgccgctgtgcttacatttgggtaacacctgtaattttcaacctgctccatcaggctcgggagcttccc

SEQ ID NO: 107965 - DNA, 895 bp, Glycine max
  Clone ID: PAT_MRT3847_68508C.1
cagcccacgcgtccgcccacgcgtctgctcaaatctatattctgacaaccaatcgtccgaacttattacatttcgaagctcttcatcatctacctttgctctgggggtgtctgtcggttacttcattgctgaccttgggatgatattttggtttttttttctcttggtggatatgagtatgtgattcatcatttgctttctttagtagcagtagcattttcaatgctgagtggggagggtcagctatacacatacatggtcctgatctctgagacaacaactcctgggatcaacttgagatggtatcttgatgcagctggaatgaagaagtcaaaagcttatctcatcaatggggttgtgatattcattgcttggctggttgccagaatacttttgttcgtttacatgttttaccatgtctacctgcactttgaccagattgagcagatgcacgcgtttggacaagtgttagttattgttgtgccactggcactatcagttatgaacttgatttggttttcaaaaattatcaaagggttgaggaagacgttggcgaagaggcagtgaaaattctgcttagtgatgttattttagaaaactgatatacaggtcaatgatgtgtagtgaaagatgtaacagaacagaaacaattgaaagtgtttggatcccctgtggattcgaacttgtacaaagatgttcattctgccttttttcttctattaatgtacatttattagtttaattttaatatattgttcgatgcaaaaattttgttccatgttgactggggagggtcagctatatacatacatggtcctgatctctgagacaactactcctgggatcaacttgagatggtatcttgatgcagctggaatgaagaagtcaaatgctt

SEQ ID NO: 107966 - DNA, 351 bp, Glycine max
  Clone ID: PAT_MRT3847_68509C.1
acgagatcgataagaatgcgaaggcgaagtgtaaatctttaatcggtaaaaaaaaatgcctgagactatgtaatggataactggggtactttagttgattgtccgtccgaacactagttcgctgagtcacttcagaagtttcaaattgcttgaccgccttggccgatgttcgttgactatgttaacgacacatggattatcccccacaaggaaaaaattattacagcatggacgaataaggtcatgcacctaggcaacacaacaacaaacaggtattaagaattgttttttttgttagtaaggattattaataaatggtatttaattggtgtatatttttcatgtttgttg

SEQ ID NO: 107967 - DNA, 259 bp, Glycine max
  Clone ID: PAT_MRT3847_6850C.1
tttttgtaaaacagccccctaattggtttcggggccggatattgcgggggaccaaatatacaaggcaaccgacatcatcatcacctcttactaaatcaaggggcgtccatcagtgcgatgatagatgcaaaagcaaactccatttattctatacggcctaccgggcgccatatagccaccacagcattaggcgccatgttggccagaatctaccagccatctacgttagctttttctatctgcccacccttagcaacta

SEQ ID NO: 107968 - DNA, 682 bp, Glycine max
  Clone ID: PAT_MRT3847_68510C.1
aacatgacccatctatgttccttaagcatcggggctatgggaaatgatggcatgcttaagttggaatctttaagaaatcctccatcttcccttcaacgcctttacctgtatgggcgtttagaaaagcttccaatttggataaaagaaattccaaatcttgtcagatcctactggaagtggcctagtctaaaggaagatccattaccttaccttaaagacttgtcaaaactgttgtaccttaagttctatgaggcttatggtggtgatgagttgcatttcaacaatggatggttgaaaggcctaaaggttttgcatctagagtccttgccaaagttgaagaccataaagattgctaaaggagcaattccttatcttgcagagttgaagatagggaaatgccagaaaatggtgacgtttcccagagatattcagaacttgacaagtcttcaaaagctttatctctatgatatgcaagaacaatttataaatgaatcacgaagtgaagactgcaagattatttttaacaaaatacctcttgtggaattctccaacgatgaccatttttccacttttaataatgctgatgcttgaaagatgaacttgatagtaatgggacaatttctctggaaaagtggtagctggcatggaaaaattctctaaaggtgattctttgggtgcttgc

SEQ ID NO: 107969 - DNA, 1163 bp, Glycine max
  Clone ID: PAT_MRT3847_68511C.1
tgggctcgagctctcccattcccaatcccaatcccaatcccaatccaaacatgttagggttttcagtgttcaaatttccccttcccatttcttcaattaacataactcatgcagcatgattccgccaccttcaactccaaatttctttacaaacgcactcaccaaccaaccgatcgcatttcttcccttcgccaaactctcgcctattcgcccttcctcggagacaagtgtaaaggcagaaaggttgtaaaatcttcaaaggatttctcaatcaaggggtggtgttgcaatgttagcttctaaagaaatgatgaaattcaaatcttaccagaaccgggctaatttgtttgtgaaggaatatttgttagcagaccctctgattccatatacttctattattggtggtatttttgcttgcaagatggtctatgatcttactcagctatttagcactgttcactttaagagctattccagcctcactagaatccaacgtgttgagtggaataatcgttctatgtcaacaattcatgctattttcataacaactatgtcgttgtacttggtgttttgctcaaatctatattctgacaaccaatcgtccgaacttattacatttcgaagctcttcatcatctacctttgctctgggggtgtctgtcggttacttcatcgctgaccttgggatgatattttggttttttcctgctcttggtggatatgagtatgtgattcatcatctgttttctttggtagcagtagcatatgcaatgttgactggggaaggacagctttacacattcatggtcctgatctctgagacaactactccagggatcaatttgagatggtatcttgatgtagctggaatgaaaaagtccaaagcttatctcatcaatggggttgtaatatttatttcttggctggttgccagaatacttctgttcatatacatgttttaccatgtctacttgcactttgatgaggtaataactattcgcaccctgaattgataagttgtccattgcgtagtgccttgtaggtagcagattttgacattcagttcttggcctttaatgactcaaaagatgtctgcacattattctcttggatgataaatggcctagatcatggatctacctatttcttcttatcagctaaaat

SEQ ID NO: 107970 - DNA, 368 bp, Glycine max
  Clone ID: PAT_MRT3847_68512C.1
acgagttttgctccactctcctcgtcgtttcgtttaaccttgcacaccgttccataggtttactggatggatcaacgacgtcgtaaatcgctttgttcgcttctgaatgatttttttacttgtttttgtgtttgatagatatgatatcacctcaaacaatgcgattcttgcggaggacaagcacacgcctattggatgctccaagttcctggtgcaacaagttacatgggtggcataggaaaggataagtttggggaagagatgaagaagaactcaaggcttgctggtgtaaatgttcactattatgaagatgaaactacacctactggaacttgtgctgtttgtatagttggtgatgataggtctct

SEQ ID NO: 107971 - DNA, 1398 bp, Glycine max
  Clone ID: PAT_MRT3847_68513C.1
catgcagaagagatcggcgcgtttcatttgatcagatcataacaatggtgtccgaaggcactctcctgggcatgggtaaccctctcctcgacatctccgccgtcgtcgatgaagacttcttaaaaaaatatgatatcacctcgaacaatgcgattcttgcggaggacaagcacaagcctatgtatcaagaattggctgagaaatataatgtggagtacattgctggaggtgccactcagaattcaatcaaggttgctcaatggatgctccaagttcctggtgcaacaagttacatgggtggcataggaaaggataagtttggggaagagatgaagaagaactcaaagcttgctggtgtaaatgttcactattatgaagatgaaactacacctactggaacttgtgctgtttgtatagttggtggtgaaaggtctcttgtggcgaacttagcagctgccaattgctacaagtctgatcatttgaagagaccagaaaattgggcactagttgaaaaggccaagtatatttatattgccggctttttcctcactgtatcaccagattccatccagttagttgctgagcattctgctgcaaataacaagatcttctcaatgaacctttctgctccttttatctgtgagtttttcagggatgtacaggagaaagctctaccgtatacggactttgttttcggaaatgagactgaagcaagaacattttctaaagttcatggctgggagactgataatgtcgaggagatagctgtaaagatttcccaatggccaaaggcatcaggaacacacaaaaggataacagttatcacacagggtgcggatcctatttgtgttgctgaggatgggaaggtgaaaaagttccctgtgaaacttttgcctaaagagaaactagttgatacaaatggagcaggagatgcatttgttggaggatttctttctcaattggttcaggagaagcccattgaagaatgtgtgagagctggctgttatgcagcaaatgttatcatccaaaggtctggctgtacgtacccagagaagcctgattttcattgagtgtttctctcggttctgttcccattatgaagttttgattgttaggaaaccttttgttgtatttcgatagttgcagtataacaactgcatttggattttttcaatcccgactggggaaagcggggaaaaagtttcagtgaaaggaaacaaataattaatctgttatattatagtactaccattagagatttagagcatcgtttcatatttttgctgagtttgttattgagtcttttttattcgatattaaaccttgttattgtgcttagactgatgtctaacttgtcacttggagtatcatttaacgacctattggttaagcaaggtt

SEQ ID NO: 107972 - DNA, 193 bp, Glycine max
  unsure (1)..(193): unsure at all n locations
  Clone ID: PAT_MRT3847_68514C.1
cacagggcatattatggcgcgggaaccattctccttgggtgctcttggggacgtgggggagcgagcacagatttgtgtgccgtctactgtgtggagctttgcagcggtggcgtggaccatttcgtcagcttactggggcgggcctgttttgtgttgcgggtttttttgcgtngttggtggtggtccatgccgt

SEQ ID NO: 107973 - DNA, 1670 bp, Glycine max
  Clone ID: PAT_MRT3847_68515C.1
tgaaaatggtgtccgaaggcattctcctgggcattggtaaccctctcctcgacatctccgccgtcgtcgaccaagacttctttaaaaagtaccatctgactcactcactctcttttccatgccgttttgctccactctcctcgtcgtttcgtttaaccttgcacaccgttccataggtttactggatggatcaacgacgtcgtaaatcgctttgttcgcttctgaatgatttttttacttgtttttgtgtttgatagatatgatatcacctcaaacaatgcgattcttgcggaggacaagcacacgcctatgtttgaagaattggttgagaaatataatgtggagtacattgctggaggtgccactcagaattcaatcaaggttgctcaatggatgctccaagttcctggtgcaacaagttacatgggtggcataggaaaggataagtttggggaagagatgaagaagaactcaaggcttgctggtgtaaatgttcactattatgaagatgaaactacacctactggaacttgtgctgtttgtatagttggtgatgataggtctcttgtggcgaacttagcagctgcaaattgctacaaatctgatcatttgaagagaccagaaaattgggcactagttgaaaaggccaagtatatttatattgctgggtttttcctcactgtatcaccagattccatccagctagttgctgagcatgctgctgcaaataacaagatcttctcaatgaacctttctgccccttttatctgcgagtttttcagggatgtacaggagaaagctctaccgtaaggattcatcttaaaacgaatgaaattttacatattggttcttaaggatgcacattatgtgatttaggtatacggactttgttttcggatatgagactgaagcaagaacattttctaaagttcatggctgggagaccgataatgttgaggagatagcttctaaagatttcccagtggccaaaggcatcaggaacacacaaaaggataactgtcatcacacagggtgtggatcctgtttgtgttgctgaggatgggaaggtgaaaaagttccctgtgcaacttttgcctaaagagaaactagttgatgcaaatggaacaggagatgcatttgtcggaggatttctttctcaattggttcaggagaagcccattgaagagtgcgtgagagctggctgttatgcagcaaacgttatcatccaaaggtctggctgtacgtacccagagaagcctgattttcattgagtgtttctctcggttctgtttccattatgaagttttgattgttaggaaatcttttgttgtattttgatagttgcagcataacagctgcatttggatttttcaatcccgactggggaaaacgaggaaagagtttcagtgaaaggaaacaaataattgatctgttatattctagtactattattagaggcttagagcatcgtttcatatttttgctgagtttgttattgagtcttttttattcgatattaaaccatgttattatgcttagactgatgtttaacttgccacttcgagtatagttaacggacctattgattaagcaagcttaaaagcattatgattttttccgaagatattactagtttatgagaaaaataataaaaactgtttcttatggcg

SEQ ID NO: 107974 - DNA, 557 bp, Glycine max
  Clone ID: PAT_MRT3847_68516C.1
ggtgtgtaatgggttatagctgcgattgcatgggaggctgggaagccgctggtgattgaagaagtggaggttgcgccaccgcaagccggtgaagtccgtttgaagatcctctacacctctctttgccacactgatgtttacttctgggatgcgaaggttataacactatctttattagattagattagtgcatacatgtgttacattatcttagttaaattaaaatcaatatgtaattgatgtgatatgattttgttgaaatagtgattagcagatatatatatgtaatgtctatgtcaaaggttggtttttgttgttttctctttaggatgtgactcctctaaagtgaaaaggagttaactaagtaatctcagaacttgataagaaaattaattgttcatctttcaatacattcaagatttatcatatatgtacatgtaatattgatcattaattttcttaaccattgagattgcttattttacacttctaagtagagcgatcactttagaggagacggatttttctcttgaaatgtaaatttgttggaatgattg

SEQ ID NO: 107975 - DNA, 183 bp, Glycine max
  Clone ID: PAT_MRT3847_68517C.1
agcgtgaacttcgacctgaaaagacggatttgagcagaccatgtccgaatctgctgacccacatccacgtttgtacttcgtacaccagatcgtggatcactcactcactgatgtacaactttccgaactctttgccgactatggtacaactgactcgtgcaatgtcatgcgacgaccgactgg

SEQ ID NO: 107976 - DNA, 211 bp, Glycine max
  Clone ID: PAT_MRT3847_68518C.1
tttggggcgtgcgcgttcggcctcggaggggaaccagaaaattatgttagcagaatagtctggaaccctaatgtgtcagtgtcgtcatcagtgtgtaggttaagctagctttgctgtgggtacgttctttgggatgagagtcttgatgaacagtgccattctgatgcattgctttccttgagagttaatgcgtgcttgttatgcttcgggg

SEQ ID NO: 107977 - DNA, 469 bp, Glycine max
  Clone ID: PAT_MRT3847_68519C.1
cggcaatgacggtgacggtggtgtgagattgatgaggtgtgcggtgattgagtgttcaaggccggtgttttccgtgagcgttgcgtttgggtttctgattctcggtgaggagaatggggttagggtttttggattgaggaggctcgtgaagggaaggagcgggaagagggttgggaattcgaaaccgctgaagaatggtggtcgaggaggcggtttggaggcggtgaactgcaatggtgatttggaagggaagatggaaagacatggtggtgttactactgctgtgaagcagacaaatgttaaattaaaacatgacgacagagatggaggttcttgtttttttgtgttgaagggaaacgaggttaaaacaaaatccatgacaaaggagtagatatcactggtaatgtcaggccactacctcgtattatgaaagtgtgaagtcttgctgttcttcctgatctatctacta

SEQ ID NO: 107978 - DNA, 332 bp, Glycine max
  Clone ID: PAT_MRT3847_6851C.1
ggaacaagggctcaaaatttattaaaggcgcattggagaccacatgttggttcgtggagtgtcttaggtgacttacccacatggcatcatgtgacctttactgacatcgctcatgctcctatttgacttgtgcatttcaacataccttattacatatagataggaactgcctctaactatattgtttacagaggtgaatgttctactcaatgtatgacaatgggattaggattctcagaggttctgctttcacctctgcggtatcacgctgatcgttctattgttgttcaagacctcaactttcttaggttcttgcttaaacagatactctt

SEQ ID NO: 107979 - DNA, 310 bp, Glycine max
  unsure (1)..(310): unsure at all n locations
  Clone ID: PAT_MRT3847_68520C.1
cccacgcgtccgcctattctttttaataaaaaaatataattaaaaaaaaaaaaaaaaaaaaaaaaaaaaaaaaaaaaaaaaaaaaaaaaaaaaaaaaaaaaataaaaaaataaggggnggccggttttgagaggattttaactttacttaaccttgcatgcaaactcaagcctcttttttagggtcacataaataaaataaagtgaaagtcgttttaaaacttttttaatgggaaaaccttgaaattccccttcttaaaccttttgaaaaacatcccattttctccacttttcttaatttcaaaaaggcc

SEQ ID NO: 107980 - DNA, 176 bp, Glycine max
  Clone ID: PAT_MRT3847_68521C.1
ctttagggcttgctgctatagatggggttaggaggtgctgagcatggaaaagtaatggtggagtctcaggatgtgtgtaaatcaaaggggaggaagcagaggaagaaagaggatggggacgttgaagtggaacaagagactgggtgtaggtttaggttaaagttcattgggagctg

SEQ ID NO: 107981 - DNA, 306 bp, Glycine max
  Clone ID: PAT_MRT3847_68522C.1
ctaaactaatcaaatttagagttaaggaaaataaagattctatactcacaacaaaaaaagttttttttcaacagacgttatttccacacccccacaactataaaaacattaccatccttcacacactctacaatgattaccattatccattatatacgcaacatcatgcaaacaaaatttgtcagaccctcaatcttccaacttacactactaaaatataatgtttaaaccattgaattccacatgtacttaaactattacgacttcgatataattcaccccagtcctcacaagacctaatatgct

SEQ ID NO: 107982 - DNA, 145 bp, Glycine max
  Clone ID: PAT_MRT3847_68523C.1
accgcgacatacgcttttgttactgcgaaacatggactgagtactacccgtctacccggccaccaaaatatgtatggcatgatgggtgatccggcacagccgtatggcgtggctacacatttcgtactaaaactcagcgagcgga

SEQ ID NO: 107983 - DNA, 346 bp, Glycine max
  Clone ID: PAT_MRT3847_68524C.1
gtcttatgaatttcttcgacgtaaatcgattcttcaacaattattatcatagaaggcgagtcatgttctgatcctgcgcattctcttatggctaatcacgacaataagctgcactgataacagacgatatagtagcctgatcaaacgccggatataggctagattgctcagagcctttatgacgttcaatcttggtgacatgtctcattatgacgtcgactcccagactaccatcatccttgatcgaatctacaacaacgtcttaagcacacgctagtatgagtactattaactacaactagatgatgtgaaatcgcatggtgaagtactcttggtggaatcatgt

SEQ ID NO: 107984 - DNA, 110 bp, Glycine max
  Clone ID: PAT_MRT3847_68525C.1
agatcaataagagcaatttgatcttagaaactcaaccggacatcaagggagtcatgggacacatgtactgtgattaatcggccacatatgtgagatgcaaaacatggggc

SEQ ID NO: 107985 - DNA, 365 bp, Glycine max
  Clone ID: PAT_MRT3847_68526C.1
accaatcaccattaacatactcacattcttaacttcccatacccaacacaaggccgcatttattaactcctggacctcattcaccacttaatcctactaatcctaaccttcacaatcataatcacaccaaaacaccttcctatcttaaaccctcacttatactcgcatccaaacactgtccaaactttaaatctcccatttcctacacactctaacatctcctatgacacatacaacttccttcaggtcgactacaaaataaactaccccttcatcaacgccttctgcaaactccaaccataaattatccactacttcacaacccacaccaaccctcctgtaacactcctattctatttctttct

SEQ ID NO: 107986 - DNA, 368 bp, Glycine max
  Clone ID: PAT_MRT3847_68527C.1
atgattgtcaacgtccttgtattcatcgttgctacacatttggtagcacggcaatgccatgcgtaggacatgtatccaccccgaatgaacactggtcatggtgcccgtactccggaggtgaaatgcgcaagttggaggcttgctgtggaagccacaccatctttggctttgagacgattcctgaagagtgcgttgaagcagaaaaggaatacgtccgtggcgaacaatatatatcagacgccaaaacagttaaccaacaagcgtacctttatggcagagacctcgaagtccatctcaaggacacatttgtgttcagtagagatggcaccgtactctctaacattccatactacaaagtacatggatat

SEQ ID NO: 107987 - DNA, 271 bp, Glycine max
  unsure (1)..(271): unsure at all n locations
  Clone ID: PAT_MRT3847_68528C.1
tttcgccactttcttctccacttccatctccattcgcctcccctaacttccttcttatcattacacnnnnnnnnnnnnnnnnnnnntcatcgttactttttcgatantaagattccctctcgttaatttcattagcatatcacacaaatcccactctactctttggcangtanggcaccnctgatcattcaggcgatggcgcgcgtctctggtnctgttcggagcagcagtagcangggagaccaacggcggcgtgntcgnngctccggct

SEQ ID NO: 107988 - DNA, 410 bp, Glycine max
  Clone ID: PAT_MRT3847_68529C.1
cttctttgggatcagcttgaagaaggttattggctcaagggtccccaacaccaagatcccctatgagtacattatcactggacttcgccagtaagtaatcactaatcacatatttacatatttatgatcagtttgtataaacttaaaataagtcattttaaaaaataaagactgcttctgccactatacccaactataagtgatgaaagaaccaatgttgaatgtctaaaataatcgatgttaaaagtattttttctaatagtgatgaaagaagaagcaggaacaaaaataaaattgaaagaaagataaagacaaaaatgaagagtttattaaacataacactatataataaccaacatgatgacttgatctctacaaaattgtgcattagtatattgtgtgatggaagc

SEQ ID NO: 107989 - DNA, 206 bp, Glycine max
  Clone ID: PAT_MRT3847_6852C.1
ggctcgagcccgactgggtatcgtttttttctgacggggcttgctatcagcatgccctggaattcagaccttggccctttgcttcgtttgcaaagggttctccccccctgtagaacggaattggccttcaaggggtgtagtatgggtaatccttctcacaagggtaaaccaccgctcttgcctttggggggccaaggccccctact

SEQ ID NO: 107990 - DNA, 239 bp, Glycine max
  Clone ID: PAT_MRT3847_68530C.1
cccactcgtacgcatgcgcaagggcagacgcgtgggggccattttttgccgccaaggccgttatgcggaaccaaattgacagtttacatgaagagtgcagcaaaggaagactgcagtatgcatggactcataccatatgtagaggaaaacggacaagctcataatgctgaagataactttgactgataacctgaaggagatggagggcagcaaggaggtgccgacatagttgaatctga

SEQ ID NO: 107991 - DNA, 318 bp, Glycine max
  Clone ID: PAT_MRT3847_68531C.1
cccactcgacccacacgttcgaacacgacgacaacacctcaccatttcacttttcagatagaaatgaatatcaagggtcaacgttaaacttagcccgttcacgatactcatcactttaccacaccatctgactcttacaaaaccttaaatttctcatcacgtctaaaaccatctctatttgtaaaacccaagttcacatacacataaatccaatgtcataattatactatctaacatctactatcaactaacctctcgctgttgcaaatcctaatgactacgataatgcttcaattgaccatgttcatcttctcgtac

SEQ ID NO: 107992 - DNA, 197 bp, Glycine max
  unsure (1)..(197): unsure at all n locations
  Clone ID: PAT_MRT3847_68532C.1
gcatgcacgcgtacgtaagctcggaattcggctcgaggncaagactcacttatcacaaagtggtgggtaagcatggaaaacaggaatggaaaacccaagaagaaacattcacggaagaggcttaaaggcagctaaaactaaaacccttaaataacttcagagaaaaatggaacattttccanaagaatgcttatcct

SEQ ID NO: 107993 - DNA, 333 bp, Glycine max
  unsure (1)..(333): unsure at all n locations
  Clone ID: PAT_MRT3847_68533C.1
gcgcccactcgtccntaccgctgcgaaaggacgacagaggggggaancccaatcaattatctacccaaaatattatttttccttctttttaaatctgagactgagaggggaaaactggggnaaatgtggaataagagtgtaacggggaattgagatttgactcaacagcgataagccctaatcaactaacggcaatttccgtggcgagaggggaaaccgggacacaggagcagatgctggggatgtgtcttcaggcacagcagctctccttggggctttanctcctggggggaatggggcctacatggggtactttaaaaggcacttttttat

SEQ ID NO: 107994 - DNA, 544 bp, Glycine max
  Clone ID: PAT_MRT3847_68534C.1
tgttaagggacccaatataagacgggcaatgagacaatatttcctatatatgcagctttctttttaaaattgtcaatgagacacctgcactaagtgacgagttaaatataaaattaaggttaaatatgttttttcttcttcctgaaaacaggttaatatttatttttatatcttaaaagttaaattatttattttttatcttttatttatgaaaatgtgttacatctgattcttatttctatacgtgcatgaggaattaaaaatagatttttttatgaggcaaagatcagatatgatatattttcataaataaaagttaaaaaagaaataatttatttttgttttacctttttgcctagactaaaacacatatttaaccttttaaggattaaatgtttttacttgaaaaaattactaaatcttaagggtgatgggtgtacttgagaaaatgtaaaacatatttattgatggaaaacctaataattataatgaatacatataattgattattcttttttactttctacaaaatcactaaaaattt

SEQ ID NO: 107995 - DNA, 425 bp, Glycine max
  Clone ID: PAT_MRT3847_68535C.1
cggtgacggcttgggtgcagtatgattagcgtgacagggcgcctaccaccccatgcctattgaaatggcagcacccgtgggcatccttccctgaagacaccttaccttactatccctaaaattaactggaagaagtgtatgaaactgtctccatgatacatgcctatgtcatggcaaacaaattggttattgactgtaatgagcctcaaccaaaatgagtgaattcatcctatcttgaattgaaccttgactaagtggaaccatccatctaacgacccaagagacctcatgatcagacgcctttgaaggaatgaatgctgataggcatgcttgtctagacaacattgctggatttaagggattcgctatgccatatgacgtacagcgcgaagctgcaaaattcgattttcatgggcagtcagaag

SEQ ID NO: 107996 - DNA, 1813 bp, Glycine max
  unsure (1)..(1813): unsure at all n locations
  Clone ID: PAT_MRT3847_68536C.1
ttggtcgaggcccccggtttaatcagagcgtccgcaagcatcaagtctaataagcttccgttcgtgcgtggattgaacaacatcaagtggtcgagtctggatcctcaacggaaacgggcttttgcggctacggtggagcatgcaggaacgacgtcgtccagccaggggatggtgagaggaagcggaggggagatagttcaagttgaaggcggtcacattgtgcgctccacagggcggaaggaccgtcacagcaaagtgtgcaccgccaaaggctctcgtgaccgacgggtgaggttatcggcccacaccgccatccaattctacgacgtccaggaccgcttgggctacgaccgccccagcaaggccgtcgactggctcatcaacaaggccaagtcctccatcgaccaactcgcccacctccctccctggaaacccactctcccctcacccgcaccacctcatctaaacgacgaccattcagacaaacctaaccctaaccccaaccccaaccccaaccccaaccccaaccccaaccatagccctgatgcccaaattctcaaccagttcgaccacgacgatggagctggagctggttccagttatcttcctatggataacgacgcgataaggtcgttcttccccacgacgacttcctcgttggttcaattccagagctacccaccggatttgctctccagaaccagtagccaggacctgcgtctctcgcttcagtccttgcaagaccctattttacttcaccacaaccacaacaacaacgagcacgtgcttttcgctggaaccgcctttgataacatggtagcgtggaataataatagtaataataatcataataataataatcataataataataataataataataataatactgcttctaatgatacttgtggtggtggtggtggtggtggaggaggaggaggagggtttgtgtttaacgctccttcgactttgccggggccggcgacggtggcgtcgccgacggtggtgtttggtcatggttatggtcaaggccagtatttttctcagacggctcgagcggctcgaggtaacagcccttccgttcgtgcgtggattgacgcgccatcgttcgtcgctgctgccgccgatcatcggcatcatcactatctgtctcccgcggcagcggcagcggcgttggtgtatcagtctgctccttccacggcggcatttacggcggcgcccggtggcttctcgggattccgcgtgccggcacgaattcagggtgaggaggagcacgacggcggcatgtccgataagccgtcctctgcttcctccgattctcaccgttgattctcgccgttgaaccgtcgagatcgtcagccgatttctgtctccttggaatcaattgggtatgtgtgtgatctgttttttgcagggatggaggagacgaagttggacttggaatggttcggttcggttcagtggactattatgcttgtggaatgaagaaaatctggggttgaatatccaggtttttgaattctccagtctgttatgttaatttattttatgtttttcatgtttcattagggagactttcaagtttgagtactgttgtgttggattgtctgtttgatgatgtttgttacaatttgtactagtggatgtatttgtacttgggtatctagtttcttagttttggtttgaagacatgcacgtagatactactatatcacttattattcacggcctagttggtcgatttatctttgtatttccaaaaaaaaaaaaaaaaagggggnccnnnnnnannnnnnnnnnnnnnnccggg

SEQ ID NO: 107997 - DNA, 726 bp, Glycine max
  Clone ID: PAT_MRT3847_68537C.1
atccctataagtgtgaaaatgcttataggttacggaaaaaaagaagacgattacggttagatttatgtaattcatacgctgttaaggtgcactctccgcatctaatttttttttccttttccttctctttctctctcatcccttctccaactgccgctccgttctccgaccgtcgctcaccgctgccggaggcactttccggtgccgatgaccctcttttttttctattcctctctaaaaaaattagaaaaacagaaatgcttccaccgctaccgaagcggagctccgccgtcgctcccattgacaagagaatcgcagtgagtgataccactatatgaagaggacaaaaggcccaggaaaagcgtattcatcgtcgtcgtcatcatcatcatcatcctaatcgacagaactgaaaagaatcaaactcgagaagtgaagattcagggttcgatcctcactgtgttgttgtctcgtttgttttggcgctccatcatgagcaataacatggaaatcaacaacaggaaagagattgaaattgtctgacgcggttgccgacgtagtcggaggcaccaagagaactttgacgatgaaggtgaaattcagagggttagggtttgagttcgaattgggttgggagagtgatattgatactgagttggaacccagggtggtggaagggcttgcgtgacgaggacaaaacggaaaatgccgccatcggtgatagga

SEQ ID NO: 107998 - DNA, 666 bp, Glycine max
  unsure (1)..(666): unsure at all n locations
  Clone ID: PAT_MRT3847_68538C.1
gggggcggaattcccgggncgacccacgcgtccgatttgaaggagatgccccttcagaaaactctgcagaattgctttctgaagaacctgctgatgaagccccagaaaaataatagcattctgaagttcagaacaaggatacttgaattgaaataattattgaggcattggctcagcttacactttctcaaaaaattgaagaatccagcccatcaccatctttgtagaaaataaaagattaacaaggcattgaagatgcttctaaagttcttcagaaggaaattgtagtgtctgttctccaccctcaaaggaacaacaactgaatgtagatgctgctgatgagttgacaattgaggcttgtgatcataatgcaattattctttattcaaggatcagccttagttggaaaagagaaatttcactttctgttcctaaaatttttatttaggaattaaaagtgagataaaagacataattaactgtttttttaaattctgtaaataactaaatctaatccttgaactgctcatgggctcgtatgggatgctgttgtgtttcttacgctaatttggcagttatgatgtcatatactcatatatgccccttttgcacaatagaatatatttataccacacttaatacttgatatacttctggtgccgaatt

SEQ ID NO: 107999 - DNA, 671 bp, Glycine max
  Clone ID: PAT_MRT3847_68539C.1
ccacgcgtccgaccactcgagcgatttttttagaggtaaatttattaggtattagtagcgcacaaagttctacaccagcgactattctaaagtgattcttaagatgacttctatgataatcactatagaaatcattcaagatatcttacgagataatttatgagtaaatattattgacatagttcttgactttgttgatgcttatattattaattttattcaaagatgttctcttgctggctcacatgctgactatttttagtgtccttgttgcagagctgggatcagatccctgcaagggacccagagactgggacgaagacctggaagagtaacggtaatagatttgggaagatggttagtgagaagacaactgatgagacattttatcctgcactagcacctgtgcaagcagctgctggcgttgctgcatgtggccttccacctgactgcccacaagactgacaacacactctaacatacagcatgaccaacagctgtaacaaccgcccttcctaacgtgctcacttatctgaatttctgcccatattcctgcgctctaactacatcactatatataacactatctaggacaaggtcatggttacgggaccgtggacaagcccgtgccccaacatgagcccccccggatgctatgatggcggaaatga

SEQ ID NO: 108000 - DNA, 216 bp, Glycine max
  Clone ID: PAT_MRT3847_6853C.1
gcatagcttcacagtagaacgatactatagctagctacactctttcaaatcacgctcccgatatcgctgctcgtcgtcattcaactcgtgtagcgcgaacctttcgatatcatgctccagtgtatgcaatctctgtgcagtagactcaaaatcgtgatgtctatagatgatgctgccggcatctcgagcatctatcgggaggaaacctattgacca

SEQ ID NO: 108001 - DNA, 469 bp, Glycine max
  unsure (1)..(469): unsure at all n locations
  Clone ID: PAT_MRT3847_68540C.1
ccctaaagattcttgccacccaancngcagggacagcgagaaaacaatgccaaacaacaaccctgcacaaacgcacacaagcaaaaaggaaaccgacaccggccaaaaaaatccagagcgggccccaaanaaaaggcgagcacaccgacaaccaaagcacaacactgaaagaaaaaaagccagaaagcaagaagccaacaacgaatatgatgcatgtacaattccaaatgattgtggctcattggttgctgccaaggttggaaatcacaaacaaatagttggtttccatgttgctggaagcaaaggaagactgggatatgcttcattgataccataatgtgagccagtagtgccagctcaaagcgctgaagattactttgacaccttccctgtggaaggtgatagtaaagacggagttgctcacattggtgaattgaaacctgtgtctatgttccactgcccacaaaaa

SEQ ID NO: 108002 - DNA, 262 bp, Glycine max
  Clone ID: PAT_MRT3847_68541C.1
tgcaaacatgattctggtgagtttctctgtctgatatttggggatggggatttctatggtttgtgtaaaatacaccagagcgtaatggaataagagatatagttatcaaattaagacttagtacttgagcagtggccatttggctgcctccccccggtccctgatgctttgactttgtgttttcttcacctctttggtgtatacaacttttcaaactttggaaatatgtgcaggttaagagaatgagagaaacactatactc

SEQ ID NO: 108003 - DNA, 491 bp, Glycine max
  Clone ID: PAT_MRT3847_68542C.1
gagatgaaatgaaacctacatgtcgcatacagagtaagttacaagttcattacgtggtgaaaagccagggtcaaatgatcacccatttattattgaaaatataacaacaaagaatatatatcatgctttcattaggcacaaattaaagcacaatattaattaaagcctattttgtgactgatgcctaaggatacaatgaattggggaatgtctatatatagttttcaataaacacaagtctagtcccattggtcattgttgggaaatgcaaagttggagagattaatagttgactttccatcaggtccaactggatcatatggtgaatcttccccaaagtcacttggcattgacctccaatataaactaggctcccactctgcttctttgagcaccttcaatatctcttttgttactatcttgcttccctcagttgaaagatgaattccatcaatgaagcaaacatctctccagttatcctttttctgaat

SEQ ID NO: 108004 - DNA, 256 bp, Glycine max
  Clone ID: PAT_MRT3847_68543C.1
accacacctacaaaataactgattcaaatgtatttaaaacaacaaataaattgggacactggctatttttaaaaggcacctgctcataaacataccttaatacaactccatcttttattaatctaccataaaacacatttctctctaatacagctaaaacacttcaactttccacatctcatacacctacatccttactgttctcattctagcatacgaccatgtgtttatcatatcaactctcttttatatctat

SEQ ID NO: 108005 - DNA, 543 bp, Glycine max
  Clone ID: PAT_MRT3847_68544C.1
tttcttttttttttattattatttttggggtacgaaactatcttattgaaacgggcataaatccttaatactaaccatcaccctggtacaccgctaacgcagtgcacataataatagtgctcttaagacatttaggctaactcttaaaatacctatagcgcgacgctgaagaaaaacaaccgggccctaagggacctttgtaatactccgactccacaactcacaccgaaggtaggaccgtgggatggacctatccacactaactgctcgtttgaattgacaaaaatttagagctggagaaattctataccaacttattataaaaaaacccctacgtgggcgctcgctacatattacaatcctcacttgttgaccgctaactggagtttaactgctcctcacaaggaatgacccaccctcactctggagaggggggaacttcttttctacatttaccctgaccactgtaaatgcataagaagaagttccgcccttgcgctgggatgatgcggacctcccctggactgaacactttaacacccc

SEQ ID NO: 108006 - DNA, 298 bp, Glycine max
  Clone ID: PAT_MRT3847_68545C.1
acccgatctgatacgcattcatttccttagtctccaaattactagaaatgggggctgctcaccggcacgagctcgtacagattacgattatctcataaaacttctcttgattggccatagtggcctccgacagagttgcctacttctacgactctctgactgttctctcacaactagtttcatcacacctatacgcattgatctttacgatcagacccattgaccaggatggaaaacggatcaagctccacatttgggatactgcagcgcacgagcgcgtccgaaccaatacaaccgc

SEQ ID NO: 108007 - DNA, 1246 bp, Glycine max
  Clone ID: PAT_MRT3847_68546C.1
gtctgttacacacatgggattcgagaattttggttggattagtgaaaaaatttggttaaacaattcccaatatacttttactttctttctttcttcatttcatttcccctgctgagaagtgagaagaagcagtgacaccaacacacaaaatagtgaagtgataatacccaacacacttaaaatcaaaatcacatgcaacctcgaactccaaggttgtctctgcgctagggttttgggttcgcgaccaaatcgaagtgagcttgagggccctgcaaatggtcgtgttgctgttcgagacttcgattccgagatcgaatattcgtggtgcgataatgctaaaccatacctactcttagaccaactccaacacgaacaacgtgcgaatcctcggttcgaataaaaaatgcaattcgctaagctcgatgactctcctatgttccgcaagcagatacaatgcatggaggaaagtgctgaatctttaagagagagaagtttgaaattttacaaaggatgtagaaaatacactgaaggacttggggaggcctatgatggagatattgcatttgcaagtgccttggaaacttttggtggtgggcataatgacccaatcagtgtggcttttggaggtcctgttatgaccaaattcaccatagccttacgagaaattgggacatacaaggaagttcttcgatcacaggttgagcatatgttaaatgacagattgcttcagtttgtcaatattgatttacaagaggtcaaggaagcacggaaacgctttgacaaggctagccttatttatgaccagactcgtgaaaggtttctgtcactaagaaaaggcacaaaaactggtgtagctactgccctagaagaggagcttcatagtgcaagatctacatttgagcaagctcggtttaatctggttactgccttgtcaaatgttgaagcaaagaagagatttgaatttttggaagcagtcagtgggaccatggatgcacatcttcgttacttcaaacaggggtatgaattgttgcaccaaatggagccatatattaaccaggtcttgacttatgctcagcaatcaagagaaaggtccaattatgagcaggcagccctaaatgaaagaatgcaagagtacaaacgacagattgatcgggagagtaggtgggcttcaaatggctctaatgggtctcctaatggagatggtatacaagccattggtagaagttcacataagatgatagaggca

SEQ ID NO: 108008 - DNA, 913 bp, Glycine max
  unsure (1)..(913): unsure at all n locations
  Clone ID: PAT_MRT3847_68547C.1
cccacgcgtccgcccacgcgtccgcccattctccccacgctataaaatccccccactccttcttgcttcacacacccgatctgtctcttgttccttctccttgtgatcttcttcaaccttcagagtgagaaaacacattcagaaaccacgtttctctcttcttcttcttcttcttctttttcttcttcttcttcttcttctttttcttctctcgaggtcattattaagtattcaccatggaggcaccatctcccaccaaacccaacgacccaacaaaaccttccaacacttccaccacccttagtctggaggccggcccggcccaagcgagcccactccgaaaaatgtttgccgtggcgtccatcgccgccggcatacagttcgggtgggctctccagctctctcttctaaccccctacgttcagcttttaggagtcccccacgcggcggcctccttcatctggctctgcgggcccatctccgggctcgtggtacagcccattgtgggctactacagcgaccactgtacctcccgctttggtcgcaggcgcccctttattctcgggggcgccttagccgtcgccgtcgccgtgttcctcattggttacgcagccgatataggatacgcggcgggcgacgacatatcgaaaacgacccgaccccgagcggtcggggtcttcgtcataggattttggatcctagacgtggccaacaacatgcttcaaggaccctgtcgcgcctttctagcagacctagctgccggcgaccaacgaaaaacaagaattgctaacggttttttctcgtttttcatgggcccgtgggcaacgtgctaggttacgcagcagggtcctacnaaggtctcacnaagatgtttcccttcacggagaccaagggctgccgacgtgttctgcgc

SEQ ID NO: 108009 - DNA, 343 bp, Glycine max
  Clone ID: PAT_MRT3847_68548C.1
tacgagacatccatggggcaatcaggagtttgccagtgatataaaatttgtgtatgatttccagtagtatctagttgcttcatatttaatactcgattaaatgtattagtcacgtttggtattttgcccgtaggctgtcatgtgaatattgttgttgtagctaattatgcagcttatgttagacccatagaatggtgctttcacggtttgtttgtaggtcaatgaaagaaaaaaggcaatgtttagtggcattattatcatgacgatggttgaagttgcttttatgtacattagattaaaaaaaacaggtcagtgattcaatattatagcgagaatttctatt

SEQ ID NO: 108010 - DNA, 369 bp, Glycine max
  Clone ID: PAT_MRT3847_68549C.1
gtggaacccagtctgatggaggactaagaacatacagtggcttggagaccatcataacttacaagatctgacttacacatcggggtgagatctccggacccgagaatcaacacgatatgttaattttagagatgatgttgtgccctgaacttaatggctcgactgtaatgctgttcagactatggcgtatgcaaaaacattcttaacatacaagctgaggagaccaagtatcaaatcttgtgctcgctcttacatgcagatgaggcacatcagacgatcttaagtctttgatagacagagcccatgaactgtgtctggtcggtctagagagatattgtacacagtcgtgcatgaaatcatacagtggat

SEQ ID NO: 108011 - DNA, 513 bp, Glycine max
  Clone ID: PAT_MRT3847_6854C.1
gcaagagctgtttgcagctatccgcatggacaaagagcgagggatatgcgggtaccttcaaacacaccatagggaaatggtatggggatcctgaagactcaggtcctcaaacgtatactgacgccaaacattcccacatatgtggacaaataccagagcttagtaacaaggactcaaacctggtggtgcagtatgatgtaccgtcagaacactacatcgattgcgatgaaggttacatcaagattgcttgtggttatgacaatcggactactgttgatgcagatgctgcttacaggatgaagattggaccagacttatgtagttgactgacaaagaagctgcttcatatactatcatgccaagaccaggtttcccctgatgaagaagatcgagaatgtgaaacatagaatgtgacatcattgctatacctacctgtagagcctgaagccagctatagtatgcacggagataatcgctagagagatgcagtaggcatgtacacagataggaaca

SEQ ID NO: 108012 - DNA, 707 bp, Glycine max
  Clone ID: PAT_MRT3847_68550C.1
caagacttggatagttatattaaaatctccaaccttagcttaaatggaatacatttttttttatggccctgaattggaatacttaaaaggggaatatgaaagcaaattagccctgaactgagtgaattactatatgatgactcggaagcacatttgttcattcaaatccagaacaatgatgcagctcaaagggaccactaattaattatatatatgatgaatttcatcaatcgtcatgccacttatcccaccaatttcatgggattagtaatgggcatgacattgaccttaaatcatttgtatggaatgctacaacaatgtctaattaaacaaagccgaggcctttacttaaattttgctgactttctctttttgatatactgtgccttccacatcacttttttcatcatggcgatggactaattaagccttattattattgttaatgctatcattccttggagctgtgaccggtagctgtcgttggtcttctggaaagttattttctgcagaggacggtgtcatcagacctctacgttctttagcttttccccacgcaactagataaagcccaagaaccacaactattgctccaataatacttccaaggaagagttgttcagataagatgatgcaggccaaggccgtaacaatgatcatacgcatggtctcaaaaattatgggcccagttattgtgacctcgagcc

SEQ ID NO: 108013 - DNA, 394 bp, Glycine max
  Clone ID: PAT_MRT3847_68551C.1
cacaaccaagccacccatgataataacaatttcctgcttcggctctaccctcggcactcgggactcacagttctcaactcaaccacccattattaaccctcaccgcaatctatgattcgatctttttcaattgacgggtttcccatataccacaaggcatacgcctgtgtgaatgtgtgatatgctgagtgattgtcggcaagacccaatctctagtgtactactttaccaacctatagcgcacgattagatgtttttctattggaatcggacaaaggttccactgggactgaaactgtcagaggccaaagaatgctcgattcggaccttctggcgctatccttgccgagccttggcatgagcggggtattgatcgcgtacattggccttcttt

SEQ ID NO: 108014 - DNA, 849 bp, Glycine max
  unsure (1)..(849): unsure at all n locations
  Clone ID: PAT_MRT3847_68552C.1
cccacgcgtacggactggttcactgtacttggattttttcccattacagtcacgcacagcaacaacgtcccttctcttctcttcttccctcatctctactgtacaccctacgcttcatttcttctattctctcttctacttctgggtcgacaaaagttcaagccatttatcttcacttcgtttcatttcatagtcctacacctcttcacaattccaacaactcttacaccaaacacacatccttctttttaagttcttcatatctcaacctctggttctggttctccaccatgaaccaataactacaacctcgtacttgtcgtttttttttgtgtttgtgtctgtcttgttacatggcgtaccataaccacaacctttcacagcaagaccttccactccaccatttcccgaaccaatccatattaccagaccaacaacaacaacttccttcctcacccgaaccaaactccaaacctccctccgatctccaaaccgcgcccaattggctcaacgacgcgcttctccgcactcactacaccgagaccaccaccaacgacgccacaaccaacaccgccaccgtcgccgccgctgccgccaacagtaatgttaacggttccaatttcctgaacctcaaccccggtgcctccgacgcgcagtggccggcgctccaccgccaccctggcgaggtcatcgacgccggcgcaggggactccatggtggagcacgccgatttgaagggcggcggcggagacggtggtggcgacgccgtgaattggcagattggacggtggaaggcggagattctgcagcacccgctgtacgagcagctgctgtncgcgcacgtgtcgt

SEQ ID NO: 108015 - DNA, 2053 bp, Glycine max
  Clone ID: PAT_MRT3847_68553C.1
gggaatgctctcaagtgcagtgcctgtcaaggttattgtcacacgggttgttccgtgagttcaacagtctctacatgtgaagaagttgagttcttggccacatgcaaacaatgtcatcatgccaaattacttactcaaaaagagtcctgttatgaatctccaactagtcccttactcttacaaggacaagaacgtagcactttggcagttctgaaggggccaaggcctaattgtgatggtcaaggattgatttctactaagacaaagaatagtcgacttgacatgaaactagttgcttctgatttccctttggaaacaaaaggccgtagcataagttgctcttggggtgttatatggaaaaagaagaataatgaagatacaggctttgatttcaggctcaagaacattcttttaaaggaaggttcaggcctgcctcaactggatcctgtttgtcgtttgtgccataaaccatatagatctgatctcatgtatatttgccttgaaacatgctcaaattggtatcatgctgaagctgttgaacttgaagagtccaaactttttgacgtgctgggcttcaaatgttgcaagtgccgcaggataaagtcgcctgtgtgtccttactctgatttgtacatgatgcaagggggcaagaagttgctcacaagggcttcaaagaaagagcactttggggcatattctgattccggtacacctatcgacacgagaacatgtgagcctgcaactcttatctatcctgcaggggatgtctctagacaagacaatgatcctctgtttttctccctttcaagtgttgagctgattacagaactccagttagatgcagatgatgcaaacttttctgtctctggtggattcaaacctaaataacctaaatggataaaggagcctaagtgtccttttataggtaatcttcatgctcaatttggcaagagcaatgccacaagggcttcaaggaaaaaagactttggggctgtagcttattctggtacacctatcaatcttctaacatgttgtgaaagtgactcctatctttcctgcaggggatgtctccttaataactaaatgatcctctgttgttttccctaccaagatgttgatctcatttcagaacccccagttaaatgcagagattgcacgtgatatttgaaaaattgttgtagattatgaaattgaagaaaacgggagggttaatttagcatccaactgtggatctacaaattcgttacaaggaaatgttaataattgtcggcaatgttcacaaaaggaactggcccctgatctctcttgtcagatttgtgggattcggattcacagccattgttcaccttgggttgaatcaccatctcagcttggtagttggagatgtggtgattgccgggaatggcgatagcagattttgtttgtcatcctgttgtttagtgagagttctcttgggtgtggtggtggtgagagatatggtaattgccgggaatggtgatagcatacaaactgactctcgatttcagcattaatcatacaagttggctcagtatgcgtgcattgattggttcaggtatatttcagagtttaattggcatctgcaggtttctatgaatttagttaccgctcaaataattgcggctttcctgcaactgatagatagtgtttgagtaaatgatgacttggacccagtatagttgaatgctctggaaccatattggtttttactcccctagttgcattccccccaatccccacttttaatgcaggattcatagaattttgctccgataatcggtgataagcagttttttatgttgcttatctgtcccaattatttgtatagattagataccacatttttttggaggtcggtcaaaattgaaaccttcccctcggattttagatatcaagctgtgagatgcctagtgagctcccccccccccccggccccatcagaagtcattctttacgcttaaagttcactccctaaccgtttatactaaagaataaagccatttggtaaaaaaaaaaaaaaaaaaaaaggaaagag

SEQ ID NO: 108016 - DNA, 346 bp, Glycine max
  Clone ID: PAT_MRT3847_68554C.1
ctcactaagcggagtccgcccttgacgtcctttttttttttggctacgaattactaaaggggataccatcccagtctactactataactatgcattgaaagatttacatgcgcccctataggctaaaaccctataattaatgcaaatcaataatcatcctatgtgcaacttagccacgggctttgcacatgacttacttaacggtttaacaagtagcactcacataatgggaaagagtacttcatagcaggtgccaaatgacagtgtgaggaatctagcccagctgacgagtaaagattgccatgtcaggaaatcaaccgtcactaggcttaacatcctacacagt

SEQ ID NO: 108017 - DNA, 210 bp, Glycine max
  Clone ID: PAT_MRT3847_68555C.1
gctaaacgagtagagtgagtgggttttcgatctcaatactctctctctcctctcttcccattagggtttcttcctcaacccgatcgcccatggccgacgaatctcaatatgcgggtgacccggacagcagccctacgcctcgctcgctgcaagggcgagtgcaaggacgagtagcgccctactgggtgctcggacggccggaacccggcg

SEQ ID NO: 108018 - DNA, 493 bp, Glycine max
  Clone ID: PAT_MRT3847_68556C.1
ggggggaaaaaagcaaaattttaagggtaaaaacggattcttacattaaaacggatcttacccgggctacaagcgttttttacccccaaggaaaaggggggcccaaaatccttttttaaaaaggggcagaccccccatcgaaaatgtttcttcggagaaagggaaagggcaaaaacatagtttcgatgggaccagttctacttatccatcgaaagcgacccttgggattttggaaaaaacattcatctaccttttatttattcaaattaagggaagaccaatttttttggtcaagggagcgctgggccccctccaaaggattcttcagcaacattgggacgggcattggacccacccccccaggaacggggggaatccaaccagcaactttagaggcttccccaaaatctacatctccaacaagccgggaaccggacttctttggtggggcatcaacagcattggggccaacatctatcactggagctccagg

SEQ ID NO: 108019 - DNA, 453 bp, Glycine max
  Clone ID: PAT_MRT3847_68557C.1
gtgaaagtcccaaaacccaaagattcaaattctaaaggggggtccattagttttttggggccaaagcttggggccgggccaaaattttaatgggggaattaggtaaaaagagaacgtttcccaggggaaaggcccccggcgtctagatcctcccctagaatccaaaccctagggggggggtttttatgggggccaatgaaaacaaaaatggcaatcccccctttaaatgtcccggggggtttaaaggcggaaaagggggccggcccccaaaccgaggtggggcctaaagccttaggggttccccttggggtcccaaaaggggggggcccccttttccccctacaaggggaattttgggttttccaactcaggggtccccgaaaaaggcggtttttggggaaccgggggggccccccatacttgggggggacctcaagggggggggggggaaca

SEQ ID NO: 108020 - DNA, 284 bp, Glycine max
  Clone ID: PAT_MRT3847_68558C.1
taacgtgttattcatcctcagtaattcgatgaggccgcaaatgaggcggagaagtcggaaggacgccggtgaaagtcggcgacggggaaggactcgggggcaaacgggacgccaacgggccggaaaaggaggcacctttaaaggagacgaccgagactccgaagaagaacaccgacagggagtaagtacctctcgaagttaaatcccggggagaaaatcggaaggaaaagacatgactcagttagtagaaactaaaccttaacgcaccaagactccttatacgc

SEQ ID NO: 108021 - DNA, 136 bp, Glycine max
  Clone ID: PAT_MRT3847_68559C.1
cggacatcatggggtatcagagtttcaggtggttcgaactctgacccatgtggtacggcctgtaattcgggtacaggtacagctgcaaccccaacggatatacgttattctgaatctgttggattacacgatattt

SEQ ID NO: 108022 - DNA, 467 bp, Glycine max
  Clone ID: PAT_MRT3847_6855C.1
tccggttgcaaaagacaacagaggggggcataattcatgcgtaaatagaaaacctggtaaacaaatttgaaatggctttcttgcatcaccactttggcaggtattcaaccatcgcatcacatcacatttacaaataaaactcaaaatccacacaccaccttgtctatatattatcatatttattgtaagcatcaccactaactctactgctactttcacctttcatcatcattcaattttagtccaatggagtggtctttctccatatccgtggtgctgtttcttacccttctcattcaaatacatggaagtggttatcttgatcacaagcaagcaagaggctttgcagagaattatggttgtaatttgttccaaggaagctgggtttatgatgattcataccctctttatgaaacctctcagtgtccctttatagagagggaatttgattgtcaaaacaatggtag

SEQ ID NO: 108023 - DNA, 452 bp, Glycine max
  Clone ID: PAT_MRT3847_68560C.1
agttccgaaacatcaatgaaatccattcatacagcatcatgacatgatcttgattgtgatacatatatctctgacaccaaagcataacatgtcagttctctgctatatactaacaggttcacttacccactccatccaatcctacatacaaagctataagacttctctaaaacctggcctagaactataacaacttcatcataggcactagcacgtgtacatatataatattccagtggtagcgaataacactgaacactctgaacacggttttggactaggactgtgcaaagacggtctatgactccagttgattatatctaggatgactctaattttcacgtggcgtttaataaggtcatggttaacttattattagaagctattaggggaagattggctagtaacttgccttcatttgaaattcgccttggtaagaaacccggctcttt

SEQ ID NO: 108024 - DNA, 169 bp, Glycine max
  unsure (1)..(169): unsure at all n locations
  Clone ID: PAT_MRT3847_68561C.1
tccaattcttcccttcccaacctgggttttctccataacccttcaagtttaactctttttccatttgggtctcgctctgctccttcgaatctgctggtgattccaccttaaaccgctattccttcatcaagatctattttttaaattcaattctctcangatcactctc

SEQ ID NO: 108025 - DNA, 378 bp, Glycine max
  Clone ID: PAT_MRT3847_68562C.1
cggctcgaggtttgatcaatggtttcttccctctcctcatggataatggaaaaccaaacccaaaacttaaattgaagttccagttatggttcaagccggcagaattagaaccaagttgggcgaagatgttgagcaatgactgggaatttcaagggctgagggaggctaccttcccactaaggtccaattgtcaggtcaaactttaccatgatgctcaccattcttctgcttttcaacctccatttgatctatgtggagctccaaaaaagctatgggaggatgtctataaagccattgagggtgcaaagtatttagtttatattgcagggtggtccttcaatcccatgatggttctggttagagatcctctcacagaaa

SEQ ID NO: 108026 - DNA, 451 bp, Glycine max
  Clone ID: PAT_MRT3847_68563C.1
tttttcttttttttttttttttttttttttttttttttttttttttttttttttttttttttttttttttttttttttttttttttttttttttggggcaaaaacctgaaatttggctcttgaaaacccaaaacggggggaaacattcccattccttacccggggaattaaattttaaaaattttttttattttttcccgtaaaacatgaaaaccccaaaaagggcccccttggggccctaaggggtttttaaaaaaaaaaaaatttgtccccccctgactcggaaaattgggacaaaaaaaaaaagggggtccggcccccacaaaattttttatttttttccaaaaccccaaaggtggaccccttttttgaaggcccttgtttttacaaaaaaaaaaaaatttggcattcccctttttgaaaatttttcccaacccctgggcggaccccg

SEQ ID NO: 108027 - DNA, 372 bp, Glycine max
  Clone ID: PAT_MRT3847_68564C.1
caacattttcggatctattcaaaaaaaaaattaaaaaaaaaaaaaaaaaaaaaaaaaaaaaagaaaaaaaaaaaaaaaaaaaaaaaaaaaaaaaaaaaaaaaaaaaaaaaaaaaaaaaaaaaaaaaaaaaaacaaaaaaaaaaaaaaaaagactgataaaaaataaaaatgaaacgaacacaagaaacatgcaatataaactggacagaaaacaagctataacactgatacataactataacatgattgccattgtgcaagctaagaaaccaagatcttaagaagagctgctttcatgaagcataactataggttaacaaaatattcacttaaagagatgggacctataagagaatttcctaatcaaaaacc

SEQ ID NO: 108028 - DNA, 627 bp, Glycine max
  Clone ID: PAT_MRT3847_68565C.1
tcggccggcactagtaattttgtttctagatgatctctccagcggaacgatgaagattgaagcatttggctgacggatgcttggtaaatatactgccctacaaccacttctgctgatgtatgcaggctttctatggctaccaaagcctttcattccgcgggtgaagccaacactgagggggatcgctttctcctctatgattggacctgtatcatctccctttacttcttccgctcctacatttcactctataaaggatctctatctatatctgtacgaacgacccaccctcattgatcaatgcaccaacagtttttaattgcagaagcgcactggaaacaatggatacatgcttcccgctagagatctgatcattatatggggagacactacttattattgctagtggacaatcctaccataccccatgttcaaacaagttgctcggcttcaagctgagcgttggttagacattactgcaaggaagaacactcctgttttgtattcaaatactaatcatgcaggtttacttgtgcacaagaggatcgacgccgccggatttcactactatcctgttgtgttaacatgaagtatgttgggaggcaccacccccaccaaagatgtttg

SEQ ID NO: 108029 - DNA, 581 bp, Glycine max
  unsure (1)..(581): unsure at all n locations
  Clone ID: PAT_MRT3847_68566C.1
attcaagaagcagtgttcctatatggggtggaagacaaagtgttgcagctgcaaactgaattgaggatgatgaggtcttacttgcaagatgcagatagaaagcaagatggtaatgaaaggctaaaggaattggatttcagaaatcagagaagctgcttatgattctgatgatgtcattgagtcatatgccctcagaggagcttcaagaagaaatttgactggtgttttgagcctcatcaaaaggtattgctttaaacattaacaaattcattaaaaacccacaaggtgggatctcatgttgataatgtcataagctaggatttctaacctcacaaagagtttggaaacttatggcataaggcctgaggaaggaaaagcctcaaattctatgcatgggaagcaaagatctttgagctcctactcacatgttattgaagaagacataattggtgttcaagatgatgttaggattttggagttatgtttggttgaccccaacaaagctatagagtagtagccatttgtggaatnggggggtttggngaaaacaacattggcaaagaaagtgtaccatagtcttg

SEQ ID NO: 108030 - DNA, 442 bp, Glycine max
  Clone ID: PAT_MRT3847_68567C.1
gggccgccaacccacgcgtccgcggacgcgtgggctccggaggcggcctgggcgatggcggcggagtttggtccataacctgtgcaaccgcgcagctggaggatggcctcactcgggcctgccgcagctggagagcaggcgtcgggggctgaggcggagccgggccccgcgtggccgtcgtcgtcgtcctcaccgtgcctgtctggggccccctgctcccccttgcagcggggaaccctctctacaaactgggcagggcgaccaaggacgtccgctgaagagagcgctttcgcccttcctcttcaactcgggagctgctgagcgatgtgcgcttcgtactgagcaagggtcgcggcgccgacgccgctgggggcccgcagcgcatcctcgcccaccgcttcatgctggcggacggcaacgccgtctttgaccccatgttcaa

SEQ ID NO: 108031 - DNA, 667 bp, Glycine max
  Clone ID: PAT_MRT3847_68568C.1
ttatataaagttaatatttcattcatttggaagaagaatatttgaattaagaagctcagtaaaccactcttccaagttccaacatcctgaaggcaactaatttacatccacatcaaatgttacttgtttttccccatcctctccttggagagaaaaaaaaggggagagaaggggtgcttactaagttacatctctataatctggataatcccagaactttgttatcgaacactaacattgacattcacatccaaaggagaaaaaacattccctgtatatgattcagaatcagcagttgacacttccaagtcgccatcagataagcttccaccagtagacgacgcaccattgcctgaatcagccttcaccccatgaaaggaatccccagtaaccagcgcttgaagcaacttgggtggtggaggaacactcacctccaccaacccttccaacatcttcaccaccatacccattgtaggtctcattgcctcatcatcttgaatgcaccaaactgcaaccaaagcaaccctcctagcctcctcaatgttatacgcattcccaagcctcttatccatcacatcactcacattcccctcgattatcctctgcgcggcccatggcgggaagaaccacttccctttcatctcatcaccactcttttcaccacctt

SEQ ID NO: 108032 - DNA, 353 bp, Glycine max
  Clone ID: PAT_MRT3847_68569C.1
ggctcgagcgccgagtgactgacacgtcttttacccttgttcttcacttgcacttgatgctaaagagccttactagattataccaagaggaatgcacttgcgacttgtgtctttcaccaatggcgttgactctagatctatacgagggtggagctggtggagtcgctgtcatcacgatgggcataccacccaagaatgctggagacaatacaactagcatgggggagacaaacagatcagatgatgcatctaggaggagtgatctgagaacgctatgggagactgtgaaaggaaggacattatctggtggatttgatatcagtgatatgcagcaggtgcaccggactaaggac

SEQ ID NO: 108033 - DNA, 589 bp, Glycine max
  Clone ID: PAT_MRT3847_6856C.1
caaacagatgggtattgtacaatttagaatctaaaatacatagaagaagctaatgttacatcctgctttccattttctcgaaggtttcaaataattcatcaaagcttggacgattatcaggactagtatcaaagcatctcttcatgatatccttgacttcattaggacaatgaggaggaggggtgagtctctttccatctctcacagcataggcaacatcaatgagttccatgccagcccaaggatcttgtcttgaatacaactcatagagaaccactccaaatgaccaaacatcactcttcttgctgtagaccttcaacatgatacactcgacagccatccaacgaacaggtcctacatcacttctagtcttgttgccagatccaccaaaatcaacggttcttgacattccaaagtcagctactacagcttctaagttctttcctaagagtacatttcttgcagccaagtctctgtgaacaagattctcagcatgaagatgaatcattccagcacagatatctttagcaattcgaatggtggtcttgctatcaatgatggcattggttctcaagtaactgtacaaact

SEQ ID NO: 108034 - DNA, 460 bp, Glycine max
  unsure (1)..(460): unsure at all n locations
  Clone ID: PAT_MRT3847_68570C.1
ctggaaaagagatgaaaataaaatttatttgtaaggccaaaaaccaatgtgatgtgttaatgatcttgtttaaaggttggtctgcattagaattgaagtattcaccggaaaaaagtttatacttttcttgaaaaaattcttccattatgatttcatttttaaaaccttccattctactatcatttctattagctatgtagttgtcaagatgaaattggctttgtaatcacactcttttgcactttcaaggctttcccctcctttcaatatttgacatgagctgctttaaccacatcttaaaacatgccgcattgtttatatatgtgacaaagggatttcaagtctggacttgatttttcttgaggtgtgggagattagatttggactggcagtaaaagtaatgattgatttgacgttaaattatttattttatattctctttagnactattataattttg

SEQ ID NO: 108035 - DNA, 457 bp, Glycine max
  Clone ID: PAT_MRT3847_68571C.1
gcacgaggcaggttgtacatctttttaaagctttttaatttctagatacctttatattgcttgtaaaaaattcttctttgagaattcaatcagacctctaattgctgatacccctggccagttggcatagtaattgtatattgggtgtatctgaatgtagaatccaacgttcaattatattgccaattgggcagggaagtcaattattaagcgtacaacagaaacctccattcttatgctgttgttgaacaagggcctcaactgattgagggtatgcgataggaaagaagggaaacaaatgggcatatgtctggactagtccacagtttagttatcttagttagttcctttcaattcttttccttccaaatccttcacattatcagagttcttagtttttactgtacgtactaagtaaacagattgtttgacctttgagttcaaaacaactcaaaga

SEQ ID NO: 108036 - DNA, 363 bp, Glycine max
  Clone ID: PAT_MRT3847_68572C.1
ggacaatccaactgtgttatttttatgggggagaacttttattaacatacatatatattgggaaaaaaagagtttgttccaactgtataccaaagcggaaccgggctcaattgccaaaacaaagccctccctcactatgggacaaagaaaaacggccccgacacaaaaagaggcgtttgggcctcccaacgcctaacaataaaaaaggagcggggttggttcttgttattaaacccgtccgcaacaaagcttcagcttggggggggaaaaaacccttaaccggggcccgctccctgcaaaaaggagggcgattcccggggaaagggggggcaacaaccaacttgacttgccacactgcaaacg

SEQ ID NO: 108037 - DNA, 1238 bp, Glycine max
  Clone ID: PAT_MRT3847_68573C.1
gcacgtcacgaggaatcagctctcactctcttcgcacctcaacggttctctgcaaaagcaccaatctccatcaagcggctactttagaatcagccttcatcctcttcgcacctcaacggttctccaatagccatcgtttctctgcaaaagcaccgatctccatcaagctccatgcttccacctcccttttcttctcttccaagtcctccttcaaaacgggaagactctgcttccagttatgctccactttgcaagaggtagcagcaacagaagaaacacctgagctaacgcaaccaacagacaacgtaaagaagctgtacgtggttaacttgtcttggtctctgacggcggcagacatcaatgacctcttccggcaaagcggctcaagctgcgtcgtgaagataataaagagcaaagatgggaggagcaagggctatgcctacgtcactatgggagattaggaaaaccctcttcctgttcttgataaatttgactcttatgaattatcacaccgccatgtaatggatgcatccacccttgcatggaaagcaagatctacccatctcagaccagtcttccctgaacatggcaaaacgcctcatgtaatccatgcatgcatccttgcatgcaatgcggacgatctgctgggtacggatttgtcgctgttcttaccagggaggaatcatcagccagggtttgtctttgacagcccttctggacgatctgctgggtacggatttgtttcttttcttaccaaggaggatgcagaggctgccatttctactgtggatgggaaggagttaatgggacgaccgcttcgcctaaaattcagtgaaaagaaagataaagctggaagggaaaaagatgaagaccaagataaagatgctggaagtgaagaagatgaagacgaaggttctgatgctcgaccggaagaatcataaattttagatacacatttactgatttttggtcgtggtatgggattgagtggaaacctctacgagctagaagtatacctcatgtataaagaactatgatggatggttttttgcattcacaatatttttcactaaggtcgactttactatcctttaaaatgtgagtgaaaatgtaagaaatttttttatgttaattcttataaatctccgctctgaattttttcactcccatttctaagggtgcttaaggggtgataaaacttaaaaatctttgtcaattaaaacttgcaaaccatatat

SEQ ID NO: 108038 - DNA, 2319 bp, Glycine max
  Clone ID: PAT_MRT3847_68574C.1
gaaacgatgaatggacttaggaaggaagtgaattgaaggtgcagtgagggcaaaatggaagggattattcagatccgatcagtgctgctactactatccataaccatggcatctctcactctggctgtggccgatggcgtttctcgagaagaagctaaagaacttcgagatgaggttaaggatatgttttatcacgcctttaatggatacatggaccacgctttccccctcgatgaattgagacctctctcctgcgcaggacatgatacgcttggtggctatgcgttaaccttgattgactctttagacactttggctttacttggtgaccgccaacgattctctgcttccgttgaatggattggtaaaaatcttcgctttgatataaataaaacggtttctctctttgagactactatcagggtcctcggaggattactttcagctcatcttattgccactgattatgctacgggcatgagagttccgttgtatgataatcagttactaaacttagctgaagatcttgccaggaggttgttacctgcatttgatacccctacaggaattccatttggatctgtaaacttgttacatggagttgataaacatgaaagcaagataacttcaacagctggtgggtgggaccttgactcttgatttttggagttctaaagccgattgacaaatgatcctatttttgaacaagttaccaagaatgcagtgcgtggactttgggcacggcgttcaaagcttaacctggtcggtgctcatattaatgtttttacaggtgaatggacacaaaaggatgctgggataggaactagtattgactctttttatgagtatctattgaaggcttatttattatttggagatgaggagtacttgtatatattccaagaagcttatgctgctgccatgcattatctttaccatgacccttggtatgtggaagtgaatatggattctgctgctattgtctggccattatttaacagcctgcaggcattttggcctggccttcaggttttagctggagatatcaatcccgcaattcgcacccatgctgccttcttgagtgtctggagaagatatggttttactcctgagggctttaatcttgctagtctcagtgttcagcatgggcagaagagttacccgttgcggccagagctaatcgagagcacctattggctatacaaagctaccagagatcctagatatctcgatgctgggagggacatggttgctagtttacagtatggaactcgatgcccttgtggatattgtcacatttctgatgttgagaatcaccaacaagaagatcacatggagagcttcttcttagctgagacagtcaagtatctgtggcttctgtttgatttggctgtgggtcctgacaatcttgtggaaaatgggccttacaagtacatatttagcactgaaggtcatttactgcctgctactcctcaaatctccttagtgagggaacattgtttatactatggggcttattgtagaagtggtgatttgagacaaacatactttgtgccagagtctgacaaagataagaaagaatccaatgatactggattttatgagagttggactaaacctacttattcttcggactacactactgttgagccaagtgctgtttcaggtttgatcaagggtttctgcccaggattaaatcatggacagaagtttggtatattatatgcctatccaactgatgaacgtcatgattatgaaaccaaccaagtccaacagaaagaatcaactactgctgtgcaactgcaaagccattcagtattggttctccgtgaccagagttctgacaatttgctaccagaagacaatagcagtaatcataatgatagtcagacaaatgaatcaagcgatactccttgaagtaggaattataagatctcagttatgcaataggattggtggggaagaatatactcttcaacttcaaagggttgtacttctaaaactcgggcaggctcacccacctgaaatttaaattcaagttttgttagtctgtctaattgagaaagtatgcatttgataatttcggcaactgttgatacagagagcatggagctgaaagagttaaattatggatgaactgacccactaatatcctgcctcctaatcatcgggcacatgtataagaatgtaatgtaattatttttgttgtatcatttttcctaaggctcttgtaaacctattgtgagaggtttaatcagtgtacatgacataggtattatcagattattgaatttagatcataatttgaattgctgatag

SEQ ID NO: 108039 - DNA, 146 bp, Glycine max
  Clone ID: PAT_MRT3847_68575C.1
tcactcactgacttcctacaccactttcaccattttcactcaacttcttcataacgcttattttgaaaaatatccatatcatgatactccctttacatctcataactactctataatattctattcacttaactaaaacacattac

SEQ ID NO: 108040 - DNA, 893 bp, Glycine max
  Clone ID: PAT_MRT3847_68576C.1
ctcttggtgactaaacacccccaatgtgcccataactttgtattggcattttgcaggagatattacataagtgaaggattgagaaaattacagtgtcgtttactaatttttgttggggatatgtctccttttcacgtggaggctcttcatatgacatccaagttggatagacgattcagtgccttagtcgaggttcaagcatgtggatcaatggtaacagaggagcaacctcatgccatgttaatatcgatggagtattttctcatgggataaggcttgtactgaccacctaagctgagtgtcagcccaagaagccccttgagcccatcttgcatttctcccgagctttactcgccagagagtatgggtttgaaattgaaacccataaagacacgaatttctctggaaatctagaagtagatgaataaaaggctgggaaaatggtgccccttctcatctgttcatgaaagaacaagttcatgattgtatggttagtgggaatgaatgaggggatgccatgccagatcgttgtagatagggggagataaggaaataagaaatcaacaaaagaggaaagaaatgggaagcggttagtagaaatcaacatatagtgattctttcatttgtaatcaatcatagatcatagattttagtcaatgagtttcaaacctgagtagttgtaaagcttcgggattgttgttttcttattagggggtaaaaatgaaagttcagattacaattgtaaaataaatatggagggcatgaggtcgttaccgtgctgtatctcctgttttgaagtatttccatgttgtaggcatcttattcactgtcaataaaaaaaaaaagttgtctgtttaaagttttaaaaaaaaaaaaaaaaaaaaaaacccaaa

SEQ ID NO: 108041 - DNA, 452 bp, Glycine max
  Clone ID: PAT_MRT3847_68577C.1
ggaattcggcacgagggtgaacaacaggtttcaatgccggtgtataatttggtgcctaataatggtgatgtgttttgggggcctccatcttcaccttctaattattgaaaacttgaaacccttggtgtttacgtaattggtttatctgctgtctcgtgaccattcagaacgactcaatgggtttgagggttgtgttaatacccaattgtgaaaatattaacacaattctcaaaacgacgtttgaagacgggataacaaagaagtcatgttcggaactactttccaccattgatcttgctgactgtatatgcgcagtgtgatcaaacggttactttgttttcgttgcaactcaggttagaacaacttagaacgtttttgaattttgatgatcatatcatatctgttgcatgttattttagtctctccggagaacttgttttgttgtctttgtt

SEQ ID NO: 108042 - DNA, 1419 bp, Glycine max
  Clone ID: PAT_MRT3847_68578C.1
tacggctgcgagaagacgacagaagggggaaagaaaaaggaatgtagtgtgtgtgagtgagtaacaaattctaaacgctattgagagtaaaatggcggattcagtgtcggtggacatggaagccatctctcctccacccgaggaacatgttgttagaactcgtcatggttgtgtctcagttgctgtgtatggggaccaggacaagccagcgcttatcacgtatcctgatttggctttaaattatgtctcctgctttcaggggttattattttgtccagaagcctgttcattgctgctccacaatttctgcatatatcatattagtccacctgggcatgagttgggagctgctgccattgatccagatgatccaattctttctgctgatgacttggttgatcaaatagctgaagttcttaactattttggtcatagtacagttatgtgtatgggagtaactgctggggcttacattcttaccttatttgctatgaagtatagacatcgtgttcttggtttgatacttgtttctcctttatgtaaagcaccatcttggactgaatggttgtacaacaaggtcatgtcaaatttactctacttttatggcatgtgtggggtggtaaaagaaatattgctaaagcggtacttcagcaaggaagttcgaggcagtgattatttgccagagtcagatatagttcaagcatgccaaaggtcattagacgagaggcagagtttgaatgtgtggcggttccttgaagcaattaatgggagatatgacataagtgaaggattgagaaaattagagtgtcgttcactaatttttgttggagatatgtcttgctttcacggtgaggctctccatatgacatcaaagttggatagacgactcagtgctttagtcgaggttcaagcgtgtggatcaatggtaacagaggagcagcctcatgccatgttaataccgatggagtattttctcatgggatatggcttgtacagaccatctaagctgagtgtcagcccaagaagtcccctgagtccctcttgcatttctcctgagctttactccccagaaagtatgggtttgaaattgaaaccaataaagacacgaatttccgaggagatatagtacagtagtagtaatggtagtaggtgaataaagattgccgctctttttgatttgattgttgaacaagtttatagttctttgttttgtcaaaaatctgatgagggatgtcataaccttgtagatagagggagacgagaaagaaataaacagagggaaaaaggggaagagtttagctgaaagcagctatagtcattctttcatttgtaatcatagactttagttagcgagcctgaatgattggtaaagcttcgaaattgttatttttggacaaataaaataataaagttcttgtt

SEQ ID NO: 108043 - DNA, 1787 bp, Glycine max
  Clone ID: PAT_MRT3847_68579C.1
ggaaagaaaaaggaatgtagtgtgtgtgagtgagtaacaaattctggacgctattgagagttatatggcggattcagtgtcggtggacatggaagccatctctcctccacctgaggcacatatactaagaactcgtcatggacgtgtcgcagttgctgtgtatggggaccaggacaagccaacgctgatcacgtatcgcgatttggctttaaatatatgtctcttgctttcaagggttattcttttgtccaggagtctgttcactgctgctagacaatttctctatatatcatattagtctaccttaattatatttctccacttgagctgtaattatgcttgggagctgctgacattgatccagatgatccaattctttctgctgatgacttggctgatcaaatagctgaagttcttaactattttggtcttagtacagtcatgtgtatgggagtaactgctggggcttacattcttaccttatttgctatgaagtatagacatcgtgttcttggtttggtactagtttctcctttatgtaaagcaccatcttggactgaatggttgtacaacaaggtcatgtcaaatttactctacttttatggcatgtgtggggtggtaaaagaaatattgctgaagcggtagtttagcaaggaagttcgaggcagtgattatttgtcagagtcagatgtagttcaagcatgccaaaggtcattggatgagaggcagagtttgaatgtgtggcggttccttgaagcaattaatgggagatatgacataagtgaaggattgagaaaattacagtgtcgttcactaatttttgttggggatatgtctcctttccacgctgaggctcttcatatgacgtccaagttggatagacgactcagtgccctagtcgaggttcaagcgtgtggatcaatggtaacagaggagcaacctcatgccatgttaataccgatggagtattttctcatgggatatggcttgtacagaccatctaagctgagtgtcagcccaagaagtcccctgagtccctcttgcatttctcctgagctttactctccagagagtatgggtttgaaattgaaaccaataaagacacggatttccgtggagatatagtagtagtagtaggtgaataaagattgccgctctttttgttttgattgttgaacaagtttatatatagttctttgttttgtcaaaaatctgacaagggagggatgtcataaccttgtagatagagggagacttggaaagaaataaacagagggaaaaaaagggggaagagtttagttgaaagcagctgtagtcattctttgatttgtaatcatagactttcgtttggttggtaaagcttcgaaattgttgtttttggacaaataaaaataataaagttcttgttaccactgtaaagctaacacggtgagcaagcataatgccgagaccatgcaatgctacacattgttttcatgtcgtcgaaaaaaaaaaaaaaaaaaaaaaaaaaaaagcggggcatgaagtcattaccgtgctatatctcctgttttgaagtattttcatgttgtaggcatcttattctctgtcaataaaaaaaaaaatctgttaaaagttcaaaaaaaaaaaaaaaaaaaggggccccttttaaaaagaaaaaaaaaattacggcgggggggggcggtttcacccattttgaccggtaacccccccccttttttttggggggggcccttttaagaaaacaaaattttttccccctgctttgaaaaacaaatttttttttt

SEQ ID NO: 108044 - DNA, 363 bp, Glycine max
  Clone ID: PAT_MRT3847_6857C.1
atttgtgactatgtaattccaatttattgaagatgctcttccaaattatacagtagggcttgtttaaagcatcttcagggatttgaaacttcttactaacatatcacaaacagatgcctgcgccaacaatcgcgagcatactgcacaataactcatcagtaatgacttttttaaatatgcgatctaataccctaacaataagtctcctttaccagcaattatggatcaataaactttcatttatcataaacaaacacgcccatggtgtgactttgtaaaaaacgaacaaggcttcgtactagattggagaatgattacacagctgataaatttaataagaactacggtgcttcagtttttggt

SEQ ID NO: 108045 - DNA, 387 bp, Glycine max
  unsure (1)..(387): unsure at all n locations
  Clone ID: PAT_MRT3847_68580C.1
taatacccgtaagactccctggcttttcttatttaaaaataacacactccataaattttctataangcattcaacatacgaatttttttaaataaaatctccaaaaacaaaccaaattacaaaccaaaaactctcaataaaaactaccaacctcataaagacaaataaaatcctaaatatttaagtcacactttatttattgaaaaaaatccttttcctaacttcctcaattattaaaagcttaaaacctttacccttgtgaacagaaatccactgctttgataccttgccaatggagaacacatttcccatacaaaatttaaattcatgcccaaaatcatcctaaacatggatagcctcaaaacttccctaaagcttctctctgtt

SEQ ID NO: 108046 - DNA, 467 bp, Glycine max
  Clone ID: PAT_MRT3847_68581C.1
tctcattttccggttctaaaccaacttggtcatggtcttcggagaaatcactatcaaggcctttgctgtctactagaagatagtgcgtgacacctgcaggaacatcggctcttgatttaaacgctgtgggactggatgccgacaactgtaaggccctcgttaacattgagcaatatagtcctgatattgctcagggtgtacacggccaccttaccaaaaaacctgaagaaattggtgctggcgaccagggttacatgtttggctatgccacctgatgaaacccctgtattgatgccattgagccatgttcttgcaacaaaactcggtgctcgtctcatcgaggtttgcaagaacggtacctgtccttggctgaggcctgttgggaagacccaagcgacccttgagttttacaatgacaatggctgaccgggttcctatttcgtgtacacacccgtgctaattttcac

SEQ ID NO: 108047 - DNA, 217 bp, Glycine max
  Clone ID: PAT_MRT3847_68582C.1
agcgaggatcctgtggggcggacgacctacaacttataccactcaaacaaggtatttatttgagaacacatgcaatgtgatatcgtggacatcataaggggaacctctttaataactggtttagctgtccttgtcaaaaacaccgtaactctttagctcggtctttgcgtcacatctacggcagctctacatgagaagagaactgaccatgctggtg

SEQ ID NO: 108048 - DNA, 184 bp, Glycine max
  Clone ID: PAT_MRT3847_68583C.1
aggaacaatgttggaaacagaagaccttggcatgtcgattcttcaaagattgcattcacagagacaatctctactgcatacacatgacacgcttcatggagtggatgataacacagacaagagcaagaaaattttggctaacatgtcaagaaagatggacaaaaacaaatggattttgagcacc

SEQ ID NO: 108049 - DNA, 491 bp, Glycine max
  unsure (1)..(491): unsure at all n locations
  Clone ID: PAT_MRT3847_68584C.1
ggnggggctggggnngcgnntggnggggcctcacaaaaggntncttnacatntgttatcaattgctaaacgacatggatgctactaagttatgtggacaatttgtgggggggggaatgactcagaattactgagaaaaatatgcatgaaagcctgggacctaaagggggaattagttactatgtctttaagaaactncatgaaagcagacanttttntaaacttttaaggttaggggaagaatttnctggtgagccatncatttttctgagggagcatccagaaactttttggcttaatgatttggtnccttataattntnctttgggttagaaacacttaatgcattggnttttttccaaacatgccatntacttntggtggtggagaaggaggggaacagggatntttgaggatgaaactaaaattgnctggcngaagaaatnntnnaattnttttttagggtggtggcctntgaagaagaaaacaaaa

SEQ ID NO: 108050 - DNA, 983 bp, Glycine max
  Clone ID: PAT_MRT3847_68585C.1
cccacgcgtccgggtcaagcaagaatccatttatagatcatgatgattcttctggtagcaacctttctactaccaaacctcaaataggtagccctaatcctagtcctccttcgaatggggaatctgttccttcaaacaggtcgccaactaaagattcgattgatgggggtgttgatttgagtcaaagagcagtagcagtaccatcactctttgaagaagatgttgaatttgtaggtgtagaattagaaggtactgagaaggctatggaacaggctctgaaagaagggatagttggggaggcaggaccattgaaaagaaacatggtctctaaagtgccagaaaaggaaagtactgacgagggtggtcctggaataaaggaattcaatgatgcaaattactggagggttgaccaggaggttgctgttctagagtgacggacaccatggtaactcttgcttgtttgtatcaaatgttagaccaacaccagtggaccctattcttgttttccggagcgaatgcagcacattaatgtacagagtatatttttgtttcaattatgccttctttctgtggtccacgcttattagagattaagcttgttttttattctaagttttgccccgtcctgtaagtgatttatgggttttcccacatttatcgaatttagtctgctcttaattttgggctcattttaattttgatgataccttgctatcagggatttttaaattcgttacgaggacgctctgcttaatctgtgtatcgtaactgaactgtggtgtagtgaattctttgtcagtgtcttaattgtctgtaaattttatattttcgacttagtgaattttgctgactctgcaaacaccttggtttcaccagcatgtttttgttatatataattttttttagcatggctcatcaattgccagctactgttactatgcagcatcacaaggttttgaataaattggacaactgctttgagt

SEQ ID NO: 108051 - DNA, 164 bp, Glycine max
  Clone ID: PAT_MRT3847_68586C.1
tagaagcctgattggagttccttaccttgcgcggtggaccgagacgacggtgataagctcctcccttctcctccgccagatctcatcatcgccgtcgctgaatttctccttggcgttttgtttccgactctcacttctcgctgaaagcttattaagtacctttt

SEQ ID NO: 108052 - DNA, 262 bp, Glycine max
  unsure (1)..(262): unsure at all n locations
  Clone ID: PAT_MRT3847_68587C.1
taaagagttggtctaggatatatttgaatcgcgcaacatcagcacctataacctcatcaccctttttcccattctaaaaaaaataaagtatggccacagataaaatgtgcagcttcccgcaggtacctggaantgcttcctaatcaatatcaatcttatatgtggtgacataaaaatacttgttgctaagctccccaacgatgagtaaaataaacctgcggaagccacaccaagcgggagggaaatagaagaccggtgcgac

SEQ ID NO: 108053 - DNA, 573 bp, Glycine max
  Clone ID: PAT_MRT3847_68588C.1
ggggcgagccccctatttgaaaaatttaaaagggggcttcccaaacacccctttggggggttttttccccgcgggggggcggggggggccccccgggatttcggggcgggccccggggggggccccacttttccttttgggggggggtttaaaaggggggggaatccgggggcaaaggggttcccggggggaaatggttttccggccaaaattccccacaaaatacgggccggaagcaaaaaggggaaagcggggggggccttgggggggggccaccccaaataaatgggggggggcccacgggccgttttccggggggaaacccgggggggcccccggttttaaggaaccggcaaccgccgggggagggggggtttgcgtttggggccccggggggtgttttttttttccccggtggaggggcccaccgtgtttgcccctccccccgtggcccctggggggttgccccagcgggccccccgggtttgccccccggggggaaaaccctcgtggggggggggaaacgggggggtataaagggggggtgcgttggggttcggggtaccccccccc

SEQ ID NO: 108054 - DNA, 329 bp, Glycine max
  Clone ID: PAT_MRT3847_68589C.1
caaaaggaacccccgggaaaaaccggctccaaattcaatggctggggggaaacaaggttaatccgtaaaaccaagaggggcgggaccccccccccaaggggcacccggcccaacccctttttttaaaaaccactggctttcccaccttagggtttccccttccaaaaatggacctgggggacccaaaccccccttccaagggacaacttttttttaaaccaaagcccccaacccaatccccggggattcaaaggaagcctcccgggggcaaaaacccttttctggggccccccaggacccaaagttgttttgggggaagcatacccctt

SEQ ID NO: 108055 - DNA, 163 bp, Glycine max
  Clone ID: PAT_MRT3847_6858C.1
acaagatatattagtgatacaacgaggtgatccagctgacgggaacgctacctaagatttgaatttgtttgcttttggtatcaatgccgagaacaaccagaggaacttccttgctggctcgaaagacactgtgataagccagatacctattcaagtgcaggag

SEQ ID NO: 108056 - DNA, 460 bp, Glycine max
  Clone ID: PAT_MRT3847_68590C.1
gggagagcaaacaacaaaacaaataagggggggaccagaaaacaaaaaactttgaaggaaaacacccaaaaggggaggccacagggaaacagggaaactttaaaggaaagcaacccgggaaaaaaaaaagaaaaaaaagccttttggcaaaaaagggaagtaacaaaagctaacgcccaggattcaagaggggctaacaaaaaaaaaaggaaccaggccagccatttggccatcccaaccaggggggtttttttaaacaaaaaaccagccatcaacttggaaccaaagggggactttttctccgggggaaaaaccaaaataaagggcccccccgggggggagagaaaaaagggccctcccaggggggggattcccaaagaaagcccgctcaacatttggaaacccaaaagggggcaatccattcccgggaggggggggccaaaagaactcgggtttttgc

SEQ ID NO: 108057 - DNA, 171 bp, Glycine max
  Clone ID: PAT_MRT3847_68591C.1
caattacacatgtgctgtacttgtaaatctgattacctagatctttggataaggcgcctctagaataagcaagtatgagggtattcacgcttaaatcaaattacgtaagatgagaaaatttagtaggcagaaagtaggaaggtggaaaacttgaaaggaaggtattctaca

SEQ ID NO: 108058 - DNA, 251 bp, Glycine max
  Clone ID: PAT_MRT3847_68592C.1
cgcagtatagcactcagacacgttgttcatgtttttcagactttggacggctcactacacaagggtgaggaaggcttatggggagacctcttcgcgcaggaagtggaataccgttttagagttctgctcctccgttggacaaacagttgatgagataactcacaatgttgaatcattgtattcaacgcaaattcttcatctaaggagaattgtttgtgtgacgattggtggcaccaccgagccattggaac

SEQ ID NO: 108059 - DNA, 333 bp, Glycine max
  Clone ID: PAT_MRT3847_68593C.1
gtggctttataacaaacacctggtccttaacattgcagttggcatgggcggccaacgctgtggtttaaccgtcgccgttccaacctaagccctttttccggtaatccttttccggggtttccgtaaagctaactcccaaatccataacgctttaacgctccaagcccttaaccgttttggccgccaccaagaaggccgcggccgtcctaaaggggacctccgccgtcaaaggcgtcgccactctaatccaagaagacaatggcccgccaccagtttttgttcgaatcactggccttactccggggcttaatggttttaacctacatgggtttg

SEQ ID NO: 108060 - DNA, 830 bp, Glycine max
  Clone ID: PAT_MRT3847_68594C.1
gaatgcaacatgctatatacagcttagatttgtctaatccaggaatgacaacctaaaatcaagtgtggattcaacatggccgttctcaagtctaacttaaaaaatattgcctataattaagttgctacaaaattctctttgatttattccatgtggtaaaaatgatggtttaaatggggaaggaacagtttctcaaaatcagacaaccatgatgcaaatttctcaacacctttgaacattctgaggagcatgtaagtatctattgtcaaggaggcatagctcctaaccaacagctccctgcattcaagtggcagaatcaactgctggttgaaattatcataacggaaaatcacctgagataaaaatgatgatggaggaagtaacgggtttctgtatgctatagatccttctgtcactttaattgttagtggaaagtcgtcatactgctgcgcaaattgcccctggggaccaccgggaggagcagcaaaactttgtttcatcaaggtgttccacatcaagcccaataaaccatgatccaatgcttacatcatcgtgtgcatatgtacgaagaataaatctgtttattgaaacaaactgagccaatgcttttgaaacgacatagacctcacctgaagcatgtcgaaagtatgatctctgtctctcacaagttcttcaatggagtggggcccgctggggttccctttcctccggttcatgagagccgctgcgatttttgagacccgcgagcacttcggccggcgcggaggccggaaagcggcgccgccagtcctcttcttcctcacgatctcggtggtggcagtgcaagccaa

SEQ ID NO: 108061 - DNA, 381 bp, Glycine max
  Clone ID: PAT_MRT3847_68595C.1
cttctgtctgaccatcgacacacctaccggactgtcttaccgatgatgccagcctcactgctagctaagaagaggcctctcttaggatcgtatgatcatcatactgaagagtgatttagcccagcattacgatggacttgaagatcgtctgatcctacctcattatgacatccttaacatgtcgatgacactaaaatacccgctgctctctcaccaatctagttctgacctgtatttctatcacccatgctcctttctgaactctcgttacttgctatatgtgcaaaaacttattacaggataaaccctatactatcttggctgtatcacattgttgtaattgaatggtaccactgattttgtctgtatcggggacagaga

SEQ ID NO: 108062 - DNA, 505 bp, Glycine max
  Clone ID: PAT_MRT3847_68596C.1
atatttagcgatacccgtgtttcaaccaaacaattcctaactgacacctgtacagcggctaaactaccactatatagagtcggataagagcttggcagaagacatggacatcgctcacatctgtatcaaataatactaggatgcccatacaaaaacacgtacctaatccattgccttgaaaggaatggctgggatgactatttagtgatccaccatcacaattgacaggtcgtgtgaacggcccaatctacagaatccaaagctttcccacgcactgtactaagtaaaaatgaaggaggctacgagactcgtacccggtataatgcccaaggccgtcatgactgctctttagaaagaatttgataattttgtagccgctttataagactcacccttacgttttcttgaatgcgatttaatttctaggctccaatttagcgcaatatctaatcacttaccggaccttttacacctaaaaaactgggaaaaacccttgtggttaccc

SEQ ID NO: 108063 - DNA, 263 bp, Glycine max
  Clone ID: PAT_MRT3847_68597C.1
agcacgcgaacgaaaaaacgttgttcgtgatggcacgtacgaagcaaactgctcggaagctcacatgaggaaaggcacctatgaagcatctcgtatccaaaggtgcaacgtaagtcatgcaccaactactgtttgtgggaacaacacacaattgagtggaacatgcaccaaagctcttcactagatcagtgaataccatgagagtaccgaaccgttgaacacatagcttgatttccagaagctagttccagaaaccgctgatg

SEQ ID NO: 108064 - DNA, 394 bp, Glycine max
  Clone ID: PAT_MRT3847_68598C.1
attctttctaaggttgcacaagatatggatgaggaacggcttgaccgcgttgatgaggaggattcctttgaggaagttcatttgagtgcaccactcaatggtgttgtgggttgggactatctctaaagaattcctcttgccacatatgatgcttctccccatgtgcttttacgcataaatggtgaaaaaggcataaagagatttgtttttggggatagcgaagagatgacattgattcctgaaaccatggttgaaaaggcttacactaagctaattgccgaactcgagaaatatgtatctacattggttgacattgaatgtcccatggatgaaaaacctcctcgcacctatatttttgacagacctaagacgcgctgattcactattctcccta

SEQ ID NO: 108065 - DNA, 257 bp, Glycine max
  Clone ID: PAT_MRT3847_68599C.1
agaggccccaaaagctgcacacattgcccttcctgtccaggaatttgagatctagcaactaacaaggcaataatgaagttcttggttcagtgcccttgctgctcttgctttgcttcatgaagcaaagcaaggaaggcaaagtcaagaagtccaagaaccaaggtggagaaaaacaggttaggaaaggaaggattgaccttgtaactccatttcaagcttcctttggtaatcattagtattatataggcatgcacaac

SEQ ID NO: 108066 - DNA, 1534 bp, Glycine max
  Clone ID: PAT_MRT3847_6859C.1
cccacgtgtccgcccacgcgtccgcggaaccaaaactcggcgctacgcccgtgtttattttcgcaactgctgggatgcgtctgttgccatttgaaaaacaacagattttaatggaacatctccgcaatgaacttcctcagatgacaaaattgcaaattttggaccaacacattcgggtgataagcggccgatgggaaggaatttacagttggatagccataaattatatgctgggacgcttcaatctttcgaaatcggtgaacaaatccaaatcggagtcactcgaagagcgatcacaaccagcactttctgttgagaaaaaggagcgaccgaaaacagcaggaatgattgacatgggtggcgcttctgctcaaattgcctatgaacttccattgggccattccgatgctgcaacgggtgggcaagagaatgttcagctgctaaacctcggctgtcgtgacgacgaatcgcgtttccgtttccgattgttcgtcaccacttttcttggcttcggagtcaatgaaggagcaaaagcatacgaaaagtttttgtggaagcggttgaacaacaaaagacaagcggcaaattcgaccgaaacggacaatggaaaagacggcgcgaaagtgccgactgtcgttgacggatgtttgcctgtgaatatgctgaaattgagccatgccgaggagaattacgaccaattcgtacgaaagggaaatggcgactgggattcatgtgtcagcgacatcgtttcgctgctgttcgagtccaactccaaatgttctcccgccaaagaatgctttttcaacggagttcacgcccctccccaattgtccctttccgacgtcgaattgtacgggttcagcgagtattggttcagcgtcgacgacgttctttcactgggcggcaaatacgaacacgacaaattcgaacaaaaggctaaggaattttgcgggcagccgtgggcagtgataaaaaggaaagtcaaagcgcacttctaccaaaaggcggactcggagagattggagacgcaatgctttaagtcggcgtggatccacgccgtgttgcacaacggtttccacgtcgacgaaatccaacatcactttcaaagtgcatttcgaataaatggccaagaagtccaatgggcgcttggtgcgattatttaccagatgcgatatttcccattgtttgctgaaagcaaagggattattcagccaaagcaaaaaagccgaattcgcccgcttttctccgcgggtccctccgttttctattttctttgtgttttgtctttggccgcgctactcattcgtattttatggaaatcaaagcagaggcaaatttcggtagcaaaaagaagagacaacggcaaaattgttaaatattggcgactcgacgaggaactatcaaacagcccttgagaatttatattaagaaatgaattattgtcacacctcacttatttattaatacattgtatgtcatttaagttttgtcttatgtttgctttaatttttatattgtaaaatattgggactct

SEQ ID NO: 108067 - DNA, 513 bp, Glycine max
  unsure (1)..(513): unsure at all n locations
  Clone ID: PAT_MRT3847_685C.1
tcgatctatcgctaggaatgtgccaggtgccgtacaccgtgatgtgacacacaactcgtggcaagaaatctgtggtgtgcaaaaattgcagggtggtgtggtggtgtggtgtgggtcgggtcagtggtcagtgtgcaaaagcacacacgctagggtaagttatagtccgtaccttccgaggtaccgtccaaatcttgctgcccactgtgatgcttgtcaatatcctaggtacttgcagccctacagcttaacgcagaacatgcggccgccaccgcagcagctgggtaatattggtggtacgcaaatgcccctgccaaactatcgcttgtcgctcagggggcgacagtgtcacttgatgcgcaggcagcaacggaccatgcccatagattcttaatgagggtagttgcactactgtaggactccaaaccaacagctgctaaataatgngctttcgccttatgagattaggccaaaccacaggcggcaatgggctggccagtctagtacaaactg

SEQ ID NO: 108068 - DNA, 1212 bp, Glycine max
  Clone ID: PAT_MRT3847_68600C.1
taattcttctcttttctctctatctccgttttctctttctccttcttgttcttcttcttcaaatccctagcccccttttgttgtataaatactcagccagaagagctctaacacaagaggatcccgccgacggagaaagtggagcgagaaaaatactgaaaccctccttcgccattctcgttctgctccgtccctctcgatcttcgccagggattctctggcaggtattgttgatctgttcggttctagatcttttcgggcgggttttgttgacggcaccgtcatgtcttccctcagcagagagcttgtttttctcatacttcagtttctcgatgaagagaaatttaaggagactgttcacaagttggagcaagaatcgggatttttctttaacatgaggtattttgaggatatggtgacgaatggggagtgggatgaggtggagaagtacttgtctggttttacgaaggtggatgacaatagatactccatgaagatcttctttgagatacggaagcagaaatacttagaagcattggacaagcaagatcgagctaaagcggtggatattttagtgaaggatttgaaagtatttgctgcatttaatgaagaactttttaaggaaatcacacagttgttgactttggacaactttagacacaatgaacagctatccaagtatggagatacaaaatctgcacgaggcataatgctggctgaactgaagaaattgatagaagctaaccctctgtttcgtgacaagcttcaatttcctactttaaagaactccagattgcggactctaattaatcagagtttaaattggcaacatctttgtaagaacccaaggcccaaccctgacataaagaccctttttgtggaccatagttgtgggcaagtgcacccaaatggtgcacgagccccttctcccgttaccaatcccttaatgggtgctgcccaaaggctggaggtttcccaccacttggtgctcatggtccatttcagcccacaccagctgctcttccgacatcccttgctggatggatggctaacccatctcctgttccacacccttcggcttctggccggacccataggtttggcaagcaagctaataatgcaagctatttttaaagcgccccaaaaaccccttcctttccaataaaccccagcttatggactaatcaaactgggtggattcaagaacatgta

SEQ ID NO: 108069 - DNA, 398 bp, Glycine max
  Clone ID: PAT_MRT3847_68601C.1
ctgcatcccagctaacctaggcctattaccttattccccaatttatcaatatcattggtatcgatcattgaaaaggggattcatcattaagatacacagtcctgtaccacttatataatcaaattattccttaataacatttacatattcttagtgaaaatcaaacaatgcttacaccggaatatgaattgactccttattgcaccgacattttttttacacccaatttatacaatactatcctagcacactggccgatttattttcattcccaatgtactaccccatgcatacaaaatcccaacagcacctcctcttcctataccgctttctttctccttattaaggcgcatccctctctgtctctttttttctctacgccaggttagctgacactt

SEQ ID NO: 108070 - DNA, 327 bp, Glycine max
  Clone ID: PAT_MRT3847_68602C.1
tgctcatctagaatgtaaatggtgctacatgtgatgaggcatgagctttttatattattttaaaataaaaacagtttttgattaaatcaaacacacccttaatgtttggtcctatgtttcaaaaggtttcacatagcaaataacttataacatgtacggcatatacagatattcggatgacaccctttatctcagtatgatataaagatgccttaagttttaagtgaggtattaaatcaaaagggtaaagtattttaagaataaaatcaagttatggtaatgctagtttaatttattgatgtatgatgtgcagaggctggtcaatac

SEQ ID NO: 108071 - DNA, 475 bp, Glycine max
  Clone ID: PAT_MRT3847_68603C.1
acaaaggcaatgtgaatgcttggctatcctcatgtactattccatttcaagtgatgatcacacaacattgagccaagctggtgggaaaagcatgttgaaattggcacaactcatgactagtaactactgttccggggttagtgcttcctccgctctgaagtgggacaaccttcacataagcactctgggagatgacatgaaagtgatgactaggaaaaacgtggatgaccctggggagcctactgggattgtactcacagctgccacttctgtttgggtgccagtgacacggatgaggctgctcaactctctacttgatgaacacttgagaagtgagtgggacatcttgttcaatggtggaccaatgcacgatatggtacatattgtcagatgacaaggacatggaaactgcgtgtctattctgaggctaatgccgttacgccaactaatctacctgctgattctgcatgacaca

SEQ ID NO: 108072 - DNA, 619 bp, Glycine max
  Clone ID: PAT_MRT3847_68604C.1
ccacgcgtccgctatttttacctttggtattcatgccaccgacactcttacttttactctcactagagaacgacgaggctgctttaggacaacgtgagagacgcatttccacgccgacctgcgagcgtctaacgatccagcaggcgcacgctttcatgcccggactaaaatgctgtaaccgcccgttaagccactccgagacctacatggggacgacgcttgacgcgaccttcctcataacgctccgtcaccggagtgttctccgagctgctgcacgcgcttgtgtccggagaacgtctggtgccactgcatcatcaccacgcaccggcagacggagctccgtcgtatcatcaccgagacggtcccgtacctctccttgcagctctaccacttccatgagaacctcgtgcgcagcaagatgctctactcaatccggcgcgcgctggatcaacccctaaactacgcgcgcatgtacgacgcatatcttcgaatggcgaacgggcggcgaatcattgacttctactacaacctcatcgaacttcatgacctggacaaactctggagcatcgatctccacacgcgcttgcttggcgcgccgaagtactgacaaccgatctta

SEQ ID NO: 108073 - DNA, 3904 bp, Glycine max
  Clone ID: PAT_MRT3847_68605C.1
acgacagaaggggacagaagcgatatcatcaagaatattagcgagagtttaagataaaaaaaaaagagaaaatcaagaacttgggggttttctctcagattcgtgaaaatctcgaaagaggaatacgatttcagccgtagttcgattcccttaagatcaaaccctaaatctaatattctcccttccgaatatatttcagaggaaaaaaaaaggaatttagggtttcggtctctctttaccggtgccggttttcgcgatcggcgatactaccttattcttgaccgttcgttagaaatcgtaacgatttatagcccgaaccgttaggcctagggtttcgttaagatgaacgaccaatcgcagatgattatgaatttgaaccagatgaaccaacctcaggttatgaatcaggtgaagcctcagatgctctcgcacaatcagcaagcgcagcagcctcaaatgaagacatcgcagattatgatgaaccattctcagcctcagcctccgatgatgaatcgtggatacaacaaggtttggtctcagcatcctcctctggaccctaacatgaagtttcagaaccctatgaaaccgaactactggagtaactggaaggggaagaaggtaactgacaaacgcaaggaccctagaagaatggaaaaacccattccaagtggaatcgctactcttagtatttccaacagcggtgtcgtcggttaccagcccccaacgctgcacgagttgcaatcgcaaaatcgctttttagcgcgtaagttctatcctgattttgagtttaataatagattcgctccttaggctcgagggaatacgacgtcgtttattattcgtgccaagaagtccggtggcatagcatcgcttgtgtcgccttgtcctgtgacccccgcagtgctgcctacgcctatattgtcgccgtcaagggaggtgttaggggatatggctaaggaggagtggggtgttgatggatatggatcgatgaagggtttgattaggcttcgatcgccgggtaatgaagctgatgttcatgattatgaggatgaagaggacggtgggtccagtgagagtgatgtagaggaacatgtggaggtggagaggaggctggatcatgatttgagtcggttcgagatgatatacccgaactatggaggtgagtataataatgtgttagagaatagggttgatgatcaggattcccatatagctcaattggaggaagagaatttgactttgaaggagcgccttttcctgatggagagagagttgggcgatctgcgaaggaggttgctgtttcttgagaggcagaatcaagctgtggaggatgtgaacgaggaagttgtggagaatggatctgataatgagagtgagggtggatcggatgttccagttctgggaattgagaacaatgttgagatggctgactcgctgccggaaagtgggagagttggaaatgttgaggctggtgctaagttggataatgatggcgtattggaggctgaaggtgtagatgatatttttatggaagggtctgttccaaatgaggctattgcgaagaaggatgagatcagaggtcatgaaatgggggatgattgtgtgtttgatgaagtgaaggagaaggatgagcagcaggatgaagtagtgacacaacagtgtttgacagataatttttttgcaaaagataatgatgttatggataacaaagagagtgatgattttgaaatgctgaacagaaatgaagaatcaacaagtcaaggagcaacagatgaaaacacaaatgacgtggtcttaaatgagaaggatggaagcaagaatcaagtagttgggacaagcttagagaccacttccggagatgataatttgtctgtcccatgttagcaacttaagttgttcatctgaatagacttttgatgggaaggctagagtaaaattaattctacaactttttaatacataaatgttggtaatttgtagatcgtatgttagtggtttacttttattttgtggctatatatttttttaatttgtatgttttggtaatatgaaagattggggaggactagtggttttgttcttcgttgtcatatctcatgtacattaatgagggccataatggctaggaccttattttccttcgttttctttttcctttctggggtagagtttggttgggtaggtctttcaaaaaatagtaagagagatccttaggtttgcaggttcatttgtgtacaagggatttaagtgtatgccaaagtgttatcctaattagcatgtaaagaacctgtgaatttgtgaggagaactaatgacactatgtactgaagctacttttagttaatttcatgcatcaattgattttgtatattttattggttgtttctgttgattatttatcctcccttctcttaatgagtgtctttttttaattaaaaaattatttgtgatgctcactgtttaccataatgaacttcatcagacaatgctgaatagaatcaatcctttttaacgaggaaagcttttcataaaggaccaattatagttttttcttccaatatactactactatcattcacttacatgtaatgctaggttcttgaaatattcttatttacaagttgtgtaagtcacatttagcttgattgatttttggatagattctgattatgcatgagtttctctttcacatgtaagtgaatgattgctttaacataatgtttggtggctttggactccaagtttgattgacagctgtatatctggaacccatctattgtcttgtttttattagaaaaatattgccctttgattgttattcaggggcatctgttcctgattttaattggatgatgcagggggtttcgctattatggtgagggttggtctctagaaaacgatatgcagggaatgctattttagaaatgagaaaatggaagtgtttttgctgatactatttgctgctaggctatacaagtcaaaaggtgtaaaatatgcctgtgacaaacagtttcgtaaatcttgtagttacgtggtattaagagtttgtagtgcatctcaaaaagacagggcaatataaagttaggaattggcgtggaatacgtaatagctgctgcttcatcttgtccgcagacactattcatgcctgcaggctctgcacaactgcacttggtgtcttagcaaaaccaaaagaattgtttgctgagatcattggtcttttcttaattttgtgcctcaacgagttcaatgtgacttggtattattcagtcatgtgtccaggaattgcttgtatggtgaaggagccgatttcgtgatttcagtcttttctttgtcttattagctactctttcagcatgttacgtagcaagtatcacttaaattgaatgcttgacctgtgactttcatgctgttgatcatgttaatggtgtttttcttttctttcttctcttggcccggttcgaaagtagtgtttcttttaacgttcctttatccccgttgcattctgtctcaagttgtggttaaagtgttggcccgttttgtggtgattatttaattaaaaaaaaataatgatttataaaatttacagataaaatattcggtgtcggcaaaaatattagttttattcaatttcgttcgtgaataataaatgaaaatataatacctgcgaggaaataattcttttaacttaaaagaatctgaaaaataatgacttttttaaataattcattttaaccattaatatatgatgccttgaaaattcataaaaaaaaaaaaaacaagcgtgtgattatgttaattgaataaattaatccttgaaattatttcttacactagaatatctttacagatattgtgcaataaatgaatgggtttctaacaacaaacatggagtacagtaatctggg

SEQ ID NO: 108074 - DNA, 520 bp, Glycine max
  unsure (1)..(520): unsure at all n locations
  Clone ID: PAT_MRT3847_68606C.1
gacagaacccacgcgtccggcgataataaccagaattttcgagagagaaaaaaatcaagaactcggaatcagggttttctctcagattcgtgaaaatctcgaaagaggaatacgatttaagccttaggtcgattcccttaagatcaaaccctaaatctaatattctcccttcccaatttatttcagagaaaaaaggaatttagggtttcggtctctctttcccggtgccggttttcacgatcagcgatacgactttattctcgaccgttccgtttgaaatcgttatagccggaaccgttaggcctagggtttcgttaagatgaacgaccaatcgcagatgatgatgaatttgaaccagatgagccagcctcagatgatgaatcaggtgcagattataggtcagtcgcagcctcagatgctctcgcacaatcagggaatgaatcagcaagcgcagcagcctcagatgaagacatcgcagattatgatgaaccagtctcagcctcagcctncgatgatgaat

SEQ ID NO: 108075 - DNA, 324 bp, Glycine max
  Clone ID: PAT_MRT3847_68607C.1
ggaagctatacagtcgagaaggactgttctatcttgatttgcatgggtgcaaaaagctgttgcgcctaccatagcacagagaggagagttccattcgatgcagacgatgatgaatgctcctgattcaaatgataatattgatttactgttgagcattgatttgttgggattacaaggagcaggtaaagctttttcaaacaaaattgtttttgatgataaacttgtgttggctaacacacaataattctttgatggaaattttccagtggattcttggttaccaatatttgtgaagtgtatttatcctaggagtcaattaccttc

SEQ ID NO: 108076 - DNA, 1248 bp, Glycine max
  Clone ID: PAT_MRT3847_68608C.1
cggtcagtactcacgggtcgaccacctcgtccgctctctctctctctctctctcatcactctctctctctctctctaagacacacaaacactacacatcacaatctcacattgttctcaagtttcaacactttctagttctaccatggcggtaggactctccgccgccataaccatgaagtccctcctccgtttccaccaacctcacctgaacctccccaaatcaatcccaacaacactccctttctcccccatgagaattttccaccacacagcatcaccaagaacccaaaaagtttcaactttcaccgtttgtgtcctcatgcaggacccaaaacaaggcacccacatggaaattgagccacaagaacaacctcctcctcctcctcctcctcccgctcaacaagttctgtcaccaaagttggctgagaaattggccagaaaagagtctgagaggttcacttaccttgttgctgctgtcatgtctagcttcggcatcacatccatggcagtgttcgctgtttattgcagattctcgtggcaaatggagggtggagaagtgccttggtctgaaatgtttggcacatttgctctatcagtgggagctgctgtgggtatggaattttgggctagatgggctcatagggctctctggcatgcttcgctgtggcacatgcatgagtcccaccatcgaccaagagaaggacccttcgagcttaacgatgtatttgcaataatcaacgctgtccctgccatcgctctcctttcctatggtttctttaacaagggactggtccctggcctttgctttggtgcgggtcttggaattacggtctttgggatggcctacatgtttgtacacgatggattggttcataagagattcccggtgggccccattgcaaacgtgccctatctcagaagggtggcctctgctcaccaacttcaccattcggaaaaattcaatggagtgccatatgggctgtttttgggacccaaggaaattgaagaggtgggagggctagaagagctggagaaagagataagtaggagagcaagatcatacaaaatagctaatgagaacaactaatacaaatcaagaatgtttcgaagaattatcagtgtaaatcagaaatatgaaataaaatgatccaaaaattttgcttgcatataaataattatttacagcgatactagtcagactttggttaataaaataaaaagaggaaaatattttgttgagatgtgc

SEQ ID NO: 108077 - DNA, 529 bp, Glycine max
  unsure (1)..(529): unsure at all n locations
  Clone ID: PAT_MRT3847_68609C.1
ccctcgcgtccgcccacgcgtccggttcctctcattgacctggaaacttctggaaacggcatggagctgcaagtagaaacatctcaggtccactgttcagaaggagaattaccatactcttgtcaagtagaagatggctggtcaaagacaaatagttactcaaatgtgtattcagtgaaaaaattgaacaaagaggatttttccaaacaatcaggcaccagaaataatgcaccaaaccttgtggcaaggttgatggggatagacaccatgccattaccattagacactaaatctgttgttccattggatgaaagcaaacatggaaatatggagaggaagttttcaaaaaacggaatgaatccaaggggttctgttggcaggggttcctccaactttaattcttctagccatatggtatttgattcattttatcgagacattgatgttggtgatgatcaatgcggacagaattttggaaaaccaaggcctagggaacatcctcaggaaagaggactaannaaattcaaga

SEQ ID NO: 108078 - DNA, 544 bp, Glycine max
  unsure (1)..(544): unsure at all n locations
  Clone ID: PAT_MRT3847_6860C.1
ccggaannncngggncgacccacgcgtccgaattcgagcggccgctttttttttttttttttttttttttttttttttatgctctgtgtgtgcagatggaattctcgtttggtccccgaagatggttgcctaaagaattactgcaagacagacgtgctgatgatgatgttggtaacaatgaaaattatgcgctgggattgcatgctcctggtttttttgataaaattctaaatgttgacaactgcttactgcaatctcatcctgctaataaggtacttgcagctgtccaagaatgttggagagatccacaacttggtttttctccctacagtgttcattcacacaagggatttcttaagcatttgatgctgagaactggaagggatgtaacaacttatcagcctgaagttatggtcaactttgtgacctcttcctacaagcctgagctgttgaagttcctagttgataaagtttctgtatttcctgaagtggtaagtgtcgttaataatgtaaatacatctgttggggaggaagatacactttg

SEQ ID NO: 108079 - DNA, 377 bp, Glycine max
  Clone ID: PAT_MRT3847_68610C.1
cgaactcgctcaggattgcaacagatccaggtgatgcacgatacactagtgcatctactgaggacgtggcgggatatggacagagaaatgctcttaatgttgctaataatatcacagtatcttctgctagaaatgagcattctgagataaattctcatatgggtacatcatggttagagcagtgtgtaacttttaaaacagcgaatatgttgcagatgtatgatactctgacatatgactccataaatagttatggaccatcctttaattataaagaaccaatctgtgtagtagcatcttgctaattcaatggatcaagtttacaagctcaatgatgctgcgcaaaattcaatgcttacttcagatgctaatgagca

SEQ ID NO: 108080 - DNA, 787 bp, Glycine max
  Clone ID: PAT_MRT3847_68611C.1
ccacgcgtccggtttgtgtgaagatttcttatctcgagcctctctctttaaaaatgtttctctctctaaaaaaaaggtccattctttcttctccttattgtctgtgttcttgagagagatatagagagagaaagagaaggaggaggagtggctggccccagcagatcgaaatctcctccttttcttcaacccgatgacgatcttagctgcttctatggtgttccaacaacaccctctttgctattttgtcttacaaaattgttattggtttcagttctagttacccttttggccttcaaatagtgggagtccaaaaaggttctgaatttctctctctctctctctctgatttttgttgatgccttcaatggtggaatctctgtgggattcttgagaggaggtgcttagaggatgtgggtctgaggtatgggaaccaaagtccagaatcttccaggatataactcaatgagagatcttaatgaggaatctagcagttgtggctggccactattttatggggataaatcactaacaaatgggcagtactataataattatctgccaagttctacaacagatgcatgttctgcatacgataaggatgttgtgaagcagatgatgcttgagcatgaggctgtttttaagaatcaggtctatgaacttcaccgtttgtacagaatacaaagggatttgatgaatgaggttaaaaggaaagaaatacacagaaacaagataccagttgaagcgtcattttccgctggtcacatgacatctcaattaacaactg

SEQ ID NO: 108081 - DNA, 425 bp, Glycine max
  Clone ID: PAT_MRT3847_68612C.1
ctcggaattcggctcgaggttctagatcgcgagcggtcaccctttcttattgattatttttttaaagataaccctttcatgttctacaccacgggagataatataaacttgactgagccattgacacaacacaggtgcccaacttcattaaatttaacgaaacacattccaaaacatcattcaatttcacttattaaacaaatatcctaattgttgattaatccacagcaactcatataccttatttaacaacattttaagcaatttacctcaaatttctaacgagactaataaacctccccttcataaacaaattatggcttattaaactgccaaaattttattcaccaaccatcctaaccatgatttttttaaaagcttcctctcttgttgcttcaaaaatgacatataaccttctttaattt

SEQ ID NO: 108082 - DNA, 300 bp, Glycine max
  unsure (1)..(300): unsure at all n locations
  Clone ID: PAT_MRT3847_68613C.1
aatcactctgctcgcagggaccccccaccaagagggaaatggcacccaaaccgcccagcacggccccgaaagacggaccgaacaagggccacgccgccaccaagaaggaaaagccaacacgccccacagaacgaaaggggaaaacaagcaagagggcgcaccccgcgaggaaccncacaagagaggcagccggacccgcaccccaagaaaagcggaaaacagaagagccgaacggagggaaggaaaagagggccccgaaggccgcaaagcgacagccccgacacacacacaacgccccaa

SEQ ID NO: 108083 - DNA, 462 bp, Glycine max
  Clone ID: PAT_MRT3847_68614C.1
ggcccccttcctttgtttcttcttcaacaacgtgggggaaacaaatacacccacatattccaaatccgtgtagacctaaagcatcacaatagtcaccacaaggaatgtgtagtcggtccttgacaatgcacttgattgatgccatataggaccaccctataaccgaaatctccgatagcccaggtcacctattgctcctgaagctatggcaaaaagaggaagaactctttgccaaaccccttgctcaccaggagactagattggacaccatcaaagctgaactctttcaactctcctcattcttcttcatcttacatgccttgttcctaaccctccttataactgcttggaccaaggcccaaaaaacaggccctaccaccccatatcgttggaaacaagtagcggctaccttacatgggggcccttttcacctaccttgtggttgtggaggtcgagcaagtg

SEQ ID NO: 108084 - DNA, 251 bp, Glycine max
  unsure (1)..(251): unsure at all n locations
  Clone ID: PAT_MRT3847_68615C.1
gaagagtagacgcgcagcacgcgacgaagccggaancggccgagggcaagatgataaatggcgaaaaaggcaaaaggagggggggcgcaggggaaggggaagagacgaccaccaaaacaggaaccaggggtgaagaggcccacaacaagcaaataggcgaacgggagaaaagcgggccgacacaggaaggcaacgaaggaaccaaggatgagaaaccgccaggacgcaaaaaaaaggacaaacccaagacg

SEQ ID NO: 108085 - DNA, 573 bp, Glycine max
  unsure (1)..(573): unsure at all n locations
  Clone ID: PAT_MRT3847_68616C.1
agcgaaaaaagtaaaaagtaaaaaccatgatgtctttcttttaataattggcagtatactattttttttgaaagcttgcattgcatactgttttagacaagaagcaagaaagtggaattggtgaattacctactatataatgtatagggtatcattaaggtaaataaaattatattcaatgcaataatatggtgtgatatgattgacgaataattacactccttaagcatgtgatcagaggtctgatcctcaagattcatacatatagaataacatttggtaggacttaaagggagatcaattccttaaatgaattttaatatttcaagagattaattttagactcttggctaaaaaaaccgaaggttaaaaaaaaagaaaatcagattcgaattcgatccactataagtttgtggcatttcgatgtctgttttttcatgatagatagcatagtcactttcaagtccatgaatagcattactaggttgtatgatatangtcatatggatttcaattccattaacttgcccatctttagaagagaaagaaactataagaatcatagcataaata

SEQ ID NO: 108086 - DNA, 689 bp, Glycine max
  unsure (1)..(689): unsure at all n locations
  Clone ID: PAT_MRT3847_68617C.1
accgaacagaactcagtcgcaacttccaacctccactcattgcacagtgcacaccactttcacaacacaaaccctttccgttacaatcaatccattttccccatcctctcattaccctctcgattccatttccatcatttgcatttcggtagagcgagcgaggggagtgtgtgtgactgtgatgtattgtggcgaggaagcgaagcaatggagttgtggaaaagctggggcagtaaatttgcggaaagtgagttccatcgtgcgcgacattggggatccctgcctttcgcagtcgcctgtaaaggtaaacagaatgcttaagccagacaaatggcaagccatgtccgatagtgaaggaaaggtgtttggtttccggaaggcactaaaattgattgtattagggggtgtagatccatcaataagacctgaagtttgggagtttttactaggttgttattcgttgagcagcactgctgagtatcgaagaaggttgagagcagctagaagagagcattatagtggcctgattaaacaatgccaaacaatgcattcaagtgtcggaactggttcgttggcatatgnntgttggatccaaattaatggatctgaggacttcatccaaagatggaccggaaatcgcaagcttaaatagaagaatcaacttnatatgataataatgnttgaagtag

SEQ ID NO: 108087 - DNA, 155 bp, Glycine max
  unsure (1)..(155): unsure at all n locations
  Clone ID: PAT_MRT3847_68618C.1
aaaatgctaatcnatctancacnaatttgtgcttnttcctgtattcatnttaggtgaaggtatnaggancattggagaaaaggaggngggatgtnatanctgaaggtgaaggtgaggggctgaatgannagggtggttntcttagtttgaacctt

SEQ ID NO: 108088 - DNA, 445 bp, Glycine max
  unsure (1)..(445): unsure at all n locations
  Clone ID: PAT_MRT3847_68619C.1
atgctatggaggtaggtttgaacttccacatgggtttgttgaggaggaactccaatgattaggaaattgattggtttctgaataggactttacgaggaagtatgccaaaaaattgaaggtcctagttctcctttagagaaaacttaggtgcagtgcgtaggacctttgggttctattctccgatcaaaattgaagtttcatttcagtaacccaccacaccaaccttcaatgcctgggttatcaagatgaaactcaattntggttaatcaacaacaccggaagtacctctatggtactgaacctaaattttctgcctcctttcttaatttaagaaagacgaatagaatataagtttttacgaacaatgttctggccttttaggttgtatgtgttgagggattgttgtagcaattttctttggattatgcaatggtctattagcttg

SEQ ID NO: 108089 - DNA, 581 bp, Glycine max
  Clone ID: PAT_MRT3847_6861C.1
ttccgattagagtgctgtacatatgataatatccatggacttgttcggagagaagaacgagcaagtatcagacgtgccgatggacgtggacgactccaaccctctcgagatgcttcgcccagggcgacatcgtcgccaacaacgatgtccccgacgccgatttcttcactgattgtccgagacgatttctcagcactcatgcatatctgctactgcccctctcttcttcatgaggattcacggagatacaattttctcgaatacggatacttcatttcgaaaggtcctcttcattatgtgcacagaattacaagactgaacatcgggttgccactattgatgctgggattgtcttgcgaatgatatgaggtctatcttgatgggctctttgaggacactaacttgtgtgccattcacgcctggcgcgggcccatcatgccctttgcatatctgctggcaggaaggacccaagctgagcggtgatctgaggcgcagctctctgtgtgttgtgacagataatatcagttgatggctgcgtcttgttctaccagatactaaaaaaacgtcctgatgaaccctat

SEQ ID NO: 108090 - DNA, 432 bp, Glycine max
  unsure (1)..(432): unsure at all n locations
  Clone ID: PAT_MRT3847_68620C.1
ggttctagtgtgtgattgttgttgttgtaactcgggtctcttcctttggtggtccggggttggggttggtttttctctcaccctaaaatgtcttgctgcgggggtaactgtggttgccgaagctcctgccagttccgccaccggttccggggcttctagattttccccaacctgagcttcacttagtcaaccaccacccagaccttggtcattggagtggcacccgtttaagctcaatttgagggtgctctaatgggtgtgcccgctgagaaccatagctgcaaatgtggaccaaactgtttctgcgacccctgcactttcaaatgaggtgtttggagagcaaacttcaagcacagatagccctttattatgaataatgatgaactatttatgtgtngctcaaaacttatgtattatgtctgtgatgggttt

SEQ ID NO: 108091 - DNA, 269 bp, Glycine max
  Clone ID: PAT_MRT3847_68621C.1
gtgtttgagaaacttggaccaagcttatacggtttgcttcggaaaaacaatggtgggtcatttcccattgatcttgtccgtgagattggcagacaactattggaatgtatagcattcatgcatgacttgcgcatgattcatactgacctgaagcctgaaaacatactactagtttcaccagagtatgtcaaagttcctgactacaagagttcatttagaccaccaagttcttatttaaggagagttcccaaatcaagtgctataaaggt

SEQ ID NO: 108092 - DNA, 236 bp, Glycine max
  Clone ID: PAT_MRT3847_68622C.1
ctcggaacacccactgaggtgttatgctctgaagcaatcaaattatgagcaacaaaacaatggtcccgaggaaggcttatctacgctagctttcagaaactgtatatttctacgacgctaatacatcatagagcgtgtgcgctacccccctgatgcatgactggtgtccccacgaacagttgtgctgttgatgagacacacacattgttttaggaagaatggtatgcaccatgttc

SEQ ID NO: 108093 - DNA, 489 bp, Glycine max
  Clone ID: PAT_MRT3847_68623C.1
atgtataaagaacgtggatttgaaattaaaccagaaatcgctggacttatgatttcagctataatttctgatagtttattatttaaatcacctacctgcacaaaagaagatgtagatgctgctcaagcacttaaagatattgcaaatgttgatttagaagcatatggtttagaaatgttaaaagcaggtgcttcaactacagataaatctgctgaaacacttgtcaatatggatgctaaatcattcaatatgggagattatgtaacacgtattgctcaagtcaatactgtagatattgatgaagttttagatcgtaaagaggaatttgaaaaagttatgttagaaatgagtgccaatgaaaaatacgatttattcgttcttgtagttactgatattattaacagcgattctaaaatccttgtagttggtgctgaaaaagataaagttggagaagcatttaaagtacaactagatgatggagtggactaa

SEQ ID NO: 108094 - DNA, 314 bp, Glycine max
  Clone ID: PAT_MRT3847_68624C.1
gggcgccccccttttttttttttttttttgttaaaaagggcaaggatgaactttattattaatagaaatcctagttagctgacactcctaagcctatgtcatatcaagccgagaactatactcaaaccagccttagatccagcaagacctcagcagtaggctccacccagtagatatcatggcccgcagcccgctctaaagccccttttaagggaacagagctgcatggcacccccaagcatccagagagggacccattatgcatctctgagatagtagaaacatcctcccagcacaaaatggccaggatgagg

SEQ ID NO: 108095 - DNA, 437 bp, Glycine max
  Clone ID: PAT_MRT3847_68625C.1
gacataaaaaactattggaacacccatttgaagaagaagctgaaacaaagtgatcaaagtgggagtgatgaaggtgttgaccacgagggacattcttcttcttcttcttctatttcacatccaaagggtcaatgggagagaagacttcaaacagatatccaaatggccaagaaagccctgtgtgatgctttggtctttcacaagtcagcaacagcaacaacaacaaaccttgttgtgcctgatgatgccaccaaaccttcttcaagttctcatcatcaaccctacaaccatgcatcatcctcatatgcatcaagctacgagaacatttcacgattgatggaaaactggatgaaacccccaaactcaacgaataattcaccagggtattattcttccttcagcaacatggtcaataataatactagtactacaggatc

SEQ ID NO: 108096 - DNA, 344 bp, Glycine max
  unsure (1)..(344): unsure at all n locations
  Clone ID: PAT_MRT3847_68626C.1
cttttgtactctcattcttcttgatccttcttttacttcttctactctaacatcacacataagganatgttcataaactcctggccacctccaatctatatcaaactcataattacacttacttaacccaatatcaaatcttaatacaaactataaaactcaaactaacaacattccttttatactacaaatgaccccgattcacaaaaagattcccattctcatacacaataactaacccatttaacaatccctcattgaatctcattacatcgatgatttttgccattacacccattacttgtttccttctgacccttatcatacacctcaacctacattct

SEQ ID NO: 108097 - DNA, 498 bp, Glycine max
  Clone ID: PAT_MRT3847_68627C.1
gaaaccaagcctataaagataagcagtggcaaaaagccattggattttatacagaagctatcaaactctgtggtgacaatgcaacatattatagtaacagggctcaagcgtatctaggacttggaagttatcttcaagctgtggaggattgtacaaaagcaattagtcttgacaaaaaggtaactttcttcatagaacgttttgcttagaagtctatgtattttgccatcatacactgacaaaagcttgtcttcattccaataacgtacgggtgttgcaaatcagggctttgtaattgaatcaccaagtactattctttggcatactaaaaataaaattgttttgcaaaattactaacattttgagttgtataattgggtgcatcagtttacatccgtggatttataaaccttctctacttggctcttgcaagaataataaaataaggcacaaaagagaaagagggtcttaatgggatgaagcaggaaaaagatgctt

SEQ ID NO: 108098 - DNA, 826 bp, Glycine max
  Clone ID: PAT_MRT3847_68628C.1
ttgcatgcctgcagcgatgaaggagcagaaggaggatatagccgagttcatggctagctttaaaacgtcttcagactatctcgcccagtacgatattataacatcctattcttacagaaaaacagcataattcctactctttaaaaagaatggcatcatttattaacaatatcggcatcgcacacccagggtcaagaaagcagttctatactaatgaaatatatgagtcagtataaaatcttacaagtgcgatactggtattctaaacacaacttccaaaggtcgcccattcttcttgagtttcctaccttcttgaggtacgtctcagtctattatctcgctttctccgcagtatcgataaataagcgtaatatcatcattaggaagacactgcccatcttgaataggattttagctactaaatatgttgatggtctttatgaaaaactattaactaggaatattatgctacccatatggaaagaagacgctaggggaatagaaagaccatcaaataaacgaagtcaacaccaggtcttccgaagcattaacaattacctatttaatatgtactcagtccgggtggatatctcactacattgacgcagtttgttcaaagacgaacgccctgaattatgccatctgcttaggctttcaaatatggtacgctctaatgccaagccttatgctggtcttagggtattatcatcaaatctttaagccagaggtagttaaatacatcaaggacaccataggagtatggcacaacgatattgtcaagatcgcatcagatctaatagggcataatgaattcttcatgcagccc

SEQ ID NO: 108099 - DNA, 513 bp, Glycine max
  Clone ID: PAT_MRT3847_68629C.1
ggctcgaggttcattggacataggtgtggtggtggtgaaatggaggagggaaagagcaagtctacattggcgaagaatccgagccgcagccggaatccgagccggcgtgtggccttggacgtgccctcccctcgccacatgggctccaccctcagtggcatccattcctccatcgaccaccttgacaagggacgttaccacccatgttgctttgcatgttgtgcatggtcatgccttattgtgttcatcttaatcatagccattctctttcttggtattacctacttggcttttctcaagtcagggatgccaaaaattaacgtgagagccttcaacataacaaagtttcaagttgatgatgggtcacaaaagatgaattcggttataggcttaggattaatattctctaacaagaatgataagcttaagcttttgtatgggcctcttgatgttgatgtcactagtgaggatgtgctattggggaagaaaaaacaaggtggcttctctcaaaag

SEQ ID NO: 108100 - DNA, 468 bp, Glycine max
  Clone ID: PAT_MRT3847_6862C.1
gcaagtcaaccaaatggattgacttgcaatgtgtgtttagaaatcttgagaaaaaaaaaagaacttgtcctaccttgcatctgttttaaattactggatcgttttactacaggattactcttattcagaagttggggtatgctcctgaaacaaattttggaatttccacgaaatattataaaaatttaggcagaagctgattttactaatattgatttaaatatctttaatctttatatctttttgatgtatattgttttacataatagggaactttacagcaataacattactggccctattccaagtgacctggggaatcttactaacttggtgagcttggatctgtacctgaaccatttcactggcccaatcccagattcgttgggcaagttgtcaaaattgcgtttccttcggcttaacaacaacagcttgtcgggtcctattcccatgtcactgaccaatatt

SEQ ID NO: 108101 - DNA, 353 bp, Glycine max
  Clone ID: PAT_MRT3847_68630C.1
agggactagtccataaacattaattggcgttggagaacggaaaccgaaactacaggttgaggaagattaattctgataaagcaaaagcgaatgggaatgtagttcaagaaccacagaggggggggtgcggatgcttatgctatgttaaaatgacaatgactcctaagggcttgggctcgatggagatgaagctcttgcattggacttcgctgacgatttcaaagatactgatgcagccgaaggcgtttgcggatgcagcctttggcagttgcatctacacctgcaaatgataagcgtcagcgcacataagcatatgccgcatggaccaggtgcagccatgatcataataaggt

SEQ ID NO: 108102 - DNA, 1276 bp, Glycine max
  Clone ID: PAT_MRT3847_68631C.1
acgagtgcgagaaaacaacaaaaggggacaacacaactcagtcggaaattattggaaagatctattgggagtaaagcggcaaagcaagaaagatgcaggattaggtgtgtggatagggagggtccagcgtagcgtactacctggcttctgttctttctacccacgacttttctctcaaaccaaccacatcattcaactattgcactgccaaggtttggacagtgttacgtgcttcacgaaacatgacctctgctcacgaccttactgataatgaagatgatggacagcagcagtcagaatcacaaattcagtccccttctgcaaatggaatttctgatccagatattagtacccagaatgtcaatgtacagtatgcaacacctggccagcttggaactgggcatgcaatggtaccacctgtgtatccatatccagatccttactatagaagcatctttgctccctatgatacacaaccttatcccccgcaagcctatagtggacagccaatggtccatcttcagttaatgggaattcagcaagctggtgttcctctgccaactgatgcagttgaggagcctgtgtttgtcaatgcaaaacaataccacggtatattaagacgtagacaatcccgtgcaaaagctgaatcagaaaataaagttataaggaataggaagccatacttgcatgaatctcgacacaagcatgcactgagaagaccaagaggatatggtggtcggttttctgaattcaaagaaagacgagaatcagaatgatgatgtgacatcagctgacaaatcacaatccaatatcaatcttaattctaataaaaatgatcaaacctcatcagataggacatcctaaactactgagacgacgataccttagacagtggagatctatattgtatgtcacaagatcaataatacctgccttggatatcccacttttgcttcattctggctttgtacaacactgtaggttgtgtggtaggtagcgttagtatgtcgcatgatgcaggtaaaatgtaaattgaagtgattttatcaaatattgacctttggtaggggagatttttatggtgaacagcatttctttgtatttggtactgtagagaggttagagattggtattttgtttggttggatcgtatttatttaccttgctagtgacagttgaagaagtttcaaccatgattggtgatggatattgatagttgtttttgttcagtgattaatagatagataaataagattcacatgacttgctgatattg

SEQ ID NO: 108103 - DNA, 323 bp, Glycine max
  Clone ID: PAT_MRT3847_68632C.1
agtttttttttttggactaaccaatcaatataattttattttctttctttccaaagaaaaacaaaattgataccatcaaacccaaataataaacttcacaactatacaaatgcatatctgcaccagaaggaaacgggcagcttcgctgggctacgatgtttaagcaggaaatgtttgtatatttttctaaaaattcccttcatttaccaacgatataaaccttcacctataaaaaatttttgccccaaataatggcgggggatgatcctttgaggcatttcacttttagggcacgggaccaagcatcccatccgcgtttgggg

SEQ ID NO: 108104 - DNA, 666 bp, Glycine max
  unsure (1)..(666): unsure at all n locations
  Clone ID: PAT_MRT3847_68633C.1
ccacgcgtccggaaagatgcaggattaggtgtgtggatagggagggtccagcgtagcgtactacctggcttctgttctttctacccacgacttttctctcaaaccaaccacatcattcaactattgcactgccaaggtttggacagtgttacgtgcttcacgaaacatgacctctgctcacgaccttactgataatgaagatgatggacagcagcagtcagaatcacaaattcagtccccttctgcaaatggaatttctgatccagatattagtacccagaatgtcaatgtacagtatgcaacacctggccagcttggaactgggcatgcaatggtataagatagacacacattgctgttgttttgtcattgaagcaaattgactctgaatattagcaaatcatgatgaaaattttccccaggtacccacctgtgtatccatatccagatccttactatagaagcatctttgctccctatgatacacaaccttatcccccgcaagcctatagtggacagccaatggtccatcttcagttaatggggaattcagcaangctggtgttcctctgccaactgatgcagttgaggagcctgtgtttgtcaatgcaaaacaataccacggtatattaagacgtanacaatcccgtgcaaaagctgaatcag

SEQ ID NO: 108105 - DNA, 440 bp, Glycine max
  unsure (1)..(440): unsure at all n locations
  Clone ID: PAT_MRT3847_68634C.1
gccggcccttttttttttatttttaaatatttgattgtacgatanatttaaatttcaagggcgtgcacgagggttaatgagtgacagccaaatgagaaccgaattcatgagacatattagatacgagtattagcattcagcttattacaaacaaacataatccacaatggacagtcttgtgtttctccacattcaacggagatatccagaatattatgtaccacgaatgactgcatagtacgtataaactaacagtataaatgacatcaaattgtgttatattgccccattcttatcgcgtcaggcacacgcacgagagcttttggcatattaggacagtgactcttcttcattagacagaccactttctnctaatgcaactccacactggtgaatgcatgtcgcacgaagcgtttcacgcgtgcccgagcatcgttcca

SEQ ID NO: 108106 - DNA, 1511 bp, Glycine max
  Clone ID: PAT_MRT3847_68635C.1
aattcggctcccggtgaaaaggctgttacacacactgccaccaaagaggcctttttcctccattttgacgtgccccaaatcagagttttttctttccacacacacacacactggtggttgagtggttcttctcaaaatgggtgagaaagatgatgattttgggttgagtttgagtttgagtttggggagagtgaaccaacaacaacaacaccctcctcctttgaatcacatgcaccagcctcaacaactacaacctgttcccatgaatcacaataagactctctttggtgatttgtctcagttaccagaccggagctccgaaatgatacgaggaatcgacgtcaattcggcggcggagtgcgacggcgtttcctcgccgaacagcgctgtctcgagcgtgagcggcggcgacggcaagcagagcgagagggacgacgataataatgctgccgccgtggccggtgagaggacctcgtgctcgcgagggagcgacgatgacgacggtggtggcagcgatgcctcgaggaagaagctgaggctgacgaaagaacagtccatggtgttggaagaaacgttcaaggagcatagcacgctgaatccgaaacggaagcaagcgttggcagaggagttgaatctgaagcccagacaagtagaggtgtggtttcagaacagaagagcaaggaccaagttgaagcaaactgaagtggattgtgaatacttaaagagatgctatgagaatttaactgaagagaatagaaggttgcacaaggaggtccaagagcttagggcattgaaattatccccacaaatgtacatgcatatgaaccctcccaccactcttacaatatgcccttcttgtgagcgtactcactcctttgcatcctcctccactgccaccatccactcggcggtggcggccacatcgagcaatcgcaaactgttcggcacaaacatccggctgcccgtgtccttcaacactcggccatttgaaggcccaattcctcggccataattggttgaggcctgaggacaatgtgatatttataatgatgtctagacatttttaattactagacatgtatgcatggaaaaaaaatcaaattgcaacggaacaccaatttgtggtttttgttaggaatcaaggatatgagtttggacttggttaagtcttcagtgaagggttgttctattttgtgtatgctataagttatagctagtcaacttcaggatttgtgtagggtagatatgttaccggcgaggtatggtttgagtggggtaagattttcatatgccgaatagtactagcatttattagtttagacttataaaaagaagagaaagagaatccgaatctgtgatgttctcatcaaaatggagattaacgtggaggaatgattgtgatttctcaattggagttttttgtctacctttgcgtagatgtcctagaactacagatgtaaataaataaataaataaacaatttttccttcagattccatgaaggagtagct

SEQ ID NO: 108107 - DNA, 544 bp, Glycine max
  Clone ID: PAT_MRT3847_68636C.1
taggctgccagaagactacagaaggggaatgtaaattatgaacataggataggaaatggcaaaaatatgctgctggagtggaacacctccactacaacctttacacaagcagtttcgaaggaatcacggcgtccaaaactgctcaaacactaacacactgaataggaggaagatatatgcatgcttgaacagagaaaaagaaagtgaaacacctcagatattgaaaatagcggtgagcggggtaacggaactcttgaggcttttctctccttcttcccatcaaacaagccttgagaaacagagagatcaaattgaattcccagcttcgagcgtcgatgatgttctaaggatcatcaagtcttattacgacaacgcttatttcgtaacagggaacttctcttcttcaatttatgctgagaactgtatctttgaagacccaactattaaatttcgcggtagggagttatatgcgcgcaacttgaaattgcttgttcccttctttgactctgcatcaattatactacaaaagattgataaggatgtt

SEQ ID NO: 108108 - DNA, 489 bp, Glycine max
  Clone ID: PAT_MRT3847_68637C.1
tccacgcgtccgcccacgcgtccggcttctcaggtcgcctgcagtgccaatccgtcaagatggctcccaacaacctccccccgatcttcaaccctacgtctcaggacattgagatgcttcttgctgctcaggcccaccttggtagcaagaacctccaggtgcacatggagccatacctgtggaagaccaggcctgacggcattaatgtcatcaacattggcaagacctgggagaagattgtccttgctgcccgtatcattgttgccattgacaaccccgccgacatctgtgtcatctctgctcgtccttacggccagcgtgctgtcctcaagtttgccgctcacactggtgccgtcgctatcgctggtcgtttcacccccggtaacttcaccaactacatcacccgctctttaaggagccgcgcttgatcattgtcacggacccccgtaccgatgctcaggccatcaaggaggcttcctacgtcaacat

SEQ ID NO: 108109 - DNA, 257 bp, Glycine max
  unsure (1)..(257): unsure at all n locations
  Clone ID: PAT_MRT3847_68638C.1
gcgagcgtcgatgccgatatcggcttcgagagagatacttnncctcttcagtttcgcttgattttagggggttttgcattcggaatagaggcggtagtggcggccctagatgtggattgagacacgtgttatggatgattcccagcatggaccgattgcatcatatttttctgcagaggaaggtctcatgatatattagatgatnaattcaaannctgttcctcatcttcattnnnctttatctgagtacttccctg

SEQ ID NO: 108110 - DNA, 909 bp, Glycine max
  unsure (1)..(909): unsure at all n locations
  Clone ID: PAT_MRT3847_68639C.1
ggtacgccctgccaggttacccggtcccggnacactccccgggcttcgaacccaacgccgttcccgcggnacgccgttggggttttttgggaagtttgatactcccttgaaggcccttttaaagaatgggacctccaactttgcacttcctctcttagaagatttcacttgaacaacttggtccgcacttgccttccacttggagacctaaaccaccaaactctgtttgacttctgccaaaagaaggggccagaaaagttagccacttaaagacatgtttggccagcatatttcttgaaagacgccaaccaaaaaaactggtttcgggagggccaccttttgaagacttgaatgactgaaacctttggtaaagcccaactcatttcaaccggaagactcttacatcgaatattaccttcaaaaagcttaaatttacatcgggactgaaacctaaaaataattggaaggacatgggaaggtttgggtttngtgaaaattgaaagaaatctttttcaagaaaccatgaagaaacttgatgtgtgggcattcatttaagaaaaaaacaaggtttttagtgaaaatgttttggtttttatgcaacactttgaaggatttgttgagcatgcggtttggatccaccagaaaccagtaaagatgatgcaatgattcagaaagatggcttgtgtcattggagaaggcaaaagtaactttaaacagacgaaactccaattctttttgtcagcttgagaaagcgcaggtaaaaaaaggtgccggaaagnggaaacaggncaaggtcanaattgtgaattactaccccatatatacatnatctgtggcatacatggaagcaatttagggttctaaatcaaattcagtgaggaaaagcaaattttacccgaagtaattgat

SEQ ID NO: 108111 - DNA, 1161 bp, Glycine max
  Clone ID: PAT_MRT3847_6863C.1
caggctggaacgagaaaggaggccaccagaaaagcatggcaattttctgcatcaagtatggatgcaacttatgagcctttaatttgtggtagcatataacaatcaactttggttcatcaaggtctgtccaaattcaatcaccaaatttaatcctctccctatttatgtaagtccacccactttatataccaaattgaaatttggtttgttcaaatttatcagcaagttatggtcaaggtgaatttctgcacccttttgctaccatgtttgaaaggttgagtagactaagccatgatctattgcagcttctgatttgttagtggttgaaatccttaagggtgatgatcaaaagggtatcatgcttcaaactagaatcaggactggtcatgccacaggtttggttctattgttactagtgttattattatattattatactactggtgagtaaattaaagtaactagagcttgaaatttcaactgcctttactggggaagaagcctaattgagtgttgaaaagtaagaactaaagacttttcaaagtggttttggagcaatgggtggttcttcttgctttttcataatatgtgttctgcattctgcaatagctttgacttgtggatccctgatggtgttttattccaaagagttaagtgtgttggggcatggaccaaagactgcaagcaagcttcaagggtcaacaccccatgatcagtttttgatccaaacctcagattccttctctggcttgctgttgttcacaatagggttccttgtgttcatggttgcttgtgttaaggactgggagttccagagtttctttgccaaagggtgtgtgcttcttcatatctctatggcagtgtggagattctactttgaggggaagcttgaggatcttgcgcatgactggcctaggcatgctgttggggacattgcattggccacttcctggctcttctttcttgtgtacatgtggagggagaagtatgattagttagttattgttgtaaagtagtataaatgttggggtctcacatctgaagaaaattctttggttttgtgttgtgatatgcttgtttgaatcatttatgtacattttgtagagttttcaatgtaagtttacccatatttgatctcaataagttaagaataaagtaaat

SEQ ID NO: 108112 - DNA, 340 bp, Glycine max
  Clone ID: PAT_MRT3847_68640C.1
aacctttgggctgatttatgtgcttgcatggtcgtgagaagatgatagaagggtgtcaccacgggaaaaaaaaaaaaaaaaaaaaaagaaaaaagttgtttgccccaagggcttaaatcccttccttttccttccttaatctacaatccccccaccagggtatttaaacctaacctaaccgtttgtgccccataattcttcgattcggaaaatttccgttccatttaattcaaccgttccctaagaaaacttttcccctttaatccgttccacaattaaaaagttttgaattacttgttcccttaataaccggttaattccaaccggtaaccggattttt

SEQ ID NO: 108113 - DNA, 714 bp, Glycine max
  Clone ID: PAT_MRT3847_68641C.1
tcgcccacgcttttgaggacgcatgggcccacgcgtccgggtcattttagcggcagatatttgtctctgcggcgcagggtaagaagcagaacacagaacagagcataagctacttccattgctcccaacaccatcatcttcatcattattttctttctcttcactcatgtcactgtgattatggctcttgtacccactcgcccattcttcgattcatttcattcttctcccaacttccactctctccgcttctgcaactccctcttccgccactccctcacaccctctcccaattccactttcctccgtcgcaaaccactcttcatctttcgttgcaaccctgccaagagtttctccaccgacaaacactggttgaagcgttggaacgaccccacaaacaaccacgcccgtccgaagccgccatgtgctgttttggactattctgaaaatgggcacgcgtcaaaatccggtcttgcgagctctgacgaggagggtggtgatggaaataccggtggaagcaccatggataggattgtggaaaaactgaagaaatttgggtacgttgaagatgggattcagaataaggagagggtgatagaaaaagggtcagtggaggatatattttatgtggaggaaggaatgttgcctaattcacgaggtgggttttcttcagaatctccattagggtttggaagctttggaagtgatgatgga

SEQ ID NO: 108114 - DNA, 429 bp, Glycine max
  Clone ID: PAT_MRT3847_68642C.1
acctttgaatcacctttgattcaccatgaagctttgcttctacatgatcccattcgtaacatccctaattatcgacttctcggtggctctcacactacgacatttcactcaacatcattgttgataaaaaatctccataggtatccttttctacgacctcgatcactagctttgacatcactcaactgctcttaagatcattgactatcctcacaaaccaacaccaaacattttagcatgctttgtcctaacctaaacactttctaaggaaccttctaagaaggcaaccattccaatacttcctccagtcgaaccttcttaaatgtaaatttcttaaattattaggtatttgaaagtaaatgcctcctggtggtattaggaggacccaataatttctttaagtcaccctccactggataatctcatgcc

SEQ ID NO: 108115 - DNA, 218 bp, Glycine max
  Clone ID: PAT_MRT3847_68643C.1
gctttgcaaccttcctcttctccaaagcttttattgctaggagcagcacttaacagattgggagtatggtcaattggaacaggaattattcttcctaagacatttaatttggtgttgaagccccggctttgatgcttaaaggtgttgaaaaacttgcccattccctcaaaattaccattggcccttaagggccttatgtggttattggaccaaagttt

SEQ ID NO: 108116 - DNA, 1219 bp, Glycine max
  Clone ID: PAT_MRT3847_68644C.1
ggctcgagaagacaaggtacagatatacacataacaataatctgataaagcctcctccttccttctgttttgtcatcgtgaatgttcacgttttttcacatacacaaaaacaccatcaaaagctgtatctataataagaaccgagagtaagaaccatcactaactgcatatgcacagagagtgtgtatgagaacataaagcaaagtcattttgtgaaggtgaattgctgaagagatagcagatttttgaaggaagatgaataactctgtttcagaaaacagtttcatcattgagagtgatgaagaagatgaggagaaggatttgaataaaggtggagttgatggaaacgattctgattcttccaattactcaaatgaaaaccctccacagcgaaagcccagttcttacaacatttcatggcctcagagttacaggcaatctattgatctatatagtagtgtgccatcaccaaacattggatatttgggcacaccttctctgtcaagactaagcagttcttttctttctacatcattgacaaggaggcacactcctgaagcacttccttcagtggcaaagcctctgatacaagacacagaagatgagcagcatcagagacgtagctctcacaccttgcttcctcctcttccttctagaaggtcttctttgattaagaaggattccaaggttattcatcatgaagttccctctggccactgctcttttggacaagctgtgcttaatggcataaatgttctttgtggtgttggaatcctttctacaccttatgctgccaaagtaggtggatggcttgggctttctatattggtcatttttgcaattatttcattttatactgggctgcttttgcgttcctgcctggacagtgaacctgagcttgagacgtatcctgatattggccaagctgcatttggtactactggacgtattgccatttcaatagtattgtacgtggaattatatgtaagtaccgatgccttctctcagcagcgagtattccgttcgtagtctctacctatagtaattttttaaaaccaaataattataatgatgaaaattaaattctgagtggctacctatttggattccacagttgcatcttattggctacctattatgatgacgtttttaaatttctagcaactactttgcctattgaatatttcttcatgcaggcttgttgcattgaatatataat

SEQ ID NO: 108117 - DNA, 293 bp, Glycine max
  Clone ID: PAT_MRT3847_68645C.1
aaaacaaacatgggaccgaaggaggagacgaacaggacggagagaaagcaaagagagggaaaacaactcaatcaagcgacaacacggagagcatggacggatagaacaagcacgccaccgacggacaggccaacaccagccgcacagaaatgatcaacacgagggacagaccaaaatgggaggcatggaaagccatcgaagggacacccaaggacgaaaaaaggagcgattacaggaaaaacgcgaaacagactgctggaagcagccgggcgcgccggctagacaacattcgc

SEQ ID NO: 108118 - DNA, 298 bp, Glycine max
  unsure (1)..(298): unsure at all n locations
  Clone ID: PAT_MRT3847_68646C.1
catgaaggagaccacaaaagtgatcaacaaacctatgattacaatccctattgtcaacaatgaccccaacctaactacctcggattccgagttcagacaaacctctatctcattggtggcaaaattcatgagggtaaaagcactcctcgaacccctttcctttaaggacatatattccattctcaaccctatatctggtcactacattancttcaaaccaaccactactattcccaacaaacgaaaagcatagatctttgaagaactcaacactgctaacaanacggctctaaagaga

SEQ ID NO: 108119 - DNA, 487 bp, Glycine max
  Clone ID: PAT_MRT3847_68647C.1
cggcttgccaaagttattgggttgtacgtacatggtgctgtaaacgtgatcgaatacgccatactcctccgagaactacgtttgctcgtacgccagtcataaacaccacttcactaccagcttagtgcagcgtcctgagcgactgctcaattgcaacaccaagtgcaccaatacctaccacggtccagagccacttgttcttgagctcgtccatgctcggccagaaggcgttcttgtcggcgcggaacttctgcagctctgcaaacttgtcgggatgagactcagagtagcggcgcacttgatgctgctccttctgcttgtcaccaccaaagaaacgcaggaagcagtagttagcgatggggccgagcagctctaccggtgctagcatgtcactgccatagagcatgacgatgaaagagatgtgaaccagggcgtctccgagatagttcgggttgcgcacaatactccagacaccttcacggaggat

SEQ ID NO: 108120 - DNA, 293 bp, Glycine max
  Clone ID: PAT_MRT3847_68648C.1
gcgtcagtctcaatctcaatctattattattattcctcaattaataatgggtgttttcatattcaatgatgattacatatcccctgtggtccatgcaaatcttgacaaggttttagttacatatctcgacaacatcttcccgatggcacatgattccttcaagagtgttgacaatgtttacggaaatagtggcacaggatacatcacgaatatcactttccttgaggatagataattcaagtttgtgctgcatagaatagaaagcattgatgacgctaacttgggatacattt

SEQ ID NO: 108121 - DNA, 389 bp, Glycine max
  Clone ID: PAT_MRT3847_68649C.1
atataacataaaacgggtggagattaataacagtacactaacatgattacttgaataggaaataaaggtatactatatacacaagaatttaaataagaatataaaatatctgagattgaatactttttatacacactatgaaagacaagacagatttctaaattaatatttattgcaacatgccatatgactcacccggagatagacgtttggctgccaaaatattactgaacttgtattgagatactatgaataaacttagcctgttccaaagtcacaaatctgaagcgagaagactgaccataacagacttttttccaccttatattgcaaaagctaattccgtgtgaatacaatggtgccatataatggctaaaatcttaaccaat

SEQ ID NO: 108122 - DNA, 262 bp, Glycine max
  Clone ID: PAT_MRT3847_6864C.1
gttctgataatgcatttagaaccaatctcttaatgttattttgaaagctagctcgctattatttatcagcacccctaccttatagataaaatgtactactagacgctcttctattttgtgatgacatcccaaaccagacacagcactatgtgactagccttacctctctgtctcaaataaccaatggcttaagggggctggccttgacgactctattaaggcgcctatttgatagaaaagcaatccgcacaactatgggggg

SEQ ID NO: 108123 - DNA, 271 bp, Glycine max
  Clone ID: PAT_MRT3847_68650C.1
gttaataatcgatgttgtattaatcaaataaccgatgtacaataacgtttatgcagtagtggttgtgtttgaagattgagggctatatatcttttgggtcgaattataattcgatcctcataacttagcattgatgcatgttgtgcttgaggttcaaggactatttatccttccgatcggatcacaatttgatctcacaatttagcctcaccttatgcttgagacttgaaggttatgtatccttcggattgaattatgcgaccatgcattt

SEQ ID NO: 108124 - DNA, 300 bp, Glycine max
  Clone ID: PAT_MRT3847_68651C.1
ggttggagggggagaccccaaataaccctcaacaggggaggtttattctagctggaaacaggcaatctcatcttataaaaaaaaagcttgtgaaaaaaaggaaaaaatttgggtgaaaaaaaaaaggggttgaaataaaagattcccccggggcctgaaaatttttaacttccaaacgcaaaaaaaacccttttttgggggggggaaatgagcaacccttttgcgaaaaaaaaaaaaaaaatgcggggaggggtgttgcccaaaattcataagggggtccctcctggccgcttctaaacc

SEQ ID NO: 108125 - DNA, 577 bp, Glycine max
  unsure (1)..(577): unsure at all n locations
  Clone ID: PAT_MRT3847_68652C.1
cggtnccggnaattcccggngtcgacccacgcgtccgattacattcaagctgggtctgcttcctggaagaaccctgtctaacacgatgatgaggacacaacgttggataggaaattggtgtgaagattctgctgaataaaacggtgttgacagagcaatctcaaaaggtggggataaaagtaataaaagtgtaatagggtcgatgaaacataactagctgtgcaaaccacaaactccaaaaccttctgagatgaacccgctgactagctgtggagcacacaaaggaagagcacctagaaaaggtctgacttcagaccatactatgaacaagcctctacctaccaaagagccaaaactgatgatgtctatgaaggcaataaacggtagttatgtactgtacttacgctctgagagaaattaaacatcgcgagctgtatgaatgtactacattcttttgaacgttgatgatggatgatgtgcttccatgacatgagggtcatacatcttgtagacattattatggaggaattttctaaatttattgtgataactaatgtctcgacgactgttacggtga

SEQ ID NO: 108126 - DNA, 284 bp, Glycine max
  Clone ID: PAT_MRT3847_68653C.1
cttaaacaaccgtagcaggcgatcgtcccgatctagtgaatcttctgtcagtagagaggcaaagaagagattatcagagaggtggaaaatgacacataagtctcaagggctgcaaggcatcagcaggagcaacacgctggctgaaatgcttgccgtccctgacaaggtattgaaggctgctaattcatacagcatggctagtggggaaggtttccatgataatttactcccaatagtcaaccttctaagtgggttgaaccatgggtatcagcagcagggatggt

SEQ ID NO: 108127 - DNA, 462 bp, Glycine max
  Clone ID: PAT_MRT3847_68654C.1
atggttggagtcccagaggagcatcaatctggtcatgcatttaatatgtatcatcccacgcgcccggatgacacagttacattcgaatttcaacataatgtttgtggtagatcaatatatgcggagggcactgttgatgctgtgctgtttcttgctaagaagattgaaacaaaggatcccaagagactgtataatatgattgatgtcttgcgagagggtaatatgcgatgaaattttctttggaatctgggtgcaggatgtcaaatgtagaacttgcaataaaagagatatgacattctagtttttgagaaccaaacaattttcatcttctgttcgtgatcttttttgataagttaggaaagcttagtgtatgtatcattaagaatcgactctagagctatgtaaacactgcttatgcaacttttgttaatcggatcactttacaatcgcttttccgactgt

SEQ ID NO: 108128 - DNA, 925 bp, Glycine max
  Clone ID: PAT_MRT3847_68655C.1
agcagatggttttgtgtaaacaactcgcactttttttttttttttttcatccatagaagatcaggtaatctttattatttccttaaataagaggggttttctcactaaatatgagttacaagctagtttcgcattacactcggaaaatctattctaaaaacaatcttgcaaatataaaagcatattaaataagtgtatctgaatccatcaagacacaatgcaaagtacgaacatagaggcccaccaaatggatgggatatgcttctggaagttaagggtttacatggaaccttagcttctggaagcacgagaggagaggatattgcttcaatccttagttcaaaaatacaatagatggcacatgttggactttgtggtaatcctccccagcagttccaagcctggtcttgaatgatttaggcaaccagctgatttctagctcccgaagagtagtgataaattttagtccatcaggaaccgtctttaaattgttgcaatcagatatgctcaatcggtaaagattgggcatggcttgatcctctattgtccactgatgtaaattaggcaagccgcgaagtactaaaaccttcagttgaggaaaaccatttggtgagcatgccattttctttccaacaaacatatcccacccatttagaaacttcaagttaggaagcttctctaatgttaccattgggtcttccacaagtctacagccccataaagtcaactttgaaagctgtggaggaaacagtgaggctgctggcagcctttccatccgcccttcgacctgcaattttcggaggaaaggacagcccagcaccaatttttcaacatctactacattttcagggaaggaaagcatgtcagtccttaaagacaaggatagaaggcaatccaaccttttattagggggactgaaactttc

SEQ ID NO: 108129 - DNA, 1403 bp, Glycine max
  unsure (1)..(1403): unsure at all n locations
  Clone ID: PAT_MRT3847_68656C.1
atcttgggtttgtaaggcttgtgaaacacctgacatcaagcgggagtgttgtctttgtcctgtaaaaggtggtgctctaaagccgactgatgttgacacattgtgggttcatgtcacttgtgcttggtttcgacctgaagtctcttttgctagtgatgagaagatggagcctgctttgggtattctaagtattccatcaaattcttttgtaaagatttgtgttatttgtaaggaaattcatggttcgtgtacacaatgttgcaagtgttctacttatttccatgccatgtgtgcttcaagggctggttatcggatggagttgcattgtatggagaaaaatggtaagcagacaacaaaaatggtttcttattgtgcttaccacagagctcccaatccagacactgtttcaattatgcaaacccctcttggggtcatttcaaccaaaagccttcttcaaactaagagaaaagctggatcaagattgatttcatctaaaagaataaaggttgaagacacttctcctgcagagaacactagacatgagccattctctctgctaggtgtcgaatatatcgaagaacaaatcatacaaaaaagagagcagcaggtgaagccattgctcatcatgtgaggggtcactaccatcatcctttagatgcaatacagagtttaaatgcagacagaatggtagacaagcctccagcattttcttctttcagggaacgccttcatcatttacagagaacagaaaatgaaagagtttgctttgggtagatcaggcatacatggatggggcctctttgcacgtcaaaatattcaagaaggggaaatggttcttgaatatcgtggtgaacaagtgaggcggagcattgcagatctaagggaggcncgctatagattagaagggaaagactgctatcttttcaagataagtgaagaagtggtagtagatgccactgataaaggaaatatagcacggctaattaaccattcttgtatgcccaattgctatgcaaggattatgagtgtgggtgatgatgagagccggattgtactcatcgctaagactgatgtgtctactggtgatgagctaacgtatgactacttgtttgatcctgatgagccagatgaatttaaagtcccttgtttatgtaaagcatcaaactgccggaaattcatgaattaggatttattcagatcatgatgatagtattgcttctccgcaaggagcagtagcacatccccctcatcagtgggaacctcagttacacccaagctgtaattttaatcaaatcataagagaagtataggaaaaaaaaattgtggcataggtttgtcttctatccttctaatattctattatttgacattcatcaaggcctaataaaagatacagatttacc

SEQ ID NO: 108130 - DNA, 311 bp, Glycine max
  Clone ID: PAT_MRT3847_68657C.1
ttgctacgcgtccggtcttacgcagctcataacgttaatcagccccaagagaaagacttgttggagggaaattctcccttggatattaaagctcgctctagatgggaaaaagtttcctctactaaagcacattatggcagtggaaaaaccttcaaatatgatataattggcgctggttcacattctacagaagatcttcctgaaaaagaagatcaagaaaaacccaaaaagattgatgccagatcgcgacacagaatagatcctcaatacaaggaggctcaggctcaaatggaaacaaagtagggttaaaa

SEQ ID NO: 108131 - DNA, 430 bp, Glycine max
  Clone ID: PAT_MRT3847_68658C.1
gcgagaagacgacagaagggccccttggtgtgagatttccattgtgtgaaaccagatgttacttttattgcctgctctgctgatatttttgctggtcttgaaaactaaaatattgagaataaggagaagaccttataacctcatatttgtaaagaaaaatgcatctttgcaactggttaaaaagaataagaaaattttaattttaaaataagggtgaaaaatttatggatgaaatatatacgaaacattgtatgaaaagctcatccctaatccccaatgttaaggtgataccaagcaaactctaaattttacatgggtggctgagacctaaactgtgtgattgggctatatcctactgataagaatttagactatggttatcactttccaattttaattttaaaagcaaaacgattttaaatggatgggc

SEQ ID NO: 108132 - DNA, 136 bp, Glycine max
  unsure (1)..(136): unsure at all n locations
  Clone ID: PAT_MRT3847_68659C.1
acccacnaannccgttgnantantggtgnattgnttctnngtgcacttntttttggcntcaccgcggttnaatccntggattctgattatggtattcccagggaactctcngatcttcaaaagcttnggtcgtggt

SEQ ID NO: 108133 - DNA, 659 bp, Glycine max
  unsure (1)..(659): unsure at all n locations
  Clone ID: PAT_MRT3847_6865C.1
ggcaattttctgcatcaagtatggaagcaatttatgaggcattaatttatagtaacatataacaatcaactttggttcatcaagctctatccaaattcaatcaccaaatttaatcctctccctattatgtaagtactttatataccaaattgaatttggtttgttcaaatttgtcaacaagttatgatcaaggtgaacttctgcatccttttgctactatgtttgaaaagttgataccaaattgaatttcgtttgttcaaatttatcaacaagttaagatcaaggtgaaattctgcatccttttgctaccatgtttgaaaagttgagtagactgagccatgatctattgcagcttctgatttgttagtggttgaaatcctaaagggtaatgatcaggattggtcatgccacaggtttggttctattgttactagtattattattattattattatactactggtgagtaaattaaagtaactagagcttgaaatttcaactgcctttactggggaagaagcctaattgagtattgaaaagtaagaaacgaangactttcacagtggttttggagcaatgggtggttcttcttgcttttcataatatgtgttctgcattctgcgatagctttgacttgtggatcactgatggtgtttatt

SEQ ID NO: 108134 - DNA, 1205 bp, Glycine max
  Clone ID: PAT_MRT3847_68660C.1
gttgtactaattacaactagtcgtgcatcacccacagtttttcctttttcgagagaaagtgacaaaagagaacaacacatgtctgaacagaaaaagagaggaggttacctacttaagcatcctaaatgacttgggtgagtcaacctttgcaagtgagaaagacgaaacactcaaacagggtgctgctatgagtcctctccctactactaatactctgctgggtcccactctatatgtctctttgaataatgagccaaaattccacacacaaacaaacagataacataacagaagaagaactcaagagatggagagtggcggtaatgggaagagagcacatgaagaagcggggccttcatctgggattgatggaaggaaacttgaaatgactgaaaaagcgagtgatgatgataaagaagaggaggaggaggaggaggaggaggaagaaggagccattgaagatagcaaaaatggtttttttgttcctgggcctcttctttctctcaaggaacagatcgaacgggacaaggaggacgaaagcctaaggagatggaaagagaagctgttgggttgcttggaaagtgatatagatggtcaattggatcctgaagtgaaatttcactccataggaattctctctgaggattttggtgaaattgtcactcctctacctgtggatgaaaatcgcaatggctgtactctatttactctcagggaggggtctcgctatcagcttaagctaaaatttagtgttctgcacaacattgtgtctggcttgacatactccaacactgtgtggaaaggagggcttcaagttgatcagagcaaaggaatgttgggtgcttttgctcctcaaaaggagccatatgtatacgccttgaaggaggacaccactccttccggtgcacttgcaaggggtgtttactcagccaaacttaagtttgaagatgatgacagaaggtgtcacatggaactcaaatatttattcgagataaaaaagagaagctagtccggtttttctgacaccatgtttttatatatcctcccaaaatccttaattatatttctgaacatgtgttatggatgctacagctttgtatttgtttcctaatacacagaaaggggatggactccgttatgaaaaaaaaaaaaaaaaaaaaaaaaaaaaaaaaaaaaaaaaaaaaaaaaaaaaaaaaaaaaaaaaa

SEQ ID NO: 108135 - DNA, 411 bp, Glycine max
  Clone ID: PAT_MRT3847_68661C.1
tgaggaaggcactggtattaaactttctaattattcttctttcccgttttcacttatggattttcctgtgattattttattgggtataataatatgtacggggccgatgcattttattttttggcatcattttacggaaaaattatggcctgattgcatactaaatacattgataattattctctccagtctctaatctctaatacttgctttgacttttgtaatgtttctgtgtttttgcagtttatgttgagtggccgcacatgattaaaggctgtaagcctgccacttttatcatattatgaattctctcaagttcctctctcatttgtaacattttattatttaactatttgtaccataacaaaaaatatttgctaatcatgtgcagtggtatataaacacctttgc

SEQ ID NO: 108136 - DNA, 606 bp, Glycine max
  Clone ID: PAT_MRT3847_68662C.1
ccttttgagagtttttcagagagaaagagacagacagagagagcgagcaactttgttagatttcaatcatttcgagaatatcgaattttcaatttcgtgtcttccattttcgggttcaattctgaggtttcatacaaacaagggaagatatcacattcttaaagattcacaatttcagataaatattatatgtatctgaaacttttttaataagaagaatgccaggcattcctgttgcagctcgtgctacctcaagccatccagatgcttgtgaacatttatctgcagaagaggagcttgcagctgaagagagtctttcaatttattgcaagcctgtagaactttacaacattctccagcgacgtgccatttatcaaattggtcggattttcatcttccgaaactcccctggaattgatttgaatactcaagtccaggcaaattttacacttcctgaagtcaacaagttagctgaggaagctagatcttgctcacttgatatcttgtttgtcagcactgccactgtggaaaactcaaatttatcatctgggagtcaattcaaactctaagcccttcgatctgaatcatctagctttttttgaatct

SEQ ID NO: 108137 - DNA, 921 bp, Glycine max
  Clone ID: PAT_MRT3847_68663C.1
ccacgcgtccgtttttccacgcgtacgaagagacagacagagagagcgagcaactttgttagatttcaatcatttcgagaatatcgaattttcaatttcgtgtcttccattttcgggttcaattctgaggtttcaaacaaacaagggaagatatcacattcttaaagattcacaatttcagataaatattatatgtatctgaaacttttttaataagaagaatgccaggcattcctgttgccactcgtgctacctcaagccatccagatgcttgtgaacatttatctgcagaagaggagcttgcagctgaagagagtctttcaatttattgcaagcctgtagaactttacaacattctccagcgacgtgccatgagaaacccatcattccttcagagatgtttgcactaccggataaaggcaaagcacaagaagagaatacaaatggcagtttccttgacgcggactataactgaaagtcaaaatgtgtttcccatgtctatctgtcttgcaaggcggatttctgatcatggagcttcaaggcaaactgccatttatcaaattggtcggattttcatcttccgaaactcccctggaattgatttgaatactcaagtctaggcaaattttacacttcctgaagtcaacaagttagctgaggaagctagatcttgctcacttgatatcttgtttgtcagcactgccactgtggaaaactcaaatttatcatctggagtcaattcaaactctaagccttcggatctgaatcatctagctttttttgaatgtgagatgtgctttagttgctaatatctgtcagacaaaaaacatgtttgaccacattgttacgttgttatttgagcccccactttttttctttttataatttatttacctcgagggcgtattggctccggtccca

SEQ ID NO: 108138 - DNA, 216 bp, Glycine max
  Clone ID: PAT_MRT3847_68664C.1
ggctagcaattgaataacatgactatccacatatgatcatagtgtggccacggtgaatcgtcctattgctccagatccatctcctgtttgccagtactctgattacttcaaagattcggtttccacaagtcgtgtcaaaggtgaaggatactcttctgcatatttctgactatcaccacacgcttgttcatatgaaactcccacatgttgaccatg

SEQ ID NO: 108139 - DNA, 465 bp, Glycine max
  Clone ID: PAT_MRT3847_68665C.1
ttcacgcgtccggtttcgcatgtcctgactgcaacatagttggtgcattgcttttgggtgatacttatcataccaatcctgaaaatgcagtgcgtagtatttttgctgcgcctttcaaaggcggaaggcccattcgggtggttacatttccgaataccatcgtgcagattgtaccaaacatgaattcaaggtttcagcttttgagtaccactaccaatggtgatcttgctcaaggaaaagatctctgattgggtaaagttaatgtgacatgtgctggcgttggcttgacatcatgttacactccaactgcattgttggaatgcggtttgcaacaagacagagggtcaattgtggagtatttgggaaggatgtcttacgctgctcataacattaatcagccccatgagaaagactcggtggagggaaacttttcctttgatattaaatctcgctctagattggaaa

SEQ ID NO: 108140 - DNA, 210 bp, Glycine max
  Clone ID: PAT_MRT3847_68666C.1
gactgctgaaatgggactatatgaggctagaacggtgaaccactttagacttgtagagtgagcagtacataggactattcttggtgctactgatgctgttgacacgctagatgatgcctatgctactgaatgtgctatacgaaatgctggcacaggataagacctttgttgagtgctctactgcagaaatgcattggctaccatggacag

SEQ ID NO: 108141 - DNA, 379 bp, Glycine max
  Clone ID: PAT_MRT3847_68667C.1
ttatgtccggcctctcctaattcgggctgcgcgctctgcgctcccgatctagctgtcgtctatctccccgtgggctgccacgttgccctccccgtccactggggctacatcctccctcctcctccctccgccggtggttcctacgccggcctccatctctccaatcctccggttcctgggggggggcgcgatatgcgcacacgtctttattctcgaggactccgccccttctccggggaatccgagtgactcttactgtagctatgccgccttcccggcccccattggtcaccggtgcatagcccccgccttcttattttctccccccattccttccgccctgctcacattccatggacctccgtccgccgcccccctt

SEQ ID NO: 108142 - DNA, 324 bp, Glycine max
  unsure (1)..(324): unsure at all n locations
  Clone ID: PAT_MRT3847_68668C.1
ttccacgcgtccggtccaatcgttggtccgtcgtgccaaccgttggccaatgtccgccctcccgggacggccattcggcggtggtcaacggcgactttatgttcattttcggcggatttgaggagagggaacaccgcttcagccaggagacgtacgccttccatttcccgacaaaagtgtggaagaaattgaaaacggagggcgaatcgccgcagtacagagacttccacgcggcgagcgttttgggagggataatgtatgtttttggcggtcgttctgatgagatgggccagctgcacacttnccacgacgtttactgtgaca

SEQ ID NO: 108143 - DNA, 543 bp, Glycine max
  Clone ID: PAT_MRT3847_68669C.1
tcggtttatgcgttccttttttatgtgtgtgtgcgtgagagagagagagagagagagagagagagagagagcgctatattcaattagcacccttatctttacaaataggtgaattcacgagtgttagaatgaaagatgattatgaatatgaggaagctatgctcatgctctgtacttcagtttagcttatgataaaacttgttaatttgttagtttttgttagtgggaacgattgaatccgtgacctttttgtcctttctttctttcttaaccatccaaccaaccctatatatctcgagagtcatggtcataggtatgttgcaaaaatgaaaaatcagggctgataatttcactctgtatttgaggtttattggactgccatgtgtcatttgtagagtaggtattgtgtaatttgagagtaagttaacaatcctatggttgtataatgatcacaagaggtgggtcctcggtgcgactttatcttctggtacttcagagcttgaaacctcttcacagtttgattttcatttctctaactggact

SEQ ID NO: 108144 - DNA, 306 bp, Glycine max
  Clone ID: PAT_MRT3847_6866C.1
cagtccgtgaactcggctcgagacggctgcgagaagacgacagaagggggatcatatattaatgccattgttattatgactttgagcttcgagagctgtgctaagacattgtcttgttgtctcttatatattttataaatatatatacttccttagtttttccataaacacaacaaggaaggaagaggtcaggtttcttgctcggcttttgtgtttcctccattcccactatccttctaagtttgagcataaattcaggatcttgttctttctttcttgataccacaacccgtgccctttcaaaaa

SEQ ID NO: 108145 - DNA, 2257 bp, Glycine max
  Clone ID: PAT_MRT3847_68670C.1
ccacgcgtccggttttgactgactggcaagtatgtttgtctcacctaaatacattctctcttttttctttcttccctttctctccgctcctccagacgggcgcccggtgtatgcactagaattagtgcatgagcctcggggctgtctgctattacagtatgtataaagtatacagttctctgctcactccttcaattcccacctcaaccaattccatccaatgctttatttcacttttagaaacaaagtttcagtttaccctgaatcagttggattttccaaactttcaccaactgggtacacttgaaaacagttcagggctcctgattcagcataaagttttaatttttcgttcatttattatatgtgtcttcaattcaacttggatttgtatacaagttccctctttgttcatttatttgggtacagtaagaaatagtctcttttaagctttcagtatatataaattttaagaatgatacatacagttgattctgttgattattacttgatcaatccctagtggcataagttctagttttttttttttatccgtgggaatcgaagacattgtcagaggatatgggttctagtttttggtttgttttaaatgttatttatttacatgaaattatgaactgttattttgctatgtagatttgtgaatatgcttaaaacatacttgcacactggaggagaagaagcttagagatccaaggcgtctgtatgcacctggccgactctatcacattgtggagcgaaagccatttagtctcttctgattgtaggataggaagacttccacctgtcgttaggacagcagtacctgttgatgggaggtttgagcatttagttctttcttgcaatgcaacttctgaccatgccatcatttggatagagagagaatcccgacgggctctcgatttaatgcgagataaagatgagcagcatatggagatcccagaagagcagaagatggagaggcatgaatctatagcccgagaacacagtgaagagtaccatgcagcccttaagagggcagttgctttggatattccacaagcatattcaccttcattatatggaacatttaatcaaattgatgttggggaggattctggaagatcaagtgtcctaggttcctccttgtctcacaaaaaacgagcacaaaattggaatgaatttgttggacgcctgtttgatgtggatgattctggtcatatggtgttcaaaaagacatctccataagatatttctttctagcaatgcttaataaagcaatatttgcttgttcttcaagcattgatgtcatttatatgaactattatttttctctgtaagatttgtgaatatggttaaaacataggtattgatgtcctttatatgaactattattttgctatgtaagaattgtgaacatgcacaaaacataggcattgatgtcagctatctgtgggcgagctatccttgagtgtgtttattgtctggcttgcgctcgttgggtttggaagaagtgtttgtacactgcaggctatgagagtgaaaattggggcctggctacggcacaagaatttgagcctgtgcctcggatctgtcggctgatcttagctgtctatgaagacgatattcgtaaccctcaatgggctcctcaaggaggttatggcattaatccggattgggttatcttgcgtaaggactatgacgataaccaaggtcgcgttactccgtacatgatataccttgatcatgatcatgctgaaatcatactggctgttagtggactcaatttggggaaggaaagtgattatatagttttgcttgataacaagctgggacaggcggaatttcatggtggttatgttcataacgggttgttgaaggcagcgggatgggtttttgatgcagaatatgaggttctcagggagctagctgcagaaaatccaacttatatgttaatatttactgggcattctctaggggctggggtggtggcattgttgacaatgctagcagtccataatcgagacaaattggggatatcgagaaacaagataaggtgctttgcgatagcttctcctcggtgtgcgtctctcaacttggctgtaagatatgcagatgtgatcaattctgttgtactacaggttgaataatctcctttttctatgaacttagtactgtattttacttgactgatttatttatcataatcatgtttaaaagacaagattgtttgtcaaattttatcaaaaaaaccaac

SEQ ID NO: 108146 - DNA, 735 bp, Glycine max
  Clone ID: PAT_MRT3847_68671C.1
attgtgtataatgtgcttaaaggatacttgcacactggaggagaagaagcttagagatccaaggcgtctgtatgcacctggccgactctatcacattgtggaacgaaagccctttaggataggaaggcttccacctgtcgttaggacagcagtacctgttgatgggaggtttgagcatttagttctttcttgcaatgcaacttctgaccatgccatcatttggatagagagagaatcccgacgggctctcgatataatgcgagataacgatgagcatatggagattccagcagagcaaaggatggagaggcatgaatctatcgctcgagaacacagtgaagagtaccatgcagcccttcagagagcagttgctttggatattcctcaagcatactcaccttcatcatatggaacatttcatcaaattgatgttggggaggattctggaagatcaagtgcccttggttcctccttgtttcacaagaaacgaacacaaagttggaatgaatttattggacgcctgtttgatgtggatgacgctggtcatatggtgttcaaaaagacatctccatgaaatatttctttttagcaaagcttagtaaagcaatatttgcttgttcttcttcttcttctttgctccttactaattgctttattctttctctcttccttttatggttctatttatttgtgccaaaacccaaaagcataaatctaagaattttttgtctaggg

SEQ ID NO: 108147 - DNA, 961 bp, Glycine max
  Clone ID: PAT_MRT3847_68672C.1
agcttgattaatactaccaactacaggtattgtgagctctcagctgtgcaattacattacaaccttaatcgcttagcatacgtaaatcatggctcgagtgagaattgacgtggatttcccaagtccagatgcagcttcacaagtgggactactgcataaggaaattgttggaaaagctatgatttacaagttgtctgaagctgttgaagaaggagatggtgctaactttgttaaggtgttgaagcaacaatgtgaggaaaataagctacgtttgtctgatgtttttgataaagtcaccctagcaggtcattcactgcttcatgtggcagcagatatggggcaaaaaagtattgtgcaggtgctttgtgatctctttcctttgcttctaattaggagaaatgtaagaggtgacactccacttcatgttgctgcgaggtctaagaaatatgagacagtcaagttgattctctcccaatatgccacaaagaagtcaacatatgatgagatgaaagataaaaagataacaagagaaacaaatgaatgtgggaatactcctttgcacgaggctgtctacagtggggatgttgatgtggttaaagagaatttcgaccaggataaggctgtagcctattgtttgaacaagtcaaagagatcaccactgtgtttggcagtggtgaatggtaatgagcaaattctcgaacttctgttgcaaattccattacctgcggaccagccgctttcacagtgtcgtcgaagttctccactccacacagctgtacagcatctcgaacttctgttgcaaattccattacctgcggaccagccgctttcacagtgtcgtcgaagttctccactccacacagctatacagcatcagaaaagagttatgatactagcgataatagaaataaggcccgagctagtttatttaagggatgaagacggaaatactcccctttca

SEQ ID NO: 108148 - DNA, 395 bp, Glycine max
  Clone ID: PAT_MRT3847_68673C.1
acggctgcgagaagacgacagaagggggagtccaataaacaatgagcaatctaagctcgaaggttcaacttctgaagaaggagctgcacctgatgaacacaaaagaaagcgtggacttgactataattttactttcagttcaaataagaatgctgagggggaagcacttaaagattcttctgggaagagctgtgatgatgatgtgacagaacaatgtgaaaggaagcctagagttgcacaaaatagtactgctaacttatgtggaaagcaattgctgaagcaaaagaaagatgactccgagagtgaagaaggttccaaagaaaatttcattcatgtgagagcccgaagaggtcaagctacaaacagtcacagccttgcagaaagggtgaggagag

SEQ ID NO: 108149 - DNA, 369 bp, Glycine max
  Clone ID: PAT_MRT3847_68674C.1
gtttttcaccaaagcagtaatcatagtatgtagttcccatcctgtttaatttgtaaacccttgtcagtaatgtgtagttgaattatgtggataagtggtctccagtagcatatgtatgttctcttttggaaattgcttatgtataaatcgatcggatgcttcctcagaacaggcacagtagaacgagctgtctatcagtagctcctgtactatttaaatttttgtgaaaatgtgacacgctgcatggctatatcagaattatgatgagacacaccttgtcagtaatgaataattgagttgcaccttgcttcactagaatcttgatgatgattatatccttataacattccaaggttacgtgaattaccc

SEQ ID NO: 108150 - DNA, 301 bp, Glycine max
  Clone ID: PAT_MRT3847_68675C.1
tactccactcctactatcactcacatttacctcttacagtagacaactgtcatctttgcatatgggatcttagactactaatcatatttctattcactattatcagccacacattgatctatctaatttacttttcaacctactattttgattcttactacatccccatctctcatcttcctctacttctattccaaaatccatacaattttcatacatcatgatttatcccccatagaacatatttgaatacactataagacacttatcttaacaatttatcaaaacacagtattaccaa

SEQ ID NO: 108151 - DNA, 519 bp, Glycine max
  unsure (1)..(519): unsure at all n locations
  Clone ID: PAT_MRT3847_68676C.1
cccttcggctcgagttcagaaaccccaacatgttttgtcggtgtaggttcggtgaaaatgagttcaagaggaaagcagggtgccatcgtttcttaccaaaacgtcgtcgtaatgaggcacggcgagcgcttcgacaacttcgagccgtcatgggcggcgacggcggcgcggccttgggacccgccgctggccgaggccggccggaaacgggcgttcaaaacgggcctgaggctccgagagagtgtcgagtttccgatcgggcgcgtcttcgtttcgccgttcctccgctgcctccagaccgccgtggaactcgtggcatctctctccgatggtgttgccgttaagccttccgaagtcaaggtctctgtcgagtatggattgtgcgaaatgatgaacagcaaggctatccgtcccaatgttgcccccaaagatggaaacatggggtttgatgtagcagttttgtgaagccatgctcccagctgagatagtggataaaaatgtngaaaggatgtgtaaagg

SEQ ID NO: 108152 - DNA, 429 bp, Glycine max
  Clone ID: PAT_MRT3847_68677C.1
ctttcgcccattgtttcaaactgaaagcgagcgatggttacatacgccttttcatgactggttcgaacaggcttgagctctacacttctcaaactaaaactgtaagtacagacctgggtggagctatcatgaatgacatcttattgcttcctctaatcatcggtgcgccccccattgggaattggctccatagatagagacagccacttctggaactatcggtgggtacggttgcgaatttaagtttggcatgaatctgtatccatgtggtaggctagggcatgcatataagtgaatgtcgcaggatgcatcatgacactttttgtgtgttaagtgacagtgcttgcatttttagacatctaagaaaaggattcattgtgcgttaactgcgcgtgtatgcatcacatggacagcagcctctgttctcct

SEQ ID NO: 108153 - DNA, 285 bp, Glycine max
  Clone ID: PAT_MRT3847_68678C.1
atacgagactacattgctttcattagatggcggccctgtgaaagagagagagcctgctcattaggatctctattccacgctgatacacgatttgctcgtcaaccattcaaagatttgtgacgaagggtacttgcacctccctcgctagcgtgtcaggaagcacacacagggctggaaaacactgcacagcatatgatacctgcgacattcacgcatcctcgattaatgaatggattatcatgccccgacctcttatatgaagaggaggtgatctgatgatgcggg

SEQ ID NO: 108154 - DNA, 368 bp, Glycine max
  Clone ID: PAT_MRT3847_68679C.1
cccaagtgtctatataaagtggccagtgttgctgacgcactgaattaaagctacacgctaagatcgttgcatgcagcgagcggggatagagacacaggggtaaggggggagtgatagaaaagggcgtttcacgcctctgataacagtggaacccattaagagagggatcagtcgggagcaatccaagcctacgatattaacagttgttatagataggagagagacacttgtactaaagcacaagatcggtatgaggcaagacctctgaagtatgagataatggatgctggttgacatgcttgacattatatggctggatgcgaaatccagaaaaacacattggattgttgccgagattgatacaaaag

SEQ ID NO: 108155 - DNA, 514 bp, Glycine max
  Clone ID: PAT_MRT3847_6867C.1
aaatatttgaaatattgaaagtcaatacataaaattatttgtaacataatctaaattaacataataacaactctacaattttaaaattacttaaacacctagtgtttgatttttttaactttcagataatatcttgcctactgaatgcgaattaccttcattttctctggttctaatggtctttgataagtaaaatattgcatgatataataaaacataagttaatatataaatctaaataataacaattataagaaaatgaattagttttggagtaaataattattgtttaccagttatccttgaaacctcctggaactatcgttgacataatgcattacgtagtacctacattcagtacttcctttatccttattacactaaattgaatataatatttagatattcaaagttaattgaaaattggtgtataacataataaaatttaatttttaaggcatgaaacattatttaaataacttactttaattataatccatctagcagcagcctt

SEQ ID NO: 108156 - DNA, 306 bp, Glycine max
  Clone ID: PAT_MRT3847_68680C.1
attcccaccattgggtccaccttggagacggtggaggataggaccattagtttcactgtctgggaggttggtggccaggataggattcgtcccttgtggaggcactgcttcgaaaatacacagggtcgcatttttgttgttcacagcaatgacagggagagatttgttaaggccagagatgagttgcacaggattttgattgaggatgaactgggatatgctgtatcgcttgtatttgcgaacagtcactatcttcccagtgcaatgaatgcggcccaaattactgagaacctgggatcccagtct

SEQ ID NO: 108157 - DNA, 404 bp, Glycine max
  Clone ID: PAT_MRT3847_68681C.1
aaccattctcatacgcctgataaaaacaatatttgtatgcgccccatacatgtgttggtagaactttaatgtgagaggagtggttcatttctataaattatgtttttctcgagggatttttccttcattattatattatttaatttaatacaaaaatataattaatgtataaattttaatgatttactaagtgacgtgttttaattaattaaattcacattaaatgtttcttgataaaataaataaataaataaagtatggataataattataattagaaattgaatatagcaaatgagttcgattcatatcattcataagcttgcattgtgttggagtgtacatccaccttttaagtatttgacgaatagaaatattgtcaaattgaagcatacttattcaaa

SEQ ID NO: 108158 - DNA, 463 bp, Glycine max
  Clone ID: PAT_MRT3847_68682C.1
ctttgtgagccggttttgtgaggttgagttagacttgaatatcaaattctaaggtgaacataaagcatattttattttagacttttttgttctatcctttaatttgatattggcttccatttcctagtttagttggtgttacactgaagtaggctgaggtattttgccttaaatttgaaaactggttaaaccttttatgatgactttttagttgatgtacatgcatttattcttgagttctaatttttagttaccatttgcagaaaatgtattcaatctttgcagcttgcctaatctagaaggaatgacatataggcaaataagacatagatttcaagaagctgttgtatgtggtctttaccggagtgggaaaatatacttccacccaaatgatggtgaaattctgcagcaaaccgacaaagtattgttcattggatcccttcgggatactaatactaaaaag

SEQ ID NO: 108159 - DNA, 331 bp, Glycine max
  Clone ID: PAT_MRT3847_68683C.1
tgagttaaaagataaaatccctactgcctccgatccttttgctgatgcaaatgctgatgacgcgggtgcgggggcaaaggagtacgtgcatatacgggcacaggagagaaatgtttggaaaagccagacaagcggtcagggatcgaaaaaagaattccgctataacaagagactgaaagatgctaagaaagagttctgttgcaatggaaccgctggtcaggacccagaactaggacaggtaactccacttccaagcgaacagaggaagaaagctcctaccctcatagaacagggtgggatcgtgaagaaggagcagatcaagagccacggt

SEQ ID NO: 108160 - DNA, 722 bp, Glycine max
  Clone ID: PAT_MRT3847_68684C.1
gaagaaaacagaacatgggtgaaggcatagttgagagatcgctgaacagcttaggaaagggcttcgacttggcctcagatttcaggctcaagttctgcaaaggcgaagagcgtttggttcttctcaacgaaacagagaaacgagagctcatggtgccaggtttcagacccatcagagatgtctccgttgacatcaaatgcgacaagggcgatcgcacccgctaccaatccgacatcctcaccttcacccaaatgtcagagctcttcaaccagaaaagttcaatccctgggagaattccatctgggtatttcaacaccgtgtttggatttgacgagggttcatgggcaactgatgcagctaacacaaagtgtttgggtattgatggctactttatcaaactcttcaatgctcatattgatcggtaccctcttgttctgtctcaacaagtccttgaagccgttccttcttcctgggatcctcctgcacttgcaagattcatcgagaacttcgggacacacatccttgtggggcttagcattggtggcaaagacttagtgttggtcaagcaagacgtgtcttccaacttggagccatcagagctcaagaagcacttggatgagcttggaaatcaattattcaatgggacatgcaatttccttccaaaatccaaagaacaaaaatataaagcaccgcaagcttttgatgtcttcggtccacaaatt

SEQ ID NO: 108161 - DNA, 326 bp, Glycine max
  Clone ID: PAT_MRT3847_68685C.1
gtggctactatggctatggctatgagaactcagatggttagaacgaactgagcggagggccataggccaaaggtgagtaagaccaaaaaggtagtgcaccgactatactggcagtcaaatggcagactttcgactgcaactttaggcacagatgaagatagagacaagactagtaccattctggaatgtaatcaatataacaaagatgattatccagaagaatatactggtgcctaaatacttgtcatcaagtcttacaacgaaggatgatatccataccagtattaagcatgatgtgtgggctagtacacaaaatggcaacaaga

SEQ ID NO: 108162 - DNA, 348 bp, Glycine max
  Clone ID: PAT_MRT3847_68686C.1
tttttaagatgaaattggtcttactaatcggagactggttgattctacagacgttgcccattttaatcagtgatcctcatcctgaccctctaaataaaacgggtggttagccaaactttccaaaatacacaatctgcgcctacaatatccatgatccctgcttgtttgtatcacttaaaatatgtacaggcacttctcttgccactcacagagaggttctgacaaattgaatgatgggcttgatctgttttagctttccacattgttaatgcatatgcagaatgttgaggtaacctggggtggtatctgctcccctacctaggtaacaattactatggtagtttcttt

SEQ ID NO: 108163 - DNA, 617 bp, Glycine max
  Clone ID: PAT_MRT3847_68687C.1
cggtttcgtgggcggacgcgtgggtttctttctttctttactcactcactcacttaattacccaatccacttccctttttattctttctggccttttctgaccaagctgccagaagacgacagaagggggctgtcaaactttctttttgtttcttttctgttaatttcaaagaatgatgatgttgttgttgttctcttccgttttcctttttctatttccctgcctagaaggaacttcattataaactaatcaattaaaattaaaacccggaaaaagtgcatcgcttgtgtgtgatgttttgaatcgtgacatgcttttggggttggaagagtgtgtgcaatgcagaaactgagattggtgctgtgagaggaaaagagaaacgatggtggtgaggaaagtggggaagtacgagattgggagaacgattggggagggaacctttgccaaggtgaaattcgctcagaacacagaaactggcgagagcgtggccatgaaggtgctcgatagaagcaccatcatcaagcacaagatggtcgaccagatcaagagggagatttcgatcatgaagctagttaggcaccctgatgttgttcgcctgcacgaggcatgtggttct

SEQ ID NO: 108164 - DNA, 266 bp, Glycine max
  Clone ID: PAT_MRT3847_68688C.1
cgacgagcatgcgcatcacatgtatacagcacagccctcccaaccaatgcagccaaaggaccagccacagcgtgaacgatacctaacaaggcgtcgaaagactaagcgcagtgaaacaaagaggatactaagtctcccaaaccttgtacagacccaaaatacgagcccagacaatcagaatctagatggcctgcaaaactcgggggatactcgaacggcagcatccgatcaaaaacgaacctcatcaatcacaggcagaagaaaaa

SEQ ID NO: 108165 - DNA, 322 bp, Glycine max
  Clone ID: PAT_MRT3847_68689C.1
ttcaatcttgataaaccggtaacataggttgccgcacctttaaaccgggaacaaaagcagtcgaaactggattccaagaatctatcaatttcttcctacttttttgagtacgagttcttaagggaaagaaaagtactctctgtgctgaccacagacttcgagaataattttcttttccattcttagtgtatttgctgaacactctcctatttgatataacgacctcgtgtcagattaaaacttctagagagtgtttttcatttctctgctcaatttcacgatcaagctgaagaaatcttggattagagctcccactctccta

SEQ ID NO: 108166 - DNA, 507 bp, Glycine max
  unsure (1)..(507): unsure at all n locations
  Clone ID: PAT_MRT3847_6868C.1
catatggaaggcatgttaccatgaactcagcttgggatcatgttctgggcttttgtttattatttaaagggttaataaatgagttggatgatggaaatagtccattctgcatgaacttggggctttgcagcacacaatctgttgcatggatttctcattttgcacagctagggtcatatgtttggtttgggatgtttgtgaaagtcaccacaatgttgttgaatttaatgcagcctgggatacaatttgaagttattgtcatacatgatacagagtggacaatgtgctagaacatccatattgttacagggtttgtaggggactgacactgaccattacaaattgttttcagcgaataacctacagttataaccaatccttggctggcatatctaggttctgctgcaagatgagtctgagggtggataaatttctaattngctacttttgtggaagctcacctgacattttgtgaagatgacatttactgacgatcacttcataggg

SEQ ID NO: 108167 - DNA, 288 bp, Glycine max
  Clone ID: PAT_MRT3847_68690C.1
ataaaaaatgcacaaagtttacattactattttatcaaattaatcatacattcgcggacgtagttaaaaccactaaaaggaccttaatataaccatactaatcaccacacttacatagttatcatcaacacacttgcttatgccataaaatttcacttaaacttggaaacttacttaacaattcactgatttacaattataaataaactgcatctatctataaagaaacttcattttcttatcatatgttctaatataagtgtaaaacgattaacatagatccctatt

SEQ ID NO: 108168 - DNA, 327 bp, Glycine max
  Clone ID: PAT_MRT3847_68691C.1
tagatattagcaccacactttattgagcattcagaaggatcaaccaacatagcgtgtcacgtagattgcagaaggtacacaagagagaatacacatgcgcgacataagtgtcagggctccacaatactccaggaggctaacaggctttatggccaaccattggcatacagagatagcctaccccgagtggcggcatctccttaacacgctaagatgccctttttctcaaacatgtttgatgtaacctcaccatgggagcttttatcgatatcctttgaacggcgtgtctcagaaagggttttggcgtgggcatcctgatcctctttt

SEQ ID NO: 108169 - DNA, 489 bp, Glycine max
  Clone ID: PAT_MRT3847_68692C.1
cttaatttcatcgagccattgattggctgcgtcaaccatttctagggctatttttctcagccacttgggggtaacccatttcacaatggttaatatcctcagtctcattgatgaacccacataagagtctgtgaacctcagccatccattttagctttcagatttacgcttcccactgcaaggaagaattaatccaaatactcagaactctcccattggctaccttagttatcgtacattgtctctgccaccatttttttaacctcactcactcacttaaaatcttcaatttattgttccctctctctcctcattgagcctaggaaaacccttttctttttcttttctcagaccattatttcacagatatcccagtatatggggtagcaacaattaagtcacactcttattggctcatcacttctttggccatttactcacccagaaatcattcttcctcccccaaaacaaaacccttccttacatgca

SEQ ID NO: 108170 - DNA, 231 bp, Glycine max
  Clone ID: PAT_MRT3847_68693C.1
ttagtcctcaaacatgaaagtgtctttgtatgttgctgattctccatatgttatccacttctctttctatgagtaaatccaattacccttccactccttgtcaaacctgtgtctatcctagtagtgtgagaggtttgagcttcaaggtcaacatttcttggccgatccatgcttcttgcattgtgcagcgacaatgaagaagaataacaatggttttgttgtggtggggtg

SEQ ID NO: 108171 - DNA, 284 bp, Glycine max
  Clone ID: PAT_MRT3847_68694C.1
acggctgcgagaagaccacagaaggcggactcatcatggacgcttctttctacttcctatgcgctgcttatgctctcgggtgttacatcgcttggaattggggttacaatacctgactatggctagactactcacaaaatttttcatctcatgaacttcattgccaacggagatcgtgctgaggtgtttggattgcacaagctagtttttctttagcatcctaaggtgttgatttcgccgctattaaatctgccaagactacgtttcattcttcaacatataca

SEQ ID NO: 108172 - DNA, 209 bp, Glycine max
  Clone ID: PAT_MRT3847_68695C.1
gagccgaatcggttcgaggcttccttagccatttccatggatagagaattcttaggcatattaacattgaagtgatttagcacatctctgccactgactctgctgcatagcatcggataacaaaggccatgcctttaccctcctgaagatagattgagtcaaagagagatcaagctctcgcttatattattacgcgcgctcagaaagaa

SEQ ID NO: 108173 - DNA, 431 bp, Glycine max
  Clone ID: PAT_MRT3847_68696C.1
cacgcgtccggacatgtgtaggttttacaaaaagaggggagacatgtgtaatttactctagttacaatttacactttctttgtctgtcctttgagctatgtatcaatgtttctcctgaatatttgttttcttttctttgtttatttatctgatttgggtcttttcgcggtgcatttaatgaagcctgaatagtactttaggagtataccatactaatatataattgtcttgggttataaacttataattgttagacacttgtgtcaaatgcataacacttcaaatcctaatgtgtcatttcaaattttgttgcatgttgaagagaaccctctcccattgggataaatatttttttttttggtgatcttggattacgttttattgcttctcagaacaccaggtggtaactaggggttcaattatttaaattc

SEQ ID NO: 108174 - DNA, 333 bp, Glycine max
  Clone ID: PAT_MRT3847_68697C.1
ttcagaaagttcatgaatctactctagcccagcttacggagggctctcgattagctgctgagaaaattcgaagtttggaattcagaagcggaaactttaatctcaaaaaagaaagatgcagaggtattaattttcaaattagaagagaaagctgaatttctgttagaaagttctagatcacagagaaccaagtgcaaggtttactgctgaaggtttcagccttagagactgaaagcaaagaaaatacagaaagactgcacgcagaaatatcgaagaaatcagaggaaatagatactttgcaaaacgagagaatgaaactagagcagcatgctg

SEQ ID NO: 108175 - DNA, 689 bp, Glycine max
  unsure (1)..(689): unsure at all n locations
  Clone ID: PAT_MRT3847_68698C.1
ggtaagttctcttgtatataaaatatttcaagtcacgttaattaactcgtccagaaacatagaacatagcttttaaatcgcagtacgcggcaataacagcataatatcaagccacaagctgtgatttaaaactttaacatttcgtgttgttgaggttaaagttggtaatcaccatggctacggcgagggccctttttctcttaggggctgctctcctctcttgcaccttgataggtgcatcttcgcgtggcgttgagaatcgccgtagcctcctccttccagttccaaataatggtcctgcaatttttgatgtgacgaaattcggtgctgtggcagatgaccagactgacaatattgatgcatttagggctgcatggggagaagcatgcaaaaacagtactactcaggcaaaggttttgatcccagcgggaacatttcgtgcagcacaaactatgtttgcagggccatgtaccagcccaaaacctataattgttgaagttataggaactgttaaagcgaacacagatccatctgagtatgtgactccagaatggttcagctntctagacattgacggccttgtgttgactggcaatggagtttttgatggccaaggagccgctagttggccatataacgactgcgccaagaccaaaggcgattgtgctcccctttcagcttctctgaaa

SEQ ID NO: 108176 - DNA, 152 bp, Glycine max
  Clone ID: PAT_MRT3847_68699C.1
agcgggaaaccaagaacaccattgaattttggtcttgacacgcggagcttttgacaagttgctatcgtcctccccgatgcaggaataatagtggccaaaactgtagactggactgcacttatacatgattctcctattcgtaacttagtgac

SEQ ID NO: 108177 - DNA, 934 bp, Glycine max
  Clone ID: PAT_MRT3847_6869C.1
acccttccgtacggctgcgagaagacgacagaaggggggtccattttgcgcaggcaatgggaaagagcaaggttctttgttgtggggggaactgggtatgttgggaggagaatagtgaaagcaagtttagaacaaggccatgaaacctatgttcttcaacgtccagagataggtctagacattgagatgatgcagatgctgctttcattcaagaagcaaggtgctcaccttgtggaggcttctgtctctgatcaccagaacttggtggaagctgtgaagcttgtggatgttgtgatttgcaccatgtctggggttcattttttgctctcacaacttgttggtgcagctcaaacttgtggaggccatcaaggctgcagggaacatcaagctgtttatatggatgaagatgatgttgcaacatacacagtcaagacaattgatgatccaaggacattgaacaagatggtatacctaagaccaccagaaaacattctcactcaaagacagctaattgagaagtgggagaaactctttggaaaacaactagagaagtccagcatgaatgaacaagactttcttgcttccatggaaggtttggactatgaagctcaagtgggagtggggcatttctatcatattttgttatgaaggttgtttgacaaactttgaaataggagaaggtggggaagaagcgccagagctttatccagaggtgaagtacacccgcatggatgaatacctaagtatatgtctgatctgatgaggttataagcttgaaaaattatgtatttgaccaaccaaaaaaaataaaaattggggatgttataataaaataattgagaaagtacgctgaccttacttgaagtgattctatgtctgttgaatggtttgtaatcatgtttgctgtaattatgaaattttatttttcatctgt

SEQ ID NO: 108178 - DNA, 403 bp, Glycine max
  Clone ID: PAT_MRT3847_686C.1
tgagcatcgtctagctatctcgatcgaactgtccaagttcctgtcacccacacacaaacacacccacgaacgcccgaaaccaatcaaaatgaacagataaattgaatatagtatacagttggcaacatcatcatcctaaagccgttcgggtcactgtgtatacgtcgggtattgggcacgcttctgttcagtttcagggtgtgttttttttcttcgttggtcataattgttctcttcaaatggttctgttgttgtacgagttcgcatcctcgggtatcctagtgttgtttgtagttgttctggtttgtttaatggttactcgttcgtgacgtattaactctcttctaatgctctaatagtccgctctaagcgtgtttggtcgccgtaataatagcataatgtg

SEQ ID NO: 108179 - DNA, 145 bp, Glycine max
  Clone ID: PAT_MRT3847_68700C.1
ccttacttaaccccggaatccggtccaagaataatccaaaaccaagggttaagcacaatcccccaagaacaaaggttagccggaaaaaaaaactaaccggcaatccggaaccggaaaagaatcaaccaaacaattttggcctggg

SEQ ID NO: 108180 - DNA, 267 bp, Glycine max
  Clone ID: PAT_MRT3847_68701C.1
ttctttcgtacgcccacgcgtgcgcccacacgtgcgttacagcattcttgagaatgctgctgttgctacttcacatgacgtcaagtacgaagagcatgctgcacaaaacccggggagataagcctctgcttgaacttcactgggtgcagggaccacagcttctgatctgggatctatgtgctgctccacttgcaccgattcaagtcctatactgcgaagagcttaagcttaccggagacatacatatgccctgtgtgacatgagaat

SEQ ID NO: 108181 - DNA, 331 bp, Glycine max
  Clone ID: PAT_MRT3847_68702C.1
gggtttgtgagctcactcctcgttggccgtccttttttttcttttttagtacagctattttacttctttgaggacgggccattcattgggagatgtagctgatcatactagcctccggcagtctgattgctgctaaacttataaacatcgtaaatacgtgtgatgcgactctatctttaatcaaaaccacttgtgaagatattatcctcctttttacatgaatttgcattactgatttctactctatttggaaacgggttcaagtattcctattgagaaggtctttataccgtgtcgttatacttaaactctaagataaatgaaagttata

SEQ ID NO: 108182 - DNA, 435 bp, Glycine max
  Clone ID: PAT_MRT3847_68703C.1
tccctggctccctgcaaatagggtaatgttcatttttagtccctcaaaaaataatcatcttcttttggcctttcatttttagtccctcaaaaataatagtctttgtttccataaggagatggtttcttttatactgtcagaacttttgcgcattgctctgataactcctgtataacatagataagttagaaatttaaatactgttctaatattttctgtattgattgtttatattgagggttctgaacttgacaaatgcataagggccaaaggagaatttcataaactaaaaacaatgtcctcatattcttactcttaaatgaaatacttatggtccaaaagttataaaagaagatgctaaataaaggtgttgaaaatttaaaatattggatattgatactaaattaatctacagaaaattactgctatggctta

SEQ ID NO: 108183 - DNA, 769 bp, Glycine max
  Clone ID: PAT_MRT3847_68704C.1
ctgcgagaagacgacagaagggggcgccttcccaccgtaaaccctaacaataatggagttgtggaacgtggtgtttgtgtgttgtgttttatgttacagtttttgtcacactgcggaggctatcgttaagctacgaggcaatgaaacaataccagcattgattttgttcggggattcgatagttgacacaggaagtaacaataacttaataacggggcttaagtgcaattttcctccttatgggagggatttcgagggtgggataccaacaggaagattcagcaatggcaaggtcccagctgacttcgtagcggaagaattgggaatcaaggaatatatagcaccatacacgagtcctgctttgcagcctggtgatctcctcaggggagtcaacttcgcttctggtggcacgggatatgatcctttgaccgcacaactagtgtcagtcataccgttatctgagcaactagagcaattcaaagaatacataggaaagcttaaaggaaattttggagaagcaaaaaccaacttcatcttgtccaaaagtttagtacttgtggtatcaagcagcaacgacattgccaatacttattttgcaactggagtaaggaaactgaattatgatgttcccaattacactgatatgttggtgcaacaagcctcttctttcgttaaggaattatatggattgggggcaaggagaataggagtgtttggtgcacctccactaggatgtttgccattcgtgcgaacattgtttggaggtcta

SEQ ID NO: 108184 - DNA, 285 bp, Glycine max
  Clone ID: PAT_MRT3847_68705C.1
acaaagataactataatcaatgtgatgaatatgaagtttcataagatccttttgcagccacattagtgggggaatctcagatgcagggatccaatatctaacctcataagaatgaacaatgaatatagggccctttcttcagagcgcatagaacacgactcctgcttactgccatagcacacaacatacctggctatgtgaccattcctatagtgtgcggtgccgcaacactaccttacttgcatgttgaacagtatctaccagtctgacaatcatgtaatcaac

SEQ ID NO: 108185 - DNA, 1352 bp, Glycine max
  Clone ID: PAT_MRT3847_68706C.1
gaaaccaccaaagcctacggctactacattacattcttttttttctttcccaaatgggttccatcttttcacccttaaccactatcttcctcctactcctactcgtactttggggtggcgaggcacgtgacccttttgcttgtgaccctaagaacaccgccacaaaaaacttaccattttgcaaggcttcgttggcaacaggggcaagggtgaaggacctcattggaaggttgacactgcaagaaaaagttaacttgctagtgaacaatgccgcggcagtgccacggcttggtatcaaagggtatgagtggtggtcggaggcactacatggggtctcaaatgtgggccccggaaccaagttcggtggccagttccctgccgccactagcttccctcaagtcatcaccaccgctgcttctttcaatgcttctctgtgggaagcaatcgggcgggttgcctcggacgaagcaagagcaatgtacaatggtggaacggctgggctgacatactggagcccaaacgtgaacatctttagggacccacggattaaaggcacacatgagacttgcggtaaggattccatactagcccataaatatgttaaaaatgacggctccaaagatggcattcacacgttgttggtgttctcagccccacctgcgggtaatggccattgggctccacacaagcaattagtggcttttgagaaagtccatattcccgccaaggcccaacaacgggtgagagtcaaaattcatgtttgtaagctcttgagcgtggttgaccggtctgggactaggagaattccaatgggtttgcacagtcttcacattggtgatgttaaacactccgtgtcacttcaggcagaaacacttggaattatcaagtcctaaatttttcgaacgttacattccattactcacacaccaccaatcgcctttttcagcaaaatatacatatatagtacctgctaaataacctcaatctctacgtaagtgtataatagacagattaatagtgtgcttattgtcagggacattttaagttttacctctaaacttcctacatggtgctttggttctaaggaaccattgattcaaaccgtaaattgtttatatgtcataacctccaagacaggacgtgctagatttgattcatcaatcacagccaataaagtaatagggttggttgcgatttttggagaagagattaggaaaatgtattgttctctctcccattcatttctactttctttgccattctttttgcttgtacttttatcaatacaagacattagtatttttttttaaaatgtaattgtaaggttggtaataagaatgagctttttcacc

SEQ ID NO: 108186 - DNA, 233 bp, Glycine max
  Clone ID: PAT_MRT3847_68707C.1
gaggggggggaaaaaaaagggaagaaatttcttaacaagaaaggggggcattccaataaccaaaaccccctgcaatgtccaagttgtcccgtgactttttaaaggggacaaggggttcaaacaattgactaatctattcgcaattgacaaatattttgacgaacatttgcttcaaaataatccacaaagccccacagaaggggtgagaaataccaacaaatctgttaaacaaa

SEQ ID NO: 108187 - DNA, 395 bp, Glycine max
  Clone ID: PAT_MRT3847_68708C.1
atacatttttattaaaattatttttcttgttttttttttttctacaatttttgggagcaaaataaaaacaaccgtaccatatcatcctatattccaatcaacactgccctttggttcccccccctcccaaatcaaaatccctttttttaagctttccaggcaagcacacaaatttttacctttcaaaccattccccaaatagtgcaccccaaacgccaaaagaatacatacatgacccacaatatacctcaaaatccaaatccggtaaccaacaaccttacatttatcccccctacctttaaaaacatcccccggacacattttaatacggtatttatttttcccctctctctcccctttgatactacaaaccacccctttttttgggaataaaa

SEQ ID NO: 108188 - DNA, 1213 bp, Glycine max
  Clone ID: PAT_MRT3847_68709C.1
agccagaaatgaactccacaaaacagaaaaataggtcatgggactctttttcaaatgccatgacaaatccagttggtgttccctcaggcaaagacagtgctgcttttcagagttcaggattgcaatgtacaccacatgaagcagatgctcttccaccagctgcaagtgaaaagcatgattcagtagaattgggtttacaggatgcaaaatcctttcctgaaaaaaaggacatttcacatgcaaagtcatctgcctctgaaactgatacaaaacgtgctaaacagcaatttgctcaacgttcacgggtccggaaacttcagtacatagcggagctggaaaggaatgtacaagctttacaggcagaagggtctgaagtctcagccgagcttgagtttcttaaccagcagaatcttatcctgagtatggagaataaagcactcaagcaacgtttagaaaatatagcacaagagcagcttatcaaatatttggagcaggaagtactggaaagagagattggaagattacgtgcattgtatcaacagcagcaacaaccaccacagacacagccacaacagcaaccatctggtagtcacagacgctcgaacagtagagaactcgaatctcagtttgcaaacctttctctaaaacacaaggacaccaattcagggcaagaccctgctctcagaatttagatttgcagtagctgtagccttgttcggcctctacattcaaccggtgttgccacacccgcgatagaattgtttccttcccttcccatgcatgggattgtgcagagatttccatcctatgccctctctctgcctgccagctttgctgatttcatccttctcttagtctttccgttttctatttacttatattattaccatttaatgtgcacctggtggtcattgccgaaatcttattctatttgtcagttgacctaccagaggtggtaaccaacatttccaagctttcaacccccactgtattttcagtgaatatgtagctgtataccccctcttgtgaatctccactattgtggaatttggcccagtgcaaatagcaaatatctcagggccatttgaatgtgccttatttgtatggataatgtttagctaatgcttgtaatgttattttaatgaagttaatgttttcttaacatcttgtttggtagcaatgagaaaattgatctaggccattattttggtcc

SEQ ID NO: 108189 - DNA, 405 bp, Glycine max
  Clone ID: PAT_MRT3847_6870C.1
gtcattttagcttctgattctgaagccatcaagagtcatatcataaatctcaagcgggctgctgtgcaggagattcggattcaacagtcattgcaagagatacagggtataatctctcctttgttgaggattgctggaagatgaaattttgggtttctcatctatgagctggttttgttaggctatgtcttttttttctctctctaaattttgatttaagaatgtatttgttattctggtaatttgattcaggcaatgccagtttctctagaatttttgttggcgactgtgatccttggaaaacaccgggaaatgttttaaattattgccaattgtgttttcaggggctctactttcacctttatctatggtctcatttggcacctatataatattttcttctgt

SEQ ID NO: 108190 - DNA, 260 bp, Glycine max
  unsure (1)..(260): unsure at all n locations
  Clone ID: PAT_MRT3847_68710C.1
cccgacgtnctatatcaaataggacttcgtgtcagatttaaacttcacnctgtntcnttcncagttctctgnttaatttcaagttcaagctggancaatcttggcattagtgctcccacnctcctatctggtatagacttcgtgggtagattnnctatttctctccttncttncactctctnctnctcactggatccgcattggccgtncaaagtggncttatttgaaaaaccacttgggcgtgggngcaaaatgtttgc

SEQ ID NO: 108191 - DNA, 282 bp, Glycine max
  Clone ID: PAT_MRT3847_68711C.1
cgttatatgagatagacacaacctcatcctttccttcacaatttcactttatataatacaccaattcactaggaccttgttcacacttgataagagaagaggccctccaaaattctactctccctctctttatatcttatatacccatacattcttctatatatcactttaataattacatttcttttcatctacatatttattcaattccattcaatttattaattaaccaattttactttaatttattaatctcttcatttttttaaaactctcaacata

SEQ ID NO: 108192 - DNA, 298 bp, Glycine max
  Clone ID: PAT_MRT3847_68712C.1
ctactaccttatgcattagctggcgtacggtcgcagctactgggatgcttatgcgagtactaaggtggaacctactcactcactctgtctaacactctccaaccacgcgagcgtttctggcgtgcaacctgagtctgccaccgtatccatcataaccaacctttttttattacaaaaccctgatttcgtcgcggggaacactctcttactgaggatgcagagagttcgctcagcaagtggctgaagtgagaacaaagcacttgtcgtaaggccgcagcgctatggagcgatcacatca

SEQ ID NO: 108193 - DNA, 280 bp, Glycine max
  Clone ID: PAT_MRT3847_68713C.1
tatacggaaactttggcaggtgtcagcccgtgtaccatccagtgcgtcaaggagtggcccttgagaactaaattacatccccagatctatggtccacccgaatcagctatcgctaaacaagtcattgaaccgcaaatgattggctattgcacagttgaacaggccattaaggacaacaagttgtttatgttacactaccatgatttgttcttaccatatgtaacaaaagtgacacaaatcaagggaaccacgttatatggatcacgaactctgttctttc

SEQ ID NO: 108194 - DNA, 410 bp, Glycine max
  unsure (1)..(410): unsure at all n locations
  Clone ID: PAT_MRT3847_68714C.1
taacaccaaaagtatttattgataagcagagagtgatgattcaaattacatatttataaaagaccaccaaaacacatagcaaggactgtattctaaagctccaaacgcaacttgtacttcttattatttggagatacatatatgacacactatctctgtttaaaggatatacattttgaccttacttgcggtcgcatgggtcacaggagcagatagatccacagatgcagccaccngtctaagatgcaacacccagttcagcaccctccagtggggcgcttacaggcccaacacccaaaactagagtctttgtggctgcctaatcaacgtaactaaggtgagaagagtacttgatgtaaccgcaggtgctgacacagttgcggctgatatcacacgcacagctagacatt

SEQ ID NO: 108195 - DNA, 308 bp, Glycine max
  Clone ID: PAT_MRT3847_68715C.1
tacgaatttctaatagatgaagctattcttgactcatgcagtggctgcttacatggtcgtacgctaggaggaatatctttgagccgtgactatgaaacgaccggtggttctggtacctgattacctgatatgcttagaatcgaaagatggtgatgcacaagcccgtgaacgaagttttggagctgcacgagagcacataggtgcatggatttgagaaccgtgacaaggtgaagcttatgcgagatttgctgcaaatggctatctgaaatgctgccgagatcatctgatccaatataatgtcttgatga

SEQ ID NO: 108196 - DNA, 316 bp, Glycine max
  unsure (1)..(316): unsure at all n locations
  Clone ID: PAT_MRT3847_68716C.1
bgaagnangnangngtangnaagnanggaattagggangagngagaatgtanggagggnntngtnagnatgannnatatggatnngtntgagaanaangtaanangnggggntanaaaggnnntantannatgntnngtaaagaannnggtnnnatnggatgtatnanaaaanaagantaaggggaaattngnaagtggnatatgnaaggganaagganttattataaanatgagtgnnganagaaaagaagannnaagangaanangnaannnnanaggngaangnaagagngnngaganggnnnaagnnnagaa

SEQ ID NO: 108197 - DNA, 336 bp, Glycine max
  Clone ID: PAT_MRT3847_68717C.1
gtcaaacatacggactcacattcacttactttttatatgatcacactttacaaaagggctggcatcattttgatagcatgcgagactctgcattatatatgacattacatgatgactgctaattcaagattttggatctgaactcaaaaaggacacaccgtttcatagttattaagactcacttccatatctagcacatcttaatgtatacatttgatgatacttcccaatactattaatatatcactgtcagccttcctactaacgattgcacatatactgattatcattttcaatatcttactaaacgtaatgtccctaaaagcataatttttt

SEQ ID NO: 108198 - DNA, 1526 bp, Glycine max
  Clone ID: PAT_MRT3847_68718C.1
ccacgcgtcaccaggagagtctgcatgaagctttttattttcattttttttcttccttaactctatttctgaccaaaattattctttttgcagctacatcagccttaacaagagaagtcataataaacaaccaatcaattgtgggtaaaattgtagttctttaagctttgcttcatttttgtcgcgttaattgggcttaattccacttcaaagatagcacatggggaaagtggagggatataaatgcagagtacacaatactaaaagcaagttacagcactacattcaaaaaagctgacccttgttgcgggcgacgtgcaatgtagaaactcctcttctaagatcgaaggtaatgaatcaatttacacaataagaagcatttaagaacttatgccgagaagtgctaaaaaagtcaactactacaacatgtctgaagttacagctgtgttcaccagaagcctttcatgtacctcttctacttatctgtacctaagctcaaaattgttcgatgaaaaccgtctccaccttgctgcagggtcgccacacaagtaagacacttcgtctttgcaaataggtgggcaaatgggagcaccactgaccgaaaaaagtacttttgcaacaaacatggcaccaccatcgtttggtgtgctgcaacagcatcatcatcatcaacaaccaaatgggcaacccttcatgaaccaatacatgcacagtggccaccaccaccaacaacaagaggttaacatttctactcagtatagtttcggtagtgcaaatgggatgggtggagggagcgttgggatgaacggtgtggacatgttcaacgctattttggaccaaagcaaggctttgtcgaagatcatagagcaaaacaacaatagaagcagtagtggaggaacaacaaatggaggttcgagtagtgctattaataacgttgctggaagtaaaggaagtggggatgttatgactcttgactttttgggaataggaggtggaggaagtggtagtggtgggggtgcacatggaaatttctatggtggtgctcaacaaggggaaactggtgcaccggatgaggtttggagaaactggtctagtaagaacgcaggctttgaatcattttcaacaacgagcagcatttgaaaaagatcacccgacaaggaataaaagtcaacttttttagagggtggaattttcagctgatttggtcgttatgtgcttctttttctttaactaattaatcctccctttcggccacatatatagaatagaaatcgtgcgacaaacgactgaacgtgtctttctaaagaggaagacgcattgagtcgtcgacagtgtggtcgagtttcgcagcaccagccagtgcaacagtgtagacccatatccttagaggatctcataaatttgtgttcaaatgttaaaattaaggataatgtcaatttctgaaacacttttttatagttcatttttttaatctctcttttaatttagcacattcctctcaatatatattgtctttttatctctcc

SEQ ID NO: 108199 - DNA, 178 bp, Glycine max
  unsure (1)..(178): unsure at all n locations
  Clone ID: PAT_MRT3847_68719C.1
gnggaggattcctaagggtgancccacccttaataagggtggttcattatgggaacccattatttaaccagtaacctttgnattaaatcctaaagtaagcaccaaagggttaattgtacaannancccttgtaccctcactttgnattanattctaagtaggcaccaaaggttattgt

SEQ ID NO: 108200 - DNA, 1120 bp, Glycine max
  Clone ID: PAT_MRT3847_6871C.1
attcggctcgacaaataaactagtattaaggagctagaggcaatgggaaagagcaaggttcttgttgtgggtggaactgggtatgttgggaggagaatagtgaaggcaagtttagaacaaggccatgaaacctatgttcttcaacgtccagagattggtcttgacattgagaaggtgcagatgctgctttcattcaagaagcaaggtgctcaccttgtggaggcttctgtttctgatcaccagagcttagtggaagcagtgaagcttgtggatgttgtgatttgcaccatgtctggtgttcattttcgctctcacaacttgttggtgcagctcaaacttgtggaggccatcaaggctgcagggaacgttaagcgtttcttgccttcagaatttggcatggaccctgcacttatgggacatgcacttgaaccgggaagagtgacatttgatgagaaaatgaccgtaaggaaagcaattgaggatgccaacatccctttcacttacatttctgctaactgctttgcgggttacttcgctggtaacctctctcaaatggggactctcctccctccacgagacaaggtccttctctatggtgatggcaatgtcaaagttgtttatatgaatgaagatgatgttgcagcatacacaataaagacaattgatgatcctcgaacattgaacaagacggtatacctaagaccaccagaaaacattctcactcaaagacagctaattgaaaagtgggagaaactcataggaaaacaactagagaagtccagcataaatgaacaagactttcttgcttccatcaaaggtttggactatgcagctcaagtgggggtggggcatttctatcatattttctatgaaggttgtttgacaaactttgaaataggagaaggtggagaagaagcgtcagagctttatcctgaggtgaagtacacccgcatggatgaatacctaaaagtttataagcatgaaaaattatgtatttgaccttacttatcagtgattctatgtctgttgaatggtttgtaatcatgtttgatgtgattgtgaaatattttttttaactaaagtccccaagaacttgacataaataatagtgaccttgatt

SEQ ID NO: 108201 - DNA, 792 bp, Glycine max
  unsure (1)..(792): unsure at all n locations
  Clone ID: PAT_MRT3847_68720C.1
caaagcgtcgcgacaaaatggcgccattggagtcactggagaaagagtatccactcattgactctaattttcaaagcttctgcgcctcccacggcattttctctgttgaagattttcttctgcacgatctcgacgcattactttcctttacggataatcattccacttcacagaccctgaagcagggaattgaccagctgatctcaataatagacgctcttcatccaccattgctaaacggtttgcagctcttggaagatgctcagcgtaataaacatgttttgtccactggatgtgaaggaggtggattacgtgaagggcaattaactgaacttgttgggtcatcctcgtctggaaagacacaggcatgcctactgtctgcctcaactgttgttgcgaagcataagagttcagttatatacttagatacaggcaactccttttcacctcaacgtattgcacattttgttggtcagtcttctggccatatttttggcaatcaggctgatcatatgctcaaaaaagtattggacaggataatttgctactcagtgtttgacgtctatcagatgtttgatgtgctgcatcaactgaagattaatttaagatctgagattgtgaaatcaaatcagcatgttcgattgcttattgttgattcaatctcttcactgattacccccatccttgggggcagtggtcctcagggacatgctttaatgatatctngctgggtttttactgaaagaagntagcacatgagcataatattgcagtatttggtaacgaatcatg

SEQ ID NO: 108202 - DNA, 1098 bp, Glycine max
  Clone ID: PAT_MRT3847_68721C.1
gtaggtgaggaatacccaaacagcatctcattctactgtttattggccagatggcttctgcgctatttcgagctattgcagcactgggtagaaacatgattgtttccaacacatttggagcctttgcagttctcacgtttcttacattgggtggttacgttatgtcaaaaaatgatatcaaaaactggtggatttggggctactggatttcacctttaatgtatgggcagaatgctttgatggtcaatgaatttctttcaaacagttggcacaacactagccgcaatttaggagttgaatatctggagtctcgtgggttcccctcaagttcatattggtattggttaggcttaggggcaatggctggatttgtgttgcttttcaacgtgatgttttctgctgcactcgagatccttggccgtgagtacttttcacatcatttgtactttaatttttttttccagaaaagcaatgcaaggttttattgataagtatgcatctggaatgtgcatgcagcatttgataggctcgagcacaagcaacaataaccgaagaagaatcacctaatgaaggaaccgtagcagaagttgaattacctcgcatagaaagttcaggaagaggtgattctgttgtggagtccagccatggaaagaaaaaaggaatggttcttccttttgagccacattctatcacctttgatgaagtcatatactctgttgacatgccacaggaaatgaaggaacagggtgtacaagaggacagattggtgcttttgaagggtgttagtggtgcattcaggcctggtgttctcacagctttgatgggtgtaagtggagctggtaagactactttgatggatgttctggctggtaggaaaaccggaggatatattgatggaagcatcaaaatttctgggtaccctaagaagcaagaaacatttgctcgtatctctggctactgtgagcaaaatgatatccactcacctcatgttacagtttacgaatccttgctctactctgcatggcttcgtttaccttcaggtgttgattccaaaaccagaaagatgttcatgtgtgaactcataacagtaaaacatgt

SEQ ID NO: 108203 - DNA, 327 bp, Glycine max
  Clone ID: PAT_MRT3847_68722C.1
tacggcttcgagaagacgacagaagggggagtgtgtgagagagcgagcgagcgagcagtttcaaagagaggatttgggattgggaaggcgagggattgcgctgcgtctcttcctcttctctttcgattcatccctcattcataatctttcaatccaacaaccttaggcttacacttacacatacacacatttgaacgcgtatcgtcccttccatggcttcaaagcgcattcttaaggagcttaaggacttgcagaaagacccacccacttcttgcagcgcttgtccaatagcttaagacctggtccattggccagccaccaatattg

SEQ ID NO: 108204 - DNA, 273 bp, Glycine max
  unsure (1)..(273): unsure at all n locations
  Clone ID: PAT_MRT3847_68723C.1
gatcaattaccaaagcctaaagaagtggtggccaaggaagccatgcctccaaaatctccaatcactagaatggaacaaggagaaaaatctaatggacacaagacaaggcctcaacatgttcaagaggaaagcatgctgaaatccgccgcaattgcttcaaccccaagaaaagaaacaggaaaatctcaaaagggtcatgaggaaattgtgccaaagatagaggatataggaatgaagagttccaataagcaaatggacntcacaacnatatag

SEQ ID NO: 108205 - DNA, 431 bp, Glycine max
  Clone ID: PAT_MRT3847_68724C.1
acccacacgtcaatacggccgccagaagaggagcgaaggggttcaagcaggggcgctagaggagtcgacagccaacctctggaggatctgaatgacgtgtacagctatcatagaggaccagacggtgaacacgatgcccctcgacgtctaaagcatcgacacgattgacaatgtcagggctaagatgcaagacctggaaggcatcactccggatcatcagcatttgattttcgccggtaagcaacttgaacatggaacgaccttggccgagtacaagtatccagaaggaatcaacccttcaccttgtcctcaggcttcgtggtagcatcatcgatccttccctcatggctttggctcacacatacaaccacgacaccattatttgccgcaaatgctatgctcgtctgcagcctacggctgttaactgccgt

SEQ ID NO: 108206 - DNA, 684 bp, Glycine max
  Clone ID: PAT_MRT3847_68725C.1
caccgttgcagtggtaatattgtggttctgggaaagcgtagattacatagtgatagtagcggcgggcgaaggtttgatactgagtgtttgagaatggcatcatcgaaggtaatgtgtaggttgtcgtgtcggatacagagtgttgttgctcataatcataacaagttcaccaaaccctcaccactctctcctctttctctctctctctctgcgcgacgcctttctcgcacttcccggttaccagtggaattgggaagcttggaatcaatgatgccgttgcatagcgcggtagcttcagctcgattagtgtcaagcttgtctattgagtctctgggttggggattagttcctcaaggtatttccatgcctttatgacagcatttgtctgcagttagttgctgaaaggtagcattttcattggatggcaggctcatgttgatgttttcatttattgtaatcttgagaccactggcatagaatccttcatctgacatatttgaggaacatgccgtgcaactgatgttgcttacgtattgtttggttcattttatcttcatatatttctggaataacatttttggtttttccagtctggatgaattttttgtcaactaataatgcattaaagtgcattatatctgaggatttaatccatttactagttaacgtttccatttcattagt

SEQ ID NO: 108207 - DNA, 438 bp, Glycine max
  Clone ID: PAT_MRT3847_68726C.1
taatacctttgcttcttataaggcagcaggaaaccacccctctctgggcgagcaagttacatatcttcggatccataatcatttactgcacatgatgcttttgatcctgggaacacccaaaccatacccgtggaggaggatactctaattctttccttgattcacaaccatggaatatatctaccaggcaatgcctgcatttgccatatcaaagtttcttccactagagctaaaccccgctaaagctgatccggccttctctagagtacactctgctaaactttaggatgctaaccttttgctcctggacctgaaaggtccctactaggaacaacccgttccccctgcaaaggaacattggatccgggttcaactacaaacacttgttgctcagaaagatctattatatagtgagaacctccttattcacaggagaat

SEQ ID NO: 108208 - DNA, 310 bp, Glycine max
  Clone ID: PAT_MRT3847_68727C.1
gcgttgcgagatataatcaaactggatataacgttaatcgcacatctacacatcgtccacagtcaatgtgaaagggcatcacgtaccgaagcactttctcattgaaactgcaaccagatttaaacacttgcttctcatgtcagcgaatttcgtaactggagtctcctcgaacaggtacaacatgtgccgacattgtcatggtttggcaagcatatgcattgccggatgtttcgatgagaaccacacgcgcgagttaaatgacacactggtatgtttttacattcatgcaagcttcatggtcagcattatg

SEQ ID NO: 108209 - DNA, 293 bp, Glycine max
  Clone ID: PAT_MRT3847_68728C.1
gcgacaaaagagatatattactagcacaactgcagtaaaaacacccaaaacacaccctataagttatatattactcacaaattgtatgcaacacctcaagcctatctatacattattcaacacataccaatcggactattttttctacagaggttgcttccatgcaagcgattgacaccataggcaatcccatcttcccaaacgattctaggagagtacactatagctagctccttaaaccatgatggccaaaatctacagcttgcatactacctgcaataacaggcaaaagc

SEQ ID NO: 108210 - DNA, 320 bp, Glycine max
  Clone ID: PAT_MRT3847_68729C.1
ttgctcggaattctcctcgagctaacctgcttcaccactccatgttgctttctacactcgttgcttcgaattggtaacgtcccacacgctgcggttaacattcgacagagggcgagagaaagaagcccaactcggttgctttcttcctcattttctctatgttctctgaatgatgaatctatgtcagaacatagctacaattaggacttgattgctactcgagcgttcgacaaatttccatcaaacctccctgcacacctcgaactatttcaaacacttgctcttttccccctcattcctcctcgtgctcactgttcctc

SEQ ID NO: 108211 - DNA, 292 bp, Glycine max
  Clone ID: PAT_MRT3847_6872C.1
cccatttttccgcttgatacaaccgagccggatggggggaacgtagatgcttatgagggtattgcaagtctagggggaacatttggttccgaataatgttcgaatgtaaatgacagccaataagagtttgcaagtaataccacaacatattgaatgggggccatccaggaaagatggacaccggatcaagccaggaagtggaaacacagcagaatagggaacgactgacggcaaagcaataggtgatggaaagcaacagttaccgcacgagaagcaatagcggtatgtaaca

SEQ ID NO: 108212 - DNA, 514 bp, Glycine max
  Clone ID: PAT_MRT3847_68730C.1
aaacccccaaacccaggaattaaattaattaaaacaaaaaaaaaaggggaaggcatccatttaaaccccgaaaagctttgaaaatgcgtcactactacaacagaaactacaaaaaaattaaaacagacaattcaaaaagacccaaatttgacaaactttactaaatcaactttggggggacgtttaaacaacactagcctgtaaaacagcctggggaggggctccatcataggttccgggaggagccccacctggattaccatcggtggaatatacgggggggtgagcataacccccaccaccataaaaactggtgctatacaagggaggagcctggccaaaaccgggttgaccaccgggggggacaccaccatatgaggggggaccataccccgggtggactggaccaccgaaaccaaatgggggagctttttaaaaacctgactctgggggggcatatcccccaaaaggggggggctaaaaagggggatttccaaattgcaaaggaccagat

SEQ ID NO: 108213 - DNA, 453 bp, Glycine max
  Clone ID: PAT_MRT3847_68731C.1
tggatcctgtagagcggccgctttttttttttttttttttttttttttttggctgaaaactacccgatcataaaattggcttgggtttctagcaaaacatagaaccttttttcgagccataaaatcctcgttagatcaaacaatacaaaatacaacacgacgacgtaaaaactaaaataaatatcaagccacaacacctaaaaaaaaaacccagtatgaaaaggacatgctgtggggaagcaaagagaaatgtgatgcacatcaaagccccccccagaagataacaatgcaactgtgaatctgcactggccaatgtgttaacgatagtacataagctgctgtctcgatgaattaccggtgtatccatcatacatggcttgagatgccccagaggttatgcccatggaagcaggagctaggccatgttgtccagtcatttgcagaagagcttga

SEQ ID NO: 108214 - DNA, 135 bp, Glycine max
  Clone ID: PAT_MRT3847_68732C.1
ttagtcagtaattcagggagtgcaaggacctttctaattgcatctcaataggatcagttatttagaatttaggtaggattattagttagaattagttatggttagttaagctgtatagaggtctataaatacctg

SEQ ID NO: 108215 - DNA, 281 bp, Glycine max
  Clone ID: PAT_MRT3847_68733C.1
cgacggctgcgacaagccgcccgcaggggccgcccctgcttccccatggcttcttctccctcacatccatcctttctgtccctcctgaacctgtctgcatccattcccatttcttcttccgtctgcatgttcccaccgtctaaaaaaccccgcaacgcaacaaaacggcgtcatgcctcggcacgtagcatgcactggtacccctagcactcggcgggcacttctgctcggccttggaggactctatggtgctcccacaagtctcccacgtaacaacactg

SEQ ID NO: 108216 - DNA, 752 bp, Glycine max
  Clone ID: PAT_MRT3847_68734C.1
ccacgcgtccgcacactcactgagtttgtagaattgaagtctcgtcgttaacattgccatttgtagaattgaactctttaccctgcctgcattgtgatccgccgccgaatcctgtttcctctaagagattgtaaatggcgtcatcagcgagtggagcgacgggatggtacagaggaaaggtgaaatcggttccttcgggggattgcgtggtcatcatggccatgcctaccggcaagcctggtcctttgcctgaaaagtccatcacgttatcatctctaatggctcctagactggcgcgtagaggtggtgtagatgagccgtttgcatgggaaagtagagagtttctacggaagctctgcattgggaaggaggtggccttcagagttgattacaccgtgccatcgataaatcgtgactttggcacagtttttattggggataagaatgttgcaatgctggttgtttctgcaggatgggcaaagataagagagcaggggcaacagaagggcgaggcaagtccttacctagcagaattgttacggttggaggaacaagctaaacaagaaggccttggtcgttggagcaagattcctggtgctgctgaggcatccatcagaaatctaccaccatcggccattggtgactctagcaactttaatgctagggatttattacatgctaacaagggcaggcccatggaaggaattgttgagcaggttcgcgatggcagtaccctgcgtgtctatttgctc

SEQ ID NO: 108217 - DNA, 143 bp, Glycine max
  Clone ID: PAT_MRT3847_68735C.1
ctatagcagctaggtataggccatataccagagcgacctacagccgtagaagatggctgcatccagttcattaatgaggtcggacatcacaaaccactatctctacaagatttgagggcaagtaatgatgcgacctcatcttc

SEQ ID NO: 108218 - DNA, 245 bp, Glycine max
  Clone ID: PAT_MRT3847_68736C.1
gtgtgattaccggccaaaacagcaccattttgccacttactacgtcttgcctgcttctctgcttcatgccccctcaatcgtctcatcttgtttctgcatctaagttgactaaaattcaatgtcaacaagttggttgtgtatgacctttttgcttactgttcaggaaaggaatgctacatatgcatcccccttaggatttggaggagtctaaaggtggatgatagaatgtagtcattggcttgctg

SEQ ID NO: 108219 - DNA, 111 bp, Glycine max
  Clone ID: PAT_MRT3847_68737C.1
gagaaaatgcacagcttattgaacaaaaaaacacacgtatatgcgcaatagttacgccgctttattgactgtgaataatatgttccatacgtctaccacaaacgctaaagg

SEQ ID NO: 108220 - DNA, 272 bp, Glycine max
  unsure (1)..(272): unsure at all n locations
  Clone ID: PAT_MRT3847_68738C.1
gcatggagaagttggagaaatggaagatggctctgcatgcaagtagctaacttgtctgacattaaaatcaaacatggagctcgatatgaatacgactttattggggagatagttgagtgggtctccagtaagattnaatcctgctcattacccggttggattacggtcaaaagtgctggaagttaggaaacttttggatgttggacgtgatgatggtgtccacatgttagggatccatggaattgatggtgtagggaaatcaacattgcang

SEQ ID NO: 108221 - DNA, 169 bp, Glycine max
  Clone ID: PAT_MRT3847_68739C.1
ttcgtcctctcgtcgcgtccacgcgtacgattgcattgcatgagctaaagctcgaaaagaaaacgatccctctgctatgctatgctctgtaagagtgaggggctacgtgcgatgtatctgcctgtttctccgcgcatccgcgtcgatcatacaatgcatgatcacatca

SEQ ID NO: 108222 - DNA, 289 bp, Glycine max
  Clone ID: PAT_MRT3847_6873C.1
agctaacactatcaagcgcacagcaacggctatggctgctctatctaatggcctcaattccatggttggctcactaacccacaatatcactacagacattactttaattgctaatatcggtggaagagtgcattgtatgcaactgcgaacaccatgtgggacgaataaaaatgacacttttacctacatagaaaacatcatggatgcacaatcggcagcacgaacccgtaaactcttcttatgacatggatggaatgcgggcttggaattcgaagatgaccactgtttc

SEQ ID NO: 108223 - DNA, 196 bp, Glycine max
  Clone ID: PAT_MRT3847_68740C.1
tcgctctatggccgcaccggagaaagccaaagattccttgccttccgctttccgaagtacaaatatccctgctgtcgcggaatattcccttgttggccaccgctgtaaaccgtcacatcccacatgaaagttgcagtgttgccttttcattctctggcgtcagatgttttttcccgcgaggagccatattttcgac

SEQ ID NO: 108224 - DNA, 294 bp, Glycine max
  Clone ID: PAT_MRT3847_68741C.1
ggagcctaaggttcagcaagcacctttcaaagtaggaatgacaaagctgttctacatctgtgcattaactctgacacacacgataaggcattcatcattccaagactcacgactgaccgatcaaattatgtatgacaccaaaatcagcacaccaaaaagtcaacgctcaatcccctgtggacactcactaatccaacaatcgaatactctgatacggtggaacgaggatactgaaggaccttaacgtgaacactgttcacacagcaggaagctgctaagttctaaagagctggg

SEQ ID NO: 108225 - DNA, 275 bp, Glycine max
  Clone ID: PAT_MRT3847_68742C.1
ggttgatgcaaacatcccccctgctgggacacccttggctctagaaagtcagtgctgatgcatggcttcgacaactatctctggagactaaccagccttttacgtactggggaaacgctcacctgatatctcatgccttttttgctgagatgcctatcttcacctttttttgaaaaattacagaccatttccattctgtcattgccgttcttacctacccaaatagatgcagttcatgatacagtaggggggggacataacctaatcagaaggca

SEQ ID NO: 108226 - DNA, 184 bp, Glycine max
  Clone ID: PAT_MRT3847_68743C.1
gagcacagacacacacatatgcttgtctgttccgtctcttttatttgatttattcttatgttgtataattatgccaattcagctaacctataatcctgaaatggcataattatacaacataagaatgccatttcaggattataggttagctgaattgacttctaagcacgtcaaactctttcgt

SEQ ID NO: 108227 - DNA, 151 bp, Glycine max
  Clone ID: PAT_MRT3847_68744C.1
acctctgtaggcgggaaaccaaaagggaaggctctaacccaccatacctattgcaagcaacaatgaacttaaatccaaaggggacatcttgctcgactagcaaattactcataagtcgaatatttaataaattgatctgacgatggcggat

SEQ ID NO: 108228 - DNA, 430 bp, Glycine max
  Clone ID: PAT_MRT3847_68745C.1
gcccgagcttcatcttggaccggatttctgtgagagaataactagtgatgctattaaagcaattgctcattgctgtcctaaattgaataaacttagactctcacgcatcagggacctaaatgctgatgctattaatgcctgggctaagcatagttcaaagttgactgatattgcgttcattgattgtctgaatgttgatgatgttgcgctgggaaatgtgttatcagatgccttcctttctgatgcgaggacatcaactatgaaatggggtgtggattcccatctttggcataaactgcctaacctgatagggttagatgtctcaagaactgatattggcccatctgctcttttaataatgttatccttatcacagaattcgagggctttaattgctctgaattgtcccatacttgaagaagacaccagc

SEQ ID NO: 108229 - DNA, 249 bp, Glycine max
  Clone ID: PAT_MRT3847_68746C.1
gtccagtaaacatccacttcttcttctagtccttctaatccagaccaccacgatacccaaattcatattgacactgtgtactctttgattgtgtacttgtttgtctgtgactctaacaatctttagaagaattcagcccatgaactgatggtgtcgtcggttagcgatcaaggcgtaagctcgtaatcgcaagtcttggaggtcaagcataatggagtctgaaaatggagtcgatattgaggacgacga

SEQ ID NO: 108230 - DNA, 572 bp, Glycine max
  Clone ID: PAT_MRT3847_68747C.1
gaagaagcagggtaaacattaaaatcaatcggaaagtggagatgtcacggagaatcgggacaaagctcttcgtccacagttagggttattctcttgtcccagattcaagctcaacccctccctcaccattgcttcgtttcatttttttcaggattatccttttacactacacaggagcagctcaagaagttgttctctccattcggactagttacccaagctgatctagctttggatcctataaccaaaaggcccaaaggtttcggctttgtctccttcaaatctgaaattgaagcggaaaaggctttgaaagccatgaatggcagggtaattaatggaaggctgattttggttgaacctgcaaacgaaaaatgacctggaggagacagtgccttatatacagtggttacattctcttatctatatccactttattaaacaaaaatgtgctaggcatcgtatattggtatgcttggattaactacattgttgttgtaagtgactatgcactgaaggtgtttgttgaaatgaccgattgattggtgattgcaatttataaagatatataatat

SEQ ID NO: 108231 - DNA, 484 bp, Glycine max
  Clone ID: PAT_MRT3847_68748C.1
aaataatagctaataagctcattaattgtatcattatcatcacatatattaaaatatgggatagttccaagcacctgatagattaattcccctacaaccatgtgtgtatacagatcacacgtatcaaatcatttacctttatcacttttcaggggtcagcattatatcccaacatgcatgctaaaacaagcattctaaaggtaaaattccaaaattctgaaccgagttatatactaactaaaccaacatggtcacacctacgaagccaacattccttgactaacagattgttgatcagccatgtagcatatattggaagaccaggaaatagcagataaacaaaacagggttgtctagaaaagaaaccaaggagtgatctgctttatttgtttgggttattcaacttcactactttttagtggcctgaagtttgaggtagcttaaaagaacccccagcataaagcatttggtacacgggcttaat

SEQ ID NO: 108232 - DNA, 133 bp, Glycine max
  Clone ID: PAT_MRT3847_68749C.1
acgacagaaggggagaaaagagatcaacgccacgaatagtgaagagtgaagagcaccgagtgaggattatagatatgcgttagatcagtgtgaggtatcttcagggtctgagtctcagatgggctattcagac

SEQ ID NO: 108233 - DNA, 373 bp, Glycine max
  Clone ID: PAT_MRT3847_6874C.1
accccaaacctttttttgattttaaaaaatagggggggggggtcaacccccccgggcgggaaaaaaaagaggcgaggccaagggaaaagacaaaacccaaactggggggggggtccccccaacaagaaaagggggggggggaggagtggattgttttttttgttttaacccaagccttaaattggaaaaaaccaaccctggggggggggggggggggctttttctttcccttaaggagaaggggaaaggcccccttaccaaggggggggaagtaaattcccagtcccctgttcgttttcaaagccccgttccccaccgggcccttttgctttgccaaggtaaaaattttggtgggccgcccctttcctgggcc

SEQ ID NO: 108234 - DNA, 634 bp, Glycine max
  Clone ID: PAT_MRT3847_68750C.1
ccacgcgtccggacactcatcaccttgaacgggaggtagacaggtggtgcttgatcattggctgcatgggtattgtaactttagttgccaactttttacagcatttctactttggtattatgggagagaaaatgacggaaagagttaggagaatgatgttctcagccatgctacgcaatgaagtgggatggtttgatgatgaggaaaacagtgctgacaatttgtccatgcgattggccaatgatgctacttttgtgcgagctgcttttagcaacaggctttccatatttatacaggacagtgctgcagttattgttggtcttctcattggtgctttgctgcactggcggttagcacttgtggcttttgcaacccttccaattctctctgtttctgccattgcccagaaattttggcttgcgggattttcgaggggcatccaggaaatgcacaaaaaggcatctttggttcttgaagatgagttaggaacatttacactgttgttgccctttgtgctggtaataaggtaatggagctctacaggctgcaattaaaggaaaatatttaagcagagctttctttatggggatggcaattgggttttgcatttggcttttcacagtttctacttttt

SEQ ID NO: 108235 - DNA, 533 bp, Glycine max
  Clone ID: PAT_MRT3847_68751C.1
aaaaggcattttagtagttttatggccctcgaaggggaaaaatacttccaaataacccttgttaaaaaaaacgaacccaatttttgagttagggaaagttttcccggcaacatttaacccagtaaatgaggtgattgaacatgggggcccctttaagggttaagtcaaattggggataccagcatcctttgtggagtcaatttaaaattttttaaacaccccttaacagcacatttttccccaaacccccggacttgttttttaaccccaagtacctgccaatttatggggcctttgatgatccttgatttaggacaccttgaactcagcacaataaattcaccttttggacccttttgtccacccacaaccaaaagttgttttccacaaactttgaaagccaccccccaacctttaaaaaaatccgccttgattggaagcctccccaattctttccaggggtttttttccttgccatattttttcaccatgttagccaaatgctcaactgcatatagttgattatccacaac

SEQ ID NO: 108236 - DNA, 469 bp, Glycine max
  Clone ID: PAT_MRT3847_68752C.1
cggccggcctttttttttttattttggagtttgcagactctaggaattccgctacaatggtcgttgcaccaaaagttatggaagctgtatcaccgagctggatttactttttgtaaaaaggaacctgcttccatttgccatattcaacattagttatgtcaccagactttttcctgaaaagtattttaatgataaaaccgttcccccgttatagatgacaataaattatcttatgccctaggatgctgagcctggcatattgaccgattggatggagaaaggaggctactacgctttacataataaatacctgtcaacccttctgttttgagggtgctaagcacaagacggaccgacgatagatgaatatgcacttttatttatgcttgccaagcttgacaaccaagatgtgtccattagtatcaaccgcactggaagacttgcgtacctgtggaccttcagcacaact

SEQ ID NO: 108237 - DNA, 723 bp, Glycine max
  Clone ID: PAT_MRT3847_68753C.1
ccacgcgtccggtgtttggcattttacaccaattgcctgcagaactcgacggtccttagcagtaaaccaattgataaatcgagacataccatccaaaagtttgagaggtggggatatagggattcgttcccttgagaaaagcagtggaattggcctacaggcatccaaagcattgaattctaaatctactacaggatcttctgatcactttgaagtagatgataattccaaatcatgtcaatttgagaattcggttccaaaggcaagtgctgttaatgtcagtgatgatgttaaaatagatacattagattgtcctaaaagaaggagatctcttaggattaggcagttgtctaatgatgataaacaatctgagacattagttggttcatctaaaccatctgcacaccctgaagatattgggaaatctactgctgggaagagaaaaatgagaacagattctgtagtcaaattccatgtgaattgccaagctcgctcatcttcgtatgatggttcagtaataacttctgttgatcgaaaacaaggtaaaatatcagagataaatttagataaagctaacccaggggacaatatcaataattctgaagtctccagttcagatgaatcaccaagagagaggtacaagtcatctgacttggcatctgcaactcaggcaaagtgtaagatgcctgtgaatgatgcatcacccatttgtatgggtgatga

SEQ ID NO: 108238 - DNA, 1776 bp, Glycine max
  Clone ID: PAT_MRT3847_68754C.1
tacggctgcgagaagacgacagaagggggaaaaaatggcgatgctcaagagatgctgtagtagatcagaagtattgcgaacggcacatgaaccgaggacgccatcgttcaagaaagcctgtggaaggccaatcaggccatgccctcaccaccactaacacacctaatgcttcctcaaactcaaccgtggtgcccggcaaccacaacaacaacacctttgcacacatcaatgtgcaccaccctcttcctcctcattcctctccagccaataccatcaataggatgtttatgagtaataataaagagaacaacaacacgagtgagaggacgaaggatggccttgcccttcccatgctacctcctactcttgagccgaaaccaaaggacaacaacaactctttcatggttcataaacaccaagaaccatatgatgaatcctcaaggaacaagaatgagtttggactcgtcacttctgattccttgcttaacccttcacagaaaagaagctttgattcttcttcttcttcacaaaaggatgattctgagtcccaacaacaacattccctcaggcacttcattgatgactctcccaaaccacagtctcatcataatcatcatcgttcgtcgtcatatttggcctgaactcgacaacatgcagtcagacaggactcagttatcaatctccataccaatatcttcctcagatcacttcatgtcattcactacttcctcgccctcgaacgagaaactcacgttgtcgccacttaggctttcgagggagttagaccccattcaaatggggttgggagtgggaagcgtgcctccaatgaagcaaacactaggcaagccaattggattccaatcacttgggagagttcaatgggtggtcctcttggagaggttttgaaccttagtaaaataatataacagcaatgcaagtgatcaatgtggcaagaacaacaacacttcagctctcaacctcatgaaagatgatgacgatgatgatgggtgggacaatagtcctcctccaatagggtcatcaccaactggggtgcttcaaaaaacagcatttggatcactttccaacagcagtgctgggagcagtccaaggggggcaccagagaacaacaacaaagaatagagatttctgattccttgttttcacgtttgaactgttttttgttgttgttgttcttcttcttcctcaaaaaattgtttgggaatggattggcgtttgtagaatgtgtggaccacaacaactcaacaagagttgtagctggctagctactgtctctttcactccaaagttcttcaaaatctttggtttcacgggtttgtactattgtctgtttttatatttggaattgtttaacttaaaaaaattacttcgattttcattttaacttttgcaatgccttgtaaagtacttcatacaaaaaaaagcccttgcccttgaactatggtgaacccatgatggaggaaaaaaaaaaaaaggcctttgttctttttacttcaattattagtgaagtttatatatataatatatatggtaatgctagagtttggaaatatgtgttcatgttcatgctaattacccttgcctaaataatttggatgtgtaggtaggttttttggtttggttgacttttactttgtttctttctattcatgcgtttttggcaaagtttgtattcaccagtaagtgaacaatgttggttggagtgtgtggacttggttgtttgttaaggaaataataatggtcaggttttggggtccc

SEQ ID NO: 108239 - DNA, 796 bp, Glycine max
  Clone ID: PAT_MRT3847_68755C.1
atttggcccgaactggacagcatgcaatcagacaggactcagttatcaatctccataccgatatcttcctcagattttatgtcattcactacttccctcaccctccaacgagaactcacgttgtccccattggggctttcgagggagttagaccccattcaaatggagttgggaatgggaagtggtgcctccaatgaagcaaacaccaggcaagccaattggattccaatcacttgggagagttcaatgggtggtcctcttggagaggtattgaaccttagcaataacagcaatgcaagtgatcaatgtggcaagaacaacaacacttcagctctcaacctcatgaaagatgggtgggacaataatcctccactagggtcatccccaactggggtgcttcaaaaatcagcatttggatcactttccaatagcagtgctgggagcagtccaagggcagaaaacaacaaagaaggtgccaccttgtgcaatgccttgtaaagtacttcatacaagaagaagcccttgcccttgaactatggtgaagccatgatggaggaagaagaagaaaaggactttgttctttttacttcaattattagtgaagtttatatatataatatatatggtaatgctagagtttggaaatatgtgttcatgttcatgctaattacccttgcctaaataatttggatgtgtaggtaggttttttggtttggttgacttttactttgtttctttctattcatgcgtttttggcaaagtttgtattcaacagtaagtgaacgatgttggttgg

SEQ ID NO: 108240 - DNA, 334 bp, Glycine max
  Clone ID: PAT_MRT3847_68756C.1
acaaccctgctaaaaggactggtgcatataattttgtttttaaagagggaaagggttttacgggtgttccaatttggggttgcccaaaaactcattgggggatccctccttttgggtccaaaaaggctttaataaagaaaaacatggacctctgaactttaatattggagggaaaattcctaataccatggcccctcccaatgacttttaggagtggaaattggcctccaaattagtggcccctttttttttttaaaaacagggaaattggggaccttttcttttttttaaaaaataaacttgaccccgcaaacggggggtcaaaaaaacaaaa

SEQ ID NO: 108241 - DNA, 806 bp, Glycine max
  Clone ID: PAT_MRT3847_68757C.1
cttgatgcctgcgttttgatgttaaatatgtgacatagattgaagttacaggacacaagttctttaatttatgtttccttcctaaattttaggtgcacaatcaattaaaaattagctcttctattaatcaaaagatttgttcttcatatgtaatggtatttgatataattcttttttagcaatcaagttatgccttgttttatgatagcaaggcaaaaatcatttaccatgttcatcataacatcaaaaatagcaaaaagatcattttatgtcaatttgttcgaacaaaagtagaagtgtattccctaacttagtgtatttttaactttctcaaaatgtttttttattggcaaatgttagttgttaattgttaattttttgttagtgggaggattcaaacccatgacttccaactccaagccaaccttataactccaactttcccaaaatgttcaatattatgttttaacttttaactataactaaaccagcataaaattatcataaaaaatgcacacaaagactcaccacttatattcactcctactgtcaaagaactaattgttactattgtttaaatatctgttttgttcagtttctaaaactttcgttattccaataaaatcaggttttctctttacaccagtatcaaggctgccttttctagaaagtaaaatgagggcatgttattatgcagctttttgtaggaattttgaagggggaaaaaagtattaagatgctcaataagccaagcagtaaaaactgcaagaatagcaaagaaaaactcaccagtaattgctctgact

SEQ ID NO: 108242 - DNA, 414 bp, Glycine max
  Clone ID: PAT_MRT3847_68758C.1
ctcgagccgaatcggctcgaggaagacgacagaagggggagagaaaaaagattgtttgttgctgtgttgtgtgcgtaaaatgggaaagagaggggggaggcttctattgggaacaaaactattttaacccttctacttttctttttcttgaccaaattggttcctttcccttttgctattttgctttccgtacccaccacttgcaccaaatgccttttttaaaaaatcccacacaacatttgccttttggcccattaccttcttattcccaaggaatacaaccacaaccccaccattggccgtaaggggaccttacccttttgaaaccatttttattaccaggggaaccccacacattgtaatatttcatttaccaactaagaaggttggaacctccctgcattccttttgggt

SEQ ID NO: 108243 - DNA, 217 bp, Glycine max
  Clone ID: PAT_MRT3847_68759C.1
gcatctcgaacattccggtgaaccttcgtttctgattctggtctcttcaatgaatgggatgttatcaggtatctgtgggcttccgctctctattccgttcactggatcgctgggaagcacaattacgcttaggatagacctaatgtgttttatatgggtggtaaaacagctaagacttgccctgtggttcatgcttgtaggaggtctcctatattgg

SEQ ID NO: 108244 - DNA, 273 bp, Glycine max
  Clone ID: PAT_MRT3847_6875C.1
ttttgttttttttttttttttttttttttttttttttttcaaattttttcatttttttttttacttttggggaaaaaggatcttgctaaacaaaaaaataaatgcttttttggaaaactggttaaaaaaaacctaccaccgaattctaatcttgaaacgaaatttcatttttacaacaaggcctggtttcccattgaataattattgattttacccacctgcgaaagtaaaacataaccctaatcggcaacattaatttgctaccccacgcca

SEQ ID NO: 108245 - DNA, 641 bp, Glycine max
  Clone ID: PAT_MRT3847_68760C.1
atggagaagatggattacattgaacgcagtcaaacacaacaatctcgttctcatttatacaataaatgttcacatattttccttatcagaataatatttaagagcaacaatatgagaaacacgaactttcgagtttctctcaagaacgtaacaaacgtatccaattcgaacagaaaggggaaaaaaatgatgaaaaggtgcgaatttgtgtttgaagaagcaagaagaggagggtgcaaggagcacccatatgataagcaatcaccaggtgtttgctcctcttgcttaagggaaaagctctctcagctatacaacacaaaccctattattgatcctcgttgtttttctccagcttcttcgcctgcttctcctcatcaatctttttcttcttcgaaacacggctcctccggtcaccggaggccgcgcttccggaggaacgcttcgcacgtggcggaatctgcctcgtgcatgctgagcttgaacttgaagaagagcaagtcgctggcgtttgcttcgaggcacagggatgtgatgatgagtggaaggaagaaagatgggttttggacaaaggtgctcaaactcaagagaaatgatgagttctagggccttagggttcgtttgtttttctttttcatgatccc

SEQ ID NO: 108246 - DNA, 308 bp, Glycine max
  Clone ID: PAT_MRT3847_68761C.1
gttttaacttaatatatgacttttgttatgtttctttatgttaaaatgctcctagatttatgatttttagttattgactatgaatttgtgtttttatatgtctttattaattgtatatgttatgttttattgttgatcgtaaatcttacgattcacaatttggtaaataaataggtcttctgattcatgatttgaatctcaattcaactatcagatactggaccattcataaaagatttttttatttaaaaatcttcaataacatacctgtcttgtcagcatttggtgctttggtgatcatattttgt

SEQ ID NO: 108247 - DNA, 519 bp, Glycine max
  unsure (1)..(519): unsure at all n locations
  Clone ID: PAT_MRT3847_68762C.1
aaagaatcatgctactttcgatggcctgcacttacaaatgtattgagcaaaaagctacaactctggctcaatattagtttaatagcatttaaacaacaatggcacaaggcgataggggtgctgttgtgttagtagcatcactgtagctaaaaaagcctgcccagtgagaggtttctgtttaattgcactaatttccaattttaccgagtgactatacaaaagaatacacacaatggaaccaaaaactaggcaaacctctgacaaggcgatcacaaataaaggagaaaaatcaaattcaacaggtaaactatccagggttgtatgaagtggaagtcaaaacagccgatttcaacttgaggaaacctttcaatttctgtcggcaagcattagaagataataacttaacaagctcagcaacaacattaaaaaacccagacacctaggtactttgcttaacctttgntaaactggggcatccgaatgaattctctcgtacaagcggtgcatgagtggagattt

SEQ ID NO: 108248 - DNA, 250 bp, Glycine max
  Clone ID: PAT_MRT3847_68763C.1
caatagtattaaattttgcgaagtatgatgatttatctattgaggcctattctggaacctggggatgtggcatcggcattggcctgcgatgtccatgtccacactttgaataactatggaagcaacaatgttcaaacatgaattggacttacttgttctcctcctaagcctatcgtgaagccaactgatatgacatccggactcctcgcgggtagcgacctcaaactcgctattatgagtcatattaaat

SEQ ID NO: 108249 - DNA, 730 bp, Glycine max
  unsure (1)..(730): unsure at all n locations
  Clone ID: PAT_MRT3847_68764C.1
aaaganccacgcgaaacaccaagaaaaaaggacacaatagtgttaagaaagttaacaaaaaataaaatgatgttatgtcttgaacaagcactacactaagccaaaacaatatatccatacccacctacttgctatggctgatgctgacaattgtcaccaaaaagtgcacccaaagcatcttgctgaacaaattgatcgctttcatacttagtattattcccaaaccaacccaagtcaagtaaagcatctggctgtgtgtaatccacctgtttcaatatttttttcttactggaactatctgggaactgggtggtaggtgcttcatgcttatcatcatgatcctgactggtttcagttgattgatacccatccacagagcacattcgtacaggagtatagtcagtcaggactgaagcagcagattgacctaagggggaatttggatcgcctagttcatcccattctgtctgaaaggaatgattcaaggttgaaatattagctacttcattggctgtagcaattgtctcttgcaataataaatcattgtttgagcctttcaagcttttcgagttgtagactatcgcttctagcaaaccactgctttgtggagaaatgggatctgatagaatnnnctcaagtgtnnnnnactgaatcaatgtatcaacagactccnntgnnnnangtggggacatnngcgggccccnnntannatgttgagtttctnnnnnnt

SEQ ID NO: 108250 - DNA, 1034 bp, Glycine max
  Clone ID: PAT_MRT3847_68765C.1
aggatgaaaaacaaaccattaacttaacggataatcatgctaaggaagaacatcgctgaattccatattctcaactaaatgaatttgcgccacttttaattgtcttctaatctaaaggtatacgtcaccttcaaaatggtgaaaataaaaagggaaaatacctacaactagtaaaaattagaggatgcctcctttcacaaagagcaaagcacaaatgaatgaatccccttcctctacattcctctattttttacctcactccttgactaactaactaacatcctaactgtcttaactaacttccccttccacctctcctaactcctagtagtgttgtgtctgtatggtactttgagattcatcagcagccaacagctttgtccccaactctttccttggtttaggcgaaagtcctttggctaacttgtgaggagctgaataggaacatctcctcatcatacttcctagccatatctatgagggccttgtccacaagagcatctatcaaggcattgtaagccgcagcatcgggactacacccaagttgcttcatcttattccacaccataaaaaccgggcgaagaaacccccacctcccaaacttgttgaggagcatgacataggtgtccatggtgggcctaaccccactctccaccatctcatcaaacatagcaagtatctgtttaggcttctccatggaggcaaaaaaacaatggtaagaaacggcagtggggtggcagccatcacggggcatgatggttcggagtaacgcaagtgcctccttgtgtctatagcaatcacacagaagcctaatcaatgtgttgtaagtgacaacagtggggttgatacccaactccttcatttcacggaaaaccctaattgaaaaatcaactccatgtgatagaccaatggctcgaatgacaatgttataaaccacaacatctaatttgaaacctttttttttaatctccttgaacaatttcacagccttccaaggtttcccacctttggcagagatatccatgtaaattgat

SEQ ID NO: 108251 - DNA, 779 bp, Glycine max
  unsure (1)..(779): unsure at all n locations
  Clone ID: PAT_MRT3847_68766C.1
gcgcatgctatttgttttggcatgcttctttgttcaaagtgaaaagcctagtgtcccattatcaggagctaaagacaatccatctcggctatataatacgttttatacaatctcctaaggtgtttaaagagttgagtgggggttgagtccacagtgaatgatatttgtgactgaaaagggccaaaaacatgatcatgaggaagcacaacaacccactttggtttgtggtgttcttgtttccctcttaggctccttttggtgaacttcagagtgcaaagttggttggttggtgggttggtgtggttgcttcattttctaggtgcattttggtttctctctttttgtcatggctggtggacggagacaacagaggctcaacaagtcatgcattctcctcatagccattgcaggaatagaaaggtttgcattcaagggggtggcatccaacttggtgacttacctaactgatgttgtgaacttgagtaactcatctgcagcaaagatggttaacagttgggttggatttacttccataatgccattgctggtggcaccaattgctgacgcatattggcacaaatattccaccataatggtttcatctttcctgtattttgtgggacttgcagcattgacaacaactgcactagcaaggtcatggcatcacaaaaacagaacaatgtctntntcatttctctctctgnctctctatttaatttcattaggccaagggtggttacaacccatctctgcaagcctttggagcagatcaacttggt

SEQ ID NO: 108252 - DNA, 402 bp, Glycine max
  Clone ID: PAT_MRT3847_68767C.1
ccgaaacaagaaaatggcgtatttctggtttgatttggcaaataatagcaatgtggccaatgcacttggggtgcttttcttctacattttttacaggactgtggtgcttagttataggaagcagaagaaggactatgaggacaggcttaagattgagagggccgaggccgaggagaggaggaagatgagggagttggagagggagatggagggaattgaaggtgtagatgaggagggcgcgcacctgactggtggggatcacttaatgcattacaatatagaaggattggattttgacgagttctgtgcaactgctcttagtgttcattaacttgaaacacttgtccagtgtgagcaaaatgcacgttgtgcctatgacctttttgaaaggatggaaacaag

SEQ ID NO: 108253 - DNA, 408 bp, Glycine max
  Clone ID: PAT_MRT3847_68768C.1
caaaaggaaaaaaagtcttattccccttaaaatgacaagatgggaaaatatcctttgttataacaattttataacatttttataacaaaaaagccttccttctcttgggggtgcattccccacccccaaataaacttttaaaaaaattaccccggggcgggaacatgtgataatattacccaaggccaggaaccttttataattttacccatttcaggggcaactttgggttgccaatacaaattttccttggaaacttgtttaaatcccgcaatatttttataactaactgaaaagctccccgacccccttcttcattattcctttaaactgctttgctgaaagcccaatatccttaaaataatccaaacttttgaaaggttctggaaatttttctcggagttcaag

SEQ ID NO: 108254 - DNA, 309 bp, Glycine max
  Clone ID: PAT_MRT3847_68769C.1
gaggatgaaggggtgtggaagaggcgtttggagtgcaatgataatggctcgattcggtgtcctaatcgttgttcttgtagttcgcaaacaaaataatatacagaataaaaatttgaaaccgtggtgtgtgtacttgttttgttgttgttgcatgaaacatagatgcggatgcttacatgattctggtgttgttgtcctgtctgtgatagagtttcatagtgccgttagatcatatatctgatgataaacactgtcatcctactttcttacactttggtactgtttgactattatagtcctactctcacg

SEQ ID NO: 108255 - DNA, 150 bp, Glycine max
  Clone ID: PAT_MRT3847_6876C.1
caaaaatgcagatcttcgagaaaactatgacagggaagactctaaccctccaggtcgaaagcattgacaccatcgacattgtccaggccaagattcaagacagggaaggcatttctccggagcagcagcgtttgattatcaccgcaaagc

SEQ ID NO: 108256 - DNA, 246 bp, Glycine max
  Clone ID: PAT_MRT3847_68770C.1
ctttttccaaactctaaaaattgttagttccacaaaaccaaaccaaaatggcagcagcctggggctcatccaccatgatatcaacaccagccttatcttgacgcacaagcattgataagcaccatcatacgaagccttgccacgtgcgctgttaaggccttagacccctcacaaggctcacacacaaagagagcagggctaccaaaagggttattccaaagggtggagtcggtgttagagctgaac

SEQ ID NO: 108257 - DNA, 340 bp, Glycine max
  unsure (1)..(340): unsure at all n locations
  Clone ID: PAT_MRT3847_68771C.1
ggctcgagaccttgttgggctctttgaagtctctttttattgtgccattcacgcctatcgtgtgactgtggtgcccaaggatattcaactggcaagaaggattcttggcgagcgggcttgagttggagaatcctgtgttagtgaagatggattgttggtgggtgctgatggtagttcgtactaagatttttttttgaggaaaccgatttgctataagatccttcaacgtgtttacttggcagtcctattaattgacattggtatcaactgcctacatacacttngaaggcctggttgatagaaatttgccatgtgtgttgattttatggatcctttattt

SEQ ID NO: 108258 - DNA, 597 bp, Glycine max
  unsure (1)..(597): unsure at all n locations
  Clone ID: PAT_MRT3847_68772C.1
ccacgcgtccggttttaagggagggttccccatttgcttaggtgcttatcagggtgttagtgtatacatctctggaattgagtgtgtcgaaaaccactagaaggatagagtagaaagggacaaaacccagaaaagacaaaggggtagattagaaaggctgagtgaagtgttgtagagtgttagctactgactcatccactcttaggggcagtgttatgatagggacataagtattatgggtgcctaattccacatcaagtagtatgggacgttcagtgaagtacttaagtggcttggttttgcccccttagaagctaggttttaagggagggttccccaattgcttaagtgcttatcagggtgttagtgtatacatctctggaattgagtgtgtcgaaaaccactagaaggatagaatagaaagggacaaaacccagaaaagacaaagggactagccaagccaacttaactatttaaaaagatgttttccttttttttcttaacctaactttntttatttgctaattatttttttaaataattaattatatatattattactactttattagcatgatttaaatttaatatttatat

SEQ ID NO: 108259 - DNA, 276 bp, Glycine max
  Clone ID: PAT_MRT3847_68773C.1
ccaattcccaactggagccacgcatcacggcataacttctgctctatacacaagcatataatgatatactaactagctatcaaaatgtacagggtgaatgttgggctgtgttaattccctagagcttcaattatattgatataactgctgcgattattcactataattaagtaattcaacgtatattacactatttacttcattattacttcaatatacataattattcttttgatatatcatatttatgctgcactatacaaaataaaactctaa

SEQ ID NO: 108260 - DNA, 225 bp, Glycine max
  Clone ID: PAT_MRT3847_68774C.1
gccacgcatgcgtccagcaagtgcattagatgggagattacacaggaatattagtccctaactcatacggctcaaactgttgataaaaagcacgctggcggtggagaacaatttagaaacctaggcgatcacacgcaccaacgaaagagacagatggaccccatgactaatctgaacttggagcaaaccagtgaaaggctgagcggttactatgtgatgtgcccg

SEQ ID NO: 108261 - DNA, 317 bp, Glycine max
  Clone ID: PAT_MRT3847_68775C.1
cttaagccacacaaaatttgcaccatctcgcatcagcccttaggctgactgtatttgacaatgtggcaagcttctgattgtcttaaaacccttaaaccgggttttttgataattggagtgcaaagaacaccaaggaggccaaatgcaggctggttgaattacaaagcgaacaacaattggtcctcaacagtataaaaaattatcagacaacactcaatggtacatggaacacattgcaacaccagatgggggctgctacctaagacatattattggcttaaaatatactactacttccccacccatttagggttttg

SEQ ID NO: 108262 - DNA, 161 bp, Glycine max
  unsure (1)..(161): unsure at all n locations
  Clone ID: PAT_MRT3847_68776C.1
aggacatggtgttggatggagtcctattattccatacancataagagcgaagaagaatgggaagaggtaccagtatcaatagcagatctnggaagcacaganataaatntgagatttgccagttctaaggaaggangtttgtntntcattgtagctcctgt

SEQ ID NO: 108263 - DNA, 327 bp, Glycine max
  Clone ID: PAT_MRT3847_68777C.1
cttcttttttttttttttttttttttttttttttttaccaacataatttaccttgctattatagtgattaacctaaatgtgactaaattgcaggtacttggctgaagaaagcatttatccttttcttaaagctgataccagtacacaatgcttcgcttgctcaacagtttaaggatcagccccaactgcttcaacacccttgtgcctggattttccatacagggtctcttcataccggattatctgattcttggacccatgagccaccagagttactggctaaacggtactgctgactctgaatggcacccactggggaccatcact

SEQ ID NO: 108264 - DNA, 684 bp, Glycine max
  Clone ID: PAT_MRT3847_68778C.1
tttcatatccttttcattcatctttcaaacagctcttttaaaacatttacttgaagtcttcttaactggtggaacactcaaaaagtggataaatgagcagaggatatggatgatgaaatcagttacttgccatctatatggatgtttggatgcactactaaagaaagttggcataagagaagctagtttcttgccaactaataaattagggaatgatgaacagactgtgctatatcaaatggataaatatgacttccaagcatcaaatatctttgtagtgccaatgcttgccctcatcactatcaacatatcttgcttctttggaggagtctacagagtgttattggtgggtgattgtgacaaaatgtttgtgcagcttttcctagcagtttttataattacggtcaactaccccatcattgaagggctgatgataaggaaggacaagggacgaatttctaagttagttgctatacctgttatcttggctactgttgttcttttggcattttttaaactactaggaatgcatagtatgctctactagtaatttgagtttaatttttgtgcactgatgggagacttttatatggtcaaccaatcagaagttatgacagatatgacttttaactaattttcgtaaaagtcaataaacttatcatacatagcaatttggatgatagt

SEQ ID NO: 108265 - DNA, 275 bp, Glycine max
  Clone ID: PAT_MRT3847_68779C.1
tccagcctaattctttttttgaacaaagtttatttttacttccccatctaccttctctaagtgggtgggtaattccttaatggcaaactataacacaccaatccatgcttatactttaaatatccccaaatcaattcctcccaagtaatgtactatgtcaatatttaaaatgcactcttcgtacctgaaacttaacaaaaaatttttccattcttcggttatgtgcttaaagatataaataaagtgactacaattttcggtattcacttaatcta

SEQ ID NO: 108266 - DNA, 1056 bp, Glycine max
  Clone ID: PAT_MRT3847_6877C.1
aggcatggaggctaagaaacgctatcaaagatgccacatatctatgtggtgtttttgtggcagctgatgctattccatcccttagttggattgatttccaagggtatgtgagtttcatgaagaggactaataaggaaatagaccttattcttgagaagtggctggaagaacatctaagaaagagaggtgaggagaaggacggtaaatgtgaaagcgacttcatggatgtgatgatatctgctttccaagaggaagaagagatttgtggttataagcgggagatggttatcaaagcaacatcagtgcttcttatccttactgcctcaggaagcacagccataacactaacatgggcactctccttgctcctaaaccatccaaaggtcctaaaagcagcccaaaaagaactggacacccatttaggaaaagaaagatgggtccaagaatctgacatagaaaacctcacttatctacaagccattatcaaagagacccttcgtttgtaccctccagcacctttaactgggataagggaagttatggaggattgttgtgtggccgggtaccatgtcccaaagggaacacgtttgcttattaacctatggaacttgcaaagggatccaaaagtttggcccaaccctaataagtttgaacccgagaggttcctcaccactcatcatgacattaactttatgagtcaaaacttcgagttgatcccatttagcattggaagaaggtcatgtcctggaatgacatttgggttgcaagtcttgcacttgactctggctcgattgcttcaagggtttgatatttgcacaaaggatggagctgaggttgatatgactgaagggttaggagtagctttgcctaaggaacacggacttcaagttatgctccaaccacgtcttccattggggctttatgaacgactttgaataaagtttgtgaaagttaaatgtaatatttttattctcatatattgcatccctcaataatttgactgtactttgggttgtgatgtcttattgtaccagtcgtttatgtagttcaattgta

SEQ ID NO: 108267 - DNA, 277 bp, Glycine max
  unsure (1)..(277): unsure at all n locations
  Clone ID: PAT_MRT3847_68780C.1
ctcaaaactgctctcgaggcaatggtttcaagtcacgaagaggttaccctaatgggagtaattgcaagcgcatttgcttgcagggtgaagattgacctcaagttgaagggagtttaatagagatatnaaggtgaaaatttgaggaacaatagtgaactgcttctcaaatccgaaccagttcacaggaagattccagtgtttattcacaatgagaagcccatagcagaatcccttgtgattgttgagtacattgatgagacatggaagaactacccca

SEQ ID NO: 108268 - DNA, 356 bp, Glycine max
  unsure (1)..(356): unsure at all n locations
  Clone ID: PAT_MRT3847_68781C.1
tgctcgagcgatcttcaaactggtatactgcactgctgcgatctcaaggagacacattaacccagcggtgacattaggactgatactggctcgcagggagtctctgatccgagccatcatgtacatggtaactcaaagcttaagtgctatgtggagctttgccatagctaaggatttgcagaacgcttaactgaccaagtatggtggtgaggctaactccctacctggtggtacaagccangtactgcattgggcgcagagattatagcaacctttcgtatggcctacactggctcgtgtgtcactgactccaataggaatgccagagattcccatgtgccaagctcaggtttcac

SEQ ID NO: 108269 - DNA, 402 bp, Glycine max
  unsure (1)..(402): unsure at all n locations
  Clone ID: PAT_MRT3847_68782C.1
gcctggagagcggacgacctccacccntttannntttaagtttttattttttcaccacccccaaaagaacacgcaagggggagggagtaatttttaaaacctatccatcccaccaaacaacaggcccaagtgggaagaaaacaaaaacttgtaaaagaatatacaaaagatcaaaaacctattagcttttttgcaatatgaaaactacaaaaaaaacccactccataacacggaccgcaaaaacagggacaagataaatttaatacccaataaaaatgagaaatgtaatggactccccaaacaaaacgaaaaaaaaaggctagatcaatctgaaaaaaaacaacgggcaaaaaaaaagaaattctacaacacaaaaaaacacattataaaacctctcaccac

SEQ ID NO: 108270 - DNA, 2951 bp, Glycine max
  Clone ID: PAT_MRT3847_68783C.1
actccgggccggaattcccgcgtcgacccacgcgtccggaaaagacagcggctcgagcattttcgttttccaacaacctctaccctaacgccgtcataacggtttgtgcttccgcgacgcgacgcttcaactgtgaaacgcacgcgacgtagtttatataaagcgccgtccctttccgtttgtgcagtcagcaagacgatgacctgtgccaaattattttccgtcttttctctcagtttctaatttccgagaggaagtaagttattgtttcttgctggaaattgaggtggcttttgagttttctattgtgattttcggctatcatgggatcagcttgttgtgttgctgcaaaggatcctaatcttcctaacagaactggggatgaaagtttgcatagagatgttgtgtgttcaccatcggggagctttcaatgggatagccgggggcgttttgctgatgaaattgagaatccttcatatcacacctcccatgtggacagtagaaatgtcagcatggagctaaaaggttcgttaagttctgaaagaggtaatttatctgatggtggaagcattgttgagaattctgtaacacctatttttctgaagtcccctgttgatgaggcattggttgcaaatctgatgacccccacttctgatctgtccatgtcaagcaatttttctacagtggtgaagaacccggcggggacacgtgaaatactgacaagagagagaaaagaagatgcagtgagtcacagtcatagaatagaaacagaggcaccatttccgttttccaacaacctctaccctaacgccgttataacgggtcgtgctttcgcgacgcgacgcctcaactgtgaaacggacccgacgtagtgtatatacagccccgatcctcaacaccaaatctttaatttacaagacatacagaagtctaaaggcctataacttaccctttgttcaatcacaattaagaccatctacgcaacagtactccaacaagatgggcacatcgatctccagcacaccctctgttgagacagatttctgatagtcgaatcatgggtctgaaatcgccagacaactcaatttctgaaggtaggccatcatttgtactctcaacttgcagcaatgaaatggcagctggatccatatgcggatcatctgatggctggtcaatgcgcaccttttctgagctggttgcatcatcacaaagggaaaggtggtcctttgatagtgagtgtggaatctttctgggtcacaagataagtggatccagtagcaggttctcgtattctccctccatggaactacaatcttgtggggcttgctcaaagctattgaccgagagatcaacatggagcaaccagaagtttattgccaacagtgacctctcagttgttgctgtactagtctgtggtcattcatatcatgcagaatgtttagaggctatgacatcagaggcagataggtatgatccagcatgtccaatttgtatggttggagataagaacttgtcaaagttgttgtccagaaaaggtcttcgggctgaatcagagatgaaggccaagaaccacaagatatccagaaaccgtgtagttgatagctaccttgatggtggttttgatgtttttgatcgtcaaaaagatatagatttgagaggaaaagtgtcaaaaatggaacctagctgcagtgcaaggagctcatttggaaagcctttcttgaggagacacttttcacttggatcaaagtggagccgatccctgtccgagaatgattctgccaggaagaaaggcttttgggcaagatatcgttaagatttagttccatttgctgtaagagtcaatcattctctaattatagttgtaataacaccatcaatttagaatgaatattttctatgtagcctaactttactgataactttgaatgctttaaaataattaattttgaatcttgacatggctggtcaatgcgcaccttttctgagctggttgcatcatcacaaagggaaaggtggtcctttgatagtgagtgttttggatctggtcgtcacaagataagtggatccagtagcaggttctcgtattcgccctccgtacttctcaaagttgttgtccagaaaaggtcttcgggctgaatcagacataaaggccaagaaccacaagatatccagaaaccgtgtagttgatagctaccttgatggtggttttgatgtttttgatcgtcaaaaaggcattgatttgagaggaaaagtgtcaaaaatggaacctagctccagtgcaaggagctcatttggaaagccattcttgaggcggcacttttcacttggatccaagtggagccgttccctgtccgagaatgattctgccaggaagaaaggcttttgggcaagatatcgttaagattgagttccatttgctgtaagagtcaatcattctctaattatagtaataataacaccatcatttagaattaatataaattccagtcaggttgatgtggttcatatgaactgtatgaatataaacgtcctttgacaaatggagctgagccaaagcagtgacgagcgcaagaaggcagaggaagcaaatgcacatttatgaagatagttatgcttcagttgtttttatggtaatagaggcagacttgcttcattctacctgctgcagatagcaaaataaggtttaacaatcaatcatacgctggaaacttaaaaatgtgtttttaactattgtatttatattttcaatgaatacaaattaacataactttgcaagttaagtcaagtgaaaggagttagttatgttgcccttgagagaacaaggcgaatctgaagattgtcatttgtcagacaggatcactgaatgttgtaattgatttaatgttggctcaaatatgatgcttagaagttaaaaaaaaaaaaaaaaaaactcagactagttctctctctcc

SEQ ID NO: 108271 - DNA, 685 bp, Glycine max
  unsure (1)..(685): unsure at all n locations
  Clone ID: PAT_MRT3847_68784C.1
aacttctaagcatcatatttgagccaacattaaatcaattacaacattcagtgatcctgtctgacaaatgacaatcttcagattcgccttgttctctcaagggcaacataactaactcctttcacttgacttaacaattgcaaagttatgttaatttatattcattgaaaatataaatacaagagttaaaacacatttaagtttccagcgtatgattgttaaaccgtattttgcctgcgcaaatatctgcagcaggtagaatgaagcaagtctgcctctgttaccataaaaacaagtgaagcataaacatcttcataaatgtgcatttgcatcctctgccaccttgtgctcagtcactgctttggctcagcatcatttgccaagggacatttatattcatacagttcatatgaaccacatcaacctgactggaatttagcaaatggaactcaatcttaacgatatcttgcccaaaagcctttcttcctggcagaatcattctcggacagggaacggctccactttggatccaagtgaaaagtgccgcctcaagaatggctttccaaatgagctccttgcactggagctaggttccattnttgacacttttcctctcnatcaatgcctttttgacgatcanaaactcanaaccacctcaaggtagctatcaactacacggtttctg

SEQ ID NO: 108272 - DNA, 579 bp, Glycine max
  Clone ID: PAT_MRT3847_68785C.1
gttttgatgtttttgatcgtcaaaaagatatagttttgagaggaaaagtgtcaaaaatggaacctagctgcagtgcaaggagctcatttggaaagccattcttgaggagacacttttcacttggatcaaagtggagccgatccctgtccgagaatgattctgccaggaagaaaggcttttgggcaagatatcgttaagatttagttccatttgctaaattccagtcaggttgatgtggttcatatgaactgtatgaatataaacgtcctttgacaaatggagctgagccaaagcagtgacgagcgcaagaaggcagaggaagcaaatgaacatttatgaagatagttatgcttcagttgtttttatggtagtagaggcagactgctgcagacagcaaaataaggtttaacaatcaatcatacgctggaaacttaaaaatgtgtttttaactattgtatttatattttcaatgaatacaaattaacataactttgcaagttaaaacaagtgaaagctgaacaaggcgaatcttgagaacagacaggatcactcaatgttgtatttgattaatgttggctc

SEQ ID NO: 108273 - DNA, 313 bp, Glycine max
  unsure (1)..(313): unsure at all n locations
  Clone ID: PAT_MRT3847_68786C.1
gggaggtggaaagaggaagaggcaaaagagagaagcagaggtttgcagaagaaaaaaaaaattatatatataaaagagagaagagaaggtgcagtgagtcacagtcatagaaaagaagcagaggcaccattttcgttttccaacaacctctaccctaacgccgtcataacggtttgtgcttccgcgacgcgacgcttcaactgtgaaacgcacgcgacgtagtttatataaagcgccgtccctttccgtttgagcagtcagcaagacgatgacctgtgccaaattattttccgtcttttctctcagnttctaa

SEQ ID NO: 108274 - DNA, 483 bp, Glycine max
  Clone ID: PAT_MRT3847_68787C.1
ggggggttctctattcttactccccttctcactctcactccgccttcagggttcccatacaagtcgtcgcgagagggaccaaggccacctcgccgtcaacgcctctaagaccaaatccaccgcaatgatgtgctcgtgctgagcttgcaccatgttgcgagatcttccaagaccttgtttcaaatgattctccgggagtgatgataagaaggaaaggagatatgattttgagaactccgaagatgaaagaaaaatgagaattggatctttgaagaaaacgctcaacgcgtcctccaagttcgagcatttgctgaagaaaaagagcagcatgtgttagctctgttttgatcgaagatgtttgaaatttctgtccaacaacatgtcattgaatttcaaactgtggatgctgaatttggttgatatttttgagaacgtgttggtgctgaagtggtggaatgggcttctgtcattgggggcctgatg

SEQ ID NO: 108275 - DNA, 1077 bp, Glycine max
  Clone ID: PAT_MRT3847_68788C.1
tttatgcataaaaacctattgtgattaagtttgagccactggctttttgaatcagttcataagaaggattacaccaggtatcaaggctatatgtgtcaattcagttcactgtttcatccactaaattcaatatgcttcctagataactatttcaaaccagatcaccgaataaaataaacaaatgatattagacattgtaattagaatttctattcaccaagaacttgtacttcatttaaggcagtattggaagaatcaccacaagcataacccccaacatgtcttcccatgatgacatgacaccagttgtaggaaatgagcatcaagctcgtcagaggcaagcaaagctcacaagtaaaaatcaccaactcagtttatcatacatcataaaactttttacatgtcttttacaaatgttgagtgctctgagtaagcgtagcgttctcagaataacccttgctttctatcaatctgaaagagatatcaacctcccctttagcattgaccacttccctttcgcaatgaccacaacgctacctctattcttggccagcttcaattcctccctggcacgaccaatcctcaccagcaacgcctccacacgagccgtctccaccaacaccatctcgctctccgacgccacaaacaccaccgccgccgccaataccatcaccgtcgccccccactcagtatcaaccctcaaaacgaagttgcagccttttgcaagacactcccgaatctgctgcttcgacatacccttgtagtcactgtagaccaacatgtactccagcagctcctctcgctccaccataccgagaaactcctccttggagatgaaggaatagccttgtcctcattgaggccaaacgtgagcgattcgatgttgcatcctctcctcgcgaacacgccgacaattcggtttatcattccactctcatcgatttgaggtagatatcaatggagtgacgccgtgaacacggagaagaagaagaatcattgaagaagggaggctttggggggcgacggtgagatttagggttgagagagagagggtaccgggacgaagtagaagtgagc

SEQ ID NO: 108276 - DNA, 1246 bp, Glycine max
  Clone ID: PAT_MRT3847_68789C.1
cccacgcgttcgtgcagatttgtccgtgtcaagcaatttttctacagtggttagttttgagctactgaatttgaaccatgagctttgtggtgcatagtttgatttttaggctttctactgtagtactaggctcactcttaatctgtgtttctctttaggtgaagaacccggcggaatcttcaataccaaatctttctttttcaataccttcagtcttctcaacgcctacagcagatcctttgcctaatcacaattatcaccatcttcccaactctactccaacaagatgggcacatcgatctccagcacaccctctgttgagacagatttctgatagtcgaatcatgggtctgaaatcgccagacaactcaatttctgaaggtaggccatcatttgtactctcaacttgcagcaatgaaatgacagctggatccatatgcggatcatctgatggctggtcaatgcgcatcttctctgagctggtggcatcatcacaaagggaaaggtggtcttttgatagtgagtgtttcggatctggtcgtcacaagataagtggatccagtagcaggttctcgtattctccctccatggaactacaatcttgtggggcttgctcaaagctattgactgagagatcaacatggagcaaccagaagtttatttccaacagtgacctgtcagttgttgctgtactggtctgtggccattcatatcatgcagaatgtttagaggctatgacatcggaggcagataggtatgatccagcatgtccaatttgtatggttggagataagcacttgtcaaagttgttgtccagaaaaggtcttcgggctgaatcagacataaaggccaagaaccacaagatatccagaaaccgtgtagttgatagctaccttgatggtggttttgatgtttttgatcgtcaaaaaggcattgatttgagaggaaaagtgtcaaaatggaacctagctccagtgcaaggagctcatttggaaagccattcttgaggcggcacttttcacttggatccaagtggagccgttccctgtccgagaatgattctgccaggaagaaaggcttttgggcaagatatcgttaagattgagttccatttgctgtaagagtcaatcattctctaattatagtaataataacaccatcaatttagaattaatattttcgatctaaactaactttactgataactttgaatgctttaaaataattaatttttacttttgaccag

SEQ ID NO: 108277 - DNA, 407 bp, Glycine max
  Clone ID: PAT_MRT3847_6878C.1
tgttcacgggctaacactgaaaggcaaaatggatgaaaattggttccagctgttggccccatttatcagtcagtggaataatcgagctgagtttagggtcgacgtttatgctcgacaagagggcctattgagttttaactcggattacatggtgtggtataggcgcaaaacaaaaatgtttatcaacccaaacaatgcaaacacggttacattgggtgaagttaccgagacattgcagtatatggtgtcaccacaagggcaaaacacatggacagttgatgatctcgtgtcatacgtggaaaagttagcgattttatcccaagagcaagagaggatcactgagcctgtggcacatggtccagcatcagagcgtcgatttcccccacaacagtttcacatgcttcagt

SEQ ID NO: 108278 - DNA, 383 bp, Glycine max
  Clone ID: PAT_MRT3847_68790C.1
aaatgaaaattcgtatagaaatatgcgggaagctttaaaattagcttttggattaaacatgggaatccaggggaacatttttagccttcaaagggtcatagccctcatacccttccaagggatttgacaaagcaaacttggcaacaaactcggggggggaggacctgcaaacaaaatacctcacagttgggataaccagcctcagcaagaacaaatgggaccgccgcaagaaaccccccatcccaaacactggtttggccaccgaccccaaaccgaacacctttcattcggttacccccccctttgagaacaaaaactgggttaaaaaaaacaagaagttgggctttaaaacaatttttacgggcagacccatttttcccttt

SEQ ID NO: 108279 - DNA, 368 bp, Glycine max
  Clone ID: PAT_MRT3847_68791C.1
gacccggggccccctgggtttatttttccctgggccccaaaaaggaaatcccgggggccgtttggggccccaaggttgtgggaatttaaaaaccctttccccctgggaaaacccctaaaaaacttttggccaacaggcccccggtttttttttttttcccccaaaaaaaaattttttttctctccccccggggggcaaattttttttttttaaaggaaaaccaacacccggcaggggcattatttccccaaaggggggggggggggaaaacaggtaccctttaaaaaggatacgggggagaaaagtgcccttcaaaaaacaaaccaaagaattttttgaaattgcgcctccaaaaaaaggaggggggg

SEQ ID NO: 108280 - DNA, 935 bp, Glycine max
  Clone ID: PAT_MRT3847_68792C.1
ctttgcaataggtggattgaagttggtgccttctaccctttctcaagggaccatgcaaacttctactcccctagacaggaactttaccaatgggaatcagtagctgagtcagctagaaatgctttaggtatgaggtataagctcctcccgtatctttacaccttgaactatgaggctcatgttagtggagcattatttgcaaggcctcttttcttctcatttccaacttatactgaatgttatggcctcagcactcagttcttactagggagcagtctaatgatttctcctgtgcttgagcaaggaaaaacacaagttacagcactcttccttcctggaacctgggacaatttgtttgatttaacacagaccattgtgtcaaaagatggtaactatgttacccttgacgcacctttgcatgtggtcaatgtacatttgtatcacaatagcattcttccaatgcaacagggtggaatgatatctaaggatgctagaaatgacacccttcagcctcattgtgaccttccccgctggtgcaactgacggagaagccaaagggaatctattccttgatgatgatgagctgccagaaatgaagcttgtaaatggctattcaacctacattgatttccatgcaactatcaaagaaggaacagtgaaaatttggtcagaagtccaagagggcaagtttgctttagataaaggttgggttattgacacgataaatgtgttgggattaaaccgaaatggagcactacctaaaattgagattgatggagaaccactaatgagtttgtcaaatgtgcaagtcagcacaactcaacataagtacttgtacgggcagggagatggagataaaatattgatggtaggattgaagggtttgaatatccctgtaggtaaaaattttaatgtgacctggaagatgggatcat

SEQ ID NO: 108281 - DNA, 614 bp, Glycine max
  unsure (1)..(614): unsure at all n locations
  Clone ID: PAT_MRT3847_68793C.1
gtcaggctgtaaatgtgggagctcctgtctcaacaaaccatttcagaatcgtcctgtgaaaaagatgaaattagtcaaggtataaatttctggctcaggattttttccaggtttgttttaatatagttctcttaactcttaagttattcttgtattttcttttaattgcaaaatcttgattctgtttagaggtcttcaaaccttgtcaaggtaatgtttgcatgtgcatgtattgggcatatggttatctagtttagctactcttttcgttttccattttaatttgtgtttatattgcagtgtgtatccttacttacaggaggtattttccttttcttttttttggtcttgaaagttctttagtctttattctattcattgttgctaaacaaactgatcaaatctttagtcgtaaaagtaaatttgagattttggaaattaataattatatgcctttcttaattgaatgtcctcatttttccgctttatctccaccacttntctttcatgccgatacccttgtttgtctgcacatgaatagatgtgtgctcatatgatattctagctaattggaatgtgtaattacttggcatngctgtgtggatattcttcgg

SEQ ID NO: 108282 - DNA, 743 bp, Glycine max
  Clone ID: PAT_MRT3847_68794C.1
ggctttgaagggttttttggtttcattgctcccaccttgccctttctaagcaaggaattcggctcgaggattctgcaggctcttttacgcaatgcaactgatgccatgagggagtcaagggttcttgagatcataaatacgatggagccacttgcctatagaaagatggactttgaagaattttgtgcagctacaatcagcacacatcaattggaagcacatgagtggtgggaagatattgcctcaactgcttttgaacattttgagagagaaggcaaccgtctgatatcagttgaagaactagccagagagttgaatcttgggccttcagcttattcagttctcaaagattggataagaaatactgatggaaagcttagtttacttggatatacaaaatttttgcatggtgtgactctccgtagttcaaacccaagacaacaccggtagtcttgggccctttgacatacaatttgaatttgaatatgcgggaaaaaaagtagatttagagattctttttggattttttcttctttcatttttcttttatggggcaaaaaaagaatatgtataaatgaatgtgttagcaagtcaatacagggaatgtcgagtcaattatatgccaaatccttgctcctttggcctatttcgcaaatgatatgtttgccatgggtctgatcccatgaatattcattaatttgtgaatgcttttaaagattacatatagtcaaaattattgataa

SEQ ID NO: 108283 - DNA, 1008 bp, Glycine max
  Clone ID: PAT_MRT3847_68795C.1
cacgcgtccgcgcaaaatagtcccccagctgatactgacaactcagtgccaaagggaactcaaggagaagctaatattgaatccaatggtagcaagggtgcaattgtaaaggtagccattgataagctgaaagattctaaaaggtctgatgatgaatccaaaggcatgattacagaaggagaggcaagagatgaacccatattgaagtccaaggctgaccgtaaaatagaggccattgagcgcagggcagaccgggacagggatagagaacgatatagggatagggaaagagacagagatagggacagggacagaacaaaatccagagatagagatcgaggaagggattctgacaaggaacgtgaacgagaggaagctgagaggggcaaactcaaggatcgggatcaccgttctagggagagagcaaaggattcaggtgtctagatttcttgtgtgtgtggtgtttgtgtttcttttttgttgtttttttgggggggttaaattattaagaaattgtactggatgcaggacattaggagtagtcaaaaggccattcatcgcatgatagcgattcccatcaaacctcaggatcgggatccccgtacgagggacagagcaaaggattcaggacattcagagaagtcaaaacgccattcatcgcatggtatgaatctgtgttaaaatgggtttggcatttgttatccttttagcattccatctttcatcgcatgatcgcgattcccatggttcctcttactcgtcaagggaaaaagatcgacatagacatcattgccattatttagaagatattacaagatgcacccgtcaaagtcagtcaactgatcaagcattgcacgtcctctgatcttataatcagtaaatactgcctgtctggggaagtttttatttacagatataaacaatttagggttcatttgcggtcttatttgataagtactcatgtgaacattctatgtataccttattttgtttatagtcgaagagaga

SEQ ID NO: 108284 - DNA, 1161 bp, Glycine max
  Clone ID: PAT_MRT3847_68796C.1
gttcgatttaagagtgaggttgtggcttgtggagttgtatatgctgctgctcgcaggttccaattacgccttcctgagaacccaccatggtggaaggcatttgatggggagaagtctgggattgatgaagtatgcagggtgtctggctcacctttatagccttccaacaggcacaatatatacccagtctgcaaggatggggactttacattctccaacaaatcatcggaatcaaagtctcaatcaacacccaaagatgttccgcaaaatagtcccccagctgatactgacaactcagtgccaaagggaactcaaagagaagctaatattgaatccaatggtagcaaggatgcaattattcaaggtagccattgataagctgaaagattctaaaagatctgatgatgaatccaaaggcatgagtacagaagcagaggcaagatatgaacccatattgaagtccaaggctgaccgtaaaatagaggccattgagcgcagggcagaccgggacagggatagagaacgatatagggatagggaaagagacagagatagggacagggacagaacaaaatccagagatagagatcgaggaagggattctgacaaggaacgtgaacgagaggaagctgagaggggcaaactcaaggatcgggatcaccgttctagggagagagcaaaggattcaggacattcagagaagtcaaaacgccattcatcgcatgatcgcgattcccatggttcctcttactcgtcaagggaaaaagatcgacatagacatcattgacattatttagaagatattacaagatgcacccgtcaaagtcagtcaactgatcaagcattgcacgtcctctgatcttataatcagtaaatactgcctgtctggggaagtttttatttacagatataaacaatttagggttcatttgcggtcttatttgataagtactcatgtgaacattctatgtataccttattttgtttatagtcgaagagagaatagagttaaaattatttttgttaaaaaaaaaaaaaaaaaaaaaaaaaaaaaaaaaaaaaaaaaaaaaaaaaaaaaaaaaaaaaaaaaaaaaaaaaaaaaaaaaaaaaaaaaaaataaaaaaaaaaaaaaaaaaattaactgacccgtaattttacaac

SEQ ID NO: 108285 - DNA, 313 bp, Glycine max
  Clone ID: PAT_MRT3847_68797C.1
ggcaaaattcaagcaaaatatatttaacattaaaatatctcatacgcagtcgtagtctgaactctgaaacttacagatcgcgtgcgccttacatgtatggcacaataataaccatgagcagagcaacaatgtacataggtgagcctcactcacttttacatattcatgttcccaaccgtcacaaccaaactgagcaccttcaaatttggggaagcagaaaagggaggcaaagaatacagagtcaagaaatataaaaagagggagaaaaaaaagcatataaaacggggcagttatgcttcaaagagaattaaaa

SEQ ID NO: 108286 - DNA, 376 bp, Glycine max
  Clone ID: PAT_MRT3847_68798C.1
cttccgtgttactccgtagagcagcatagaagaagagtttttcctattttatatataatatacatgggctttcgtcctcaaattctagagagaaaattcatataatctcttttgaggtgtattctcctatttatagagagtttaattattctattctatccttatattcagtcagagactaactttcttcacgtaacgaaaatttctcttactttgcctatgatttttcccttatatgcattccacattaaatattgtatgccaattaatgattttctctacttttaacttagttgcatgatattatttctttaacctcagtacccaatatgggactgttctagttgttaattttggtgctaacaatcaagttagg

SEQ ID NO: 108287 - DNA, 403 bp, Glycine max
  Clone ID: PAT_MRT3847_68799C.1
gccacgcgtccggtgaaagggggaaaaaattaaaatcaaagagccttatgtccgggatcattcacaagaatggggagacccttcatgtgtgaaggcaccagaaggaggaggagcgtataggtgtgcacccttctctagaatacacaagggagcaccctttggtaaacacagttgtgagcacaagggagagcatcatggtaaacacaaatctggagagcaccatggtgagcacacgccatagcacaaagaggggttcctagacaaagtcaaggacaagatccttggggagggcgccccctccgcgggcaagatgaaaaaggatggaaagaaaaaggaaggtgcccttgatcatggccatgacagcaacagcagcattgacagtgattaaactgctgcatcacct

SEQ ID NO: 108288 - DNA, 203 bp, Glycine max
  unsure (1)..(203): unsure at all n locations
  Clone ID: PAT_MRT3847_6879C.1
ttttgtgatgtgattgcctcccatcatcaccagacgatgcattttcatatttcgtgagaccatacccgttctcatcaacannnnncttcgtccgatatgagggcttgctgcacctcttttactgcttcttctactgacgaggcgttcgcccctcatatccagacccaaccgcgcctcttcttccctgactctcagagctgatc

SEQ ID NO: 108289 - DNA, 421 bp, Glycine max
  Clone ID: PAT_MRT3847_687C.1
ggcatacatgtgtcattggactgtatgcacaagtctacgtgaagagacaccctcaagtgcttatgtgatgcgttgtcaactaatctatcggctacatcatcaaaagccaaagattgcctactggacactaacttcttttataacattgacgaacatataaaactcaaagtctggcgctataaattatatggatgtgagataggatagactgatattatacataatcttaaagcactgtctaatgatttgtagaccatgtctactgacaatggtgctcttgatgtacatgaaaagaagatcaattgtatattgcatcagatcatggacaagcttactgtctaggaacacgctcgtactcttgaatttattgcaagtggagttgagaaatcacttatgaattgtgtatgtcatggacactgta

SEQ ID NO: 108290 - DNA, 279 bp, Glycine max
  Clone ID: PAT_MRT3847_68800C.1
gaataactcgtgataatctacgcacttggtttaccaaatgcaaatgctaaagcaaaacctgttataccgatggtggagccacacaaaccattaccaaccacatgaagtaatatggcctgcactactacacatgggccttgatagtcctctacctcagaacgggcgtgtggcgcccaaaaccgatctaaaagaaccatacacatggcagaaccgaccactgtgcctgtactaaactgaaacccctactactacaaaccatgcatacggctttaggagcgt

SEQ ID NO: 108291 - DNA, 1269 bp, Glycine max
  Clone ID: PAT_MRT3847_68801C.1
atttcctatcttggatctgatagactgaaacacgccacactcttggatctgatctgctgaaacacgccacactcttcttaccatgggcctcctcgatcacttgtgggatgacaccgtcgccggtcctcgcccggagaacggccttggcaagctccgaaagcaccacaccttcgctttccgatctgcctccggcaaggaatcagacagcggaagcgtcgaaaattttagggttaagatcctcgccggtactcgccgagagtaaggcctcggcaagctccgaaagcaccactccttcgctttccgatctgcctccgccaaggaatcagacagcggaagcgtgaaatcgtacggtgaggattcgcccaagaatgcggtgagagtgacgcgaagtataatgatcgtgaaaccacctggtaaccagagtcccagtggatccgctccggcttcccccgccggttctactcctccggtgtctccgttttcgggagctagagaatccttccgttttcggagaaggtcaacatcagatgcgtacgagaagacaggccagaacagatcaagctcttcttctcctttcgatgtgtgagaaatgagcctgaccactatatatcctccatggatcgatgactgaaataaaatatatatagtagtttgtttttctctagcctttgcggatgatgctgtatccatttttgtttatgttaattttgtgcatatatatagtatatagtatatagcatatgtatgaatatgtttacgagttcatcagttgagcgattgaagtcctgaaacgatcgaggtagctgtgtgtggtttaacagcttggtcttgttttattgttgaactggtttatggttcggaagctgtaaataagtaataacgtagtataggtgtgtttttgttatgtgtactttgtatatatataaaagcctttccattccaggtttgttcttagtgttaatttgctttcaagctctcagcatcctatttgtgggtaatttttttaatttctattaaaatattttgtttatctttttagtatatagtatatagcatatgtatgaatatgtttacgagttcatcagttgagcgattgaagtcctgaaacgatcgaggtagctgtgtgtggtttaacagcttggtcttgttttattgttgaactgggttatggttcggaagctgtaaataagtaataacgtagtatataggtgtgttttggttatgtgtactttgtatataaaagcctttccaaggtttgttcttggtgcc

SEQ ID NO: 108292 - DNA, 114 bp, Glycine max
  unsure (1)..(114): unsure at all n locations
  Clone ID: PAT_MRT3847_68802C.1
gtgatagccacagccatgggtcatatgcgcagtcgcangtttgtnttnattctttaatatttatcatcaaactccttctcaaacaagctcttccatgaacaacaaacttttttt

SEQ ID NO: 108293 - DNA, 231 bp, Glycine max
  Clone ID: PAT_MRT3847_68803C.1
gattggtgcaagtgcatatgcttgcttattcaaacttagcaagaagatcattgggctgcgtgagcgttaatttttgttggttcatacttttttcaagaacaactgataagatttatcaagaatattttattttaatcaaaaggcagcaaaagaattgtgacgctgacggcaccaggttccttgtaacaggatctctatgtattttactgacattcaaaatattttactgac

SEQ ID NO: 108294 - DNA, 130 bp, Glycine max
  Clone ID: PAT_MRT3847_68804C.1
tgacaggactacaaggttcattaacttttattaagacccgaaactacattggggagattgttacatattggaaaagactcaatcctagtactgatcagtataatgcacccaacagccaactaaagaccaa

SEQ ID NO: 108295 - DNA, 676 bp, Glycine max
  Clone ID: PAT_MRT3847_68805C.1
atcctgccaatatcgcttcccaacgtcattgtctcctataactctttcgatagaggcatgtcctgtccacccttcatcatgatcaagccagataggaggtcgaagaggcacttattgcctataccatcataacatctgcgaggaaagatttttacttgtaaggagtgtaactcgatactgcggaccgaccctttgctgaaaaacactatgctgatttggctgcaacgaccatctgtatcgaatctacgagatacttggtctctggcctctgctgaagccatgatgctgctagggaaataatgttgttacaactagtcctacagattatcacagactaaacccgcttctgtctgagcctgtgaactatcccaagaagacttcgctatttgcatttaaaggcatgctctccatggaattgattcccatgacagcggtacctaagaaaatggatggtggctcactgaaggccctagctaactggcaccaatcccaacactcttgccatctatggacaatacaaatgacgccagctgttcttctgattggactaatcccgatccagactatctaaatgccttcagcgtctgaacattgctggacttttgctatcaccatggtaccatggcttgcatagtaagtgtatttatgtaatgtctgttagaacgtgctcacagtg

SEQ ID NO: 108296 - DNA, 295 bp, Glycine max
  Clone ID: PAT_MRT3847_68806C.1
ttaacttcggagtcttcactctcaaacctcacgccgtattaagggcaaagctaaaaacccttcaaattaaaaaattccaaaaagccttttaatcgttgaaccctccctttttaatgtatcatcatcattgtagtataattaattagtggtaaaactccttcccaagtatactttttaatcttgcaaaattcatggtggagaagtagtatcctaaacattaactttttctgctttgtgcatatgaacttttccaataaaactctcggatcttgcatcttcatcatcttccatgctg

SEQ ID NO: 108297 - DNA, 665 bp, Glycine max
  unsure (1)..(665): unsure at all n locations
  Clone ID: PAT_MRT3847_68807C.1
tgcgggggtggttacattgtgcctctttaaccgaataacggtcttaactaatttggtaactaccctaactactttggtaactaatcgtttgagccttcttccttgagtcatgtctcgtagtcatttaagtagcagggtcttgatgtggtacgtttgggctttgtctttgtagctgtgggctcaatcttggtatcttcttggctactgttatcaacacccaatgtgacttgtaggtaaaatgtgttagttcttttagcatcttaataacaactgattttaaataacatagcacatcagagtcatcccatgataccattataaacctagctagtgattcaagactagaaagctctgacaaagaaaaacccgattcaatgagcaaagtcaaataaagaagtgaatccagatgatcttgcagtgtttttgaatgtgcattgtggaagattgatgcacattatactgaggcaacaataactagcttctatgtcttctcgaagtattttggcatgcaaaggtgcaacatagtgcgtaataaacacataaccagattcacacttattgtgcttggggaagacnagcacacatannnattgaatttcatcatccttgaactgaaactgtgtattgtataaagcctcaacaatttttgagatgaggagactcag

SEQ ID NO: 108298 - DNA, 253 bp, Glycine max
  Clone ID: PAT_MRT3847_68808C.1
ctggtggtattataactggcagccatagtgactagtacatagtggtagtacagatttggttgacagacctgacgaagcacgtcaaactctccgtcacctgactatacacagccactcctgtgcatgtatccgatgaagaagcgacagacatctcagctggcaaatgtcgtatactgataatctacggtgcagaactgtctctctactagaagaagatgtcagtgctcagcctttggaagcggcatgaccgtgt

SEQ ID NO: 108299 - DNA, 345 bp, Glycine max
  Clone ID: PAT_MRT3847_68809C.1
ggaattcggcacgagggtaattcataagattaacaacatcattattacatttagataatctgttattgtttttaagagaaaaaaataaataaatgcaagttttttcataaataaaaattagtttaaatatgagttagtgagtattttttttctaaaccacaaatattcttcatgtaggaccatcatggttaagtacatagctagctggatattcaaaaataagtgtgtattttgatgagcattaataaaaactaatttaaaattaattttaacgttatataatttatatttaaatatgtttaacagaaaacaagtttttttaggagaattataaaagcaagaaaa

SEQ ID NO: 108300 - DNA, 344 bp, Glycine max
  Clone ID: PAT_MRT3847_6880C.1
gctaggatcctctagagcgagccgctggtgttttttttttttttttttttttttgggcaactaaccaccttcatacaacttcttttataaaagaagaactattttttctacaaacaatatttcctcatctctttccacaacctaaaaacgcatacgttcttccataccaacagccccaattcaaatcattctttcctcattcttaaccaatttcgtttttcttaatactctaatctcccaccaatcacaaaccattactcttaatctcctccttactcacaactccaacacttttcctgacactgaaaacatcattgctatatatcactctcttcacaaataac

SEQ ID NO: 108301 - DNA, 247 bp, Glycine max
  unsure (1)..(247): unsure at all n locations
  Clone ID: PAT_MRT3847_68810C.1
agcgaacaatgcggatcgagagctgttncaacccttctcctcttcttatatccattatttacatctatataggaagagtcttttttacagatatagccccccctcctaatacatttccttacatctacactttcactgcacctcccactcttactacctactatactattatttctatccttcaataccataatgccatccctaatatcttaacattcatctattccactctatattctacatttca

SEQ ID NO: 108302 - DNA, 412 bp, Glycine max
  Clone ID: PAT_MRT3847_68811C.1
aaaaaattaaaaagccgtccttcttgatgaaaaaagggactttataaaaaaataaccccccccaccaattcttctgtacaaaacctttaaaaaatcagagctttaatcccttcagttaaaaaaaaaaaaaaagccccaacccccgaagagagaccgaaaaagaaagtaaatgggtaagctttcacaaccaagggaactaataagatgaaacccccaacagagccctttaaatactaaaaaggtcgggtgggggggattgaggaggattttgatctttcttggaggctggggatggaaattttaaagcgtttgatgatgacaaaaaggattttgttattgttaaatctccctttttaaagccaggtggttttggaagctcggtcagtttttgaacaacttcacgcattgttgg

SEQ ID NO: 108303 - DNA, 588 bp, Glycine max
  unsure (1)..(588): unsure at all n locations
  Clone ID: PAT_MRT3847_68812C.1
tcctttcaatcggtttcttagccatggagaaagcaacaagagtgaaaatacttgaaatttgccttgtgtcaccaccacaggaaaaaacgacaacacaaacatctttgtctctcacattctttgagttactatggctgaggcttcccccagttgagcgtcttttcttctatgaattccccaaccaaaccatttcattcttcgacaccattcttccaaatctcaaacactctctttccctcacactccaacactttctaccttttgctggctccatcatttggccccttgactcaccccaccccatcatcaactatgtccctggcaatgccgtttccctcaccatagctgagtccaacactgacttcaacatgctttgttccaatatctgtgatgcttctctacgccatcccttgataccccatttggccaattcacacgaacaagcttttgtgatggccctccaagttaccctttttccaaaccatggctttttttttggaatagccacacaccatgcagctattgattggaaagctcttacttttgtttttaaagcatgggctatgcttgcttcntaataataatacc

SEQ ID NO: 108304 - DNA, 417 bp, Glycine max
  Clone ID: PAT_MRT3847_68813C.1
aaagccccacaaattttttattgatttacatttttaaggaaattcccctaagggggggtttttcttgccttttgcccgaaaaaaaaaagggggggttacctaaacgctttttggtttaggggggggccaaaaaatactttcacatgggcatttgacttttttttttttttgggcggcccttttaacccccacctttttttaggggggctcccaggggatggggaacaaaatacctggccaaaaacctggccaaaattttttaggggccctctttctttaaaacccaacatcccacaggttggggtttaaaaaagggggaaaaaaaaagggccctttaaaaacctttttttttttttttttgagcaaatttctttaattaaccccccggggaatattgtgggtggaaaaaaggttttt

SEQ ID NO: 108305 - DNA, 341 bp, Glycine max
  Clone ID: PAT_MRT3847_68814C.1
aagttggagccgctgcccgtgccggtcccgaacccccgggccgggcaaggcccacgcgtacgctgtcgaccccactctctgggccaggggggggaggttaagaaatattgcgttaaccaagcaagccccatgcgacgagcacgtctgtgggggcctaggacatccggcaagattgcaactcctgccgcgactgctacaaaactgtggctaagtataaggccaagacggagaaaactaggattagagccgccactctcctatctggtataggacctcgcgggaggaaaggccaattctcgaggttacattcactctatacctctgactgaaccgcattgccc

SEQ ID NO: 108306 - DNA, 268 bp, Glycine max
  Clone ID: PAT_MRT3847_68815C.1
caaggagatgcaagcctttaacttgatcgctctctttcaacaaccacggggtgttggtccataggagcaggctttggaagagcctacttataaaggctaattgtctgaacaactattctttgtaatcccagccagtgatgcagaagaggtcaacgctgcctcatatctgagtacatttactgttggtattaatgccgagaagcaacagacgaacttgctctcacgttcgcaagacaatgtgatcagccacatacctattcgagtgcag

SEQ ID NO: 108307 - DNA, 238 bp, Glycine max
  Clone ID: PAT_MRT3847_68816C.1
ttgtggcggtgggggaggggtgggcacttgaggtgatggcagattgcgactcaggtagcagaagggataaacgcccggggataaccccggtaactaatgggctactgactgattgtccctgtagcttggtaagggagagatgggaagctagtaggcagggtcgccagggagctagctgagggggatagcgagccagtcgccccactgatgaggggatagaggagagagctgtagcccc

SEQ ID NO: 108308 - DNA, 661 bp, Glycine max
  unsure (1)..(661): unsure at all n locations
  Clone ID: PAT_MRT3847_68817C.1
gaattcgagctctgtacccggggatcctctagagtcgacctgcagaccgaaaatacattatcatgcatccggttcagaagtttctttgcattcatccttttctggtgatcttctatactcctaccaaggtttgctatgcactattcaaataaaattgcacagggatcagtaaaccttatttatctaattgtcttaaaacataaaacccatagcaaaagtgcacctggcgtttaatctcctcaattttcaggtacaagctagtttccccacttgcagttgaaacataatgatatatattaatcacaggagtggtcacaaaagattgcaattccttgtcttcaacagagtatacctacaaatgagattcaaatcactagagattagtaaaaccatgcccagtatctaacaagcagcacaactaggtactatccacattccacaagaacaatgcactttgcatacaaggtaaatataaggaatgcagaagagtttataacagtgttttactgtaatgttgtgtgtcaatgtagaccacacaaggaaaggactacctatgggaggggttttgatcaacaaagaaattgtgtgaagtgtcgtagtgtgtgagcggncgagaagtcgacatcaggggttgtacagatggtattagagcagatatctc

SEQ ID NO: 108309 - DNA, 130 bp, Glycine max
  unsure (1)..(130): unsure at all n locations
  Clone ID: PAT_MRT3847_68818C.1
agataccannggtggctgagagtgagggnggaaatggntctcnancagctggttcaccattgantccagcctcaggtcacgccncaagtagnccancggaagcancgacncctcacanctaaatgtnntc

SEQ ID NO: 108310 - DNA, 871 bp, Glycine max
  Clone ID: PAT_MRT3847_68819C.1
attcccgggctcgacccgtccgctctcttttctctcagaatccaaaccctagaaaattcccccttccgacagaaccctagatttcctctctcaaatctctcacagcttcttcattatcggtattcggcgtacagatcgcagatcccgttaattttttttttccgcatcccccgatcgggtttggtttctgaagaagaaaactcaattccgcacaaattcgagacattgctgctgtcgtggttcgcgttgagcatgggtaagattcggagagaatccgcgaggccgttctcgaattgttcgtcgtcggcgtctccgtcatcggcgccgccggcaacgacgtcgtcgatgtcgttgacggacacggtgagggggtcgcaccggttcaagatcacggggtattcgctgtcgaaggggattgggattgggaagtacatagcgtcggatatattctcggtgggagggtacgattgggcgatctatttttaccccgatgggaagagcgttgaggacaatgcaacgtacgtttcgctcttcatcgcgctcgctagcgaagggaccgatgttagggcgctttttgagttgacgcttttggatcagagtgggaaggagaggcacaaggtgcatagccattttgagaggaccctcgagagtggaccctacacgttaaaataccgtggtagcatgtgattacttgtgggtgggggttgctttagaatccttcccttaaacgacatgaagtgaatcatgcctatcaaatcagagcatgaggtgataagagctaatcttgaccacacaaccatacatggatggggttacaagcggttttttaagagaacagcactagagacatcagattaccttaaagatgatt

SEQ ID NO: 108311 - DNA, 2389 bp, Glycine max
  Clone ID: PAT_MRT3847_6881C.1
gagtgcagaagaggtagaagaggtaaaaggttcgagtcaggaaccaatatccaattagaactagagcctctgtttttttttacggactagcggtcaaggttattaggtgcgacgggcccaatttaataatggaacgtcaatgctcagtaaagtatttccctcctaacaatgggactaggccatccataagtacccttaagcgtgccctctgtattgtacaatggactgcaaatccacctcatgaaaagattacaagcttgagtcaaattctacctatcgttggatcagagggggatacagtactgctaatggctggttgacgtcaaagaccttttccaggaaattaagaaaaacagaagcatggggtgaactgcaataattttatcttcagtaagcctgactttagggtaagtcatttgaggaacaaccgagtgtagcttctgtgatataatagaatttcctgaatgaagaacaatagtggagtggaaaattttggatcatttagtgattgggaaggcttggaggcttgttaatagtcatttcaataatctaggacaagcataaagtaatttcggcagggattaagattacgattgatatagctggcacgaagttgttgcaatgattttgatcttgtgtcatgggtgtattcaacagatgctgatgacgaagatactcgaagtgagggttcgttgaaagtggcttctgtgggaggagaaacaggggagagacattaatgacgttccatcaagcattaccaatcaatctccaaataaagtcttaaagagtctgaatagaaaatttggtttcagggagtctgaaaaggttttgaaccaaacaaataatggggataatagtagtcaatcaggttcatctaatcatttagagaaagatgccaatggctctcaatcaggtgaagacagcggtgttaagagtgtttctgcttacagatcttcttcgcatcctataaccgcaccatcccctttgtctggtctgcctgaattctctcaccttggttggggacactggtttacattaagggacctggaacttgctacaaacaggttttcaaaagaaaacgttattggtgaaggtgggtatggaattgtttatcacggtcaattaatcaatgggaatcctgtggctattaagaagcttctcaataatttaggacaagctgaaaaggaattatgccagtgaattggccaagctgatgttggcttcaattttggaggggcgcactgtctgcttgccatctttatgttctgaaattttgtacaactacatttatatatacgaggaaaaggttaaaagattttgttgctcctgcttgttattgtgctttctgaaaattgggatggtcatcccttactgcttgtctagttgtaattttaggatttgcagcctcaccaacgctgtagagccattaaatttcaaagctaaaggttccattttcctggataagatacactattggaggggctcatttttgcattcttttgagcttctgagtgtggataactgccacgtttgacatcaaagacatgggaacaggaacgagttactttgggatggcttgaatacctatattttgttgctatatcatagaggtaggtgatggattgtactttattgtgttttactatgagacaaaaaagatccttaccctacacaagagtgccgagctcaagctgaggtaaatttggttgactggctcaagatgatggtggggtgtcgacgctcagaagaggtgttggatcctaacattgagactaggccatcgacaagtgcccttaagcgtgccctcttgactgctttgaggtgtgttgatccagatgctgaaaaaagaccaaggatgagccaagttgttcgtatgcttgaatcagaggaatatcctatactgcgagaggatcgaagacgccgaaggagtcaggcaggaaacatggaagtggagactcagagggagaattctgatactgataagagcgacaatccagattataagcccagtggcagaaggaaccaacgcatgtagcaccagttatctcaaagaatttccagaatgaagaacacaagtgaactgggaaattttgcattcttttgagcttctgtaagttctgatgcgcctgccactttttacatgaaaaacatggagcaggaaccagttactttagggtggtttatatataactgtctgttatattgtagatgttagaatgtagattattgtgtatgaatatgggattgaacagctcccttgcactaattgtgctgtgtacagtcctttactattcttgccttttatcctttcattgtgatggaggaagaactacccttgctttctggaagatcagaaaaaagataagctgcttgttcatatttccagtgc

SEQ ID NO: 108312 - DNA, 276 bp, Glycine max
  Clone ID: PAT_MRT3847_68820C.1
tcttgggagaagaggtcgagtttcacagcagcaatggtgtacgtcaaggctcagaaatcaaaagcctacttcaagagatatcaagtcaagttcaagagaagaagagagggaaaaaccgattaccgtgccaggattcggctgattaatcatgacaagaacatatataacacttcgaaataccgattcgttgttcgctttagcaacaaggacattgttgcacaaatattattttctagcattgcttgcgatattgttctttgttgagcatatgcacat

SEQ ID NO: 108313 - DNA, 619 bp, Glycine max
  unsure (1)..(619): unsure at all n locations
  Clone ID: PAT_MRT3847_68821C.1
tcgtgtccattgaagnaagtaaggaaccgtgngcttgtagaatgacagtccatatgaaagaagtaggaaccgtggctgtagatgacagtccattgaaagaagtaggagccgctgatgtaaaagaaattaaaagtaacatccaggatgagtatggttgcaagagaaagcttgtggacatccttaaaactgattctgaaagtattgctgcaaagagagtgaagaaaccactggagatcaagagagacaagcatgttacacttcgcgaagaaagtaatcatcgtgttaaaataaattccaaggcagtggtaaaagagcaaaatagggaagagacaaggcctttggttctatcacattctaagcataagttgaaagggaattttaatggatcacgggtctcatcagacaggaaagtagtactaggtttgatggccgaatcagaatgtccttggaggtccggcaaaggttcctccaaatttaagttcagtgatgctaaaaatgaaggcaagaaaaagaaagtagcttctgcattgccagataggtctaaaacagctatcaagagtaaaggtgcactaagttattctgggcagaagcctttgaaaaagaaaaaaggaaatgctac

SEQ ID NO: 108314 - DNA, 713 bp, Glycine max
  Clone ID: PAT_MRT3847_68822C.1
ccacgcgtccggatgaatatggttacaagagaaagcttgtggacatcgtccaaactgattctgaaagtaatgctgcaaagagagtgaagaagccactggaaatcaagagagacaagcactttacacttcctgaagaaagtaatcatcatgttaaaataaattccaaggcagaggtaaaagagcaaaatagggaagagacaaagcctttggatctatctcattctaagcataagttgaaagggaatttcaatggatcccgggtctcatcagagaggaaagtagtactaggtttgatggctgaatcagaatgtccttggaggtctgacaaaggttcctcaaaatttaagttcggtgatgctaaaaatgaaggcaagaaaaagaaagtaactgttgcattgcctgacaggtctaaaacagctatcaagagtaaaggtgcacaaaattattctaggcagaagcctttcaaaaagaaaaaaggaaatgctacttctgaaggtatgagtgaattagtaatttgcgaaaagaaggatagtctcgattcatatgaaaataatgaagaccttcaaaattggtctgaaatcacatgagttcaatgtaaatgttactccttctaattctaatttcactggtgatgaggaccactcaaatgtgacccggaaaaaagtgagggaaactttacggttggttcaagggggttttcagaaagcttttac

SEQ ID NO: 108315 - DNA, 403 bp, Glycine max
  Clone ID: PAT_MRT3847_68823C.1
caaacaatgaagccattgttttagacatgatgatggaaatattgatggctggtgctgaagcattgtccaaaatgagcaaccttacgttgctcatattccgtgatgtgaagtttatgggaatacttaattcagttaattgtctctccaataaactacaatttcttgagtggtataactatcctttctcctatttgccatcaagttttcagccgaacctgctggttgaattgatcttgcaacatagcaacatcaaacaattatggaaaggcataaagcatctgccaaatttaagagctttggatctcacttactccaagaatcttattgaggctccagactttggaggggtccttaatcttgagtggataattcttgaaggatgcacaaatcttgcacggatcca

SEQ ID NO: 108316 - DNA, 352 bp, Glycine max
  Clone ID: PAT_MRT3847_68824C.1
gccacatcaatattatgacagtgatgatgaatatgctcctgacagggtgccactcttgaagaatgctccacctcattatgttgttgatccaggatatgcacatggaaatgatacatggaggagacaaggtataaaagattggcattctttaattgatcatagttttcttattctagctatcttggatttcctttatcatttattttcactagtctgtttcaaatacctattatcatgcatcagccttattcttaaatggtttgaagaggcaagtagaccgtacttcgatttatactacaatttatgaatttgaaaatggttatgtattagataaatctatatcatttttttt

SEQ ID NO: 108317 - DNA, 394 bp, Glycine max
  Clone ID: PAT_MRT3847_68825C.1
gtggtgatcacacgtgagtattaaagagagaacattcaaactaattcttactgtatgccttaatcatacataggttacagaagtaatgaaatacattatctactctaacaacaaacagaacgtaggtaattgcttgttcaaaactaattacaacatatatatatatatatagagagagagagagagatagagagagagagagagaggaatactattggtagctatatggcctaatctctggaataaagttgcctagactcagattctttgtaaacattgatatttgacttgaggcaatgcattgctggtagttcacacgtgacactttcactctgtgcaaacattgtggatggaccattggaatcattgattagtcaattaaaccttcacaaca

SEQ ID NO: 108318 - DNA, 348 bp, Glycine max
  unsure (1)..(348): unsure at all n locations
  Clone ID: PAT_MRT3847_68826C.1
gtaaatattatttaanncaaaccgagaggaccaacagccttggaccttttactatatggacctaaacccgttactagaccaggagatttatgctacccatatgatactttgataacaaaagtggaaaactcatgactgngccacgaaaagaagcgggaagaatggggctgacaacctcgcatgtgagcatgggggcttgcaaccgcgtcatacaaaaccctactacttggacacaatctcaggaatttcttacctttaaagtttattaattgggagcaataatgaagaggctcctgaacaaggaacggaaatagccattatttataaacaaaaaaggggacctttttc

SEQ ID NO: 108319 - DNA, 1166 bp, Glycine max
  Clone ID: PAT_MRT3847_68827C.1
aaagttagaagagattatctttatccttttagcctttgggtacccctctgtgtggcagtgcatcttcatctgaagtgagaagctaaactcaagggtcaaaaagagcacaggttagtcatgacatcttcattctcaacgcagttggtgcaaagtcagaacctacctcctcgttttcatcgccatgtccaggggaattttagccaagatgtgtcaaaggtttcaatgacacatgtggtccgtagcagtaccaaatcacagcttggttacggtaaaacgttggcatcaagatctcactatgctgccagattttcagtctcacgacaatctgaagcaaaatcaatcacatataggagaatgacatgtactaatgctaaggaaaatgttctacagctgcaagccaaagtgacaaacaagtgcttctttgatgtagaaattgggggtgaacctgctggcagagttgttttcggcctatttggagaagatgttcctaaaacagttgaaaatttccgggctttatgtacaggagagaaaggatatggctacaaagggtcctacttccatcgtataatacaaaatttcatggttcagggaggggacttcactgaaggaaatggaactggtggaatcagtatctatggtgatagctttgacgatgaaaattttaacttgaagcatgtgggtcctggagttttgagcatggcaaatgcgggtactaataccaatggcagtcaattttttatctgcactgtacagactccatggttagacaatcgccatgttgtgtttggacatgtcattgatggaatggatgtagtgaggacacttgaatcgcaggagacaggcaagtttgataaccctcggaagccatgcaaaattgctgattctggggagctgcctatagatagttgatctttgcactgaagtgcagtacaattttctgactatcaatcacagtttttggttgagaagggtgttgagggatatggatatctgcaatgttttacatgtttgtattatcattgatactggctgaaggagaaatcgaatgttactactagtgcatttagttaattaccattgttctgagagatacaacacccatattttgtattaccaaactgtacgaaaacccttatttagtagatgagtagatgtttttctctcgc

SEQ ID NO: 108320 - DNA, 151 bp, Glycine max
  Clone ID: PAT_MRT3847_68828C.1
gaaagaggtcaaaatcgtgaagtcagaccacgagatgtcgttggtatcaagcatgttcgggtgtggagtggtgatagctgcgtcgcaagccgagggaagtgtaacgagagtctattgtggattgacgattgtgtgttcgtctgggccgcac

SEQ ID NO: 108321 - DNA, 766 bp, Glycine max
  Clone ID: PAT_MRT3847_68829C.1
cggcttcctgtcgcaattaaaagttaaggtgtaggcgcatatatgtatgtgaaattcgttgattctcttctgccttacttacggctgtctgtgctcatttgaggaagcctacgagcgaggttcgataattaatcatgtgtgacactatgtctatgtcgtccgcacctattacagatcatcgacctgttaaaggtcttgagatggaatatgtagaggatgataagaaaaaaaagcttggctctttaaagaaggtagcaatcagtgcatcttcaaagttcaggcattccttgcaaatgaaggggagaaggcatagcagggttgtgtctgttgctattgaggataacgttgatgcccaagagttgcaagtagttgatgcttttcgccaagcacttatcttggaagagctattacctgcaaaatatgatgatcaccatacgatgttaagattcttgagagcaaggaaatttgacattgaaaaaacaaaacaaatgtgggcagatatgcttcagtggaggagggagtttggtgctgacaccatcatggaggattttgaattcaaggagagagatgaagttcaaaaatactacccgcaagggcatcacggagttgataaggaagggcgacctgtttacatagaaaagttgggtcaggtggactctaacaagctgatgcaagtaacaactatggatcgctatcttaagtaccatgttagagagtttgagaagacattcgttgttaagttccctgcctgttcatctcagcaaag

SEQ ID NO: 108322 - DNA, 363 bp, Glycine max
  Clone ID: PAT_MRT3847_6882C.1
tcgaaacgaggtattatatcattcttcatcattgagcgtggctgatttacccaggggggtgaaattgagtgtgtgccccattcacattagcactcatagagatcgttccgacggataaccaatcttttttttcccttacacatacaccacattggaaatgcatacaatgggtacactctgttcttttctcttgtgacaaacagagctgaatcattttctaactccaaaagggtcagtcatacaaaattcaacatttgcattcttgccctacaaccttcatgttttctagaatctagaatccctgtgtatgcctgaaatacctggtaaaaatagtacttgctacaccgccaaatttgatgacaa

SEQ ID NO: 108323 - DNA, 551 bp, Glycine max
  Clone ID: PAT_MRT3847_68830C.1
cccacgcgtccgtacggctgcgaaagacgacagaagggctctctctaaaaatctctaaacatgcaaaagcttcgagaattgcccaaactccccctccatttctgatttcagacttaaataggtggccttgttggtgcttgtccgcttagcgtgaatctggaccgctaagcgtgcattagtgaattttgacttagcgcgcgtcttctcgctcagtagatggactcaagtggtgcgcttagtgggatgacacctcgctcagtgaacatgcacaactcatccttcttccagattcttcctcgtgctcagccgcaacagtgttgcgctcatttgaaatcgtttcaaggtccaatgccttaacgatcctttttttttttacttttatcggttaaaacgaaccgtttaaaaatctaaaatcaacaccccgcataactttcttgcttttcaaagaactacgtaggtttgagttccttatcgcaattgaggatacgtaggagcaaaagcccccacttttgtcgacccccaaaaaaaaaaaaaaaaaaagaatccccaaa

SEQ ID NO: 108324 - DNA, 460 bp, Glycine max
  Clone ID: PAT_MRT3847_68831C.1
atgttgaaacatgttgagagacatacaaaacggggtttacatccatatatattgaacaaatacggatccattcccagccactgtccatacactgggaatgaatcacatcagaaagtccacactgatgaatggcacttacaacacattgatgttaaatggaagagacaagacccttatgaggaagtatgcccagataacacccaaaatgccttctaagaacaaacctgaggtgaacccggcccacccacaaacagaatgcaacacgacacctctcacatattgcagacggtaaaggtcagcgactgagcggtgaatggaatatggtcaacacaagatgagatcccatttgtagacacgcaacaggggaggatcaccaccagcccgactaatgaaacagacccctgtaggccggctaaacacctgttgctgagaggcccagtctacacgaatgggcccaccg

SEQ ID NO: 108325 - DNA, 402 bp, Glycine max
  Clone ID: PAT_MRT3847_68832C.1
gattgaattacaaatccaaattaaggcacattgccattttttttggtacatagctcaaacaggtttacatcccatagcttttgcagcagcaataaatgaggatttaaattttcagcaatccaagccataaacccaaattgaattttgtatcaacacttagggggggccttcatgaaatcaaggaaatgggaactttatgggaggggaaataaaaataggatttggaagcttattttaaaatatatttttggggacaaaaaaattccccatgagcaaaattagtggaaaattgccccccccaattttttgatgagcccaattaaatgtcccggcctttggccccctttggaaaaacttgagggtaacgtttgcggcccgagcaatttttgaaaaaggggaatt

SEQ ID NO: 108326 - DNA, 191 bp, Glycine max
  Clone ID: PAT_MRT3847_68833C.1
ttataatccaaagatgcacttacaaccggcgttttccgtggaaacaaaaaaagggtctctcgtctaaacccaaaccgccccatcccacaaaagaaaaattccctttgtattcttagaatttgaacctttgattctttatctatctgctcagggcaacgtgggaacataggatttgtcaaacccatccgaca

SEQ ID NO: 108327 - DNA, 406 bp, Glycine max
  unsure (1)..(406): unsure at all n locations
  Clone ID: PAT_MRT3847_68834C.1
tggcttggaacctttgggctgatttatgtgcttggcttcttagcccctgccagagatatcgcgcttcgcccctctcgaactcaatatagatttgaccgtcatgaacggtacttaataggggctaaggcggaacctaatagccgtcggtcgtcgaataagaagtgtaaagaaccgctaacgtcgtaaaaaacgaaaaaccggtcagatcgaagtaagttaaagaagaggtcgaaaaggaaaccgttgagcacagggtcaagccggagcatgagccctaaaagaaagcgctatagagcagcggagacctcggcgtcaacgcgaagagatccgagtaagagatagaagaaaagacctactatttgaaaatcgangtcgagaggacactangggacgccgctcntacgtc

SEQ ID NO: 108328 - DNA, 352 bp, Glycine max
  Clone ID: PAT_MRT3847_68835C.1
aaaaaaattaaaactaaaatggaaaagatcaaaatccaaattacaccaaggtcataggaataattataactaataacaataaggtaaacccaagataataatacttgtgaaaaaaaaaaaaagagagtgccggaaagaaacaaggggggggtggctataggttgggaatttcccaatgaaacgctcagttatgggcgtccttgccatggggctttctggaaaggatcatgggcatcggcgaaaaaatgccagagtcaccccctctggggaaataggcagcggtgcttgaaaaacatgttatgaacatcaaaagtgcccttgggcgccattcccaaaacggggaaaacaggga

SEQ ID NO: 108329 - DNA, 249 bp, Glycine max
  unsure (1)..(249): unsure at all n locations
  Clone ID: PAT_MRT3847_68836C.1
ccatatccttgtgatantggtcttactgaaagancgtgccgggtgtttcacggcnatangtgatgtgtattctatgacaggaactgttggagttcccatgacaaccattgangccaggcttgantctgtgccaganattgangccaggcttgaatctctggcacagattcaagcctggcttcaatctgtgccagagatgggatatgatgccctctccaatgtaccccgtggagaaatttgtctgagagg

SEQ ID NO: 108330 - DNA, 477 bp, Glycine max
  Clone ID: PAT_MRT3847_68837C.1
cctcgtgccgaattcggcacgaggtagagacgatgatcgttatggcagagatggttacagggacgatgagtaccgtagaagaagtgttgacgatgaccaatatggctcaagaagcaggagatcttttagagatcgtgatcataattttaatgatgatggtcagcattcatctcgaggtagcagtgctaaagctgaagaccattcactggaaggaagggatgggggctcgtcccctgccgccgccccaaaaggctcttctcctgtaagtggtaacccacgccaaacctactgctcctacaggatcttctcttttaagcgataagccaacagaagcaactgctgctgccagtactgctacatctggaaaccgtgaagttaaggcttttgatgaatttgatcctcgtggtcctcctgtatcagctgccccagctcctgctaataatgttgaaatggacttgttcggctccctatcagagt

SEQ ID NO: 108331 - DNA, 616 bp, Glycine max
  Clone ID: PAT_MRT3847_68838C.1
actctacaccactgctgctgaaaatgtaaagcaaatctctgcatctctcaagcatcatcatctgatggagaaccatcatcacatgcctcagacacgatcaaagctcggttcattcactcaagatgagaaatatgacagaaacatctttgatggagaacttgccatatgccacagcccaaattttatggctgtcagtttgctcagactcaatggcgtgactatctcatgtgctattatcagcaaccactacaggcctttggagacatgaactgttgttaacattgctctagcatatgaccatccaaaatacactggaactgtggcagtatacgactatgcttgcaagcatcttaaggcgtccgacattgacggcatcggacacatagctagtggtagaatcaaggggcttctaactatgccatcttattgaacctactctactgatgttattgatgacagcctcataattgtcttgcctgcagatgcagaggtgaagacatcacctgacgatgcaccttacgctgaattgagctcacactgtgagaaagaatttgtgaatgcttcgcatggatacgctgtaacatacccatgtgttagagattgcttgctgactaga

SEQ ID NO: 108332 - DNA, 529 bp, Glycine max
  Clone ID: PAT_MRT3847_68839C.1
caacaaaagggggaaaccctttcgggggcaggggaagcttaatatatatatcaggaaaagttcccccccaacaattttgggttaaaaaaccccccggactccccaaaaggaaaaaaattttttaaaagccaactttacaggcggctaaaaaaacaaggggggaaaaaaaaaaaaaggggggcccccaaaaaacaggaattaacaaaccccccccggggggcttattttccttggaggaaaaaaaaaagtgggggtttattaggggggcttacaaatcattaagaaccaatccttttttcctggagtttgggggggggcccctttgggcaaccgggacaaaaacctttcatttagggggcaggccccaaaaaggaaaaaaggcgcgggcaacctcgcccttttagggctgggggccttttaggaaaagggaaaaacccccttttttaaaaaaggggggggggaaaaaaccgggccccaaaaccccccaatttaacccccccctcaaaaatagtaggaaaccccccgggag

SEQ ID NO: 108333 - DNA, 261 bp, Glycine max
  unsure (1)..(261): unsure at all n locations
  Clone ID: PAT_MRT3847_6883C.1
tagaaaagtagccaagtggcaacctcctagtgatgctgaaagtgatgaagaatctgaatctgactctggcattgaatctactgactctgatgatgagtttcaaatatgtgaaattngcacgacagaggaggaaaggaaaaaantncaacagagtaccagcagnggnaaangantccanaccacagccagangccagcttntcggtgatatagtaccngaagagaggacagccanttntgtaaggagaaaacagatgaatac

SEQ ID NO: 108334 - DNA, 444 bp, Glycine max
  Clone ID: PAT_MRT3847_68840C.1
cccacgcgtccgaaaccaactgtttgtgcacatatttgaaaatgtattcgttactaaaggaatgggctgtttggtgaaggatcatgaatgacttttatatctttaagcatctcttcatgcaacaaccctttgggcttaaagtttggacattgtacaagcccactctctagtctctaccttgtgctgaaattcagtttattttatttagaagagtgggagtgacaataattgaacccttgactaattttgcataaagactctgatacatgtcaactaccaattctcctaaaagcctaatgaatttagtaaacgctcattaattggttttaatatcttatctaatacaaattggaaacccaaaaaatatccagcaaaccatatttaagtagcaagaaaatgaaccaacttgaatgccaaccttgtgggtcttcacaagtttctttt

SEQ ID NO: 108335 - DNA, 261 bp, Glycine max
  Clone ID: PAT_MRT3847_68841C.1
gatctactctttcttccacacactcgttttgggtagtgattattcttgagaagactgtcgttgtcataagattctcagctgctggacgattattattatgctatgacataaggccctaaagggtaaatcatctaccacaccagacatgtttgttatgacaacctgatcaaacaatgcttgctgcgccagggaaaaagcattcttcattccctggagacaacttattctttgcttgtggctaatcgttcggtactgtggact

SEQ ID NO: 108336 - DNA, 712 bp, Glycine max
  Clone ID: PAT_MRT3847_68842C.1
aaaataatataatttctaaatattaaaaaagaataattttgtactagaagtctaaaaacttaaaaatctagcctttttatacaacaattgaattaaaaatcctagccactcactgattgatggaatacagctgttaaggtttgtgttgtcggcaagactcaatagttgttggttgactgaccttgaaacaaaaagatctttactttgatttgatgaccacttcattgcactgagtgattggcataagctgcacttgaaaacacagatttccattcatcgattccactgctccctttcctaccatacaatggcattagaatgcgttggtggtgctgttctttcttctttcctcggggctctatttcagaagctggcttctcctcaagttctggatttctttcgtggaacaaagatcgaccagaacctgcggagggacttagaaaacaagctcctctccatccaagctgtgcttgatgatgctgaacaaaaacagtttggaaatatgccagtgagagactggcttattgagctcaaagttgccatgcttgacgttgaagatgtcttggatgaaatacaacactccagactccaagttcaacctcaatctgaatctcaaacctgtacttgcaaggtacccaatttcttcaaatcttcccctgttagctcctttaacaaggaaattaattccagcatgaaaaatgtccttgatgac

SEQ ID NO: 108337 - DNA, 577 bp, Glycine max
  Clone ID: PAT_MRT3847_68843C.1
gtttgagttggcctgtccccataaatagcgacataaccgacagaacaattattcctctctactttcggcttttggagctgcgtcaatgtcttctatatctacattacgtcgccaagtgaagaatgtggcctgcaattacactgatgcacaagtaaaagttagagaggcgaccagcaacgacccatggggaccaaccacagtgctaatgtctgaaatcgcagatttaactcacaacccagtttcattcaccgaaattatgtctatggtttggaaaaggctaaatgaccacggaaagaattggcgtcatgtgtacaaaagtttggtgctccttgactatttgataaagtgcggaagcgagaaagtgtcagctcaatgccgcgagaatctcttttcaattgagacactcaaagattttcaacacatcgaggacaaccgtgaccaaggattgaatgtgcgtgcaaaagccaaacagatggtcgctttgttgcaggacgaccataaattgaagatgagcgagcccgttttttgtgactcgaaagcgctttatttaaaaaccgatcctttgggatttcattcg

SEQ ID NO: 108338 - DNA, 2760 bp, Glycine max
  Clone ID: PAT_MRT3847_68844C.1
tcaaacaagatcaaccaaaataatatctaagagacctaattctcttctaatagagaaaaacacttccttggggagaggtttagtgaaaatatcagcaagttgattcttagtatcaacaaattctaatacacaatctccctttaagacatgatctctaagaaagtggtgtctaatctctatgtgtttagttcttgaatgttgaactgggtttttggatagatttatggcactagtattatcacacttaataggtatgcgatcaagaatgatgccatagtcagataattgttgcttcatccataaaatttgtgcacaacaactaccggcagagatatactccgcttcagcagtagataaagcaacactgttttgtttcttactatgccatgagacaagagccgatccaataaattgacaagttccacttgtactttttctatcagttttagatccggcaaaatcagaatcagaatatcctattaagttacatgttgaattcttaggataccataatcctaaattgattgttcctaatagatatctcatgattctctttactgcacttagatgtgattgtttggggttggattgaaacctagcacacatgcatacactaaacataatatcaggtctactagcagataaataaagaagagatccgatcatacctcgatattgttttatgtctatagactgaccagattcatctttatctaagtaacaattagtgctcatcggtgtagacatgtgttttgcactatccatcccaaatcttttgatcaattccttgcagtatttggattgattgatgaatataccttcttgagtttgcttgatttgtaatcccagaaagtactttagttctcccatcattgacatttcaaattcactttgcatatcaagggaaaactccttgcacaatgaatcattagtggatccaaaaattatatcatcaacatatatttgaaccaacaaaatatcattatgccttctctttatgaataatgtggtatccactttacctctggagaattctttttcaagaagaaaattacttaatcgttcataccatgccctaggggcttgtttcaaaccataaagagccttttgtaatttataaacatggtttggtttatcagaaatttcaaaaccagggggttgttcaacatatacctcttcttgaattaagccatttaaaaaggcactcttaacatccatttgataaagtttaaagttcattatggatgcatatgccaaaagcattctaatggcttctaatcttgcaacaggagcatatgtttcttcatagtctattccctcttcttgattatacccttttgctactaacctggctttatttctaataattataccatgttcatctaatttatttctaaaaacccattttgttccaataacaggataattttcaggtttttctactaatttccatacattgtttctttcaaattggtttagttcttcttgcatggcaatgatccaattatcatctactatggcttcttttatatttttaggttcaatcatagatacaaaagccatattattgcataaatctttaagagaatgtctagttgttaccccttttgagatatcaccaattatgttgtcgaggggatgatctctgaagttttccattctcttgggagtacataatgtatctttgaatttcactttttttttttttttttttttttttttttggggcaatctcaatagttccatctcgtgttcctgcaacttaccaaataaagtggcaagagacatgttagacaaatctcttgattcagaaatggccgttactttgggttgccattctctacttaaacatcttaacaccttgtttataagatcctcattttgaaattctttgcctaaggctgctagatgatttactatatgtgtaaatctcttttgcatactctgaatattttcatttgcattcattctaaataattcatactcatgagttagtgcatttatcctagatcttttaacatttgtagttccttcatgtgttaatcgaagagtgtcccacatttccttagcactcttacaatttgaaaccctgaaatattcatccattcctagggcagatgttattatgtttttggcttttaagttgtattgtactctttttctatcctcttcagaccatctatctctaggtttttctatggttatgctttcacttgatgaactatcatctattgaaactctttctactgtggtgggtatataaggccctatttctatggcttcccagatatttagatctattgcctcgataacccttctgtcgtcttctcgcagccgtggtaaccctctccattaaagattggaggtctattgatagaattcccttctggaaataaggaatttgctgaggccatgattgttgggttattgtcgtcgccaatcccccagatgactaggtgaattgctttaaggacccctgtgctaaaggatgtcgggccccccccctctgataggatgttcccttggggtatagggttttataaccgcccttgttggaccccaagtgaattttttttttttttagaaaagttttattattatgttaaaaaggtgaatgtgagcctcctcccctcaaggagaacttgtttttaattctgttttaaaaacttgaattaagtttaattttttttaattatttcttttattattagtccaaatatgtgtggggtaaagggtgttccaccctctcctagttttcct

SEQ ID NO: 108339 - DNA, 261 bp, Glycine max
  Clone ID: PAT_MRT3847_68845C.1
cggacgcgtgggcggacgcgtgggcggacgcgtgggccgacgcctggggaaggtatccccccagaccaacagagggtgatctttgctgggaagcaactggaggatggaaggactcttgctgactacaacattcagaaagagactactctttaccttgtcttgcgtcttcctgggggggtttgagttttaaaatgggctgcagggcccttgtttggtgtgaaccgaagtatgtgaaaagctataaactgggctttttttttt

SEQ ID NO: 108340 - DNA, 564 bp, Glycine max
  Clone ID: PAT_MRT3847_68846C.1
tcctctcacgaaaacatggtgtgattattgttcttcttcaatctcacacatgctcatggttcccttcacagaaccactgaacatgatcatgatcgacagacccgcggcactcttcgtagaagccacactctccgaggcattcgccgcctccgtactggaacggagggttagcggcgatgttggggctcatagcctgcgctcgattgatccttgcttgtgcctactgcaagctctcagggtaccgtcaggggaacggtgaatcagaacggggcctagaagctggcgagacggagcatgaccttaagcctgcctatcggtacaaggggaggatcttggagatcatcgcggggcatgagaagccaacattctacgcagcacccagtgattgagctgcagcagtaccaggtcctcttgcttcggcgacaccacccgcacctgcacctgccaggagatcctacaatcgctcgcaatggcacatgctgggactggaaccaccgaaaccgcacactcctcgtgggactataacccttgatcggaccaaacatggtcacctgctgcggggtt

SEQ ID NO: 108341 - DNA, 1421 bp, Glycine max
  unsure (1)..(1421): unsure at all n locations
  Clone ID: PAT_MRT3847_68847C.1
cctccataccctcccaataaatgttttttcccttccactaacacatttaaatattcctcccccaactatctcccctttctcaactctcaatcatatcacacacacaaacatatgctacaaactccacttcttcaacacaaaaatccgaaatttgtgctccaacacaaaaaaatgaaacctacaatcaccattctcttgttgtctctactacttctcataacttcaccctccttggcaacccgacccgcatccaaccctgatcaagtcaagcacaacaaaaacaacaaccaaggtggtggtgctggtgctggtgctggcgggttctttggccctggaggagggttcagcatacccggttttggaaacgggtttggaaatggcatcataggaggaggatacggatccgggtatggaggtccgaatggaggctcctctaaaggtggtatcattagaccaaccgttgtgtgcaaagacaaaggcccttgtttccaaaagaaggttacttgtccagccaagtgcttctcctctttcagccgttccggcaagggctatggcggcggaggcggcggtggtggctgcaccattgattgcaaaaagaagtgcatcgcttattgctaagccataatatggtagcacttatcatcacttgtactagtattattgctagtattactattattattattatgtatgcaattaaacttatattatatggtcatcttggttacccttttagataaataaatgaaaagtagatacatctctatgtaggtgggtttctttttggtgttttgggtgttgcttttgactattatatcttgttaaatctatgggtggaaaaaaatattatgagacactacttggtgggtgagaggagtgttaagcatgggctgtaattttggttactaaataatataaagatggtgtattattaaaagaaaaaaaaaaaaaaaaaagtaatgatgtggatttgctcttcaacttaatttggtcattttcgtttcaatgcattaacgagcttgtagcccacagtggagctgcagttttgacatgaaattctcgtagtattggatgtggatggtaagagattaggtcgtagatgtgatatgaaccttcagccccaaactccagatctcatccctcacccaacaataaatgtaaaaacgttctattaatggatgtctttgccaaagaaatcatggggggggcaanacattcactggggaagcagaagtccttttgaagaaagctattcaagaaacactaaaactctttttcccacaggaacaggtagaaaaaaattgattaatcatttaataactttataatttcactttcaaattcttataattagtatcttttaatatctttttatttcatttgaatataatattaatatataaataaaatgaattcgaatg

SEQ ID NO: 108342 - DNA, 922 bp, Glycine max
  Clone ID: PAT_MRT3847_68848C.1
aattcggcggcagtgtaggctcgggttggggtagaaaaaaaaaaaaaaaagagtgtatcttgactgcatttatggccatggcaactctaaccccaatgtgttgctcatgttcaacacccagattcagtggtcaacaccatcagcatggctatcaactaaaactaaaaccctcagttttgaatttcagacctcagaagcaaaatagaagcatcagaatccgatcaccctctgcctccaacccgaaccagaatgagtcttcttctcccggattatactctgccaagaaattcgacctcaccgcatccaacgtcgacctcgttctcgacgatgttcgcccttacctcatcgccgacggcggcaacgtggacgtggtgtcggtggaagacggcgtggtatctctccgtctcgaaggagcatgcgagagctgccccagctccaccaccaccatgaccatggggatcgagcgcgttcttaaggaaaaattcggagacgctgttaaggacatacgccaagtctaccttaccgaaccaagggagacaacggttgaggcggtgaataatcatcttgagatattgaggccggccattaagaattacggagggagcgtggaagtggtgtccgtagaaggcggggagtgcgaggtaaagtatgttggacctgactccattggatccggaatcaaagcaaccatcaaggagaagtttccagatattctcaatgttaccttcaccaccaccacttagctctttctctgtaattattccttcaaaagataaacttcctctgctgctaaatgtattagtagtagattgtctccttttttcgcttgaatattacatgcatcagctctgaatgaatttaagtatggaattgttatttccttttagagcctaacactaggaataatttgagtcagccttcc

SEQ ID NO: 108343 - DNA, 490 bp, Glycine max
  Clone ID: PAT_MRT3847_68849C.1
gcaccagtttttcttctattgtcaaatctacagtgtttttcttttctctctcacacgaaaccctctccctccctttccctcagatttctcacttccttttctcctttccatttctcaccttctccccctctcttcatctcttctctaccccttttttggttttccttactcttacgaatcaaaacccgcaactttggacgtcgttggagggctttcgtcgctacccaccataactgacgaggggtgaccactggtagcaaggtgtattaggtccaattcatagtacctgaaagcacactttactcaaattgggaggaggtgttagtagtgcatgatcggtccaggggctgtagaaatattagtgaaggatttgaaagtctttgacacatttaatacttggttgcattatgaatatgttgaagacaaattatagaagacaaagctaagcagcaattttatatatctacaagcagcaagggaatatgttgga

SEQ ID NO: 108344 - DNA, 387 bp, Glycine max
  Clone ID: PAT_MRT3847_6884C.1
tgttctcggcgcgagctactgacacacgcacaggaggcattttttacagctagctcaagtcaggtgcgtccagcaacaactctgttggcggatgggtgtccatatagggctgctatggtgcatgagggatgagtgactacaatgccacgggaggttgtcatgggagttcaggtggcaaccatgaacaatctgtgagcatatgggctcagggccgggctatcagggactcgtacaccgggcaccatccctaatgccatttcacagcaaactgttgggcatcaactggcaccagggagaacaccacagaatcttgatcctaggcagcaaagctggaagtaatgatgtattgaccatctcagtggaagaacattagtggacaaaactgga

SEQ ID NO: 108345 - DNA, 1173 bp, Glycine max
  unsure (1)..(1173): unsure at all n locations
  Clone ID: PAT_MRT3847_68850C.1
ggaancccggggcggtccacgcgtccgcccacgcgtccgcccacgcgtgctacggcccgagcttcttcaaacaaaaatctgaaatttgagctcaaacacaaaaaaaacaaaaatgaaacctacgatcaccattttgttctctctactacttttcatagcttcaccctccttggcaacccgacccgcatccaaccctgatcaagtcatgcactccaaggacaacaaaaacaacaacaaccaaggtgatggtggtgggttctttggccccggaggaaggttcagcatacccggttttggaaacgggtttggaaatggcatcataggaggaggatacggatccgggtatggaggtccgaatggtggctcctctaaaggtggtatcatacgaccaaccgttctgtgcaaagacaaaggcccttgtttccaaaagaaggttacttgtcctgccaagtgcttctcctcattcagccgctccggcaagggctacggcgccggtggcggtggcggtggctgcaccgttgattgcaaaaagaagtgcatcgcttattgctaagccataatatggtaacacttgttatcactacttgtactagtattatttgttatgtatgcgattaaacttatattatatggtcatctttggttacccttttagataaataaatgaaaagtagatacatctctacgtaggtgggtttctttttggtgttttgggtgttgtttttgactggtatgtgttgttatatctatgggtggaaaaaaaattatgagatataaattaagatagtgttaagtatggactgtaattttggttactatatatagtatattaaaaacctacactggagatgcagttttgacatgaaattctcgtattattggatgcggatggtaagagacaaagattaggtcgtcgatgtgatatgaaccttcagccgcaaactccagatctcattcctcacccaacaataaatacaaaaacgttctattaatggatgtctttataaaaaatacaagcctttcagtatgtttaaaatttggaaagtgtttaatagtacatttatttcaataattaagataatttaatgaaaaacacaagcacttaaatcaactagccttaagtttgtggaatattagcttaacgagttcaagccatctatatatagtagcatc

SEQ ID NO: 108346 - DNA, 118 bp, Glycine max
  Clone ID: PAT_MRT3847_68851C.1
acaccacaccctaataattcaactacaactacattacatgttctctccggctctacgattttctgtttgagatccaaaagccttcctttcccgcactcgcaattctccattctaatct

SEQ ID NO: 108347 - DNA, 456 bp, Glycine max
  unsure (1)..(456): unsure at all n locations
  Clone ID: PAT_MRT3847_68852C.1
aattcccgggacgacgagaattaaagacggcggccgcccttnnttntnggggggggttttttaaaaagatatccgccctttaaaacccccacaaagtaagaatttttatattttttttgggaacactaaaaaaaaaacccctctgggaaaaaaaaaggggggacctcaaagcccaaaaacggaaaaatttttaaagggaaaaaaaaaaaacaaccgaactggaaaaaagccccggaaaaaaaaaaaaggggggggggagccaagtaaaaaaaaggggggctcaaaaagggggaaaacaaaccttccaatcaaaaacaccaaaatcgggaaagggtggccaaaccatggggtggaagggaaacttggaaaaaaaattcgggggattaccggaaaaaaaaaagggtccgggcccaactttgaaagaaacaccttagaaaggggaaaccacaaaaaggg

SEQ ID NO: 108348 - DNA, 494 bp, Glycine max
  Clone ID: PAT_MRT3847_68853C.1
aataatagaatactacagtgttactaatctgaggacaaacattttgggacgcggcacattcaaatcttaatcctgttcaccaaaactgcattaagattaaatgcactcatccattgtatattttcatctacactgggagagcctggtattgagaatatatacactaaggtggtgctaacttttcacatggtaacctaatgcaccaaacgttccttgaaatgctacataaagctactggtgaacaacttaccactgcatgaaatatgaactatcaacccttgataagacaaggccatcacttattgttgccttctccataatgactgtaagtcctgacaagactgaaaaacacatgctggagtatatccgtttctggaacgccatcatagtgcatgatgatgacgacgatcgcgagcttggcattgttgagcgacatgcgatacacttaattaggagctccttgcagaaccaatgggaaacttgccctcatgcac

SEQ ID NO: 108349 - DNA, 381 bp, Glycine max
  Clone ID: PAT_MRT3847_68854C.1
cacagcaatttcacattgagacatcaattggtccgtcaaacatatataattcacagttataattgtaaagatagaatcaaaattgcagaaatactcaaaaactcttctcaattgatcctttaaggatccctacacatgttctcactactccccaactgggaataactcatatcttacctctaagggggctcactgtgtagtccgacgatgatagcggcgtctttagcgattcccttagattcttcaagtttttccttctaagcaggctctcggttaggatttccaagcgttagttagagagaatgagagggaaatggagtcttggtttcacggtctttgtgcgagagacatttttttttctacaaaattatttcgcaaatc

SEQ ID NO: 108350 - DNA, 487 bp, Glycine max
  unsure (1)..(487): unsure at all n locations
  Clone ID: PAT_MRT3847_68855C.1
agaaaaccgggcgcgacccaacatccgatttatcaaaagtttgcacattcttctngtcaaatataccaaccattatcccccggccgttattatttaaaattacttactcttacacactacttaatatctcaattctattgtctcctaaattccatatactatccatactttcacaactctttttacttattaaaccctttcatttccctacctatataccttccaacctaaccctctctttcctgcttacttataatctaatattcctgttccctacatcctttccattatcctctcattctcaacttctaaactaacacaccctttaccgtaccatatatctccgcttttcttttcatttacgctctattcaactctctttattatccatatctcttactcctatttcctctcctaacattcccttccttctttatactaattttctccttctcttttaactttataatctctccttctttttttt

SEQ ID NO: 108351 - DNA, 353 bp, Glycine max
  Clone ID: PAT_MRT3847_68856C.1
cacgtgctcacgattagacatgtgttgaaactgatggatatggacaactgaaagaacatcgggcctccggaccaaaacttccaggacgaagaatacgacggatactgcttccaatgactgtcaaacgaatctacaagactcaccccaacacgctctgacaccaacaatgggcccgatctgggcacacgcacccaaaatgtgctggaggatacatatactgctgatgtgatacagcgtctcatgaaagtcgcttttacgcagatcaatatgcctattcaacaaacagatgctgctgtaagagctgatggtcaagacgctgctggccggagtgcaatgcttgctgctgcacataa

SEQ ID NO: 108352 - DNA, 836 bp, Glycine max
  unsure (1)..(836): unsure at all n locations
  Clone ID: PAT_MRT3847_68857C.1
aaaataattatcttaatataattcaagcagtgatttgtgattggatgacagtataaaactgttttacactttcagtgtatatgctttatatcctattttgacatcctatgaaattgtcgaacctttgacaaggtagtttttgagtgtacagctggcctatttcagttgagctgaattgctcctaaacattgtcctaattgaaaaacaacaagagacactaatgatgagaattgatttctgaaatccaatggttgatgtaatcaacattggaaggaggtgtgctagtcttgcgaatagaaaatggccattgaggttggagaagcattgagtttccaccctgagaacttgaagatgaagatgatgatctgttgaagtagcctgttaagcattctttctcattcttgttcaaggaattggaagaagcaagttgaggatgctccccaagtttcaagctcaatcctgaacctaaaacctctccatcacccttgttctcactgcttgatccttgtccccttatagatgaaactgcagcagctatcgctgaccgaaaactcgtgtctgtgctgattgctttggttagtgtttctgccaaagcctccctgaatggagtttggttcttgaagtaatgttggtagaaatgttcttgaaattggtttcctatattgaatggcttgatgtgagttttgtcaataggaatagtgccattgttaggaattcccttgccccnnnaggatagtggaatgttggactctggggaccaaaagtttagacttaatggagggaatcttnnngttgaagcnnngtttgatggtaacaattcccttgattnnntgaat

SEQ ID NO: 108353 - DNA, 491 bp, Glycine max
  Clone ID: PAT_MRT3847_68858C.1
taagaatctttgggttcctccattacaggctttcattgtcttttcttcttaatttctctgcaaacaaaaaaccaacacatacatacaaatcataatggatgctctgtgtttacacagtagcatttgtgggatagctccgtcaatttccattactgcatctgcacgcgccaatgattacgcgtcacactctcaggtgaaagctgttgggagcttctccttgttttccagattctcttttagattccctttgaagtccttttggccacgaccaccaacggggaatgcctccggttaccacggtctcgccgtcgacgacgacgccgttttggcagagaatgcaacggccgagacagaacgaggagaaggagagggacaaaatgggaactgggttttgaagatttttcatataaggtctgtttggagaggggaacagaggagcgatgaaggggaagctatggccaatggtcaaacggataaagagtgtgatgatt

SEQ ID NO: 108354 - DNA, 584 bp, Glycine max
  unsure (1)..(584): unsure at all n locations
  Clone ID: PAT_MRT3847_68859C.1
cacgcgtacgtaacctcggataattgaganggncgcctttttttttttttttttcaataacatagtttttggattaagcatgaaagtatgattacatgatgttaattttataaaattattttgaacctatgattgatagggagtattatttagtatataatgagttgtgttctgagcctagatccgaggaatagggggagcctgcaatgttttttttatgagcgtaatgaactgttgtttgtaggaaatgagatgcgttggttgtggtaccttgcattgaaaattgaaaaccaaattagggatgaagtactgcaaattaaggaaagggaatttatagggaggggaaatggttgttgcaggaggaaaggggatgatgttaatgtgtttactgccaggtatatgaaacccttgatgattgagaaacctgtgtgggttaaaggggattggatgctccgataccttagggtgcaagcgtatgatggggaccatgaaattgagtgtgcnatttttaggaaccaagagtgattaaaagggaggttgtggggcataacatgggggaaaggaaagggccttggtgggggggg

SEQ ID NO: 108355 - DNA, 272 bp, Glycine max
  Clone ID: PAT_MRT3847_6885C.1
ctggaatctattttcaagttaatcgagtaccccaagcagcaatatgattcgtataagcgtgaggaagaaaatagtcttaagtcattggaagaatttgctaagcaaaagtactttaatgaaaagcttgatgatcatctgacattagagcaatttttgaagaaggaatccacttgcattgaagatcaataccttttgtataaggatcataaaaggaaaaatatcaagacaatggagcaatattttatgcagagattgcgttccaatagagagca

SEQ ID NO: 108356 - DNA, 190 bp, Glycine max
  Clone ID: PAT_MRT3847_68860C.1
gacacctcaattcacgcagggctacccgctaaggggaagcatatcaaaaaccggcggactaaaagatccaagcttacatacacaaacctgccactctataggatccaaactttacgtacgctaacatgacaacacatacctcttctatcatctcacctaatttaaataaccttgccgtaacctaacaaaa

SEQ ID NO: 108357 - DNA, 343 bp, Glycine max
  Clone ID: PAT_MRT3847_68861C.1
cccatactggggggtcctaattatatggtataaatttattcatcaaactatctcaatttttatcaaaaattaaaaataataaataccttgggttaaaatgaatttcatgagtccaacaataaattttccaaccctttgggggtccaaccaaaaataagggcatttcaatttttgaacagcctataactgggtttgggctggtttttaaagacatcacagtccaaagtacataacaataaatttttgacctatgaggggggcctcagggccccatttatgagtgggggaacagccccattcccatgtgtttttactggaagaccccctaaaattcttaggaaac

SEQ ID NO: 108358 - DNA, 431 bp, Glycine max
  Clone ID: PAT_MRT3847_68862C.1
gtggcccattttctttccctgctctttccttatatgaggctcatcaacttctggtgtcagttgtgaaatctgttaggggctagtcaggccaacatgtttagtttccaattaatttctttttctgtggttataaatcaaatgaaggaaatgcaaaactgagtagacatttacatttttgttcattgaaatttattattagttcattattcatctcttgtcctgtgcgcatatacatctaatcttctatcatcaactcatacgaatacgaaccatggttttccttaccttcttttttttttcccatttttgtcttctaaatttcactcttgtatgggaaaggccaaaaaaatagatgcagatagaatgagtgtaaattgtaaatatatgtgtcattagtccgtttccttctttgaaaaaggagtctttaggaa

SEQ ID NO: 108359 - DNA, 300 bp, Glycine max
  Clone ID: PAT_MRT3847_68863C.1
acaaaaaccccatggttttgtccaaaagggaaaatgaaagaaaattctttggagagattaacttaagcagatccggggcttttttttttgccagagagcaaattctaaaaaggggggttacttctttaaaaaacattattttaacaggtctaattcttctctccatatacgaccagggattctaaacttaaacttttgtttttctcccccaaaaaaataaggggctaggtccctctaaattataagcccattttgactatttcaaacttttctatgactgccccaaatgccccttggaat

SEQ ID NO: 108360 - DNA, 290 bp, Glycine max
  Clone ID: PAT_MRT3847_68864C.1
gggcgttggttattttcctttctgtttcaatttccgcttgtgctttggaggggaaaaaatccagactgtgattttagcttgcctgcccctaagggaaaatattccctttccttataataatacccggcttgaagccttttgacccaatgacctttgattgtgcccgaaagcccccgccgcgggtaaacccctgcttctcacgaaacccccaattatttttgggttagcggggaaagaaaccccaaatcccactttttgtcggatttacgaatcatgttgggagtaccaaa

SEQ ID NO: 108361 - DNA, 155 bp, Glycine max
  unsure (1)..(155): unsure at all n locations
  Clone ID: PAT_MRT3847_68865C.1
gcgaattgggttgttttgannaatgggctctcttttggctgccattttttcccattttggtcaaaagttcgcccaaagggatggcaggctgggaagttngccagggaaaatgttcttntggctttttgggggttggttttgttgtcctccccatc

SEQ ID NO: 108362 - DNA, 208 bp, Glycine max
  Clone ID: PAT_MRT3847_68866C.1
gggaaagagaaggccccttttaaaaacacagggccttggggcggcatatataacactcacaaataattttgtgatgggcgcctagaaaagggaaacccaaagggtccccccggatctcgcacctccctctaccaaaaaaagggtcccaaacccaaaatgggaaattttccggagggggaaatatattgtgaccccatataaatgggaa

SEQ ID NO: 108363 - DNA, 358 bp, Glycine max
  Clone ID: PAT_MRT3847_68867C.1
gatctataacttttcttgtcgttggaccccccggtaatttaccggcacttgcaggggggcaaactttttttatattaaggggtatgataaaaagtggggttaatgaacgtagaaacaatctgcgtggaaaaaatttgtactctcaacaacttacaacaggggagggggcagcataaaaaaaaaaaaaacctggggctaccaaagggggaaactaacattaaataagtggggctggctgactgcgtgattctggggaaacaaagtgtgttgccatctgtattatattaatctaataataggctaaaaaatgattgtttagctaataacaccatagctatttttttttttgggagggggg

SEQ ID NO: 108364 - DNA, 683 bp, Glycine max
  Clone ID: PAT_MRT3847_68868C.1
ccacgcgtccgctctctgtgtatcttccctatactctaccttcatgatgcacatcttacacaagacccttaccggcaagacctcacccttgaggaggaaagctctgacaccatcgacatcgctgaggccattatccaggacaaggaaaggaatccacccggaccaacaacgactcattttcgccggaaagcacttgaggacggacgcacccttgctgtctacaacattcacaaagaaagaactcttcaactagctctccgtctacgaggaggcactgcagatcctgggtaagacactcaccgggaagaccataaccgtagagggtgaaagctccgacaacatgcataacgtctaggccaagatccaagacaaggaggggatccccacggaccaacaacgtctcatcttcggcgcaaagcagctctaggacgggcgcacccttgccgactacaacattcagaaagaaacaaccgcttacctggttctgcgtctgcgtggtgggatgcaaatcttcgttaacacccttaccggacagactatcaccctataaggcgaaagctccgacaccatcagcaacgtgaaggctaatattgatgacaaggacggaatgctcccagaccaggatatgctgatcttctccggcaagcagctcgcagacggacgcacgcttgctgactacaaca

SEQ ID NO: 108365 - DNA, 658 bp, Glycine max
  unsure (1)..(658): unsure at all n locations
  Clone ID: PAT_MRT3847_68869C.1
gtccggaattcccggctcgaccacgcgtccgacaagtacacaccgctacaatctcaattttcccccccttctttcctgatctgaaatcatcacttttttcattaattcttcttctatatatctctactactccctttctcataccccgtatatggctgcctgtgctttgttcagtggtggcggtaacattaccgaagatggcaatgttaatggaagtggaagtgctaatagcactcctttgacaagtgcctctaactctagcaacatgagcaacgaagaacaacaacaactacatgctggtggcatcatgccacagccttattgtgagagaaaaatgatgaggaaaagaatggcttctgagatggaagttaacgttcacgccactccaccacacaactcttcctccacaacaagtgattatcctaggtttcctcgtcgaagcaacaccaacacgaacatgttagaaaaagggtcccccacaacaacatcatcaacaacaacgttagccgcaggtccatgntataataataataataataataataataataatagccatcattataataatagtaacaatagtaatagtggtaatatttcatcaagagataacgttgctattccaaattaccccactgtgacggtcacaaccaactac

SEQ ID NO: 108366 - DNA, 262 bp, Glycine max
  Clone ID: PAT_MRT3847_6886C.1
gttcctttttattttcccgggctattgacaaggaagcatccaacaggcacttttttcctcttttgctgttatgcatgtttgtttcattactatttgtttttattgcaaggttctaattttgtttgttgttatgcatgttttcttctgaataatagttatgttttcttactgatttttcaactctgtttttggttccttttttattttcccgagcatccaacaaacaagcctttttcccttttgttgttatgcatgtttggta

SEQ ID NO: 108367 - DNA, 492 bp, Glycine max
  Clone ID: PAT_MRT3847_68870C.1
gaacaaataaaaggaaattttcttggacaaatctgcttatggttacaacagaaaattaaacaacttgctgaaaagggtatttgcagttgatgatgatcattgacactgcaaccattctgaagctttaattgggcttcatttttataccccaacttcatcatcattttgactaaataaaaatattgacaagcatgctacatccacacgaggttctgcctctacctcagtttctgtctttgttaaccccttcaaccccatcatgtgctggccagctctggatcctaaagtggaatcagaatcagttcatgttctgcaaataaatcacactgacctataatttcaacttatgtagttccttgtacacacattatctgaatcactggccatatgctagattttctcttcatcgtctgtaacagagctactgcagcctagaatagtctccatgtgtcgatccctctcactcaaaaactttgttgagttgtactcttc

SEQ ID NO: 108368 - DNA, 109 bp, Glycine max
  unsure (1)..(109): unsure at all n locations
  Clone ID: PAT_MRT3847_68871C.1
cgcattttgagtctctgtgggtcttttggggctctctctcgcgnagctcngcacgcttcagggaatttccacacnacatacganagngcaaaantgcgtcgtgagtnca

SEQ ID NO: 108369 - DNA, 1018 bp, Glycine max
  Clone ID: PAT_MRT3847_68872C.1
aattcggctcgaggtggttacctgaccaatggactcaccatactgtctcaaaagtggaaggcacattcggctaccttcctcctgaattcttcatgcatggtatagtagatgaaaagacagatgtctatgcttatggtgtactattattggagctcattactggtcgacaagctttggatagctcacagaaaagtctggtgatgtgggcaaaacctttgctaactgcaaataacatcaaagagcttgtggatccagttttggctgatgcttatgatgaagagcagatgaagcttgtaaccttaacagcttctctctgtgtagaccagtcctcaattcagcgaccggttatgagccaggtgttagatatactaagaggggaagaagagagcttaagaatcatgaaagaacgatcgaagtcaaaacttcagaggacatactctgaagaactcttagatgcagaagagtacaactcaacaaagtttttgagtgagagggatcgacatatggagactattctaggctgcagtagctctgttacagaagatgaggataaaatctagcatatggtctatgattcagttaatgggtgtacatggaactacataagttgaaattataaggcagtgatttatttgcagaacatgaactgattctgattccactagaggatccagagctggccagaacatgggttgaagaggttaacaaagacagaaactgaggtggaggcagaacctcatgtggatgtagcatgtttgccaatagttttatttagtcaaaatggtgatgaaatgggacataatttgtgatgccaaattaaagcttcaggatgggttgcctttagatggggattaccgttttccattttatccacgcagtgtcaatgatcatcatcaattgcaaataccattttcagcaagttgtttaattttctattgtaaccataagcagatttgtccaagaaaatttccttaatttgttcattttgtgttaaaaaaaactcgagactagttctctc

SEQ ID NO: 108370 - DNA, 1566 bp, Glycine max
  Clone ID: PAT_MRT3847_68873C.1
tgatgttgaaagagaaggagaggaaggagcaggaattgagggcattggcgcagaccccacggtctgaaagaattggaggggagagaattggggttgtaccagccgcgccaccagctgtggcggtggatgaggacgatatgagagttgattatgagcatgagaaggagaatccgagggagagggatagggagaggagttttgtgaaggagagtagggaggagaaggaggagaggatgcagcgcgagaaaattcgtgaggagaggaggaaggagagggagagggagaggaggttggaggctaaggatgctgctatggggaagaggagcaagattacgcgcgatagggatcgtgatatcagtgaaaaagttgctcttggtatggcttctaccaagccgggtactgaggttatgtatgatgagaggctgtttaaccaggataagggaattgcgtctgggtttgccactgatgatcagtacaatgtgtatgagcatgggttgtttactgcgcagcccacactttccacattgtataggccgaagaagaatattgatgatgagacttatggaggtgcggatgagcagttggagaagattatgaagactgataggtttaagcccgataaagggttttctggggcttctgagagggctggtccaagggatcggccggttgagtttgagaatgaggaggctgatccatttggtttggatcagttcttgactgaggtgaagaagggtaagaaggccatggagaaagtgggtggtggagggactatgagggcaagtgctggatcatcgatgcgggatggtaatgagggaggttcaggtaggactcgcattggatttgaaagagggcattaggtagcaaatgtttaatgatgcctgacatatttcttgtggatagtgttgactgttgaatatccacagtcatggcttaggttgctattctgaaaatggatggttaggacaatggcttgtgttagcattttggcttttctccaacccctttcctgttgccctgtttaggtggtcaaataaactgcttttgttcactttttttagttctgttgttaaaacgggtaagtgctggttcatctatgcgggatggtaacgagggaggttcaggtaggactcgcattggatttgaaagagggcattaggtagcacaatatttaatgttgcctgacctatttctagtgcgtagtgttgactgttgaatatccaccgtaatggcttaggttgctatgtctgaaaatgggtggttagaacaatgtgcttgtgttagcattttggtttttctccaaccccctgccctgccgccctgcttaggtggtgaaataaactgtttttgtacactatttcaattctgttaaaactgcttatggatgttacaacaatctctttccagtaaattatatattgaatgaaatgtattgtttaaagtaaaaacatgtcaattgggggcgtatttgctctggttttggaagctttggacttgtggaagctttttctttccatctcacaagttgatacacgaagctttgaaactttccaaaaaagatctcac

SEQ ID NO: 108371 - DNA, 560 bp, Glycine max
  Clone ID: PAT_MRT3847_68874C.1
ctttctaattcctacgttgcttcttctcctgatgcacctccccagattaccttaaccaacaaaatctctttccctcttaagtgctttgttcgcatatccttgatcctcaagggcaatgtttcatgtgccaaattctcctttacttgaacaacatctaaattgaccatgtgagaaggatcattaatatatttatggatttgagaaacatgaaagacattgtgaaggctagtaagagatgggggtaatgcaatttgatatgccacaaaatcaacttttttgagaatttggaaaggaccgataaaatgaggtgtgagttttcaggatttcaaagctcgaccaaccccagtctatggggtgactcttaagaatacatgatcaccaacctcgaattctaggtctttcctcctcttgtcgtgataactcttccgcctactatgagcaatcctcatcctcttttggatcaacttgaccttctcaatggtttgttgtaccactttaggtcctaaggtgaggttctctctgggttctaggctgctcacgggtgtcctacaccttctagc

SEQ ID NO: 108372 - DNA, 340 bp, Glycine max
  Clone ID: PAT_MRT3847_68875C.1
gatcgtggttttttgtttttttttttttttttgtttttattctttttttttttttttttttttttttaaaacggcttttaaccatttttttttggggggggggaacccaaagccctcggtacgggggggggggttttttttaggggggggggggaattttcttatcacgcatgggggggggggaattttaggtgttgcaagttacggagaggggggattttttgcccaagggactggaaatgaccccccccttttggggacgggggggactccccgggaatttgggggcggcgggggcagggataccacttttcttttggggggggcacaataaagcggg

SEQ ID NO: 108373 - DNA, 262 bp, Glycine max
  Clone ID: PAT_MRT3847_68876C.1
caaacaggagaagagatacaatcgagcctggaggagatttctaagcacagagctgacagctcaacagacagcagtgagttcaattgggggtgctactgagagatacgcgagagccgaagatgaagcaagtaaagcttccatagagagaaacattcaagcaaataagagggctgaagaagacagaagaaaagcagacagtggtaggggtgttcatgtggctaagtctgtagagaaggaggcttcagtgctgaaagcagaactc

SEQ ID NO: 108374 - DNA, 221 bp, Glycine max
  Clone ID: PAT_MRT3847_68877C.1
acggttacaaaagaagacaggggggggagtggaatgaaataaggtcgccaatgggtagttggggggggagggtagaacaatgagggtgtccgacgaatttcgaacctgctccggcagtaaataaggactcaacttattgcgttattgctgtagcaatagatgacagacaaataagtggattatggtctaatctgtgaaccatgctatacaattgaaaataa

SEQ ID NO: 108375 - DNA, 254 bp, Glycine max
  unsure (1)..(254): unsure at all n locations
  Clone ID: PAT_MRT3847_68878C.1
caattactactttctctctctttgtaacttgtaagcatggagtcctcaaagatctatggcttacctgcttcctttggcatgctctttccttctgccttccgccactcccatttctgcggttgtggctactgtggcaaaccccccaaaaancacaagcctggtaaaanaccaaagacacccacagtacccgttgttaagccaccagtcacaatccctcccattagccaccagtcacaatccctcccatgttatcc

SEQ ID NO: 108376 - DNA, 1623 bp, Glycine max
  Clone ID: PAT_MRT3847_68879C.1
tcggctggagctcaactcttctactcaaattcaatttctctgacacagagaaaatatccccgttaagataagatgatgatgaaatcatcatattcttcatacctttctatattattcctatttttccttctccttgtggataaatccctctccaaatccggtgcacgtttttctctaaccagagcagtgttcatgccgcaccacccagtgattggtggttcccaatgggatcaaaccgtggagaccgtggaacagcaagagtctgctccacaaccaacgaagcaaatcaaaggcctctccaaaatcaaagactacttctccaacttcggctacctcccctcctccggtggcacattcaacgatgatttggaccaggcaacggtttcagccatcaccacctaccaacgattcttcaatctcaagatcaccggcgacttaaccaacgagactttacagcaaatctcgctgccgcggtgcggcgtccccgacatgaactttgactacgatgtctccaaagacaacgtgtcgtggcctatgtccagataccatcggagatggtttccggacagaaacctcacgtacgggttttctcctgcgagcaagatcccgtccaacgcgacgaaggtgttcagagacgccttcgcacgatgggcgggatctgtgcctggtttaaacttgacagagatgaattacaacagcgccgacttaaaggtagggttctataacttggatgaaggtgtggaggatgtagtgtggggtgagagcattataagattgaatgcttcaaatgtggtttctggagagatacgtttggatgcgactaaagactggaagctgcccggtgaaaagggtgaaaacggcaccgcattggacttggagagtgcagcgatgcatcacatagggcatttgctaggacttgatcattccaacgatgaagagtctgttatgtacccttatgtgttgccgtcgcggcggcagaaggtgaagctttcgagttctgataaggagaatattcggcttgtgtatagcaaaggtcactctggcaatggtggaagttggggagtggttcgaattgtaacccccttggctcttggctttgcttattatgcggtggtgctagcttgattgatgttgaaaaagtaacaggtaccctgataacaacgagctgaagctcccattcaatccaaatagggagggtagggattacaatcaccatctctaacacatctagcataatttacctctcctgcctttgtatttggttctcgtgaggatgaaaggcctagaaagttaagtttatagtttcgatatgagtatatttgagtaaaacatcaaattgaaaatgagagagatggccctcctcaatagggttccctcctagatcaaatctcccatgataagtaatggtgggcaaaatgggatcccttgaaattttgcccccattaagaataaggtgggtttacctatatagataagaaaaaaaattttttttaaaattgtttttgtaaaaatgaggtaaactcttaattccctttttgatggggcttgttagaaataactttatttggcccccgattaatggggtgggtcctgagaaaattagaaaaagaatgttgaatgttt

SEQ ID NO: 108377 - DNA, 327 bp, Glycine max
  Clone ID: PAT_MRT3847_6887C.1
ggtattgtatttaacctttacccatatagaaggactctgtgcatgcatactttatttcaccttagacccatttctgggccaaacaacaaatgacattttaatccactaatactatgctgacatataccctaataaacggacactcttgctatatctttgccctgaattcacggaagtatatcatacgactctcttaatcactgggcgaaactgtttgatgaacaactgggcgttactgaaaagtgttcccctagagctgcttgtgctacaccaccataaacgactgctttaatggttataaatacacggccatgctcctataggaat

SEQ ID NO: 108378 - DNA, 308 bp, Glycine max
  Clone ID: PAT_MRT3847_68880C.1
gaattcccgggtcgacccactcgtccgttctctctttctatctcctttatcatcaactacccacctcctctgctatctttaatcggtggtctattccataaacgttgtatgtcaagctcatgctaataacagaatcacactccaactcccactcccattcatatactatacatttacactctccgataattgccctcctaactactctattcctgtctactctattatcatgtataatcaccttcacatcatcatctctaataccgttcacctacctctagatactacacactctactctttacacta

SEQ ID NO: 108379 - DNA, 321 bp, Glycine max
  Clone ID: PAT_MRT3847_68881C.1
ctcaagcttattctgcttaagatctttggagatactattggtctatctaacaacagttggtggatgcatggctattatcgcgtgaagcgattgatgaatcataaaatgtacttggagaaagggggggagcacactcagtggatctcacatgagtgtgcaccaggcactatgtaccctgactgatgcgggtgtgggccatatataacatgcgtctataagctagttgtcgaagataatgaaatgctacctatgttttaaaggaagcacatatattatttactcattgaagtagctctaagtcatatcatctcctagttacag

SEQ ID NO: 108380 - DNA, 1149 bp, Glycine max
  Clone ID: PAT_MRT3847_68882C.1
ttttctcgatccctttggcttttccagttcttattttgcccgctcgtcgccccggcccgggcgccgcggggagctgccgccgtgccggccgtgcgtcgctgggtcttgctccacctcgagttcgtccgcgcccgccctccatatcgcgtgccaccggtatccccaaacaatcgcttattgctaacgcgacctcttcctgttcccgctgcatcagcctcagagcacccgctagggtttcttctgcacacccaaccaaatggcggatcctgagttggaagcaatcagacagagaaggttgcaggagcttatggctagccatggtggcgtgggaaatcaacagaaccctgaacaggagaaagctcaggatgatgcaaagagggaggctgaggaacggagacagatgatgcttagtcagatattgtctgctgaagcgcgagaaaggcttgctcgaattgctttggtgaaacctgagaaagcaaggggcgttgaagattttatattgagagctgctcagatgggtcagataactgaaaaggtttctgaggaaagactcatatcactgttggagcagataaacaaccaaacaacaaggcagacaaaagttacaatacagaggcgtcgaagtgttcttgaggatgatgattaactttcactgtctctttaaacggtgtgccttgagtattgatttcatgctttattatatattttactaagtattgtataagtggattgagaaatatatctgtttcagattgaaattttggttgccttgccaggcctcctaattaaaatacttgaaagctttttattatcatcttgcaacattcaaggcagacaaaagttacaatacagaggcgtcgaagtgttctcgaggatgatgattaactttcactgcctctttaaacggcgtgccttaagtatttgatttcatgctttagtatgtgtattttactgtcaaatcaaagtattgcataagtggattgtgaaatatctgtttcagcttgaaattttggctgtcttgccaggcctcctaatgaattaaactacacaatacttgaaagcttattattttgacacattcatttgtaaaacaatttctagcatgtggatggcatttcaaagaatacatgttgtaattttccactaaaa

SEQ ID NO: 108381 - DNA, 658 bp, Glycine max
  Clone ID: PAT_MRT3847_68883C.1
ttcatatgggcctgatttccatgtccaaagtttgagagaggacttactcgagccggaaaggagtggaagctgttctggagagaccataaaaaggcaaaggggttttgacctagaaaggcctgctgagagagacatttttggtggcggctgtgatgaacatgaggcaggacttagctcctacactgcactagagagatgcaaaataagcagcaacaatgatgatggttatgatgaagacatggaagtggatttgactctaagcataggaggaggaagccaagttaataagaagaatagtagtagtaagaaaccttatctgcttccattagggtgctcagactcacccaatgggaaaactagggagctaaattcttctgtctctttccaatcagatagggtgggagatttcagtgaccccaccacccctatgagcagctcaagtgtgacatttgatcaagagagaaaggggccacattggctttctcaaggtttaaagcttaaataggagagttttaacttgtttgattgtattatgatgtatccttcctcctctctcaactctacatggaccacggaatttttatggttcatgtgttcagattcctagactagattttcttttttactttattccaataaatggataacttatactccc

SEQ ID NO: 108382 - DNA, 239 bp, Glycine max
  Clone ID: PAT_MRT3847_68884C.1
ttcacattattcttcactcccaatcttcatattacaaacccccaccttaagttggtgtttcgtgcaacaaacctcaccccacaaattgtgctctttaaactcccgcttcaaaaaaaaaaacatctttcacatcaaactcatctgaataatcttatgatcactctcattaggatatatctccacaattcaaactgccccctactacatgcaagaatatacactcttcttcaaagattact

SEQ ID NO: 108383 - DNA, 699 bp, Glycine max
  Clone ID: PAT_MRT3847_68885C.1
gagagtacacctttcccagacattgaaattgggatcaaactcgtctagtggtgggtacaaatcgcaatccatcataagacttgaatttgttcttagagaggaaagccttcttcatcaactttgcccaggcatgttaattattaccattgagcggagggctcaccaatgctacattcagattttctgcaggacaaatataataagggctcgctggattagggtacttgaagggttagtgaaactcgaattggaacttgaagtacaggtggtgaagggttagtgacacccgaattcctcgacatgattgagttgcacaggaaatttctaagttagacctgtttagacatttactttatctcactacaaccagacctgacatttgttttgccacacaattgtcccattcttatcatttctcaacatgttgcattacaaagcagcccaaaaaattcttgaagtatttaaaaggcatttttggcaaaagaatttatttcctcacacctctgtacttcatattcttggtttagtgatgctgattgggcgggtttcccagacacaaggcattcaataagtttttattgcttctttttttggggactctctgttcagctggaaatcaaagcaaaatactgttgtttcttcttctgcagaagaagaataatgttcctttgccacaggctcttgtgaccttcagtggct

SEQ ID NO: 108384 - DNA, 434 bp, Glycine max
  Clone ID: PAT_MRT3847_68886C.1
ggggttgcctcttccttcccttcagtagtgggttaaacccagctggcaccctctggaacgacgggaacaatattcttgaggagaagtctactccatcaaagacaggaacacaatattcccaagatctcaacgaggggcagaccaagactgcttctgattccttgggaccgtctgtgattccaggctggccatcccaaattaaggaccccacccttccgggagcaaattattacagtaataaattgccttcatcttccatatatcacctaagcatggttaactacgaacgtccaaaacactgcattcaatcccaaagtccatgtggctccaaactgcagcctcccggaccggaaacctccagctattctagccagaccaaacggtcttccgttatcatccagccccgccaatgctaaagagcaagatattgggcc

SEQ ID NO: 108385 - DNA, 250 bp, Glycine max
  Clone ID: PAT_MRT3847_68887C.1
acaataacagggccataagtaaacagtggaaagacttagtcaacagcaacaactgcattacgggactccggaggatcaccacaaatttcctgaagtttcgctcaacgaaattgccggcccacaaggagaacctctggcgcagagtctaaaaccatccgcagatgtctcggatgattcatgaccaagtgcactggggcttgctacgcccacaacaatcctgggtggcacctcacttggggcaagaaaagga

SEQ ID NO: 108386 - DNA, 295 bp, Glycine max
  Clone ID: PAT_MRT3847_68888C.1
tgaaaacttgctctagctgaactatctttcttgtcatgcggcaagtgtttggtactttttgttcaaccctgctggcctctctcttatcgtacagagttgccggctgaggtggctaaattacctccctcctgatgtctgatgagggattattactcccgcccaacgacttttgattatgtatctccctccacagtggggaaacacgcgggccaaccttgcctcccatctacctgccaggactgattgtgagatcgataactatttcttgaccgcgatccatacacacatccatcaa

SEQ ID NO: 108387 - DNA, 150 bp, Glycine max
  Clone ID: PAT_MRT3847_68889C.1
tctaggattaaaattagtaattaatcccttctatagaaacctaagactcgccattgacaacttactcgcttacgttatataactgaacagaaaaatgatttgtcttgactgtaaaaaaaaaaaaaaaaaaaaaaaaaaaaaaaaaaaaaa

SEQ ID NO: 108388 - DNA, 640 bp, Glycine max
  Clone ID: PAT_MRT3847_6888C.1
cagtgaagtaaatgacaagtcagtttctggtacaactcaacttgtttgtgagagatgttggtgtgctattgaaaataacaaaggtattacatcattggactctatcagtcctggagagggaataaactctgttaataactctggcgctgcatcagctggctgtaatagcagcagagaagttacaaaagtgaaaaagaacaccgtattgaaagagcaacttgaattttctcaaagttcaaagagtagccaaggtgactacagtagtagtacaagtaccagtgatgagagtaatctcagtgggtctagttgtggcaataggcctcacatgtcgaaggatgttagatggaaagccataagacatgctcaaatgcagcatggagtcttgggcttgagacacttcaatcttttgaagaagctaggttgtggagacattgggactgtatatcttgctgaactaattggcaaaaattgtttgtttgctattaaggtgatggacaatgaatttttggcaagaaggaagaagacgcctagggctcaaacagaaagagaaatattgaggatgctggatcatccttttcttccaacactgtatgctcagtttacatcagataatttgtcatgtctggtcatggagtattgt

SEQ ID NO: 108389 - DNA, 400 bp, Glycine max
  Clone ID: PAT_MRT3847_68890C.1
cccacgcgtccgcccacgcgtacgctccgtgcgtggctatgatatagcacacatacagggcctattccttactaagggtgtgaaatctggagggagaatgctaggctctgaatacaattatgcgacactacccatttacaatggcgaacagcccctattggggccaccttcttacgccatcgctcatgctgagccgtcagaactcaatcatgcagcggaagaagagacactctatgaggagcttcagagcacgttggatatgaaggatgtggatgaaagtgatgagaaagtttcggactttaacgatggtggaggagtttgtgatgaagaaactggggacggtgattgaaaaagtcacggttgggagacccatacttgcaatgaggaagcgggtgtttat

SEQ ID NO: 108390 - DNA, 749 bp, Glycine max
  Clone ID: PAT_MRT3847_68891C.1
ctcaattattgtactttcactcacttccttcttatgttagcatcctgcacttcccattggttggtgctaggcttctaagctcgaagattaaacctgtaatgcatgaaacttatatgcaatgggaactacatcaaatctaatcacatatgagatcctcagagtcagcaagtcataagtattgacatatatatgttgccactagccatagatatctagcactagcaggttctgagctcttccatttataaagcaagtagcagaactcttggctcgttaccttgaagactcatcatcattgataacgttactaagctaatgttctagactagacacgtgccagacaatcccaagtggtttcaaaatcaaagtagaaggccccatcaaatgtgctaagatcaggagatgcattcagttcagatgccaaagctccatcagctccaaccgggacagagttttcattgctaagacgggtgcttccagtaaactgggtggcactggatgatatgttcatagattctgaactttgttgatgaggattgctttgattggcatccccaatcctgtctgccttcaatgcagcttcaattagactcgcatcatgaggtttctgttggcaagaatattgccttgtagttccactttgggttacatttccacaagcattttcaactctactcaggccagccacattattacttgaaggagcattgtcaccttgaacagatatgcataaatattctggctaccat

SEQ ID NO: 108391 - DNA, 476 bp, Glycine max
  Clone ID: PAT_MRT3847_68892C.1
tttgttttttttttttttttttttttccagtaatagtatttaatattataagcagagattcataattcagattagccgaactttatacagaagcgaccaattaccaaacattaaaaaaaaaaaaaggaaggaaccatgggccttaacacacccatcacaagtccaaagcacttgaactggctgaaaggcaggacatgaccactttattctaaggatgatggttgaacacaaaacaccggagtgcacgaagaccatcacagacataatacataagtttttagctacacagtaatagttcatcatgagtcctaattaggggctatgtctgcttgaagcttggtctcccaacacctgacttgcaagtgcaggggttgcaggagcagtttggaccccattggccgccatcgttgtcagcgggcacacgcattgcaggaccctcaaattgagccttagcaggtgccactcccatgaccaag

SEQ ID NO: 108392 - DNA, 757 bp, Glycine max
  unsure (1)..(757): unsure at all n locations
  Clone ID: PAT_MRT3847_68893C.1
agtagcccaccaatataattcaagacggattttctcgctcgacgtcgcgtccgctaacttcataatatgcaggaaaaaagaaactgtatattttaaaaggataaaaagctgtattgtaccaaggtttccaataaagaaaaaacaaaaactcctgaaaatcaaaacatgcataaaagcctttttttttatcggcaaagataatatatatatatatatatatatatatatatatatatatagcataaaagccattttaatgttaccaaaagaggcaattcatgataggataaacataccagctcgtactgcttacaacaagtgctggtcgatttggcttcaaatatatgtttgaaccaacctcagttgcaaacagagtctcgttttggtgacagctagcaaccaatgaatttcctgtaagaagcaagcacattaacaaaaaaatgagctaatgactaagattgatatatatctggattgtaaaacctatcttaccattactaacacaatctctgacaccaagagaccgaaacaagtcctcatttaatctgcaaaataactgtaaaatatctatattatatatgaaaatctctaagaatgcttggtaagtaataataaccagagttactcaacaactaaactagatcaccttatgcctctcctccagtgaagctggatgaaagatgtcaggaggcctgatcatacanaactgtagcactattaaattaagaattaaaaaataaacatcaaatttcttcat

SEQ ID NO: 108393 - DNA, 208 bp, Glycine max
  Clone ID: PAT_MRT3847_68894C.1
caaaaaaagaaagtaaaaaagaaaaccctagaggagaagaagccaaaaaaaagaagccaaaaaaaaggctccaaaggtgggtttcaaaagctcttctcttgtattcctaacttttttggttggcttcccttcgggttttcattcctttgaccttacaccacttgttaggccattttccaaagttttcacaatccaccaattccttacc

SEQ ID NO: 108394 - DNA, 321 bp, Glycine max
  Clone ID: PAT_MRT3847_68895C.1
ggacgcacttcccaacagggtgtgtttgttcccgttcaaggagtactatcaggtgctctttgctgaattaatagtagaatttggttaggatcatcagcaaaagttgagcgaccgaggtgagaggtccttccccgctgcctggttcggagacgagcgaggcggacgtcatctcggctgctcttaggtgcgcgatgggatcgtgggtcctctcgctcctttggggacgttgaaggtgtagctcgggtgtgcggcgcgctcggatgacagagcagctttacataaagcaaaagaaaatctttgtttaacatcaaaaaaaaaaaa

SEQ ID NO: 108395 - DNA, 382 bp, Glycine max
  Clone ID: PAT_MRT3847_68896C.1
ccacgcgtccgctgctgctggctggctggcttcctcgtaatatcaaattcttgttttctctttctctttctctctccccattttctctctctacagtctacaccctacacccaacccaccttcagtttctgttttctgccgactagtttgatcagtctacggttccggcacgctagtactgaaaactagctacaatgaagaaggccattggtcaaactgttagggaacttaaaagagaagtaaataagaaagtgttgaaagttcctggaatagaacagaagggtcttgatgctaccaacaatgaagcgtggggtcctcatggatcacttcttgcggatattgcacaggcatccagaaattttcatgaataccaaatgatcat

SEQ ID NO: 108396 - DNA, 1662 bp, Glycine max
  Clone ID: PAT_MRT3847_68897C.1
ggtggaatgcctttccaaccatttctagctgttgccgctcaacctattcatacaggtgctgtttcactgtttcgaaaccagcctatggttcctcagttagcatcttttgaccaatctagatttcaaattcagtccccttggcgaggtcttagtccttgtagcctgtcaaggcagagagaggaagcccttccacctgacttgaatattggttttcaatctccagggtctcctgcaaaacaaacttctggtgtccctgttgactcacagcaaccagacctagctttgcagctatgatgaggcattgctgtcatggtatggatgtttccacttgaattggactggtcatggaatttgcagctcctgtcatcgaatgttgaattttgatcttgaaggcttgcatagtaaatgcgaaaatgccaaagtctacccgggttgatgactacttaaatttttcttaactctattttgtacataagttccaggcctataaagcaaagacttgttctcctttgataaggtattctttgaaagtttagcaaattgtattattgagccatatctattttccatctggcacccataaagtatttcttgtctttgaagcactagttgattatcttttctgccactcttaatcacctgtacacaaaccagtgttgtcaaatggcggttatggcagcgccatggcagtatggcgtgcgggtttcaaatggaggtgccatggcggctgccataggcttaacggtagtgacagaatggcggttatggcggaagaagcttttttttttaaaaaaaaatttcccaaaattacagattggatcgtcttgggctgacccgacccaaccctaaacccgattttcgaatctcaatgggatgaacagcatgcagcactgtgcgatctgaactcgtctgcgagcaatgataggtgtggctggggaatttctcctcgtggtgctggatatacatttggccaggatatatccgaacaatttaatcacacaaacaagcttaagttaattgctagagctcatcagctggttatggatggatttaactgggctcatgaacaaaaggtggttaccatttttagtgcacctaactactgttatcgatgtgggaacatggcctccattttagaggttgatgattccatgggccacacatttatccagtttgatcctgctcccaggagaggagaacctgatgtcacccgtagaacgcctgattacttcttatgatgttgctgctgctgcatatcatactggggtcgcagttacatctcattctgcacaaatttcaagtagtttgtgcatcctcatcctcgttgatgagattgctgtaaggacttaaaatctttgggtatgcacaccaaacttttttggtgattgcccaataccgtactaatgtaaattaggcgagaaacattccagttttttgtgacgctcaagaacttgctggacaccctattggagaagtctcctagatgatggccatgtcagaatatgtattattccagtgacctgtggatatattttttgtgtttccccatctctagaagcaatgactgtgtttccccatctctagaagcaatgacttggattttatatttctgttgatgatttgctttgctatgttctatcaattttcagtaaaagttgcatg

SEQ ID NO: 108397 - DNA, 759 bp, Glycine max
  unsure (1)..(759): unsure at all n locations
  Clone ID: PAT_MRT3847_68898C.1
acttttactagagaactatcttaataatgtcttctacaccgtctgcctgcaacagagtatgtatgtatatataaacaacattccagggccagtgtcatacaagttacagccaattttcaaagtaattaagtgatgctaaactaaatcaagactgagtttaaattttcaaaactaactcatttcacatatattttgagttatttaggccaactcttgctaaccaaagttgggtgaatattctaactggtccccaaaactgtgaagcgtagtcactttagtctctgaaataataaaattcaaaaaagtttctaaaattacaatccatatgtactcacattagtccaatattcaaaaacttgtgtgatttaaatgaaaatattaacatactttcaggacaaaagtgacaataaaatgacaacataaagacctattctgaatcttcttactttcagggacaaatgggataacacataacacttttaggactaaaatggtagtttatctaatcaaagtttttatggtaaagttagttcaagcccaacaataacacacttgaaattcacatagaaaacaactgttcaagtacaaaataggaggaatccaacaaattagcaagccaaaacagttaataggctacctgatttctggtagaacttctcatcatccatcctcatcccacnagttggagcaaaactgcccattgtacctttgtccacaacattgtggaaatatctctacattgcattcaacacttcctgc

SEQ ID NO: 108398 - DNA, 915 bp, Glycine max
  Clone ID: PAT_MRT3847_68899C.1
agaaaacaccaccaactcaacacagtcatcatcgtcactacaaaaaaaaaaataataaaaaaaacacagagtttaaccctcgaccacactacagagatccttcttcttctactttgttcctctgtttctctctcttactttctcactctttccgtcaaagtttgcaatttttcttcccaggtttgtgtagagtatagcttggatttgacgttaaagctgagatttttggacgattcaagtgggcacaaagagcttgaaatgagtgtcacagaaacaccaaagaaaaccggtgccccccaaattgttaagttggacaaggcattgaaattggcagagttatgggtaaataatatgagcaaagatgcagatgatgatagaacaaatgcggatgtagagggtcgaccttctaggcttggtctaggtgcaaaagtttcacgccaatcaaaatttgtgccttcagatgaccctgttgaaaggaaattgtatgccaagttgaatgctgaaaaaagaaaagcagctaatattgctaaagagtctgccacaattgcaagagatgctttagatgacgatgaagacaatgaagacttagatagcagagctaatgcatttaccaagaggaaggcaacagctcctttgatctcgtctatgttgcgaaataagaagcagaagtgacatttaataatgagttatttttttctgtaaggctgtaaattatcacatagtttgcatttgccttgcaggaatttttccttcaaccaagtgtaatacatgggaatttcatcgaacatagttatgtacttgaggaaaaaaagataattttactagtttatggcctattctattcccatccacatttttttacattaaatactagatgaatatttgtgttgttttatgagttatagtgacttggct

SEQ ID NO: 108399 - DNA, 1546 bp, Glycine max
  Clone ID: PAT_MRT3847_6889C.1
ggcggcacccccatggtcttgctcagcgcccgccgtgctcgcagtccgccagcctgggacggaccagaaaaagtgttggctgacactcgcaaagcctactgcttcggaactcgtcaaggcccagccgccattgccccccccactctcgacaagggtcaggctgccaaaattcaagaccaagacaatctactccgttctgctgtcaatgccggtgatggattacggataccaggagaccagaggcacatcactcctgcacaacctccattgcatttagcagatgcacttcctgtcgtcattgccaatgaccctactactgcacaaccgcaaccacaactctcagcaaacaccatgggcatgcctgcccagaattccttgttacaggcctcctccgcaaccgtatcacaacttttgggaagatcagcagcatctccttctgctgcaaccaccaccaccacttcttttgacaatacaacagcttccccaatcccatatgccaattcacctaggtcttctacaaacatcatgaacactccatcccctcagccacaacaaacccaacaacagccaccagtgctgcagcagcagcagcaacgacagaaattcatgcaatgtcctcgtcgagccgcggctcccaaaaactgaaccacacttctagctgttttattttttggcttaccattgtctgggtcagttgcgcaaacaacatctgatccgattttctcaacctcgtgggccccggccggttcggggtttcaagctgccttcaggacatgttcagcatggcattggtcaaagccaactcaatcaaggaaaccaaatgactcgattaagccagttttctggtcctgctaacagtgcgctattcagtgctgctcaaacaacacctaatactcaaatgattccaaacatttccggcacattaccttcacagtcccttctcccacgggtgcagttaggattatctggaaacaaccctcagcgaagtcatccttcccaaatgttgagtgatcaggtgtttaacatgggaggtggcaatcctggtggtatgatgcccatacaacagcagcagcagcagcagcagcagcaacaacatggttcacaagcatttggtagcatggcaaatgctcagaatctacaatctgggttggtgacacttcaaaacacacaacagaatcaccccaatttctctcagcagagacagcaaaatccacagtgattaggactcggcatggatggggttggttgaaccatgttgctgtagaaacatggttcactaaaactgaaccaaacttttagtttaattattttttgggttaccaaattatttttaattttgtaaaaaaaaactgaactgaaaaaaaaaactggttagtccagttcggtttgtgggttcattggatttatacggcaggcttgtataattacaatattggaaacctatgttagaatttagaaaatagtttgtgaagagcgtaaaatggctggttgattcagaactatttgtaggggcgataatcgaaaaccacggcatcgtcgttcattg

SEQ ID NO: 108400 - DNA, 148 bp, Glycine max
  Clone ID: PAT_MRT3847_688C.1
aggttcatggattcactgtggttaccacttgataactacaattgtgtctccatcactactaagtcttccttatgctttaacctttctcggatggaaggccagaatactctgtttggtcattggagctctggtcagtttctattcattc

SEQ ID NO: 108401 - DNA, 397 bp, Glycine max
  Clone ID: PAT_MRT3847_68900C.1
cccgcgtccgtgcaaactcgcggcggaaggcagcagagtggcgccgatggaggagggtttagagaagagagaattggaaggcgaagtagttaccaaggttgtcgaagtggtttcggcttaaagaatgcgaagcacgtcgatcaagtcattcgcgcgcttcattccttagtcacccttcttttcccctttgactcttcactcctatcagatagcattgaccagagttaccgagaccaggtcgaagttccttctgcagaaaaacgacatgcttggtggcgtgcgttttatcgaggagctgcttttcctacactggctagggttttattacttgatggtgcctcgaactgggtggggtggtttccctttatggggcagaaagacatttatgatggtttct

SEQ ID NO: 108402 - DNA, 315 bp, Glycine max
  Clone ID: PAT_MRT3847_68901C.1
gttgagtgtaaagctgctccgaaacccgggcgaccctaagtggttggtatcatggttgagaatggtggagaagcgaaggtataaaggagagtggttcacgtgagtcaccataaccttcaaagcgccttcatggctgcacatttataataaagctcctaaacctataatgagataatgaaatttgcccaaaatgccatggggaccaatgatgttagggtggatgtaatttttaacatatttttctggtaccattgtaatctgatttttccttagacgattattatttataattgctttcaaatttatttttttatt

SEQ ID NO: 108403 - DNA, 1323 bp, Glycine max
  Clone ID: PAT_MRT3847_68902C.1
aacaacaatgtaggacgttatttaacttgattttagccaacatttatacaacggtgtcgggggtaacatggatggttttcgatttttacaactataacatacgcaagacacaacatatcaacttaagaatacaagttaacccaaacttgacaaatgatatttagctacaaagctacattccggctagaattaactcaaacataaggcaactactttgaaccccttcgggtccctctacctatgtacataataaaaaaagcagaaaaaggacaatgcaacttcatgggtggattacattgatatgactttctcaaagtgcttgtagttggcccttgtgaatccttgcgtcatattaatcaaatcatattctgattatcatgataatcttagtcttagtagtatgcttagcatcttccaagccattttacacaaaaacctgcaaatggaaaatactcttgattccatattgtagtatttacctatcagttttttgtcatttcagatgcgtgagacactgatttccaagcaaaagaaaacaactctaaacaggaatgacatcagcattttgactatcatcacatgtcaagattaggccttcaacataggttggcaaaaggcagcggatccactggcagcccgttgagacaggctccgatgcaggaacaatcatgagcacgttttcatgtcgttggacaactcccatcacacttacggtgctaccttctttgatgtacccttccttgaggcgcattatcctatcatcactggagagtttgtggtctgcaagccagcctaagaaatttggagataactctctgttatcctttgttatatcaactacagtagttggttccacaaaaggagcaaccttggcaccatagcctgctttcactaatgctcttaatccggactggaagtctgatacgtagaagtctgctacgtatttctcagaatatctagaaccccaagtgaagcaacggtgtttagaattcgctgattttccacccaatcctttatattcatataattcggtggagacatatacacatctaggtactctttggtaggatgactccaaaggaatactgccacaggttacaaccccggtaaccttgacgtactgtccatcaatggcgcctctaagttcagcatcagggtaccttttcacaaaccctaaaagccctcgtctcccccaaacgcagttccacgcgatcaaaacaacgacgggcacaataaccgctccgagcgccaccaagatcactgctttcttcaccgccaccatgagaaacaccccaacgagcaagctcattgctcgacccgcac

SEQ ID NO: 108404 - DNA, 298 bp, Glycine max
  Clone ID: PAT_MRT3847_68903C.1
cgaagctttttttcggctcagctcacacattactacatttcgtcctacaataaaaccaacaacaactatgggtgttttaaaagcacttttatgatcatttcgacgagtgacgagtatggcaacgttgaaacaaaccacgtatactgcaccctgtcatgctgctagtgcacctatgtgccaccaaactgctgctggtggttacaggatgacattataagaacatgattccaccaatgcctctgctatacactggagacagattctagtgtggctacatggtgacactaaaaaatcatgg

SEQ ID NO: 108405 - DNA, 311 bp, Glycine max
  Clone ID: PAT_MRT3847_68904C.1
aataataccacaccatgatcggcgatggcgtaagttaaacgacaggtaccgttgggggagttgggttaacgtggacgcttacaacaagttgggcagttgggcgatttcgacgcacgaaccgacccatgacccagcgaagatgacgtaagcagggcagatacgtggggcgcacatggtagagaagatgtcgggcatggacagtaatggcaaaagcggcgtgggaagagtacggggataggggcgtcggtcgggttgggggggggcccccccggcagcgcgaaaacaaatacgaatgggaaccgcggacaggc

SEQ ID NO: 108406 - DNA, 574 bp, Glycine max
  Clone ID: PAT_MRT3847_68905C.1
ggggcgtattaacttgatttagccacatttatacaacagtatcgtgagtaacatggatggttttcgatttttacaactagtaacataggcaggacacaactttttaacttaagaatacaagttaacccaaacttgacaaataatatttagctacaaagctacattccggctagaactaactactttgaaccccttcgggtccctctaactatgtacataataaaataagcagaaaaagaacaatgcaacttcttggatggattacattgatatgactttctcaaagtgcttgtagttggcccttgtgaatccttgcgtcatattaatccaatcatattctgattatcatgacaatcttagtcttagtagtctgcttagcatcttcttccaagccattttacacaaaccagcaagtggaaaatactcttgattccatattgtaggatttccccatcagttttttgtcatttcagatgcgtgagacactgatttccaagcaaaagaaaacaacactaaacaggaatgacatcagcattttgactatcatcacatgtcaagattaggccttcacata

SEQ ID NO: 108407 - DNA, 468 bp, Glycine max
  Clone ID: PAT_MRT3847_68906C.1
ccaggtccagagaacctgctatgctcaggctttccagactcggcagaattctccggatgatggttgatattatcatcaaccgatcttttactattgtgaccttcaacaacttgagactctgttcatgccacaggtgattgggcaaaagatagataagtctacctacatggtacataccgcttgaatacgtgaatggtacaagggtgacaatgctcacagcccataagattgatctgcgtgaagggtactggcatgcccatggtgactacgaagaggacgttggctgtgaaactcgagaggcctgtgcagggtgatgatgctctgctggaaggctgctggtgcgcagtagtggataagctacttcgtgatctaaacaaatgtgaacaggaggccccttaaaacgcgaactctataaaataggctggcgacatggttccttctgtccctgccctgaactgtacacccgaa

SEQ ID NO: 108408 - DNA, 2152 bp, Glycine max
  Clone ID: PAT_MRT3847_68907C.1
cccacgcgtccgcttttggtccaatgcagcataaacacctaatagtttagccattttttctctcgttttattcagtaacaacaatttcattcagtcaagggtgcaaagagagtcatggctggagcattaaaaaagtgcatgatgctgtgttgcacgagcatgattgtctcagtatgcataatgcatcattaataaaatctaccttcccgtcctcggtatctcaccattcgtaaagtctgaaaaccctttaacaaatatatcctcttcctcttctttcatttagtctaacacatttacccccaactctattctaggttctctgttaaacaccaagaacaaaacaaaaaagaagaagaaagaaatatgggctggaggatcatacgacggaagccattgcagcgttgacgaaggcttctcagcgagaaagccgacctgggtggtgtcgcctgccgcaaagataaaacagctgacggcggagctggataccgccaccgcaaacgggtcgacgccgtttaacccggacgagaggatccgaaccgggttcgcccacttcaagaacgagaaataccagaagaacccggaattatatggcgaacttgccaaaggccagagtccaaagtttatggtttttgcttgctcagactctcgagtttgcccatcccacattctggatttcaatccgggtgaagcctttgtggtccgaaatatcgccaacatggttccaccatatgacaagacctaagtattcaggaacctgggtcggccaattgaatatgctgtcttacatttaaaggtggagaatattgtggtcattgggcacagctgctgctggaggtataaagggcctgatgtctatcccagatgatgggtaccactgcaagtgaattcatagagcactgggtccaaatttgcactccagcaaagtccaaggtgaaaacagaagcaaacacattagaattctctgagcaatgtaccagctgcgagaaggaagctgtgaatgtatcacttgggaacctattgacatatcgatttgtgagagatgcagttgtgaagaaaactcttgccttgaaaggtgcacattacaatttcgttaagggcacatttgagctgtgggatctggacttgaaaatctctaactctgtatccgtttaagaaagtgttcttaaccctgcgctggtgtgcgtgatgatgtacatgacctagcttccctttgcaagtgtgtcacaattgtataagacccccccttcccctagttgtttcccttaaatcccaagaaaaataaacgaacactaagctaaaataatggtcttagtcttgtaccaactcaatgagttatgtttttgtatcgttttctgttacatagtggttttctttcggcaaactttaatagtactgatctagccatcgaacttgagcaatgcatttagtacgagatgttttaaatcgtttttcctaaatgctcctaaaatttcttggagctggaatgctgtgaataaatttattaatatatgacttaaatgtgttttttgtctctagcaacatagtaaacctgaagtacaagattgtacactttggcaaagtcaaaagggtttccatagaaaagcagacatattcagaaaataatagtaataataataataatggtctgtgagctattattaaactagttttgttttctaccaaagtatcattctcatttctttgttatgtatacagtgtttttattttattttcattttgttgatatattaatgatttgatgctaaaaaaaaaaaaaaatcgaaagtgttcttgaccctgctgtgggatgtacatgacctagcttccccttgcaagtgtttcaaattgtataagatacccccttcccctagtagttttccccaaatccccagaagaaggaacgaacactcagctaaaataatggtcttggaccaactcaataagttctgttttattaccgttttatgttacaaagtggtttttctttcggcaaactttaattctgatcttgccattaaacttgagcaatgcatttaatttagtatgagatgttttagatcctttttcttgaatgcccccaagaatcttggagcatgaaagccccttgaataaattaccgttaatattaataaagaagtgaatgcttaccatt

SEQ ID NO: 108409 - DNA, 367 bp, Glycine max
  Clone ID: PAT_MRT3847_68908C.1
aattcggctcgagcgtgcgacaacaccacggaagggctgggctgtctctcttcggagaggacatccctggtgccagatgtgcctgacagcttcatgagctgtgatgcagcctgcttgaagtcaaacatttgtgatgagtcgcaaactaagatcttgaacactcctcctatacttaaatcttaaagtctcttctatgcttggagcctgaaaggcatcatatctgattatccaggtcttaagaaacaagatgtgagtaaccctcctcctttagcttcagaacctgattctgctgacgccagtttatgcgacactcctctagatgaagagaaactaccgcgtgcaaaggaaacattggatgtgaaatctt

SEQ ID NO: 108410 - DNA, 163 bp, Glycine max
  unsure (1)..(163): unsure at all n locations
  Clone ID: PAT_MRT3847_68909C.1
tctcacatatgggggagggtgctggcaaaataaaagataatgtatcaaaatcggacaaggatcggggtgagaaatcnaccgggcctgtgaaaacangctgaggaattgagaggattctgactcacaataggaaaggatcaatttcacaattctggcaaaccct

SEQ ID NO: 108411 - DNA, 208 bp, Glycine max
  Clone ID: PAT_MRT3847_6890C.1
gattggtgctagttctccgtagcggtttataggtccacactatccttaactataagctacagtattgtcatattctctgccttgtggactcatttttaaatccatgtctgtggtcactggtataacaagttcattctgaagtagttttttaaattttattttcacacttcttttattgtatagattgcgttattttgagggtattcta

SEQ ID NO: 108412 - DNA, 180 bp, Glycine max
  Clone ID: PAT_MRT3847_68910C.1
aattcggctcgagcctccccttgagttttttttcccctcaagtaaattttttatgagaaccttagtttacttctggagagaaagggaggttctcataaaaaatttacttgaggggaacctaatataatggggaggctcgagccgaggatagagcgtttgttcgcgtgtatgcgaggtaca

SEQ ID NO: 108413 - DNA, 204 bp, Glycine max
  Clone ID: PAT_MRT3847_68911C.1
attacatatgtatgcatgtaaccaaaaaaaaaaaaaaaaaagggcgcccgccaacaattgaccccgtcgccccggaatttattcccgacccggaacctccaggcgtaccatcttgcgccaatagacagccttataaaaccttggcgaaatcatggccaaaccggttccctgggtaaaattgtaacccgcccaaaatcccacaca

SEQ ID NO: 108414 - DNA, 645 bp, Glycine max
  Clone ID: PAT_MRT3847_68912C.1
acaaataatttgtttttttttttgttttaacacataatcatataaactatcttaaattaataagcacaatccaacactacataatgctccaaatagaggtatacaaaattcattattgttacttgaataagtaacattttcaatttatcatactcaaagtggaacaaaaagcaccctataaatcatcccctttatcacttgccagtggcacttttgttgtaatggctctcataagatcaatatatagtggaaattgtgctactgcatagaaggtcacaggcaagcaagttactgtataaatgaggattaagacttgcttgaatttgtcatcgatcacaaagaaatgagcagagcagaaagtagcaaacaatgcagcaatagatatgaaaagagaacttaagcccataagcaatttaagtggcaaattagttcgaaaatccctgatttctttccgagaagtgagtatagagaggaacattatgagggcagtgacggagaagcataggccaattaatgaacacattgcaaatgactcgaatggaacctggccttctaatgcaggtttacccgtggtcagtgttgacaccaccagggacaggggttagatgtggcaaaggaaaacccagcaaggagagctgccactac

SEQ ID NO: 108415 - DNA, 373 bp, Glycine max
  Clone ID: PAT_MRT3847_68913C.1
cgaccattctttttttggaacaaataaaatgggatgccttttttaaaattaatgtttcaaacaaaaatcaaatacttaaacttgtaaaatttgaaaaaactaagacacaggttaccttgttttttactaccaaaaaaaggacaacatggttgtttggaaggggaaggaaaaataaacacctttctcacccaaccgcggtgacactttattagaaaagcaccttggaactgggatattattggcccgaaccgtatatgttaataaatacaaagaacccgaaggtcaaaaaattcatacttcacacccggggggcgagagtggctctcctggacacaaaaactctcacgggagaacctaaggagagaggctggtt

SEQ ID NO: 108416 - DNA, 476 bp, Glycine max
  unsure (1)..(476): unsure at all n locations
  Clone ID: PAT_MRT3847_68914C.1
gtccggnaatnntcccgggtcgacccacgcgtccgctttttagagagatacaactggtctgactactgaaaatacagagttgaagcttaggttacaagccatggaacaacaagctaacttatgtgatggtatgtttcaaccatagtaaatctacagattttagtcactgtacatgtttatctttgacatcagttacatatatcttgattatctttgatatcagttacattacatatatcctgagaaattttgctggtttttgcatcagcaggagtagaattatttacctacagagaagttattggaaattgttttcaacttttgatgcttttctaaatgtcattttataattgttagactgcatcattccagaaatcgaattgttccttgtgatcaataacctactagtagtgtttctgttttgttaaacttcaactaatatattggtatttacaactcatttccatgactttaac

SEQ ID NO: 108417 - DNA, 180 bp, Glycine max
  unsure (1)..(180): unsure at all n locations
  Clone ID: PAT_MRT3847_68915C.1
ggggccggaattaaccgctncgaccacgcgtacggaagaacctctttttggctcctacaaattttatgtgcagcaggctgtgtgttaggatacgcatattaactcatgtnaaggcaccaccaccgtcacgttgacgctgtttcatgctctgctttaacaatcaatttgtctttttagctt

SEQ ID NO: 108418 - DNA, 385 bp, Glycine max
  Clone ID: PAT_MRT3847_68916C.1
aaagccaactggggaaggctgctaattaactaatttacagcaggtcatcaatcattctgttatcctatactgtaacctgcctgttacttgacaaggataaatggacaatgccagactgactgctttaagacatcatttccgagattcgcataactgctcgctttcagatgcctaccctgtaaagcctcagacattaccagcacaagttcctgaatgagaaggcgtaaaaggaccttgaagcagcgcgccagatacacgggaaccaactactggttattatccatacaggtcgctctaaacatgggatcttctgtccatgagcatgatttggcatgcccaaaagatccaaccaacactcgacataaccaccgatccacggagatag

SEQ ID NO: 108419 - DNA, 733 bp, Glycine max
  Clone ID: PAT_MRT3847_68917C.1
ccacgcgtccgtgcaaaggtttattctccacaaattggtatcatagagctctaaggtttagggacccgattgaaggtgctgcaatggcttccgcaacaaacactggtggattcatacatgtgctaccaattcttgatggcaagaactatgatcaatgggttgtaaggatggaagcgattctaggcttccatgagattcttgacattgtgaaggaaggaatctcagagaaggagaaagatgatgttgcaattatgaagaaggacttcaaggcaaagtgtcttcttcatcagtgtgttgattttgttgtatttaagaagattgcaaaggctagtacaaccaaggaagcttgggaaattctgtagaaggcatttggaaatgcaggaaagaccaagaaggtgaagttgcaatctttaaggaggcaatatgaactcctctcaatgagtgatcaagaaacagtggctgattacttcaacagaatgtagctgttggtaaattcaatgaagacttgtggagaatcattgttagatcagatgattgttgaaaagatcttgagaactttgtctcctcgatttgatcacattgtggtagcagttgaagaatcgaaggatcttgaaagattaaagattgaagaactgcaaaattctcttgaagcccatgagcagaggttgaatgaaagggcaaattcaagggatttggatcaagcgatgcaagctcagtttaccaagaatgatgg

SEQ ID NO: 108420 - DNA, 357 bp, Glycine max
  Clone ID: PAT_MRT3847_68918C.1
gaatgaatcacatggacttatagttccccttatttaggtaacagcacaggatatttcaacaatgattcgctgtggacaaaagaccatcatctttctcatcaataatggaggttatacaattgaagttgagattcatgatggtccatacaatgtgataaagaattgggactacactcgctttgtggagctatccataatgggcaaggcaaatgctgactgccaaggttagtataaatttaataatgattaaatatggtttagtccttataaatatggttaaatttggttttagttctctaatttttttttcattgattttgttcttaaacaaaatttaaattttatatactatgataa

SEQ ID NO: 108421 - DNA, 378 bp, Glycine max
  Clone ID: PAT_MRT3847_68919C.1
gatgcataaatgttctttataaacattactagcttgaatcctgctggcgacaaacatacgttcctttttttttccgagccaaaatcttatttccatatacagagacgcttacacatggtttattacaagggaaaacaaaaggccctctttctttaagggatacacctaaccaatgaacaaactgaggcagtcaatatattcaagatttggacacgattacaagggctcggtcgtgacttaacttgctatgccatgcatttacacatcattctttaaccgcgtatcgatgcccgccggacagttagcaaacccaggtggtacttagactggacattgtatatgtcatgtggtgctgccgtacaggccgtcggagctgga

SEQ ID NO: 108422 - DNA, 1993 bp, Glycine max
  Clone ID: PAT_MRT3847_6891C.1
aaattattcaaaattacaaaacccagtgaaggaagcgcaaaattttccaactgttggcgaaactggtttatgggttgaagtctggttcaggatttgtgggggaagagaagagcactcacaccatatccattatcaatggacttggccgcgaagcttcaccacttagacctgaccggcgtggtcattttggacgcccgaaagccctccgcactccgccaccttccgccacgcgttctcagcagaacaaacaccaacaccaatttgatttacacgaaccggttctcgggcccaccgaggcccaattccgcttcctcaacgggcctgtccatgataaccgtcgaggacgatatcgagtctcttttctccgagacgaactcggaggaggagcggcgcgtgaggaagcaacctagcattggggcgtcggggatttcctccggggtgaagctcgaaaacgtggggaaagcctacaagggcgtgacggtgctgaaggacgtgagctgggaggtgaagaagggggagaaggtgggcctggtcggcgtgaacggcgccgggaagacgacgcagatgaggataatcgcgggccttgaggagccggatttcgggaacgtggtgaaggcgaaggcgaacatgaaaatcgcgtttctgaaccaggagttcgaggtggcgccgagcaggacggtgagggaggagttcatgaacgcattcaaggaggagatggaggtggcagggaagctggagaaggtgcagaaggcgctcgagggtgccgttaatgatttggagctcatggggaggctcttggatgagttcgatttgcttcagaggagggcgcagaatgtgaacttggatgaggttgatgccaagattagtaagttgatgcctgagcttggttttgctcctgaggattctgataggctggtcgcgtctttcagtggaggctggcagatgaggatgtgtctcggcaagattctacttcaggtgtgttaatgcttcatgttggattgtcctgaatcatcttgagtgctttttgatcagctgtgtacaaaaatggaaactgacatgggtgtgtccaggagaggggaattaatatcagcaatgttatttcaagtaaatgttcacatgtttgttttcatgttgaggaattacttcaattgattttgagttgagaaaagccaaccgggggtgaagttttgcttggggagcataatgtattacctaactattttgagcagaatcaggctgaggcacttgatctggaaaaaacagtgctcgagacagtagaggaagctgcagaggactggaggattgatgatattaaagggcttcttgggcgttgtaattttaaagctgatatgcttgaccgaaaagtttcactattgagtggtggtgagaaggcacggctggccttttgcaaattcatggtaaagccatcaactatgcttgtgttggatgaaccaaccaatcacttggatataccttctaaagaaatgctcgaggaagcaataaatgaataccagggcactgttatcacagtatctcatgaccgatactttataaagcaaatagttaatagagtgatagaaattaaagatggcaccatacaggattatgcaggtgattacgattattatttagagaagaattttgatgctagggaaagagaacttgaacgcgaggctgagcttgatagcaaagctcctaaagtgaaagccaaatctaagatgtccaaggctgagaaagaggcacggaagaaacaaaagatgcaggcctttcaggcagcaaaacagaagtccaaaggcgtgaaaaatgccaagagatggaattgagtgaaccatttcattgttacactaatttaccgccagaaggtgatgtagctagcatattgggttaagctacacagcctttgtataatcatgtatctattcactaactcatttacggaaatataaaaggatgattacaccatatgtaattctcaaaaactcgagactagttc

SEQ ID NO: 108423 - DNA, 256 bp, Glycine max
  unsure (1)..(256): unsure at all n locations
  Clone ID: PAT_MRT3847_68920C.1
aagaaaaatgtttttcaactttaaaaattttttgaaggggcttttcaaggttggaactgtaaaattttctggggggcnntttnnnaaaaaaaaaaaaagcttcatttcaagaggggcaattttggggggccctttggcggacgccagggaaaaaatttggggggggccggaaattccaaaccagaacctttttttttcaaggggggcctataaccccccattcggggggggcccaagggggggcaaagttgttccc

SEQ ID NO: 108424 - DNA, 276 bp, Glycine max
  Clone ID: PAT_MRT3847_68921C.1
gatccacgcgttcgattcatttatgatacaccttgtgcgtcgcgcaagcaggtacctatatacttatagaagggccacacaaagctgactgatattttgtcaacagggaggtatacctcccaggaagcagcttagaacctaggctccacgtaagtatgtaccagccactggtggaacaaccaaacctaaacgttatcttcctggaactgtagctctgagagtgattaggacataccagaataccactgatcttctaatcaagaagcttactttaca

SEQ ID NO: 108425 - DNA, 487 bp, Glycine max
  Clone ID: PAT_MRT3847_68922C.1
cttaaaaaaaaaaaccttattttaatgtgctttctaggggaagcattatacttttacagcacaattcatctatattcataacatctgaaattacatgattttttttcccgcaaaatagcaacaacaaacttagaggactcttcatgaacttctttcatatgtagaagtttattcaagaactcagaacagtagcctggattaatgcataccaaaaagtagagaaatccatgacatttttggaggaattctaaaagaggcaacatttaacagattgaaatttctcaatttggaagggcataagctgaattctcatatttaccatcccacctgtattcctcactttctggaatctgcagctccaaattcttctcaaatggctgaaagatcaagtccaactttccgtcctctactttggcaagggatgaaggttcccactttggagcattatctttgtcaatggtgagagctctaataccctcatacatat

SEQ ID NO: 108426 - DNA, 451 bp, Glycine max
  Clone ID: PAT_MRT3847_68923C.1
ccagcgtccgaatatatgtctctctcccgaacatatactgagggagggaacaaatccctatgacttgacattacctactcaatgatcgaggcctagatggccttcttcgagatataattcatgtgcctatataaagcgtgatcctgagcttgaggacactatggagttataacagataacaagtgacagacccaaaattcatgcgaacaatgcaggagcacaatatatagcttctcctataccatcatatgaaatgggctatataaaactggcatgcccactaacctatgtgggggctacggaaactactactaggtatatcacaaatcctttagataaatctcttacagaatcacataggctagcatactgggacaccggataaaggtaaaacttttactgaacagactcctaatgagaaactgctactctatttaatttaactaggatg

SEQ ID NO: 108427 - DNA, 399 bp, Glycine max
  Clone ID: PAT_MRT3847_68924C.1
ggtgtaatagtggatagaaagagaatatatgtgtattttttactcacaagaaatttttgtttcatggaaataaatattcatacctcctccattgatattaaatattgattatccagattaattatttgattgtttcataacaaatataggattattttttaccctcatgtattctgattaaaaaatttatgtgtgaaataaataccctcttatatttattgtaaaaatcaataataataatataaaattattttatactatttacataaaaaagttctctaaaaattaacaattatttctttgaaataaactaatggcccaaaagctacatttggagcaccggtagactaaacacaacctgcccaccttataatatacccggtggggcatcgcaaacac

SEQ ID NO: 108428 - DNA, 847 bp, Glycine max
  Clone ID: PAT_MRT3847_68925C.1
agcgagggaaggacgaagttggcggcaagtttagaacttgcggcgccggcggcgggtggcaccggccaggagtgtcgtggttgtgtagcggagcttcgcgagatcagcaaaagcttctggagggagagaacaaagaatctctagtttgttaacaatggaagacgggaacaacagtggcggttccaccgcaaagaaattaaagcagcggcgaaagaggaaggattacttggtggacaaggatgggcaggtgggggagcgagagaagctggcaaaaagaatcttgttgtctctgacgagaccttcctatgttttgggattgggtcccaaacctcttagggtggagcaccgtgcgaggttgcgctacttgctccggaggctcgttaaccagcaccattgggttgcagccagtggtgttctcagtgcctacttgaagggaacacttgatgacgcctctccctacaccaaccgtcttaagttttgggttttactggagcttcttaagcatgtggaaaaccactctattaatccaacacgaatcaagaacctctatgatatttggtctaagaaaattggatcaatgaagacttggccagttgagagcagatatgcagtccatttggagttcatgcttttctgtcttttgcaaggcaatgctgaggatgcataccagcttgctctatgccttgggcaagaaaaaggtgatattggtcctatgtcaaagatgatgatgggtttgacattctatgagttgtggtactcttctatccccaaagaattccagtggagaaattcagatcagtttgacttgcaagagaactcagatatggagggaacttcattcaacaat

SEQ ID NO: 108429 - DNA, 463 bp, Glycine max
  Clone ID: PAT_MRT3847_68926C.1
cggcttcgaagcacctcccgtggttcattgaaaggccctccttccgttgcaaagccttgtgaagaccctattggatgccaaaaaggctttattcacaactttcaaaacctggtttaacccttgaaaaaaaacctggtaggtacctttaccttgaccatctggaccgatccctaccccccagcctccgaaaaagagcccgatgaccaaaaaaaaggcagtgaaaaacagcagcagccgccaccatcttatagtgcacaaaaagggatttagcccttggtggcttacaaataccaaataattccccaagcttatgtaagtgatgacaagacccttgacatggaaacttttgaaggcggtaaataatcagaaaaaaatacccagcctaatgctcataatacataaactccataggtgctgtgcatctctaattgcataaacactcatgagctcaaagacaaagatg

SEQ ID NO: 108430 - DNA, 580 bp, Glycine max
  unsure (1)..(580): unsure at all n locations
  Clone ID: PAT_MRT3847_68927C.1
ggctcgagagctgagcgagggaaggtatcgaagttttcggcaagtttagaacttgcggcgccggcggcgggtggcaccggccaggagtgtcgtggttgtgtagcggagcttcgcgagatcaggttcggatcggacggtctcgctaggtgaccgttgacgagaatttgaacttgttgttacgttgaatgttttgtagtttgtgcacagcaacactctgcggtttaatgcatcaatcgtagtaatactaatatctacaaaaggcacttaactaacattctgtctcttccagcaaaagcttctggagggagagaacaaagaatctctagtttgttaacaatggaagacgggaacaacagtggcggttccaccgcaaagaaattaaagcagcggcgaaagaggaaggattacttggtggacaaggatgggcaggtggtggagcgagagaagctggcaaaaagaatcttgttgtctctgacgagaccttcctatgttttgtgattgggtcccaaacctttanggtggagcaccgtgcgaggttgcgctacttgcttccgaggctcgttaaccagcaccattgggt

SEQ ID NO: 108431 - DNA, 725 bp, Glycine max
  unsure (1)..(725): unsure at all n locations
  Clone ID: PAT_MRT3847_68928C.1
ccacgcgtccgggacgaagttggcggcaagtttcgaagagagagagagaagaagcagtgggtggtcgaggtatcactttcttctccgcccccgccacgccctagaccgccgcgggcgttgccagcacgtcgctggaaggcggtggcttgttggcggcggagcttcgcgagattaggttcggatcgctcggtctcgctaggtcaccgctgacgagaatttgaacttctcgtcactactaagccgctatttagctaaagcttgtgttgggagaaagcaaagagcatctagtttgttaacaatggaagatgatctgttggacacagaagacaggaacaacaatggcagttccaccgcaaagaaatcgaagcagcggcgaaagaggaaggagtacatggtggacgaggatgggcaggtgggggcacgagagaagctggcaaaaagaatcttgttatctctgacgaggccttcctatgttttgggattgggtcccaaacctcttagggtggaacaccgtgcaaggttgcgctacctgcttcggcggctcgtcagccagcatcattgggttgcagccagtggtgttctcagtgtctacttgaagggaacacttgatgataactctccctacaggaaccgtcttaagttnttgggttttactggagcttcttaagcatgtggaaaaccactctattaatccaacacgaatcaagaacctctatgatatttgg

SEQ ID NO: 108432 - DNA, 372 bp, Glycine max
  Clone ID: PAT_MRT3847_68929C.1
aacgaatccgatgctgacgacgttggttctttcgatgatgaaaacgataaccgggttaaaagcgatgaggcggggagcaaaccatgtgttgggaatagcaaaagcaggcttatgattgagcaacttcttatgaaggagtcatccttaaggaacgaatttgacatgctggtaaaaatatttagatccagagtggtagatcctgtacatgatgatgatggggataagacgccaacggttatacccaacaagatttttggaagtgattcacctgagctccatagtgctgccattatggaggcacagaaatggcttgcaaaaaagaagtcaggtttagatacaaattcacatatacgttatggaagaactagtttg

SEQ ID NO: 108433 - DNA, 319 bp, Glycine max
  Clone ID: PAT_MRT3847_6892C.1
ccggacattggaataattctaaaaaaaacggattgggtactactgcgtgctgcaaaattatccaaaaccagacaagctaatccactttgaacccaccctgccacatgacatgtgcaagtgaaaattggtccataaagaaacttacaaaggtggaaagggggcaaaataagaggaaaaaattaaccgcctccctttgttggtggaagaattgaacaggtggatcaaacggggctataaagcttgaaaagtgggggcttggggttaaagttcataccggtgacgatgaccaaagggatgaaaccgtatggagtgacgacct

SEQ ID NO: 108434 - DNA, 249 bp, Glycine max
  Clone ID: PAT_MRT3847_68930C.1
caaaaagcaaagtagcagacctgcgtttactctgtttctcaatctgcacttaatgacagattcaccgcttgaggccatgcacgagccctaactcttgtcagccgtcgcagttcgcagttcgcacttctcacgcccggtcgcgctgttcatccacggggctactccgattattcacacagacgttctgaagtcgttcgttatggctggcaccacgttttctgctgcacgctagattgctgtgacgacttc

SEQ ID NO: 108435 - DNA, 2573 bp, Glycine max
  Clone ID: PAT_MRT3847_68931C.1
gaactgtgatccatcgtcaatctttcagtaacaaacatgagcggagctgttcttgttgctgtggctgctgctatcggcaacttgctgcaaggatgggataatgccaccattgcaggtcatatttttattcggttagccaattaagataacattcaaccaagtctaattggctttctatgctatgcaggatctattttgtacataaagagggagtttaatttacaaagtgaacccacaatagaaggtctaattgtggccatgtcacttattggagccactgtcgttacgacatgctctggacccttatcagacttgctaggccggcgtcctatgttgatcatctcctctatcctttattttgttggttctctggtcatgctatggtctccaaatgtttatattctcctctttgcaaggcttttagatggattaggcattggtttggcggtcaccttggtacctctttacatatccgagacagctccacctgagattaggggattactaaatactcttccgcagttcactggttctgctggaatgttcttttcctactgtatggtctttgctatgtcactcaccaaggccccaaattggagactcatgttgggtgttctttcaattccctctctcatttattttgcactcacgctattcttcttgcctgaatctccaagatggcttgtcaaaggccggatgctagaggccaagaaggttttgcaacgacttcgcggcagacaagatgtcgctggtgagatggctttactagttgagggtcttggagttgggcgtgataccgctatagaagagtacataattggtccagctcaatgaattcagtgaggcagagcagatcaaattgtatgggacagcagaaggtgtatcctggattgctaaacctgtcactggacaaagttccattggtcttgtatctcggaagggaagcatggcaaatcaaagtggtctagtggaccctctagtgaaactctttggtagtgtccatgagaagctcccagaaacaggaagcacacttttcccacactttggaagcatgtttagtgttggggggaatcaacctaggaatgaagattgggatgaagaaagcattgccagagagggagatgattatgtatctgatgctgttgacaccgacgattctgatgacaatttgcagagtccattgatctcacgtcaagcaacaagtgcggaaagggacatgcctgctcctgcccagggaagcatgaggcaaggtagtcttttgcaaggagaacctgctggaaactcagggattggtggtggatggcagctagcatggaaatggtctgaaacagaaggtgttttcaagagaatatatttgcaccaagaaggtggtcctggatctagacgtgggtccatcatttcacttccaggctgtgatgcgccgacactaacagatggtgagattgtccaggctgccgctctagtgagtcaatcagccctttacaacaaggagcttatgcatcagcagccagttggaccagccatgattcatccatcccaaacagctgcaaaagggccgagttggagtgaccttttagagcctggagtgaagcatgcactgattgtgggggtggggattcaaattcttcaacagttctctggtataaatggggtgctctactatacacctcaaattcttgagcaggcaggtgttggttatcttctttcaaacctgggcctcggttctacttctgcgtcttttcttatcagcagcgtgacaaccttgttgatgttaccctgtatagctgtggccatgaggctcatggatatatctggcagaagaaccttgctgctgactacaatccccgtcttgatagtatcacttctcatattagtaatagggagtcttgtggaattggacagtactataaatgcttttatctcaacttcgagtgttattgtctacttctgttgtttcgtcatgggctttgggccaattcctaatatcctttgttcagagatcttccctactcgagttcgtggtctatgcatagctatatgtgctcttacattttggatatgtgacatcatagtcacctactcgctcccagttatgcttaattctgtgggccttggtggtgtctttggtatgtatgcggttgtgtgcatcatagcttgggtgtttgtcttcttaaaagttccagaaaccaagggcatgccactggaagttatcattgagttcttctctgtcggggcaaagcaagctcaagttgccaataatacctgagtttacaaacgacccattggatttttttcaatataaaattattttgaatctatggatatcttgttttgtttcctctttaggcaccttcatcgtgggttgggatatgggatttgagaaatgagaaagtccaaggaaactcgttagccaataaaattataagcatctcctcttttaaaattttattttctatttattctctcttttccgtgggttgagattcagaaacaagtttctttgtttctgtaaagaaaaatgttcattttctggttcatttatggaactttatatcccgcctcgtgttctctcc

SEQ ID NO: 108436 - DNA, 795 bp, Glycine max
  Clone ID: PAT_MRT3847_68932C.1
ccccgttcacgtcctcatctcgatgtgacgtcgtttcactcccaaacccacacctttcccagaatcaccaccacttattacacctcctattccattcattttctaaccccttttttaataacacaaacctaaactctccccctcttctctaacatggaccaacagcagcgccacgtcagcagcggaactactaatcccgtgctccgcttccccacggtgcgccccctccccttcgcgcgcctcgtcgccgcctcccgccgccgcctcttcctctccgactgcgccgaccgccgatccgacgacgacggagatggtgacggcgactccggcgagtgcgcgtactcgcgggcggtgctcgtgctcgacatggtctggaacctcgccttcgtcgtcgtcgccgccggcgtcctcctctccacgctccgcgagcggccgtcgacgccgctgaggctctggctctgcggctacgctttcgagtgcgtccttcacatggccttcgtctactttgagttccgaaccggaattcgcgactccttctctcacactgcctatagtattgtgaagaagctagagcctatgaacactctggcatcatctgtttggtggatctttggattttattggattgttgagggtgaccaagcacttttggaagattctccacgtctctactggttaacagtggactttctagcctttgacgcattttttattatcttttgcattgggatggcatgcataggtctctgtggcctcttctgcatcatcgcaataataggactagcttatgctatg

SEQ ID NO: 108437 - DNA, 755 bp, Glycine max
  Clone ID: PAT_MRT3847_68933C.1
aacgacaattacatgtataatggcactgttcaaagtagtgccattcaggacttgactagtttggagaaaattgaagaaggtttagcgcaagcacgggcctcaattcaggaatctatcctatcaaggaactatacttcacaaaggagagaaagttttgtccccaaaggatccatttaccgaaatccccatgcttttctccagagccacatagagatggtgaaaagattcaaggtgtgggtttaccaagaaggggaacaaccattagtacatgatggtccagtaaacaacatatatgcgattgaaggtcaatttatggacgaaatagacaataatgataagtggagccaattcagggcaagacatcctgaggaggcacatgtgtttttccttccattcagcattgccaatgtggttcactatgtctacaagcctatcctaaagcaatctgactacgaacctgtccgtttgcaactcttggttgaagactatattagtgttattgaagataaatatccttactggaatagaagcaaaggtgcagaccattttttgctttcgtgtcatgattgggctccaaaagtttccaatggcaatcctgaactttttctaagtttcattagggcactttgcaatgctaacacttcaaaaaggtttcatccaaatagagatgtgtccatccctggagtgtacttgcctgttggaaagctaggtccgccgagcctaggccagcacccaacagccgcactatattggct

SEQ ID NO: 108438 - DNA, 717 bp, Glycine max
  Clone ID: PAT_MRT3847_68934C.1
cttggggggggggggggggggggggggggggggggggggggggggggggggggggggggggggggggggggccccaaaaaagtgcctgggatgggggttagattaccccttttgcatgccgattgtactgaagtctgggtaaagggtcagcttgggggggaagggggggggaaagctttttaaagaaaaaggaaaaacaattttagaaaggatagaaatagacgcatcacctgagatacaggaggttaagttattagcgagaactaaaggaaggaacaatatatggaaagcaactagcgtgtgtcgactgtaaagacgtggctttccttcggggataccagtcaccactgtttttgcaatcatttgacacttgggctgctggccctttgtaatatccatgccaccaacaagctactaccactactattcagcaacccgttaatttagaacagttatgccgtagtttaacttggtagcggcggcaagagcatactacctttaacctggtgactgcccggcagctatacgcttccgcagacccagccgccttaacgcaattagcaatattctaaatttaaggccaacgccgcttaatatcccaatagccctgtacttcaaggatcactggatcgatctcgctagctcatcgtagactgtggtgaggcgcctattgaaaggtaaggtatgccttcgtcggggataatcgtcgcatgccca

SEQ ID NO: 108439 - DNA, 214 bp, Glycine max
  Clone ID: PAT_MRT3847_68935C.1
gttatagagcactgtatcatatgtactaaaacataccatctaatctcttgaccggtgcctccaatagctttctttgcatgcgacaaaatcaccttaactgatttcctttagtattttgctcagtatgtgtctcacttatatcttttccattgcaatctttctgtattccatcaattttttttccttttatctcgacacatttactttaacatat

SEQ ID NO: 108440 - DNA, 162 bp, Glycine max
  Clone ID: PAT_MRT3847_68936C.1
cttttgtgttagtcgagaaaagttctctctgcttctctttcttagactctaaaccctattgcctgctttgcaatcgatcccgagtatggtcaacagtaatctcccttgatgattcttcgagggattgacaggcagggaatattggattggctcatcttgagt

SEQ ID NO: 108441 - DNA, 241 bp, Glycine max
  Clone ID: PAT_MRT3847_68937C.1
gaaatttggaaataatgagaagaagaagaagaaaaaggaaaataataagggaaaatgagtactctttgagaacttccatggaaaaaattgaaatcttgataatgtattttaaaaatcaaattgatttaaatgcatgaacttgaagggcttgattttacagaaaatttggaaatcatgagaataagaagaaacagaataaggaagaattgtgagaaccttaatggcaaaaattacagtcgtc

SEQ ID NO: 108442 - DNA, 390 bp, Glycine max
  Clone ID: PAT_MRT3847_68938C.1
aggcgtcagcaaaaaaaagacagaagagtgtacacatatgaatttgatgatgtagattgctaaactcactgtgacaattctgaacggccatggtcactccattaccattctttcgatacacagttcagccgatacgtacaataagtgcgctctaccgagtttcatggcgcatggcagtcgttgaccgacaagtgaagtgagaatgttgtgcgccagcagtgacaacacagtggaactttaggttttacagcagtcctgacaactacattacagcaagcgcggaatgcatccatggagatcacatacacatcaagcccgataacagtttcacagtcagctatatctttataccaccagacctcgaggtccatcacaaagacaaatgtgttt

SEQ ID NO: 108443 - DNA, 350 bp, Glycine max
  Clone ID: PAT_MRT3847_68939C.1
tctgcctgttggtatagccgggaggagccgctgcaacgcctgctatgctaatgaatatgccaaatgccgttgggttaatggggggatattttggtggggagctcgacgttgatgataactaagatgacttctcactacattgattggacggacgcatacttcatcgcagatgtaaaatcgccctatgacacgataaatgttgccgctactaacgcacagtctgtgcgtggaagaaccgataaatgtaaaagatgtgttgcaagttcacatgctgcatatgattctgctgaggaagactgatcatgagagccgccacacgtactgttgcctgattgagacacatatttgat

SEQ ID NO: 108444 - DNA, 330 bp, Glycine max
  Clone ID: PAT_MRT3847_6893C.1
gggggtaaaaaacatttcccttccaattccgaaacaagtttccctttataaattccacatattttaaccttttaaacggatggaaattatttcgtttccatgataccaaataatacatgcacccttcaacttatgttaaaatgtattagcccccaactccggattaaaaatgaacacaatgacttgatcctttacattggtaagaaaaatcttaaatcaaaatctttgtaaaaataatgaccaaacccacttcttttttaaaaaaacaaaatttttgactaaaccaacttttagaccccaatccaattggaaaaaaacaacttggccttt

SEQ ID NO: 108445 - DNA, 328 bp, Glycine max
  Clone ID: PAT_MRT3847_68940C.1
cccacgcgtccgcctacacgtacgattttatttgaaagataaaacacatctagactggcgagcatgatttttcatttacactggactcatactatccacacctatgtaacatcatagctgtacacattgtagtatggtactatgatgctggaaccattaaatcagccataatttaatgaattagttgaactctacattggtatttttacacattgagtttatggaaaatttatgtttcagtaatctcagtatctaatgttgttatcaatgtgaattgggacctattaatttattaattcatgattttttgtaaagtgttttacttttt

SEQ ID NO: 108446 - DNA, 509 bp, Glycine max
  Clone ID: PAT_MRT3847_68941C.1
gcccttcacatttaaatgcacatatgagggtgctaagcctcaaggatcatattatccaccgtgctactgataggagacgtggagttgtagaggatcttcatctaggcatagagttatctatagaagctgtcttcgatgttgttcacaaggcagcacatcttcttttttcgccttcagaagcttttgggacattattcaggttgttttcatctcatgaaagtgacactaaagaagattgtgatggtgttgaggacacccccatttatacagctacactaggagagaatgacccaatgcctacggagaggaatgtcaagtatcagcctctgaatacagatgcccggacatgccaggatgtcataacagaccttgggtatccatatgaagccattcgtgtgatcaccggtgatggatatattcttcttttggaaagaattcctaggcgaaattcaagggaagcttgttatcttcaacatggagtttttgattcatcaatgggttgggtttct

SEQ ID NO: 108447 - DNA, 957 bp, Glycine max
  Clone ID: PAT_MRT3847_68942C.1
cttccagttcaagttcagagttctggttcgttctcgtttcctcaaattttgaccactcactatcaccgcgttttaaaatccgacatttggccgtgcccaacgattcaaccgaagatcaaaattcttccgcgttttcgattcggttacggttcgacgtggacaattgcttatggcttcatcctcgataatcactcccgaagatgtattggagtcgctaatgaacgacggcacaattgatgccctcagattgaagatcatcaaccagctcaaagccaatgaggaattgaagagtactactataaagatggctgagcagagtaaggttctgaacacccctggggctgagaaacagaccaaaagagagctctttgacgcacttcggcaagaacttgaagcttctgtacttgaaaaagcctcaaaatcagtttgggatttaattttagacaataatggcctgggtaaggagattagtgaaacggttgagcgagtgttttgtcgattgagtggccaggaacctccattatttccacttccgaatggagaaccacaacctgataaggagactgacaacagaaaagaaaaaggaaagcagaaggaaaatgaaaacacaaattcaaatactccatctaagaaaagaagcttcagtgaaataaatttggatggagcagatgaaactgcaaccaggtcctctgatcctgcagcagtattggaaggttctggcaaatcgcccctatcaatttctaagacttgacttgcaagtttgacgagccttttgtaacagaagtgattgcatctggtaaatatattatattgacactttgtagaacttcactgcaatttagatgaatcttggtgctgaagttttctttagaatgcaacagtcatcgtgtatgctatatacaattgatgaaattaatttatgaaactttaggaaagtctgttgtttattaacttatt

SEQ ID NO: 108448 - DNA, 364 bp, Glycine max
  Clone ID: PAT_MRT3847_68943C.1
ttgacgcgtgggtttatagctcaggacatagggtttgaaaacaccttatgcccccagaacctccaaggcggggctctttgtgtaggcggtgaccaatacaggatgaaccgctattgcattgatgcctttcaagacactctttgcgctgactgcaacaggcaggaataccgggactctgttattactggcactgaccactgtatatttggaaaagcagctggagctttccaaagagtgcgagttgggggccctgaagcccatgggtatacagaacaacatggacactgcccacggacgagaagatccaaaccagaacacacgaactgcaattcagcaatgtcacctaacggcaagttcggatctt

SEQ ID NO: 108449 - DNA, 412 bp, Glycine max
  Clone ID: PAT_MRT3847_68944C.1
caacaaactgatttgtattgtacctccattatatattatctatattctataattctatatatgataattgggcacataccatagttgtatatccttgagacaaagagagagcctgatataattacacactaacaaaagttaagccaaaacatcatgtacatgcactcctttatcccaaacatgacaaaaactaagctaccagattgcattcaatagcttccatttgcatgcctgctacttttcctagatttaccagccctgtcaagcagattctcaaatgcttcagtcccatgctctttgatgtacttctctgcggcagtgagaacgtcctctggcttgcccgaggagtcctttttgctagggacataccagatgttaacattctgagaattgacaaagaaaggtctaacat

SEQ ID NO: 108450 - DNA, 442 bp, Glycine max
  Clone ID: PAT_MRT3847_68945C.1
gattgttctaatcttttttatatggaaaattcttcttcaacgaagaatctgataaatgctgagctggggcgaagggaaaacataactcttatcatattttacagccaatacggctcctccttttaacacagaaatcttcttatcaagagttaacaattaccgatataactattgaactgcctaaaatgacaatgatatctgcgagaacaaaccaaattcttgtccaaagcttcattaactactggatacaaatcctatagctaatgctttaccagctcgttgaaaccagtaactgcactcgctaattatttaattttggcatactacaatcccaaaattacagctttgttctaacaatttttagaaggattgatcaccctgaattttacaatttatctccatctatatagaccacaacttaatcttttcttgggaatttctt

SEQ ID NO: 108451 - DNA, 3977 bp, Glycine max
  Clone ID: PAT_MRT3847_68946C.1
tcatgcgctgagcgcagtaatagcggcgataatgcgcttagcgtggacgccacccaaagtgcgcttttggactttctcgtgagtatctagttgatggatactccatcttttttgtgacgcaagagctattagagctcttatggtatcaagacgagctactggtgcaaatgtctcattgtagtcaatttcgggttgctgtgagtaacccttagctactagcctcgccttgtgtttctgtatggtgccatcagggttgagctttgtcttatagacccacttaaccccaatgatatcttttccatggggacaatttactaactcccatgtgttgtttttctcgatcatctgtatctcttcttccattgccttgacccatacttctcgtcttggagtagactctggtgatgatagttcttgatcttgttgttgtgatggaggtgaaggtggttcacctaggtcttcttcctcatcttcttcttgaggtagttgagcgggtataagaacgttcttctccactttttcttcatcccaattccatgaagcatattcatcaacttcaacatctcgactgatgatgagtttcttagtttgcaagttgtagacacgatagcccttagagatattgctatacccaaggaagatacctcgtatagtcttgtcttcaagcttgtgcctcttcacgtctggaatatgaatgtagcatatagatccaaatacccttaggtgctttgcaaatggttttttcccgttccaagcttcaatttgagtcttgtcttttacagacttagttggacatctgttaagtatgtaaacaacagtgtagactgcttcagcccagaatgtgttaggtagtcccttctccttgagcatcgatctagccatttccataactgtgcgattctttctctcggacactccattttgttgaggagaatatgtgactgtaagttgtcgctcaatgccttcatcctcacaaaatctttcaaactcgcaagaggtgtactctttgtcgcgatcactttttagtacttttatccgtttttcactttgattttcagcaagggccttgaactttttgaatactccaaagacttctaatttttcttttagaaaatatacccatgtcattctagagaagtcatcaatgaagagtatgaagtacctgttgttaccatgtgatggcgtcctcattggtccacaaacgtccgtatgtatcagctccaataaatctttcgctctccatgctccacttgttgagaaaggaaatcggtgttgcttaccaagaagacatccttcacacacttcattgttctcctttatgcttggaagatctctcatcatgttcttctcatgtaacaacttcaaggcatgtgagttgaagtggccaaatcttcgatgccatagccatgaatcatcaacttgtaccttcatggcaatgtttgttgcatattttaaatttagagggaagcttctattgctcttattcatctttacttgggctatctcagaccttttatttttgttgtctaagattttgcatacacctccttcaaagtgatgtgtgtagcctctctccatcatttggccaatgcttagaagattttcttttaggctgggaactagtaagacatcatggatgagtcgcgtacctttatctgtctccaccatgacagtgcctttgtcttttgattcaaccacacttccatttctcagtcgaactttgactttgacagactcatcaatacttttgaaaatagtttcatccttggccatatgattgctacatccactatccaagtaccaacttcctcccttttcttttattgagtcttgagtggcgtagaacgtacattgttcttgatcatgctcctctgcgatattagcttgatgcctatttttgttgcgacaatttttctctacgtgcccgaacttcttgcaatggttgcattgtggcatattacgaaaccagcaatttttctctgcgtggccttgccttttgcatatattgcatgaagaatttttatctgttttgttcttaaggaaattcctagaaccttctcttcttctggaagtttctccataatttttctttcctccattttctttgttttgaggctgaaatttaaactttgactggaagacattttcaattgtatcttctttatgcctatacagtctttgctcatatgcttcaagagagcccacaagttctgtctctgatagagtggacagatctttggtttcctcaattgttgtcacgattgggtcaaacttttggggcatagtaattagaattttctcaacaatttttttgtcaagaatatcttccccaaaagctctcatttgatcaactattcctttaactttagaatagtaatctttaactgtctcggactccttcatcttcaatagttcaaaatctcttcttataaaaccgcgtgaagggatagtaccgctatgacaacaactagccaaagcgctctccaaattgaccactacttcatcaatggttggtctatctttcccttccaaattcacacaatggagagctgtgtaggtcactaactcgactgcatctgcttcattctcgtcaggtggtccaatccttggatccaaaattttcacccattctccagacaaaatatgaggcactgcaaagtccaccacactgcctccatcgtccccagacttgaatatagctatcttaccagttaaaagttcaagaattacaacttcaaaaaaatacacatcactctttgctgtcaccgcacgtccagctatgtcctcaggatcaatgtatccaacggttcctgctgtcttcatcataattgacaatccgtaatcaggaacttttgccggccaagtggcgtcgtgaagaatgttggaagacttaatatctccatgaataatacatggaacggcatagttatgaagatattggattcctcgggaagcatccaaggcaattttgatcctccttttccatgaattcaacaccctgctacccttgcaatgcagatgatcatacaacgctccgtttttcatgtactcaaacacgaacaaccttttatctttctcggcacagaacccgactagctcaaccaagtgcttgtgatgtaggcgggataagaaggccaataaatacccacgtacaatctcatgaagctcctttctctttgaccagctgacttcaaccctcttgatagccacctcaccaccagcaactagttcggctctgtacacaacgccgatgcttccagcaccaatcatgttttgaagtgagaaattatcggtggctgctacaagctcagccagagggtataattgaaaaccatgcacaggggaacttgatcctcccaaatctcctccattactactaatcgcatggtccgttgatgaaggaaaaccatgcacagggggatgggatgctcccaaatcttctccatcactagccattgcattgttgactactgaagcaaaattatgctcaggggaatggaatcctcccaaatcttctccataactattaatcgcacagttcactgccgaggaaaaaccatgcacaggagataaatctcctccataacttctcagctcattgtccacagccaaagtaaaagctgcagggacatctctgttggatgtttccgaattcgtcattctaccatgtcccataaatcttgagatgaaaaatatgtttccattttaacacgccagaaatcataattttcaccattgaagatagggacagaaatagttaacgattgagtagtgttatccatagcttagaaaaaaatatattattggagtgggttaatagtacaaaggaaatttttgaagtagttgggaggattttggaatggtaggtaggtaatataactacgcccaatgtatgaccgaacgtagctctgaaaccactgttggtagttgattagatgaaagtttaaagttttatatgactgttttgttaactaaac

SEQ ID NO: 108452 - DNA, 443 bp, Glycine max
  Clone ID: PAT_MRT3847_68947C.1
aaaaaaaaccttgccttaatatggggggaaaacccccccgggggggaaaaattaccgcatcccaaattcccaaaacaagctaaaattttttaaaaaaacccaatcaatacggggccccacaacaaaattttcccaaatttaccccgttttcgggtaaaacaagaaccggggccccttaaaattttttggaacgggaaacggggctccaaaaaacccaaaaaaaaaattttttttttaaaaaaagggggaaaattaactacccgggggggtcccaaaacccaacttaagaaatcttcaaaaaaaaaaaaccaagttttaatttggacaaaaacccctggttcttggaaaaaaatttacccctattctttgggttccccaaggggaaggggaaaaattgggatttcaacaggggggccacttggccccccattggggggacaaaa

SEQ ID NO: 108453 - DNA, 336 bp, Glycine max
  unsure (1)..(336): unsure at all n locations
  Clone ID: PAT_MRT3847_68948C.1
cccaaanncacncaaaanncaaggggcaaccaagaagggcagcaacaangncgggncgcggaaagggngggaagggnnnaggaaagggaggagcaaagaggcaacgcaaggggcnccgcgacaananccagggaaacacgaagcccgcganncggagaccggcgagaagaggnggcgngaagagaaacagcggnnngagccacgaagagaccaggggcgngcncaagancnggcncgagaacgcgaancgcgaagccgcgacggacacggagcacgcaaggagaaagacagagacngccaaggangncgangacgcgcccaagaggcagggaagga

SEQ ID NO: 108454 - DNA, 332 bp, Glycine max
  unsure (1)..(332): unsure at all n locations
  Clone ID: PAT_MRT3847_68949C.1
ttccttataaccananccaacaacaactatggcaanttatncannagcantacgatncnncanggtacgcanngtacgnacgagttatncgacaatgttgataggccaaacctagcacgaaatcatgtgtaancccggttccatgaccacttagtcgttcngcttnatgtcngtncacccaanagagtgntgntgggactcaaantgatgcacgtctcagtnaaagcgaaatatcntatgatttatctcgagtcggtactctgcaccgnactagagtgaacagccgagtgacgatnattcnantgtatgtgtgcgttgagtctgancgcacc

SEQ ID NO: 108455 - DNA, 474 bp, Glycine max
  Clone ID: PAT_MRT3847_6894C.1
cggtcgcgtgggggaccttgggggacagaggaggttccgatcaatgtgggagcgatactgtcggggtgtctctgctatcgtatatgttgtagatgccgctgatagagacagtgttccaatatctcgaaaggacttgagtcaattaaagacagagaggtctgctgctatatgatttcatgcaaggattctgttaacatagatgtagtcattgactggctaatcaaacactcaaaaactgcaaagtgatccttggtttggccagtatttcatttttagtcaaagatacaaggcgttgaggaaattccttcttggtagaagaatacattttcattaatttagttgtggttcaagtttgtttgtatagtaatcaaaccaggtcagatcactatattgcatgcagtgttcctatgtatcataaaccgattagttgatctcgtacattttttttttggtttctatttttaataaaataca

SEQ ID NO: 108456 - DNA, 277 bp, Glycine max
  Clone ID: PAT_MRT3847_68950C.1
atatcagtgctttttaataacttattaaaaatgagaaaataaaataacaagaaaataagcgcaaataaaacaaccatacgtgcatagacataagccctaaaaaaagcaacacctaggcagcacaaaggaccggcaatgagcacccctaaacaaaaactgatagagggggataacgcaaaaaccaataaggaaaggcagaaaaagcaaacaaactgggcaccagcgataacacataagtcaacgaccgaagaaaacccgggaaggacaggagacacca

SEQ ID NO: 108457 - DNA, 327 bp, Glycine max
  Clone ID: PAT_MRT3847_68951C.1
acgcgtacgcccacgcatacgaaccaatgcgagattattattcatagctaatataccagaaatgtgcttcgcagaattataagaaagcatgaacaaacatgactatgcagaagcacttcttgaggcctggcaccagtcccaagccaattcccggtcagaacgtctcctttcactgaactggtttctttaaaaaccattacctttctcataaattctgcagtaccaatcatcctggccaggaccctttcactttctaaatctgacaacgttctgttatcaaatgatggtatgacaagatgctttgcatgcaaaataaatgaatttgct

SEQ ID NO: 108458 - DNA, 626 bp, Glycine max
  Clone ID: PAT_MRT3847_68952C.1
agcatttggtaataactgcaagagacaggggattgcttgccatcatccaaagttgattgttttgcaaagaaaagatagtattcaaattgttattacatcggctaatttggtggaaaagcaggtgttctatgaaccaaacttctagttattaacattcagttttggaggccacttcactcgattaagttaacttatatgatacttcagttcagtataaaaacattgtaactcttagcattatacttgtaaaatggttatctgtaagacatcaactgcaattgccttagtgtccctaatataaactttgaagcctataatagcaacatttggatcatcaggttatatttatgtaaattagcatttctataggtaccttaagtcatgcttatagtaggtttacaactattatatgattctatgtttgtatgtcattaacatggcaaaactgttgatcaattttcatggttatgtaggggaacagtgtgactaacactatatggtgacaagatttccctcatgccaccttctgttgattttggatcacttttcccaaaattggcaatgctgacattcatcaaaggtcaaactgtggggacaaagttaaattttgggaggacagatggtgg

SEQ ID NO: 108459 - DNA, 1217 bp, Glycine max
  Clone ID: PAT_MRT3847_68953C.1
atggccttatccgttatttgttcttcaaaaggcaatgtgttgagtgagtccaatatcttagttgtctcttgtgttgtgttgaatggccttgcctcgttcgttatagtggagggcttgcatgacggttctaaagcgagagatgtgaacttaggagggtggctggttatcgaaggttggatgatcaagccttcactctttggtggcactgccaatggagacatgcttgttcaatttaagtcagggacgttgcagaagtatgtgtctgctgagaatgggggagaaatgaataacttgacaatttgtgtgtttataattgtcatagctggcacaacttgcataattttttttctcatcaccttgttcaaaatcctaaggtactattatccaaatagatacaacgttagcagaagtaacccaccaatattatttgacattcgtggagattctcccttttctgatgatgaggaacatgatcaagccattaggcaccccatatggttcatccccacagagggtctccaacaatcaatcatagactccatcacagtctacaaatacagaaaagatgaagggttggttaaagaaactttaactgagtgtcttgtttgccttggtgagtttcaacaagaagagagtctcagagtattgccaaagtgtaaccacgcttttcacatcccttgcattgatacttggttgagatctcataaaagttgtcccttgtgccgtgcacctattgttcttgatgttgctacagtgttggtggtggcaccgagtctgccccatatgtttctgacatgaacgaatacgtagaagaaagtaatagtggtggagtgagggttggagatgaagaaaattctagtgaagaggggagggatgatggaattcatgttttgaatgaatgtgtcgaggtgagtggccattctacaattctaattggttctgcttctgatgttagtgcacaagaatttgatgatgaaattgaactcaaaatgaagagatctgtctcggtggattcatcttctgcttcaatagtatttagtgatgtgttggaattaaattttgatatagaaagcttagacaccaacaccaacttggtggttgaaaaggtttcaatttcaagtaacaaggatgttgctattgctaaggagggtagcgaaagttcaaccaataacaaactggcttcagagccagagtttaactcttccattgtgaactag

SEQ ID NO: 108460 - DNA, 296 bp, Glycine max
  Clone ID: PAT_MRT3847_68954C.1
gagggaaatttatcagtgttggtacgagactgggggaatcataaaatcatcatcttttgttttgagagtttgttcgatgaatacaaaccaaatggtaagattattatgccttcttgtttgatgggaatatagttcacatctgtccttgagtgttcatcatttttcccgtgttcatcattaaagttatggtatcttctttaagaaggatccttcctaatgtctatttgctcttcttcttgatgctcacttctttaacatctataagaaccaaattcatgtattcatcaaaaaccaat

SEQ ID NO: 108461 - DNA, 288 bp, Glycine max
  Clone ID: PAT_MRT3847_68955C.1
gggcaaaccctttctgaattttattcaaatattttattaattttagtgctttagcatacacgttaacacccctttatttgtgaatactaagttgttataggggtaatacaatagggagaatttagcatgattgcatggtgttattacttaattgggagcttaatacggctggaatcccatgttgggaaagatggggtcaaaatcaaattctgttggcttattgtcacaaactataacttggagtcccagcagagtcaacacagggatggacctctgcaagataaacgt

SEQ ID NO: 108462 - DNA, 431 bp, Glycine max
  Clone ID: PAT_MRT3847_68956C.1
ggcgcggtgtgagtgtgatgagatgaactaactggacactccacacccacagtacgaacttcgctctgaagtttttatctttcataattcggcgctaatcaagggttttatcttcccccttcctctgtttccagtttcttcggtaaaaattcgttccctttcggtggtatcgcttaatttaagatacccttatcggatttattgcaaatcctgggtattactcgatttctgttgaagaacacccggagctattagtgaaccttcacaatggcagatctcaaggagaggctactagcaccaaaacctgcatcagctcttaacgtaagagaggtttccaatcgaccatctgcctctggaaggcaagctttccaaggggtggatgttttggggctaaagaagcggtgccaaggtctccgttcatggattcgggt

SEQ ID NO: 108463 - DNA, 268 bp, Glycine max
  Clone ID: PAT_MRT3847_68957C.1
ggacaagggaggcattaatctcacagccacttgcccccagagtgagctggatgctgaaactgtgaagagcattctggctgaatacaagattcataatgccgatgtgactctacgtagtgatgctacagctgatgacctcatgatgtggtggaaggaaacagagtttatatcccctgtatctatgtgttaaataagattgaccaaatctccattgaggaattggatatcatctataagggaccggtatgtgtacccatctctgcccatc

SEQ ID NO: 108464 - DNA, 391 bp, Glycine max
  Clone ID: PAT_MRT3847_68958C.1
ggtttaacaactgaactttcactaaaaaatcaatgtggtggaacaattaaaaacaatacatcaatgttgaattacatgtctcaattgacatcagattataggaaaacaaactaataatggagtaagctagctaaatgatatgcccaaaattttcggaaaagaataaagtaaatataggtaagggtggattttaaatggagttagaacaaatatggtgaaggctctggctccttatttaattggcatagagagactaggcagccataattttctgacgctcggtggattcttgagcaaagaattccctgtgtgcatccaatgcaatgttcttcaccccattttcaaccatggcactggtctcttcctttggggtttaggacactttaggggg

SEQ ID NO: 108465 - DNA, 187 bp, Glycine max
  Clone ID: PAT_MRT3847_68959C.1
cccacgcgtgccgcccacgcgtaacgcccacgcgtgcgcggacgcgtggggttgtataggctggaacctgtgagaacttgagttctaaggagacaggaacctacgtggtgggggatgaatgatgaccgagtgatgacagcgtgattaacggaccgagtgaggtagtgtttggagaggactaatgttt

SEQ ID NO: 108466 - DNA, 322 bp, Glycine max
  Clone ID: PAT_MRT3847_6895C.1
cccggcggaatccaaacaaaatacaaataaggagggcaacctgttgagatggtctgggttccacatccagcaattactcctccataagctaaccattgctccacatcttttcaaagggttaacctatccttatgacatttcatcacagctgacaggagacctcaatacattaaaaccgactctgaaccttgggtaacacactgggtgcaccacacctccaacagtgccgagactccaaccctacttttaccaaaattgtgtcttccgtcctaaatactcaaacctggaggatcatttggcattttgtccctgttctcagacc

SEQ ID NO: 108467 - DNA, 410 bp, Glycine max
  unsure (1)..(410): unsure at all n locations
  Clone ID: PAT_MRT3847_68960C.1
tccctcgcgtccgcggacgcgtgggcgcaaaacagcgtgaccccgaatggtctccctatgattttacctagtgagaatgacctgacttactagtgtgtggtttgtcttgtcgtgtactcctagacacccaacaaggtttttcactgatatggtaccacattacatataggattgagtcttagtatatctattgcataacgtttgtgtattgatcgatattgattgatttaatgatattgtgttttgatctttaagtacataaatgatgtgaaaatgaatgaggcgtgttgtgatgtgatgatacgcgacaaagtggtggaatgacgtgagctatgtttaaataagttatatttccgttatatgatatgtatatttacatgttgncttgtttctcttcattagctaggaat

SEQ ID NO: 108468 - DNA, 323 bp, Glycine max
  Clone ID: PAT_MRT3847_68961C.1
ggggcaaaataccctttgtttggattgggttgggattattgggatttttaattggggaattaaaattaaaaccccaccgggcctctttttagggggggaacctaaaaactttctggtttggtgaaatccaagttttctccttaaaattaaaatggaaatccccctttctttttttaattaaacttggtttttaaactttaaaaaaaaaaaggggggcaccattatttgttattcatatttaaaaaacaccggggaaggggttgtcccattttccaaggtttaaaacgcaccttttgggggaaaccccgcccggaaaccccgaa

SEQ ID NO: 108469 - DNA, 118 bp, Glycine max
  Clone ID: PAT_MRT3847_68962C.1
gtatgatcgctgatggatacgtgccgacgatattatccagggggataataggccttgtgcgggggaacacacagcgtccaatcgaaaccgggaagaacatatgaccatgagagatggc

SEQ ID NO: 108470 - DNA, 405 bp, Glycine max
  Clone ID: PAT_MRT3847_68963C.1
gctaagagattggatcccaagggtttaaccttgctggctgagcaaatatgacgtagaacactggcactgagtgcttgtgcttggggggaagggcaaaatacatggccttgttatgaacgtctacaaggaacaatgcccttatgctgaagacatcatgacaaaacaagaaaagcttgtctacatgcgctacatgaacactgatttgtactggctcagaaacatctcccatgactgaagctgatcatagctgtgatgcttgactggtgctgaactgcacaagaaggcactaggcctaaaaggaaacatatacaagctttgacgagagaaattacaggtacattgagaccatcaaagaagttatggacagagaatgccaaccagttgtttcatgtgctgatatactcg

SEQ ID NO: 108471 - DNA, 269 bp, Glycine max
  unsure (1)..(269): unsure at all n locations
  Clone ID: PAT_MRT3847_68964C.1
aaaattcttccaccangttatgggtntcccttgtggtgcttcttttctncctcttaggtctcttctnctagttccagtcatatcanctcatcgttccatattggaccntgncctaaccaagtntaccacacaganacaggtgncttcactgtgncaacnatggaagagtgagcatggacgtgtctaccataaccacgnagaagaggcanagagacntgagattttcaggaatgacttganctatatcaggganatgnagcaacaganaa

SEQ ID NO: 108472 - DNA, 246 bp, Glycine max
  Clone ID: PAT_MRT3847_68965C.1
gttggatacgattaagggttccattcttaatccgtgcatatggaagaacatctgccaatggcttaaattgatgtcagtatttcaagaaattaatctctgattctgaatcaaggatacctttaacttttaaatcattttctgtaccatgtaagtttatatattattgtgttttcaaaaggttagttgcaaagttgactttgccttttttcaggttaatggtggatatgattcctataagagtttata

SEQ ID NO: 108473 - DNA, 256 bp, Glycine max
  Clone ID: PAT_MRT3847_68966C.1
agcgatccagagcctgagcttatcccttaagagaaatcctctctcttatccatttcccatttggcttgctatgagtcatccatcccattcttctatgaccctatgaagtgtaaaatctttcatggctgtgagagacaactccctctgttggagcgtagcagtcaaaacccttggaatttacattcgaaaactgatcaagatgtgtaatatcaacaaatcaaccatgctccgccctgttagggttccgaaatggcag

SEQ ID NO: 108474 - DNA, 288 bp, Glycine max
  Clone ID: PAT_MRT3847_68967C.1
tcgcccacctacctaagctccgaatcgcggcttcgagtttcatttctttaacatgcaataacccacactaatcttttcataaataacataagagggagcatgcctcgcgtttcaatatgaagatctatttttcagtcaagctgacactaccttggaacagacctcaactcacattaggacttacattgtctacatagcttaacctaatatccaccagaactccaaactccaaactgtgtattgtgagacccacctgacaaaccggtttcattcgaactacatgattac

SEQ ID NO: 108475 - DNA, 276 bp, Glycine max
  Clone ID: PAT_MRT3847_68968C.1
gatgtctctctagtcggcggccgcccttaatttgggggggtttttttataatctcccctccttttgaaccgcacaccttttcaatctatcagccttagccaacaagaatcataacaatttgcaaccggggaaaaaaaaaccagaacaagggacacttgaaatctcattgaaaggaaaaaacaaaatgattctccctataccaaacccccacaacaagaaaaattttcaaaaaaagaaaaattattttaatcatatcaacacattaaccttgacccc

SEQ ID NO: 108476 - DNA, 218 bp, Glycine max
  Clone ID: PAT_MRT3847_68969C.1
acgaccagcttgtgggacaagagccaggaggagaccacccgaaggagccatgtgaatgagcgtaaacacgactttcaagctcaccgtggctctcttggcaaactttatgacttttgcagctgtgtgtgatagggcatatttgcccaggagtgctaaagaacttatatggctgcgcattaagacatactccaaagcttttcaccccaaaagtatcagag

SEQ ID NO: 108477 - DNA, 1022 bp, Glycine max
  Clone ID: PAT_MRT3847_6896C.1
cggacgcgtgggcggacacatgggcttcgatttccatcttagattccaatcctttcttccttcaaattctattctatttaccctttgttggtccgcgaagtttcttgttccctcatctttctctttcttcgattcacacacaatgggtctctgggattccttcctcaattggctccgcagcttgttttttaaacaggagatggaactttcacttgttggccttcagaatgctggcaagacttctcttgtcaatgcaattgctactgggggctacagtgaggacatgattccaactgttgggttcaacatgagaaaagtgactaagggaaatgtcacaataaagctttgggaccttgggggacagaggaggttccggtcaatgtgggagcgatactgtcgtggtgtctctgctattgtaactatatgttgtagatgccgctgatagagacagtgttccaatatctcgaagtgagttacatgatctattgacaaaaccttctttgagtgagattcctttgcttgttcttggaaacaaaattgacaagtcagaagctctttctaagcaagcattggtagatcagctaggacttgagtcaattaaagacagagaggtctgctgctatatgatttcatgcaaggattctgttaacatagatgtagtcattgactggctaatcaaacactcaaaaactgcaaagtgatccttggtttggccagtatttcatttttagtcaaagatacaaggcgttgaggaaattccttcttggtagaagaatacattttcattaatttagttgtggttcaagtttgtttgtatagtaatcaaaccaggtcagatcactcaaatattgcatgcagtgttcctatgtatcataaaccgattagttgatctcgtacattttattttttttggtttctatttttaataaaatacaagtccaacaagtttatttgtctgaaaaattgaatactattgtgttccttatatggggaaaaaagttatatcttgatgaatgcttccc

SEQ ID NO: 108478 - DNA, 223 bp, Glycine max
  Clone ID: PAT_MRT3847_68970C.1
acggttgctagaagactacagatggggggtcactcccagttttattgcaaaagcgcgacaggggttactgtttctcttcctctgtctgcttctacactatctcttgtttcaatcgaaaaatatcatggacagaaaacccttccctggtggcaactggtaatacaatgggaccaccgacgaggtgaataagattgtctctactttaaactaacctcaaaatccc

SEQ ID NO: 108479 - DNA, 531 bp, Glycine max
  Clone ID: PAT_MRT3847_68971C.1
tggtactgcttcatatctggactcttactttctgcatacttagaaacatctttttacatctatttctctcgctcgtttgaaattatgaataatcatggccttctgtggtggaacttttgttaagctaaactattctgtgtccccatgccacaaatacaaagctacaagaccataccatagctacagatacaaggttggcgaatcacatgtacaacacaatgcatgtctgtaaaatgattttatgttcctcttctttgatctcataagcggacactgatcttgcttttgttactaaaaaaacaaagaccatgatttttcaccaatagtgcaacgatggatgatgtgtaattgtgtttgtgacagctctgtgcgagagtttcagcaagcggctcagctgatgaggagagaactattataaacaaagagaaagatgggtggaagatcaattatgcaggaaaaaaaccaggaactctattgttggacacaatcaactacccaattcacatgaagaaattgtcaacacaggaatct

SEQ ID NO: 108480 - DNA, 672 bp, Glycine max
  Clone ID: PAT_MRT3847_68972C.1
ggttcggcggcgcgccaattgcgccggcggcggtggtgaagcccgagccgcagccggcctcgggcctcgccaggttccccgccggcgtggggtgccttccgacgctcgacacgtccggccttccttgtggaccacttccccagcagcaggtggtgcccgcctctgttaactctgggcctggcaccgggctttctgggcccggcccactccccttcgcccaacccctccttgacgctcacgctgcttccttcgcttcctcagggttagattttgacaccttctccaacttccccactctcgagtcgtggaaagtcatgtgagagagaaaaaaatattgagaatttgagatgagatagattcgctgaaaattttcttttggctttttccctttttgcccctctcgtgggttaatgaatctggacgggggaagttagctagctaggctgatttatgtaaatttgggaagggaaaatggatatgaaactagtatcttttttttttttctctttatgtaatttctgttacatagttcctttattattattattactatgacggggtgtaatggaatggagataatgagagctttgtttagtttaattaaccaaattaatgaaattctaagtttatctatgaacagtgtagacttggaccacatcatgtggttgatgt

SEQ ID NO: 108481 - DNA, 363 bp, Glycine max
  Clone ID: PAT_MRT3847_68973C.1
tttttgctttgacagtgagaaaactttgccaaataatttgtctgcagaattgctctcttgcaaattggatactgttactggccaatattatcctgagtgggctccaatttattgtcgagttcatcgacaaccaatttacatcactgaaggaaattatgttagaaagcaagatgtcagcattgaatatgatgcatgtacaattcccaaagaatgggggtcattggttggtgccacagttggaaaacacaaaccaaatgttggttttcaaggtgctgggagccaaaggagactgggatttgctttattgataccatatggtgagccagttgtgcaagcttaaagtgctgaaggttactttgactt

SEQ ID NO: 108482 - DNA, 576 bp, Glycine max
  unsure (1)..(576): unsure at all n locations
  Clone ID: PAT_MRT3847_68974C.1
atcagacctggcttccactgtgaagcatcaggccactcatcgatctccaaggccttcatgggcccgggcactctcacatcatgcaaaacattagccaagcttgccaaaggtatggattttttcaggtatgtaaacttgatgacttattacaccatgatgaacagagaagatgttgcagaatacagcatgaagatgagagaattagcgttgaaattggtggaggcaatttctgaaagcttangtgagaaggcagttgggaagcatggacaggacatggcaatgaactactaccctccgtgtccagagccagagctgagacctcatcaccatactccttcaagatgacgtacctggcttgccgctcgttgaccattccaacattctactgtccttcacctgatgctgtgattggaacagaggactttccaaacaaacttgcctccacatgttcaaggcttaatatgctacttaatcaaaatttgtgcctttggcttccagagtagtatgtggaatttgcatgtatgtctttctttaattaggatataataaatggcaaatattttcttcctccttcac

SEQ ID NO: 108483 - DNA, 1158 bp, Glycine max
  Clone ID: PAT_MRT3847_68975C.1
caagatggcaggatatcaagcattcgatcatgttacattctatgtgggcaatgcgctccaagcggcgacattctacatcgcgagattcggaatgacccccgtggcatacagtggtttagagaccaactcacgccaagtctgcacacacgtagtcagacagggctcgatcaactttgcattttcctctgctctgaacccagagggcaaggagaccgacgagatcggtcaccatgtctggaaacatggagatggttgcaaagacgtcgcattcaaagtcaatgattgccgtgccatatatgagaaggccatagagagaggcgccacatctgtctccgccccgaaagagttgaaggacgagaatggtaccgtgataatggccaccatacaagcctttggagacaccacacattctttcgtacaacacgtagactataaaggtcctttccttcccggcttccgtgcctacacagacgtagaccctctgacaaaaatgacaccacccatcggtctcgacttcatcgaccacatcgtctctaaccacccagatcaacagatggagaccatcgtccaatggtatgagaagatcctcggctggcacagattctggtccgtggatgacaaacagatccacacagagtactcttctctgagatccatcgtggtggcagatgatactgagaaggtcaaatgtcccgtgaatgagcccgccaaaggaaagaagaagagtcagatacaagagtacgtagagtactatggaggctctggagtccaacacatggccttacataccaacgacatcatacacgccgtacatcacatgaaggagagaggatgcaagttcttaacgatccccgcctcatactatgccaacgttcgcgagagactccagcactcttccacgaaggttaaggaggacatggacaccctacagaagctcaacatcctcatcgacttcgatgagactggctacctcttacagatcttcacgaaaccatcacaagacagacccaccctcttcttcgaggtcatacagagacacggacatcagggtttcggtgccggcaactttaagagtctgttcgaggccatagagagggatcagaacgatagaggcaacctcacagacactgcatgatgatgaaataaagacaatcagtg

SEQ ID NO: 108484 - DNA, 786 bp, Glycine max
  Clone ID: PAT_MRT3847_68976C.1
aattcggctcgaggtagagctgaggcacaccagctctattccagaaaagccatatttgatgcacttggggttcaactttttgcagttcttcatgagcaaatagactcagaggtaaaagatttctggcctcgatactggggcggtgtcgtgcttcttgatcgaggtagggacttcttcaaagctcttggagggggaaaactgctcaaggagaagttcctatcaggatttttgctgaatcctcgatcactttccaactacaagcgtgcaaaagccatgcatattgactacaatttcaaaggagaaggtgaaatcaaaggtggactcttcataatagggatgggaaagagtggcatagcttaccagttcatagagaggaactttggtgattgggcacctatagctgaagtcattgagatctgtactcaaatgcagaattttcagtaaactggagaattcaatgaaccaacaagaaggtcaaaggatgagtgtgcagtactgaggggatcactcagaatgattgaatatattgggcatgcatttagccattcactaaagttcagttccttttaattccatatctcctgcaatcaggaatacaacgttcttgcaatatagatgtcagtaaacatgcaagacctattcgataatactcttgattttaaaaacattgtgtttttttagatagatataaatatacggttatagacgagttggattattaatcaattattagagtttaatcaaggggatctatacctcacttgattaagaaatttgaattattat

SEQ ID NO: 108485 - DNA, 255 bp, Glycine max
  Clone ID: PAT_MRT3847_68977C.1
cattgagttggtgatgacccaggcatctgtttcgaggcccaaggctgtcaaggccctcaaggcttctaatggggacattgtcactgccatcatggatctgacaacttagggtgatatttctgtccgtgccacttttgttttggagtgctattgcaacttgagtgttatatgtggacctatgcttcgatgatgttaccatgattgcttcttgggtcaaggtcattccaacaaggtttcatctttgctggcttgaaa

SEQ ID NO: 108486 - DNA, 536 bp, Glycine max
  Clone ID: PAT_MRT3847_68978C.1
aaaccaacttcagaaaaaaaaggtataaaaaatataaaattcccttcttgggtggccaaatccacatgtggctaattggacaaattacatggatatgacgggccaactgggcctcgccaaaggcccaacacggaacaaaaaaaacaagccccggggggggaacagggaccccgggaaaaagtggaaccacaaaaatctactttacatagggggggccacaaagagggatggaaaaaaaaaaggccctataaaacaaaaatttaaaatattcacggaaaggcagcaaaccctaacaatacatcacgcaggatacacggttataccagcagccatgtccccccatttttttaggctgaaacagtttttgtttaaaccccaatttttttccaaaacacactaggcataattggtttggggccaacacaatttttgtcctgaacagcaaaatggaccagggaatcaaggaaagagtctgaaaaaaagggtggcctcagccccaaaaaacaagttaagggttcttgcaatggaagaaaggc

SEQ ID NO: 108487 - DNA, 453 bp, Glycine max
  Clone ID: PAT_MRT3847_68979C.1
ggtttccatgcccaaagctagccatgcacttcaaataaaaccccacctccctcccctcattccaacacaaggctacgtacgtcacctttctctctctccatttgtctctgatcttccaacaccttctccagagaagagacaaaatggatcatcattccacttccaaaacctctctcattcttttcatatccctctcctccctcctcttcctcgcaaccgccacgcgcaacatccacatcggccgtcccgacatccactccgacatcaccgaattctgcaagaaaaccaccaaccccgccgtctgcgcccagaccatccaaccccacttcctcaaaaacaacctcgaccccttaaaggcactcgacgtcgaagttgatgccacactggcctctgccaaaaaaaccctaatcgacatccaaaccctagaatccaaaaagggcatcaccaaataat

SEQ ID NO: 108488 - DNA, 838 bp, Glycine max
  unsure (1)..(838): unsure at all n locations
  Clone ID: PAT_MRT3847_6897C.1
cccacgcgtccgcccacgcgtccgtacggctgcgagaagacgacagaaggggagagacatatatattatgtcgtattgccatcctagattccaatccttccttccttcacattctattctatttaccctttgttggtccgcgaagtttcttgtttcctccaacatataatacctcatctttctctttcaatttctctcttcgcttttttttgattcacacacaatgggtctctgggattccttcctcaattggctccgcagcttgttttttaaacaggagatggaactttcacttgttggccttcagaatgctggcaagacttctcttgtcaatgcaattgctactgggggctacagtgaggacatgattccaactgttggtttcaacatgagaaaagtgactaagggaaatgtcacaataaagctttgggaccttgggggacagaggaggttccgatcaatgtgggagcgatactgtcggggtgtctctgctatcgtatatgttgtagatgccgctgatagagacagtgttccaatatctcgaagtgagttacatgatctattgacaaaaccttctttgagtgcgattcctttgcttgttcttggaaacaaaattgacaagtcagaagctctttctaagcaagcattggtagatcagctaggacttgagtcaattaaagacagagaggtctgctgctatatgatttcatgcaaggattctgttaacatagatgtagtcattgactggctaatcaaacactcaaaaactgcaaagtgatccttggtttggccagtatttcatttttagtcaaagatacaaggcgttgangaaattcct

SEQ ID NO: 108489 - DNA, 471 bp, Glycine max
  Clone ID: PAT_MRT3847_68980C.1
aattcggctcgagctttttttttttttttaagtgttcaaaaattgtttattatgcaaaatgttaacttttataaaaagtttaatatacatcacatggttacagaaagtcaccttactgtaaaaaaaaggtacaaaagctatatactctattattgagttcataattagggcaacagagcttttcttcaatgaaaccagaagaccagctcttatgctgacttggcagtgtgtgcagggcatccactcgtgtaccctccacacccttctcgacaccccattttgagaaaaaagccagtctttttaatacttgagtcatggtggggacagagtgtcattgaccaactgatgaacagctagggctagctatctctacatgctaccaacaatgagatcgtatctcatcgtacttcatggccaacctatgagcatgaattgatgataaatgaaaaggccttgagcaagatcgaagct

SEQ ID NO: 108490 - DNA, 416 bp, Glycine max
  Clone ID: PAT_MRT3847_68981C.1
tttttttatatcataatagaacaaattcatttattgtaaactaacatgagaggggtacaataataatgttgtctcgaaatcattaagatgtaattgggagacaaattaagaagatgtctgttcatctctaactcatgtttttctcaatggcgggctgccgcagttcggaattcgttgacaacagcatgaagatccattgtcacatatagcataacctggacagtagtcatttttcaatttcaatttgcaaggtgcaaaacagtcatggttcgttccacagtttgctttaataaagacacatgtggcggttttctgaccaaatactgcgcttggggtgaaagtaatagccaccaaaacgaaaaacatgcagagctgagaccttgttgctgccatcttgtttccagcggacgcgtggg

SEQ ID NO: 108491 - DNA, 405 bp, Glycine max
  Clone ID: PAT_MRT3847_68982C.1
cttgattctcccggcaatgaaagcttcggagagcattttttttccagccagaatgttgagtggatttagtgtttaactttgagatctgctgtgcaaaatctgttagccaaaatccaatattagaacagtaatttattataaatttggagtaagatgtctggtgaatcggctcccaaacccaaaccacgattagtgttatgtcctaaatgctggcaacttcttccagagtctccagattatgatgtgtacaagtgtggtggatgtggcaccactctttaagctaagaaacgaagaaatggggcttgtaactcagaatccaacacacatggaactgaatcatctcctagaaatgcattggacaaggtatccagtacacgtgaaactgatgcatctgctggtaatgca

SEQ ID NO: 108492 - DNA, 486 bp, Glycine max
  Clone ID: PAT_MRT3847_68983C.1
tacggctgcgaaagacgacagaagggggaagcagtgagtgagggaataatgttgcggattgctcccaaattcttcaccacggttcctcttcggaccatttcacccttcgcatgtcgcttctcagtccgttccatcgctgactcttctcctttcaacaaaatccgcattcaaagggatgatactgttagtcataatcacaacccattcaaagggttgctttgttttgccgcattttgtcgttaattttccgttttcttttgtctgcaaaatagaatttttctaactttttttttagtaatgggtttctgagttgaacttggaaggtattgatgagactctgcagtgacaaagataaagtttagaacttttcagcatcaatttgttgggggtaattattgtctggaaacagtgaattggagttacaacttagaactgattgtttcatgatgtgctaatattgatcatggaccatagctggaaaaattt

SEQ ID NO: 108493 - DNA, 326 bp, Glycine max
  Clone ID: PAT_MRT3847_68984C.1
aacagtaaatgaatttgtctatgatctgcttgggagatatacatgaagtgtggtttaaacccggcattatgcacattgagcgcaggatttcttcgtactgaaaacggtgcccttagatgttatactgcatgcttacactttaatgagaagctggatctcgtacttgctattggcagataacatgcacgacttcttcctttccaacttattaacctgagagggcattttattctattgctattagtacggggtttataagatgaaacaatagggtgatgaaacgaatagggtgctcttatactgcaagaaggatccataggctattt

SEQ ID NO: 108494 - DNA, 296 bp, Glycine max
  Clone ID: PAT_MRT3847_68985C.1
tcgatttaattggagctggctcacattattcagaggatttttttgaacaggatgatccagaaacgccctaactgagagaagccaaattgacactaactgtagagcctcaacatagtgcggtgcaggctcagatggaaacaaatttgcctaaaatgtctcttgatgatgctgatacttctcgaggtgccatgtggcatgatcaaagaactgagtttagaattggtcttcccaaaaacacatgtgcaggaaccatactgcgaagtgatctatgggaaaatcacctgacacaaggcaat

SEQ ID NO: 108495 - DNA, 240 bp, Glycine max
  Clone ID: PAT_MRT3847_68986C.1
gttttcttgtttgtgagaagacttactgatggtgggcccagatcacgcagctttttttataccaagggtgcttcagatcgtatagtaaaagttcatatgagggacacctgactttacgaggatcgatagaagtccataactttatattcgccattggccataataccagaaaacattgctgactctgtgtactgcgccatgcctcataacctatttgagcccccaaattcccgctggacc

SEQ ID NO: 108496 - DNA, 393 bp, Glycine max
  Clone ID: PAT_MRT3847_68987C.1
agctaccttacgctctctattgctgctccatgcaggtctaaatccattccctcaggttctggcattctatgacaatccctcagtgttcaagcctcccattgaagaaccacagtctagaaggccccagttgagaagcctcctgtttagaatcctccagttgaaaaccccccagtttagcagcctccagtacagaagccaccaggtgtcaagcccccagttgagatacccctagtttataagctcccagttgagaatccaccagtgtacaagctcccagttgacaatacaccagtgtataagcccccagttgaataacccccagtgtatcagcccccagtatagaaaccatcactgtaaaactcccagttgagaagccccagtttacaagccccc

SEQ ID NO: 108497 - DNA, 528 bp, Glycine max
  Clone ID: PAT_MRT3847_68988C.1
aacctcggaattcggctcgaggggaagctggatgggtggttcttccagatggttctactttcccatcaagatctcagggtcaaaagccagctggtggtaattctacaattgtcacttcatcatcttcccttgcggcttcacaacagactccatctgcttctctcaggggagttgcttctggctataggagccctttagagtataatgcatgtcaaacaaaaggtgtttttatgcctactccgtctccttatgatctatcctcaagttcccggtctcaaacatctatggtgggggatggagaagcacaaagagacaatcgtcctctgattgctggttcaatggataatgctgatgataagcagattgctgacttgccccccagattaccagagcgtgatttggctggtaccccatatgttccagtttatgtgatgctatcgttgggggtgatcaatattaaatgtgagcttgttgatcccgatggtctactaaagcagctaaggggtgttgaaatcagtacatgttgat

SEQ ID NO: 108498 - DNA, 422 bp, Glycine max
  Clone ID: PAT_MRT3847_68989C.1
gggccgcgacccacgcgtccggtgagaccatgtctctgagaaaaaaagaaaaaagattatggagacctattcttattgcatggagagacgatcataacatagtgagcaggggttaggaaaacccagattatgtacaacgaatgtgcgttacacttaataattagaagaaaaaagatgtcttttttggggagggggtgacaatgccttgtaaatgtaaggccacttgagaggactgtacagaaatcaaatccttaaagaaaagtaaacatgccaggtcttctgaatctcagcaagggttggccttcttagcattcctacatgggagattctaggattattccagctgtgttacttcaaggattcttgaaactcttcttggacccatttgttgactgactgctttgatggactcgtaatacaca

SEQ ID NO: 108499 - DNA, 346 bp, Glycine max
  Clone ID: PAT_MRT3847_6898C.1
ttgagacctcacatcaagcggggctgcgggctgggtttaagcaaaaaatataaataaaaaaaaaaaaaaaaagcggtcgatctaaaggatccaatctatacaacacgaacatgcaaacaaaataaatcttgtatctcgtcacaaagaaaaagactcacaaaaccgtcgttcttcacaaatggaaactaggaaaacactgaccttacccaaattaaagaccttgcctgacatcccaatttcaccagctaccaaaataacaaaaactctcataccgcaaacccttcccaacaaaaaaacaaaactgaatagcaaatggaacacgccctgtaacttaatcattaagctc

SEQ ID NO: 108500 - DNA, 179 bp, Glycine max
  Clone ID: PAT_MRT3847_68990C.1
gctctgcattatgtctgacacgcacaaaacaaacgcgtcccttgtagagactctggattcttatagttacaggtatactgtaaagcttcatttttttatggcgctctgaatcgtttgcagtgagggggaaagacggacatagtttacggagggttcaagacagtttttttttatcgaac

SEQ ID NO: 108501 - DNA, 248 bp, Glycine max
  Clone ID: PAT_MRT3847_68991C.1
acgctccgtcgaccaacgggccgggccgctcataattgaacgcggcgagggcccctacgtcttcgacacggcaggaaaacgctacctcgatgcgatggccggtctctggagtgcgggtcttggcttcagcgaaaagcggcttatcgaagccgcgcatcgccagatgcaaatcctgccattctatcataccttcgcatcacgatcggatgggccttccatcgcgcttgccgagaagctggtgaagatgt

SEQ ID NO: 108502 - DNA, 453 bp, Glycine max
  unsure (1)..(453): unsure at all n locations
  Clone ID: PAT_MRT3847_68992C.1
acaggcatccttctaagaaaattgatgggggaccaaagcttgtctggcattactcatatcatagttgatgaagttcatgagaggtctttgttgggtgattttcttctaattgttttaaagaatctaattgagaagcagtccactaacagctctggaaaactgaagatcattctaatgtctgcaacagttgattcaagtttattttcaagatacttcaacaattgccctgtcgttactgcagaaggcaggactcatccagtgacaacatactttcttgaggatatatatgatcagattgagtatcgacttgcctcagattctccagcttctttgacagatgggacatttcccaaaggacagattttgcagagagatgttgtgacaaatagcaggggtaagaagaatctagtcttatctgcatggngtgacgagtctctgctttctgaagaacat

SEQ ID NO: 108503 - DNA, 498 bp, Glycine max
  Clone ID: PAT_MRT3847_68993C.1
gttccaaggaaggatttcccgatcatcagctgtatgacagtccatcctgtcgtttggggggaggggtggggggacagacgtagcacagaacgggatgggggggcgaggcagagccccaataaaccaatgttcgtgttagagaaacagtcactggggattaaaaagaataaataaaagtttataagaggtgggatggatgaccggtagtgagcgttagggttacctggtgataaacttttgtaaaagagatagggcttagcaaggttatgattagagttgaatgcgtgtcgcggtaaagaataagttttggttataggagcgaacaacattaaaataattggccatagagggagagcgaaagccgtgtaccagacgttaaaagttgaaggcatagggatcccagtagtggcattaagtaggttggtggttgctccaagtagtttggttgttatggtgttaggcgaacagcaagcacagttactagagtggttagtattt

SEQ ID NO: 108504 - DNA, 458 bp, Glycine max
  Clone ID: PAT_MRT3847_68994C.1
cccacgcgcgcgaaagaatagtagaatcgtgtggatcgtttgcagaagaggaggtaaagagaaggagtgaccgaagcgaagatgttacccacagcttccaaaggacgttcttcttcctcctcctcttcctctcgacctaacaatcccatgctgcttccctacctccgcagaatcatcaagtggcaacaaatggatattgaatatactttttggcaaatgcttcatctatgtacgtccccgaaagttgtctatcagcatactaaatatcacaaacaaaccaagaatcaatgggcacgtgatgatcctgcatttgttgtgatctgcagtcttcttttggcagttgcaactttggcttattgtgcggcgtatgaccatagtactgcacatacacttcttgttatcttctcagtgttggttttccactttatattgactggtgtatttctggcaacattttg

SEQ ID NO: 108505 - DNA, 160 bp, Glycine max
  Clone ID: PAT_MRT3847_68995C.1
ggccttccaagagcgtgctcctatagactccaggctactgaggttgctcattccggtggcggggtgtcatgcgttacggcgtgtgagcagcaatgtctcgtttgctggaatggctggtagttgcactcataccagtaaaggtgtagaaccattattaaat

SEQ ID NO: 108506 - DNA, 263 bp, Glycine max
  Clone ID: PAT_MRT3847_68996C.1
atgaagccgcaatgatgactgctttgagctcactcttaactgcattggcttggccagctgcactactgacagcaactgactttatagacagtaaatggacaattgctattaacaggtgtatctcgtctgctgattggtctagaataaaacatttgcttggaagtggagaagaagcttctgcttgctggtgttacttaatatcatatatgcaatcaagggtgttagatggttagaatatcagtaatttaaatagtgttattggg

SEQ ID NO: 108507 - DNA, 747 bp, Glycine max
  Clone ID: PAT_MRT3847_68997C.1
ctcaacccatccaatcccaacaatcctgcctgccttcggatcttctgctgctccgccaggtgcaggtgcaaccttctccctcggctggagcggtgcaccgtctggcgccccaacttgcgctgctgctgcaaccagggcggagctggttgcggagccctcctccccactctctagtggagcgatggctggtaatggttgtagcagctgggggtgcttggctctgtctggggtggcatctgtatgccctgtggtccccactgcacagtcggagctggtcctgcatgtggccggcggtggagggggataggtatccagtgtttcctgtgcggccggtcgtggggttacgtctaactgtgttcgtgcgcctgattgcttacttcattcgtttcataggtcttgtatattaccactgctttttgagggttttctactattttctttggtaagagacgaatatagaggcatgtgtacaggatcgtctcttctttccttgtaattttcctttgttttcttttttttttgtctcgttctctctgcccttgtgcagaggaacactttattttttgttctactagattagtgaatgtattagtagcctgttagataattgggatgggagtaatttttatgagcaaaagccaattcaaagttttgtgaatacaaaatttctggtgtatgcatctgccattggtgtctgcaaatatttttaaatcagtgatggagaaaacaaccacgttcacttgttcc

SEQ ID NO: 108508 - DNA, 1042 bp, Glycine max
  Clone ID: PAT_MRT3847_68998C.1
cccacgcgtccgatggagcagaaaaattggaaccttctcgatgaagctttagggcttaacaacaacaatgcgaagccatggcctctgtgtggtcgcttcgtgcttgtggaagattgtgttgacacaagcgccgctttcgttcttcaccaaatcctcaaacgctccttctcttctcacccttcttccgccgtcgtcttcctcgctttctctcaccctttttcccactatgatcgcgtcctcagaaagcttggttgcaacttagctgctcaaagagataatggaagattgtttttccttgacatgcttatgttgcagtgtccagatgaaggaaaagccaatcatgatgggcttgcttctgtatttgagcaaattgaaagagtgatcactgcattacatcaagacaagaaattcatctctatcatgatagatgatatatcctttcttgaagttgctgctaatggctcttccaatgatgttttaaacttggtgcattattgccatacgttaacatctgattcagaatatggttgtgcatttattgcactcgaccataaggacatttatttgaacggagacaggactgctgttatgttagagatggagttccttgctgacattttggtcaaggctgaaccattggccactggtttggcaaaagatgtgcatgggcagttgatggtgttagataaggaaacacagcatcgacatggagtttcaaccgttaagactcacaattttcacttcaagatcaaggaaaatggcattgagtgcttttatccgggaacaaaaatttaatgttgatcaataatgcttgtacaaactactgtgtaatcttgaaagagtgaataattaatcttttctgttatttttaattcattaggtagaaagtgattcttaaatgtgtaaacttgaattgactgataaaaaaaaaacttgaattggtcattgaaaaaaaaaagagtcgttggggtaattgaaaactccccatacatttgagtgatagatagaagaaggatgaagagaaactcttaaaattaaaaaa

SEQ ID NO: 108509 - DNA, 632 bp, Glycine max
  unsure (1)..(632): unsure at all n locations
  Clone ID: PAT_MRT3847_68999C.1
cccacgcgtttctccacctctattcggatttctctcccttttctaatttattttctaagcccaacacatacaaccttatattctcccattcatcataaccaaaaactttgtcactggcttatttattctctattaatattatatcctttgggtattgtattgtatcgtattgctttatacaaattcttaactcaattagcctagctagctaggtcattataaaaaaaattaaaatagtgttccttgatggctgaccagaagaatcaaaacccggattcaggaaccattagtgttgaatcagcaaaagaaaaaagaaggaacaaacttcccaacttcctgctatcagtgagactcaagtatgtgaagctagggtaccattacgtaatctccaatgcaatgtaccttctgctcataccccttctaggcatagcttcggctcatctttcaaccctttccatcaaggactttctccaattatgggagaatctcaagttcaaccttgtctcggtaaccctatgttcaagcctcacgngtgttcctcgccaccctctacttcatgacccgtccaaggggggtgtacttagtagattntgcatgctacaagcctgacgtggtttgcacgtgcacgcggg

SEQ ID NO: 108510 - DNA, 424 bp, Glycine max
  Clone ID: PAT_MRT3847_6899C.1
gaacaatgttgtgtcacccaatcctgcagccagaccatccttcacagaaattgccagtcgattgcgcataatgtctgcagcagcagctagccaaaccaaaacacagggcaataaagcatctaaatgagttacattgttatcttggcatctcttaatggtgatccatggaagtaaattatacaaggttggttccatacactgtagggtttttttcttcttctttttcttaccataataatccaatactacaagtgcagagttgttgtataccaatgttttactacaagtgcaaaaaattgtcattcaattcctgtatattggatattgtttttcttgttcctttataaattcttgtaattgcaaacattataatcggtattactcgtctagacggcagcgttagtgatgtgctgctagatatttc

SEQ ID NO: 108511 - DNA, 187 bp, Glycine max
  Clone ID: PAT_MRT3847_689C.1
ggcctttgaaagaactggtccaaaactaagaagggaccaaaaaaaaaggttgggtccccttaaggggcccaccaggggttattccttatttcggaagtgcctagaaattggattgggaataatgatatcttgggtggatcaaggtaatccctggggggattttgaggcaatctcaaatttgggggat

SEQ ID NO: 108512 - DNA, 428 bp, Glycine max
  Clone ID: PAT_MRT3847_68C.1
tctacccacgcgtccgaatgcattcaacattgagtttttttaacaatctttacaattaggtttcttttaagggattgtaataaaattggactatatcatgctggctgtatttatctcagtgcacaatatgaccttggaatcttttttcctatgaatatcaagttaacaaaatgtaaaaataaggaacatagagctgcaaattgtacatgacattccatccctcaaaattgttcgaaacatgagaggcagtagtttttgactaacagggtgtatttgtttgatttaatctggattttgtagcagtgttgatttattttatttttaataactgagatgttatgatgggtttggatcaggccctgatttgctagatttctttttaacaatcctaaagtgcatactttagaatttgctgtctgaaacctttg

SEQ ID NO: 108513 - DNA, 218 bp, Glycine max
  Clone ID: PAT_MRT3847_69000C.1
ccgtgatgggacggatgatcattaggaccaactggaacgaatggcagcgctgcgtggctttaccgacatcaccgctagcacatatcagattcgatatatataatctaccctgctctgacgctggtgaacacaacatacttgagagtgcaaactttgcgtttgggagggcgattattgccaacaaacatatggtgttctggaaccgcgtactatatcac

SEQ ID NO: 108514 - DNA, 271 bp, Glycine max
  Clone ID: PAT_MRT3847_69001C.1
gaaaatatgttaggacagcactgtttggaaattctggggaaatcccaaacaacagtcattttgggagggcccagacaaaatacctaacaacaaaactttggatttacataaatatattcaaggggaaatacttttacctactagtcttaagtttccaacataaaacccaacaaaaagcccataaagcaataagaattgataataaaaggaatggaagtccctttctgccaactcttttcatagttccagtggctttacctgatgcagcaat

SEQ ID NO: 108515 - DNA, 408 bp, Glycine max
  Clone ID: PAT_MRT3847_69002C.1
ggcgcttgcgaagaagacatccctctggctctctcactcagttgccagactcctactgtgaagaagcttctttttggtcactcacaacctaaaggctacttcttctgctttaaaatcaccagctacatgataacagggcctgaaacgaatgaactgtacagctactcttgcagcagattcttggcgtcaggcactggcctgaacgaagacaagtactctgtgctctctccgagagagaggcagggttagccctactcgctactttgtcgtagaggatgttggctgggatgagacccatctttatggctctggggttcagacttcctacagcgggagatctcaggagaggaacaacgacctgagaaacatgtgctgctgaatttggaacctcctaccgtaacagaactg

SEQ ID NO: 108516 - DNA, 307 bp, Glycine max
  Clone ID: PAT_MRT3847_69003C.1
aagaactatgaaactgctctggttgacaaagtggcctcaagtcattacctccatgatgaactgggctattactgtggagaatcagcatgagaaccggatatggaagacgaggttctggctgagagtgaaacacaaaatgtagctgatcctgacaaagatgctacactaggattggctacgagaggttaagagtgcaggcggcgaactacactttaacctcctgtaggcaaaggtgctgatgacggatcatccagtgctcgggtcaatcagaatcaggaaacgcgaacagatggtcatcatatattgt

SEQ ID NO: 108517 - DNA, 627 bp, Glycine max
  unsure (1)..(627): unsure at all n locations
  Clone ID: PAT_MRT3847_69004C.1
tatgggacgtcgcatggcacggccgtaccgtaagccttgggnatccctctagnaggcgggccgcncnnctttttttttattttattttattttattttattttatttttatttttttttttatttttttttttttttttttttttttttttttttttttttttttttttttttttttaaaaacaaacccccccaaaaaaaccccccgggaacccccctttaaaattcccccaaacgggaaaagggcccaaaacaaaggggcaaaaggccccccccgtttttttttaaaaaacccccacccccccctaagggggggggaaaagggggggaaacccgggtcttcccccccaggggggggggcccccccccccccccggggaaacccccggggggagggcctggggacccttcccaaagggggggcccccccccgaaacgggggggcggaaaaccccctaaaggggcccgggggggccctgggccagggcccccgccccaaaaccccaagggatccggggggcctcatggaccaaaatggccccgggggcccagaggttttgggtttttgggggggcgccccggggccccgggggggcccggaaaacgggggggggggggggggggcccc

SEQ ID NO: 108518 - DNA, 209 bp, Glycine max
  Clone ID: PAT_MRT3847_69005C.1
gacacacatacggagacccagattttgaatttattaacggcatcatcattatcgtcactagcctccaccttttcttcaatgttacattacatgttaaccggaaactccaagggtcactcgactactcaattcactaacaaaaatgtacgctattaggtcctcgcttaagacaatgcttagaaacttgcaaagattattttgaaggttga

SEQ ID NO: 108519 - DNA, 800 bp, Glycine max
  Clone ID: PAT_MRT3847_69006C.1
ggtagtagttttggtagcccaaagaaatagccactaaaattcattaaaaaccactgtttcaatctgcagtcaagattgtgcgttatggaagatcacgaaagccagagaaaagtcagaatcctgtgcctccatggattcaggaccagtggtgaaatcctcaagcaattagtcttaagatggcctgaacctgtcttgcaaaagctggagcttgtgttcctcgatggcccgtttcctgcacagggaagatctgatgttgaaggcatttttgaccctccttattttgaatggttccaagccaatgaggagttcactgagtataccaactttgaagaatgtttagcatacattgaagattacatgctaaaaaatggtccttttgatggtttccttagcttctctcagggagcaattttagcggctgcattgccaggaatgcaagcgcagtgagtgatgactaaagggtgtggcacttgggaaggtggacaagatcaagttcctgattgagatatcaggagccaagtttggtgaaaacaggtttggaatgcctaaactggcttccaatgcattttcaaaaccaattgattgcccgtcccttccctttataggagagaaggatttcatgaaggcagagagcattgctttgttggaagcattccaagatcctgttgtgattcccccccctaaagggcatacagtccccaaacttgatgctatcggtgattggtgcattgaccgttcgttgtgccctctaccttgtttgatgtttcagtgtgctatggaaatttgcatagtatatactg

SEQ ID NO: 108520 - DNA, 482 bp, Glycine max
  Clone ID: PAT_MRT3847_69007C.1
gacccacgcgtccgcccagacagcctgccgtggaacatgcatgatgtactttggcactgccgttgggctgatgctcggtcgaaggcgcggtgtccattcttgcgatccatacgattctacatgaatccctagtacgactacgttttaccgcctgtgattataagtgctttacccgtctgcgccatcatgcttgtgattgagacttgcctacgagtattatttggacagctatgttagcacaattattatttagtctcaaaattgagacaccgtagccagatggcacgaccactatgcttcctacttcggctactgttgcgctgggagcgctcttagacgatccctttcaccttcttccgcggagctcacggaagaattatggtctatgtcctgacggactcacaaagctacgaccctgcgaagcacttggtgtacgcgatagactgcaatgcgagtgctcatgctaacgagctatttggagg

SEQ ID NO: 108521 - DNA, 873 bp, Glycine max
  Clone ID: PAT_MRT3847_69008C.1
gagcattgttgtacatctgttgccaggcttaagttcagttctttcttcatttctgtaaatgtaggctatgacaccagagttcgggaattaccaaaagcaggtacgtagcaactgctcagcatttgcacagagtttgttagagaaaggctacgaacttgtatctggtggaactgacaaccatttagtgttagtgaacttaagaaacaagggcattgatggttctagggttgagaaggtactggaagcagttcatatagctgccaataaaaatactgttccaggggatgtgtctgctatggttcctggaggcattcgaatgggaacccctgctctcacatctaggggatttgttgaggaagatttcgaaaaagtagctgaatactttgatgcagctgtcaagttagccttgcagattaaggaaaacaccaatggtacaaagttgaaggattttgtggcagctatgcaatcagatgaacaagttcaatctaagattgctaatctccgtcatgaagtagaggattatgctaagcagtttcccacaattggttttgacatagaaacaatgaagtatggcaaatgaagatgacatttggaacttcttgtggagtattatttggaaacttctggaattaataacacggaattagatgtgttgttcaatggattgtaccggagtcttagatgaaaatgagaattatactatcaatggtttaaaaaaaagagaaaagggagaaattccctttcagcttgagaaaatatattattgatttcatggtgaaaattcctcgtgatcgccaatgtactactggtgtagcaaaaaggaggtcgaacacttgtggatttttctatttggtgaatttgtgccataatttg

SEQ ID NO: 108522 - DNA, 630 bp, Glycine max
  Clone ID: PAT_MRT3847_69009C.1
ccagcgtccgcaaaagcaagtacttagcaactgctcagcatttgcacagagtttgttagaaaaaggctacgaacttgtatctggtggaactgacaaccatttagtgttggtgaacttaagaaacaagggtattgatggttctagggttgagaaggtactggaagcagttcatatagctgccaataaaaataccgttccaggggatgtgtctgctatggttcctggaggcattcgaatgggaacccctgctctcacatctaggggatttgttgaggaagattttgaaaaagtagctgaatactttgatgcggctgtcaagttagccttgcagattaaggaaaataccaatggtacaaagttgaaagattttgtggcagctatgcaatcagatgaacaaattcaatctaagattgctaatctctgtcatgaagttgaggattatgctaagaagtttcccactattggttttaacatagaaacaatgaagtatggtaagtgaaaggcgacagatggaacttcttctggagtattatttggaagcttttggaattaataacaacacgttgctcaatggatagtaccggagtcttggatgaaaatgagaatgatattatcaatggtttaaatgaa

SEQ ID NO: 108523 - DNA, 262 bp, Glycine max
  Clone ID: PAT_MRT3847_6900C.1
ctataggcttgatactaacatagacagagtggaagcttctggagtaaatgacatggatctactagagacgactagatactgataggaattattgctgattagaatactgctgcctatgatattaccactttaggcgttattaatgtaagatattgtggtaatgagaccacagtgaaatttgacctaagagttattgatgatgatcaatctccatctcatcaaaatataggaattgttcgatctacctgaggctggtgccaac

SEQ ID NO: 108524 - DNA, 2198 bp, Glycine max
  unsure (1)..(2198): unsure at all n locations
  Clone ID: PAT_MRT3847_69010C.1
aaaatatctggccgcaaaaaaaaacacacacatataaatcacccaccaacctcttccgcacccaccccagtctcactgtcactcaccgaccctccaccgcaacccatatataaataccacttttgaacccaaccaaacacgcgcgatcgcaatggccatggctcttcgcagactcaacaaacctttctccaacgccacttccatttatcgccaggtataaacatacatttctttttattcattctcttcataacactctgtgcttgcttcgttgttgcagtcctcttcgctctccgctcacgaaaaacacaaatctcgcgccgattggataaagcagctcaacgatcctctcgaggccatcgatcccgagatcgccgacataatcgaactcgaaaaggcgcgtcaatggaaggggttcgaacttataccttcggaaaatttcacgtcgctgtcggtgatgcaagcagttggatcggtgatgacgaataaatacagtgaaggatatcctggtgctagatactatggaggaaacgaatacattgacatggctgagaccttgtgtcagaagcgtgcacttgaagcttttcagctggatccagcaaaatggggagtcaatgtgcaatcattatctggatccccttctaacttccaagtttacactgctttattgaaacctcatgagagaattatggcacttgatcttccccatggtgggcatctatcgcatggacatcagactgacaccaagaagatatcggctgtatctatattctttgaaacaatgccatacagattgaatgagagcactggttatatcgattatgaccagttggagaaaagtgcagcactttttaggccaaaattaatagttgctggtgctagtgcttatgctcgcctttatgattatgcacgtgttcgcaaggtctgtgataagcagaaggcagttctgttggctgatatggcacatatcagtggattggttgctgccggtgttattccttctccttttgattatgcagatgttgtaacaaccacgacacataagtcacttcgtggaccacgtggggctatgattttcttcaggaagggtgtgaaagagataaacaaacaagggaaggaagtgttgtatgactatgaagacaaaataaaccaggctgtttttcctggacttcaaggtggtccacacaatcacactatttcaggcttagcagttgcactgaagcgggctatgacaccagaattcaagaattaccaaaagcaagtacttagcaactgctcagcatttgcacagagtttgttagaaaaaggctacgaacttgtatctggtggaactgacaaccatttagtgttggtgaacttaagaaacaagggtattgatggttctagggttgagaaggtactggaagcagttcatatagctgccaataaaaataccgttccaggggatgtgtctgctatggttcctggaggcattcgaatgggaacccctgctctcacatctaggggatttgttgaggaagattttgaaaaagtagctgaatactttgatgcggctgtcaagttagccttgcagattaaggaaaataccaatggtatcctacctctacatctgaattgttatatttgcaaaagctaacgacgtacctttcttgatgaacaaagttgaaagattttgtggcagctatgcaatcagatgaacaaattcaatctaagattgctaatctccgtcatgaagttgaggattatgctaagcagtttcccactattggttttaacatagaaacaataaagtatggcaaatgaagatgacatttggaacttcttgtggagtattatttggaaacttctggaattaataacacggaattagatgtgttgttcaatggattgtaccggagtcttagatgaaaatgagaattatactatcaatggtttaaatgaaagagaaaagggagaaattccctttcagcttgagaaaatatattattgatttcatggtgaaaattcctcgtgatcgccaatgtactactggtgtagcaaaaaggaggtcgaacacttgtggatttttctatttggtgaatttgtgccataatttgaaataaattaccataattcctcctctatttaaaaaaaaaaaaaaaaaaaaaaaaaaaaaaaaaaaaaaaaaaaaaaaaaaaaaaaaaaaaaaannacccccc

SEQ ID NO: 108525 - DNA, 235 bp, Glycine max
  Clone ID: PAT_MRT3847_69011C.1
gaaaactcaaggggaaaatcgtaaaggtctcttgccacttcaacccaagggggaagccacatgtcactgccctagcacattgtttttgctcaaggcttttcatttatgtacgttacttttgtttaacgggacctcataatcctttagacctccccaaaagagaacgagtcatgggaaccattttgccccctatatgggccttcagtaattttttcttttagggggtatacggggg

SEQ ID NO: 108526 - DNA, 2391 bp, Glycine max
  Clone ID: PAT_MRT3847_69012C.1
cattaagctagctttgagttatgccctgtctgttctcaattttaacatcttttcgaagcctatgtaaaactttatgttgggccacctagagatttccagtccagcaaactttatgctcttgagacggcttgagtgtgagaatgatctacattggttgggtatatagtcaaagtaccccatataatgacttcagctatactcttcacttgagctcgctttgaaggttgagttaggctcatttttgttttcatttgtaaccatttcaaagttgggtaacctgaaaaaatgcaatgtgtccggtgcctactggtaggtgccatgtggtactgaacgaagtgaatgtccctatcctccctgcttttcgattcgcagggcccacacatattgcaaaaaaacacatacaaacaacctccaacctccgcacccaccctccctccctccaccgccaacccgtatataaatcccaccttttgaacccaaaaacccaacactcgctataatcgcaatggccatggctcttcctcttcgcagactctcctccaccctcaacaaacctctcgccagcgctacttccatttatcatcgcatgtcctcctcgctctccgctcaggagaaagacaaatctcgcgccgattggataaagcagctcaacgatcctctcgagaccatcgatcccgagatcgctgacataatcgaactcgaaaaagcgcgtcaatggaaggggttcgaacttataccttcggagaatttcacgtcgctgtcggtgatgcaagccgttggatcggtgatgacgaataaatacagcgaaggatatcccggtgctagatactatggaggaaatgagtatattgacatggctgagaccttgtgtcagaagcgtgcacttgaagcttttcggctggatccagcaaaatggggagtcaatgtgcaatcattatctggatccccttctaactttcaatgtttacactgctttattgaaacctcatgagagaattatggcacttgatcttccccatggtgggcatctgtcgcatggttatcagactgacaccaagaagatatcagctgtatctatattttttgaaacaatgccatacagattgaatgagagcactggttatatcgattatgaccagttggagaaaagtgcagtactttttaggccaaaattaatagttgctggtgctagtgcttatgctcgcctttatgattatgcacgtgttcgcaaggtctgtgataagcagacggcagttctgttggatgaaatggcacatatgagtggataggttggtgcaggtgttaagccttatcctattgagtatgccagatttggtttcaacctcgacacaataaatcacttcatgtaacgcttagggctaggactttcttcggcaagggtgtgagaaacctagagaaacaataacacggaattttagcagctgttcaacggttgcacacagtgtgttagatgaaggcgacaatcatgttttcgatggaattaacgaacgtgtagtgttggagatcccctgaaacaaggagaaaaaagattattgagttcatagggaaaattactcgtgatcgacagcttactattggtatagcgttaaggaggacgagcctgcgagggtttctctagtcggtcaaatggccacctagtctcacacaacttacgaaactagggtggaagatgttcaaaaagtagttcatatagctgccaataaaaataccgttccaggggatgtgtctgctatggttcctggaggcattcgaatgggaacccctgctctcacatctaggggatttgttgaggaagattttgaaaaagtagctgaatactttgatgcggctgtcaagttagccttgcagattaaggaaaataccaatggtacaaagttgaaagattttgtggcagctatgcaatcagatgaacaaattcaatctaagattgctaatctctgtcatgaagttgaggattatgctaagaagtttcccactattggttttaacatagaaacaatgaagtatggtaagtgaaaggcgacagatggaacttcttctggagtattatttggaagcttttggaattaataacaacacgttgctcaatggatagtaccggagtcttggatgaaaatgagaatgatattatcaatggtttaaatgaaagagaaaagggagaaatttcccttcagcttttcaaatatattattgatttcatggtgaaaattccttgtgatcgtactgctgatgtagcaaaaaggaggtcgagcatgtggattttgctatttggtgaatttgtactagtatttgaaataaattaccttaattcctcctcaatttacaaaccccatctctctacgtctatctaatttccataaatttgtaaaa

SEQ ID NO: 108527 - DNA, 269 bp, Glycine max
  Clone ID: PAT_MRT3847_69013C.1
ccgggtggcccaccccttccggaaccttttcttgggttgtgggaggcccccaaggggcccaccgttccttttagtacctttgccaggagtgggtggattgaaccttgtttcaaaagggttggtagtgtttttccagggccttggttccttggccttgtcttcattcttgggtcctcctaagctatgcccccttttgttggccctattcatcacttctttcaaagcggttcacctcttcttgctctcttttttgtttttgcccccccccc

SEQ ID NO: 108528 - DNA, 462 bp, Glycine max
  Clone ID: PAT_MRT3847_69014C.1
ctgctgctcctgctggtgccgttccggatttaccgacgcgatcccactcctccgttttttacgagttaattgtagctggatcacatttctttgaagattttccttaatagggatatcaagacacacccagagagattgatgcctgtttgatacacagtatcaacccttagtgtgtcatggctcacgctcagaggggtacatccctgtctaaatggtctcttgctgatggcgaaactcctaggggtaccatgatggaccttataggtactctatgtaaaagtgcacttcccagatacacagttggaggaaccattctgcgttgtgctctattggcaaattttttgacagagggcaactttcgagcgagagttgatttgcagcgcccttatctcattagcggcatgatctatatggtggccaccgttggtattcctgagaatacaggtatagcattggcctgtg

SEQ ID NO: 108529 - DNA, 266 bp, Glycine max
  Clone ID: PAT_MRT3847_69015C.1
tggtatacaacagaaactacttttcgttgtttacctgtactaagtagttttcttacctaaaaatagatccacagcgaaaactagtttacgccgtgtatttgttttaaatcaatggtttgtttttgaattgttgattaagttaatattttttcaatacagtgtaccgcacacacatgatatattagacacgattgacaagtcacgggaagcttctattcatagcagagatatggcagcgacgcaagagcgggaagcttccatgatga

SEQ ID NO: 108530 - DNA, 1867 bp, Glycine max
  unsure (1)..(1867): unsure at all n locations
  Clone ID: PAT_MRT3847_69016C.1
gacccatgcgtgaaatgcttattattacaaacaacagaaataacaaatcaaaatactcaaaggatttaaaatgacagaggccgacacagatgatgttggtacgaagtgtaacttctcgttcgcattcaacaacatcaatttctcagaccgaattctcaacattgaggttatacccgaccctcatttcatccgcgcccaatcccattctctctctaccctcgctccaaatcgtaagagacgcagactctctcttatgaaagccaatgatgtcctcttgcaacctgaggaaaaattaaattgtaatttaccagatgcagaggaagttgtggcaatcactgaggcatcactttcaggtgatgaagtttctcatggcaatgattcatcattgggcatgagttggtcaaaagttcttagagttaggaccatacagataagttctccaattcttgcagaaaaaagccccttcttttacaagttgttttcaaatgtgacgcgagagtctaagcaacaaaatgtgactcttcaaatccatgattctgaagaggctgccgttatggacctacttaattttatgtatagtaatactttatcaagaacgacatctgctgctgtattggacgtgctgatggctgcagataaatttgaggttatgtcatgcataaggtattgcagtaggatgttggggttaatgcctatgacctgtgagtctgccttactttatttggatcttccttcaaacattttgacattagatgcaattcaaccactggtagacacagcaaagttgtttcttgccacacactacagagacataacaaagtttgcagatgaactgctgaatttacccttggctggcattgaagcagtgctatctagtgatgacctccagatgccttcagaggatgttgtctttgagtttgtgctcaagtgggctaggatacattatccaaaaattgaggaccggaaagatgtccttgaagcacgccttggtcgactcatccgttttccatacatgagctcccgaaagcttaagaaggtcttaacatgcaatgacttccatcctgactttgcatcaagggttcggctcgaggctctcttctacaaggcagagacaccatatcgacaacggtctcttgctgcacaagatgctggcaccacctactctcgattggtggagcgagcttacaagctccgccatgtgaaggtggttgaatttgcattgccccgtccacggtgtgtggtatacctggacctaaagaaagaagaatgtgcacaattttttcctaatgctcgaatttactctcaagcattccccctaggggagcaatggtttttcttgtcagctcgctgcaatatggaccagcaaaatgcatctcattgctttgggcttttcttagcagtgcaattcaagggatcagtatctcttcatgttgactatgaatttgctgctagatcaaaatcgactgaggagtatataagcaggtgcaagggagattatactttcacggcgggcaaggctgtagggtataggaacctgtttggtattccatggactgcattcatagcagacgatagccattttttcatcaagggattacttcatctaagggctgaacttactattagacaatgactcctttgtaggattggtgctctctactttctagcttttgatgactaatgtcctatatttttctgtctctaactgcattaaggagatgaaagaataggatttggtgtaattatacatactaataatttgattgtagaatagttccgaactggtgtagacattgactgtcatgacattgcttactcgaactggtgtaaatactgaacgatgtcacactatcacattcataattna

SEQ ID NO: 108531 - DNA, 1033 bp, Glycine max
  unsure (1)..(1033): unsure at all n locations
  Clone ID: PAT_MRT3847_69017C.1
gcttccntgtgtgccatcgnaagctgatagtatagagggantatatgacactttnaaggagtgtgncagtccattagccaaatcagctggaggaattggtgttagtgttcacaacattcgtgccacaggaagttacatccgtggcacaaatgggacatcaaatggtattgttccaatgctgcgtgtgttcaacgatactgctcgctatgttgatcaagggggaggcaagaggaaaggtgcatttgctgtgtacctggagccatggcatgctgatatatttgaattcttggatttaaggaaaaaccatggaaaggaagagcatcgagctcgagatttgttttatgctctttgggtgtctgatctctttatggaaagagttcagagcaatgggcaatggtctttgttttgccccaatgaagcgccaggtttggctgattgctggggtgaagaatttgagaaattgtacactcaatatgaaagagaaggaaaagcaaagaaggttgttcaggcacagaatctctggtttgaaattttgaagtcccagatagaaactggaactccttacatgctttttaaggacacttgcaataaaaaaagcaaccaacagaatttgggcacaatcaagtcatcaaacttgtgcactgagataattgagtatacaagtccaacagaaacggctgtgtgcaacttggcatcgattgccctgccgcgatatgtaagagagaagggtgtgcccatggaatctcatccatctaagcttgttggaagcagaggctcaaaaaaccgatattttgactttgacaaactgggagaggttactgcaatagtggcaacaaacctcaataaaataattgatgttaattactacccagttgatactgctagaagatcaaacatgcgacaccgacccattggtattggagttcagggtcttgccgataccttcatactactaggtgtggcatttgattcaccagaggctcagcagttgaaacaggatatatttgagactatatactatcatgcactaaaa

SEQ ID NO: 108532 - DNA, 349 bp, Glycine max
  Clone ID: PAT_MRT3847_69018C.1
gccgaagagttcaagatttttttatttttaatttcttgtttaaccagtgattattctatttagggtagggatttcgtaccaccaaagctttaatttagaactcctacacttgtgtttaacacactgcgagaaaggccatgatttttccgggccagaggatttttatcaaatttgtgaaattgaaccactaacggcttgtttttatacaccaccaaacccctggatccattaccatgatcaaggcatatccccaggtccccacattcgtcctcctcagcttggtgtggacagaacacaaacttatattttttgaattgatactccaaaactcttttaagtctaaaccaac

SEQ ID NO: 108533 - DNA, 212 bp, Glycine max
  Clone ID: PAT_MRT3847_69019C.1
cggcaaaacgaaaaattaatattttattatagaaattacatacacaggctacttaggagacctattctaagataaaaaagctatatcatcctttaaatccaaaacaatcattcttaaagggatctgataacaaaataccccattgtcgaaaaaaaaaagcctttttttttaaaaaaaaaagaccgcttagcccgcttttttaaagcgaaaaa

SEQ ID NO: 108534 - DNA, 424 bp, Glycine max
  Clone ID: PAT_MRT3847_6901C.1
gtttcccgtcatcactgtatgacgtcctccttctttggggggggggggggggggaacagctaggcgagaattgagcgataaagcgaataccggtgcacgtctgacggaaagaatatactgtgaatataaccttaagaggggcgagtacgaaacgcttaaaccggtaatatactccagattagaccgaccgcaacttgaagggacaacgtgagaaagtggatatgaaaagatggagtcgtaaataaatgataatcttacaaccaaaatatcaaagaaatacagccagaggatgggtggcagtgtatccgtacgtgatatgatgaggtgtcctggtggtaaatagggctataattggcgtaattttggtggtgagggctggttgcagcatgttagtacttagagtaaagcattggtgggccaacga

SEQ ID NO: 108535 - DNA, 396 bp, Glycine max
  Clone ID: PAT_MRT3847_69020C.1
cccacgcgtccgatctccccagtccttcgctcaacccaacactacagctaaatatgaacgttgggttgcaccttacatctgatctaactggtcttggatgtccagaggatggtccatataatgattacgagaccaatatgacaactctatgatgcaaccgtggtaggaaacaaccacctaacttacaccaactgcgtaacatgatgaaaatcatataccttggtcagaccacctatacaacgacaggacagtttctctcctggacaaggaagggtgctgtaagggaactagactgcacgagaggaaggtgcatttgaccggatcaaagccaccatgatcatgaacactccttttgactccaaccacagcagccataatgtgcactggatgatcaat

SEQ ID NO: 108536 - DNA, 217 bp, Glycine max
  unsure (1)..(217): unsure at all n locations
  Clone ID: PAT_MRT3847_69021C.1
caaagncgatgatgatggggaggtcatcacatatcatgtaggggaatttggagaggaccataaaggggattgggttaaaatcaatgtcctggagatgaaagcaacatgcaggtgccaaaagatagaagatacaggcctgctaagaccgcacgttgtggcagacaaaagagaaaccaatgtttttactcgcccatctcattatatattgaaacggtgg

SEQ ID NO: 108537 - DNA, 253 bp, Glycine max
  unsure (1)..(253): unsure at all n locations
  Clone ID: PAT_MRT3847_69022C.1
tttttttttttgtgtgtggtgtgtgaggtgtttgtagtgttattttggttttggttttaggaaagctggaaaccgtacatccaaggtagtgacacacgtgtgcagagagactagtgtattggacacaaacagattaccttctttatttatgagccaattatcacaaaaccactgcgtcgctgaattacaaaattgataactcataaaaacttgacaaccacaanangaattttcttgttnttatatnaanagg

SEQ ID NO: 108538 - DNA, 521 bp, Glycine max
  Clone ID: PAT_MRT3847_69023C.1
agaaaagaatggggacgcctaatagccttggatatcaactacatggtccttatactggaccctaataacaaatgggcgctaatctaacccttgtgagggaggacctttttaaaatcgacaaactaattatcataaagggatgggggcagggaaccaccctttgaaattcgaaacccaaccactactatggaaaacaattttccttatcccacatcccccaaatgttcatactggtataaccctctctactcggagacatcattatactccccctcctacagaataaccagccaacaacacattgattcaacaattgggttttcaaaagaacaagctagttaaacaacacacaaatggtaatcacaggttaatatccatcatacgtgatcttcctcatgggcattgacttcagacttggactcgtgagactcgacttccgtcgaaatcatcccctcctaacacattgaactatctagcgaaagcaataaatgccttacattacatgatactgttaaataaga

SEQ ID NO: 108539 - DNA, 204 bp, Glycine max
  Clone ID: PAT_MRT3847_69024C.1
cctgttcggtcagtctcagagggcacgagagcgttctggcgcctagacagagtgagaaaccgagcagtgggttgtcgtgttgtgcagaaacagatgatctccctgacgtgtatgaggatcatggggttcttggctggcatgcttcaacaatatcgagatgcagccttaggagctcgctctttggtaaccctatgacgtgctagt

SEQ ID NO: 108540 - DNA, 500 bp, Glycine max
  Clone ID: PAT_MRT3847_69025C.1
ggttggttttttttttttttttttttttttttttttttttttttttttttttaattaaaaaaaacaaggtcttataatttattgattggacaaaaggccaagcctttgtctcaatacaacattacaaaattactgcaactgcatgcaaactggaataaaaacacaggtctttaatttattcagcccaacccccccgaatatagagatgatgatttttgatgccccccggttttaacacaggaagagggttaaaaaaatggccgcaagtcccaaaaattaaaaaccccctttttcattattggcctgggggcgggagtttcaagggaagcaaccttccctactataccgaatacaaggggggcttgggggccaagccatggggcaaaacctaaaggacccattacatggggggcttgggggcaaattccaaggggcccaaggcctataactgcccccgcgggtacatttaaaaacgggattattaggggtctgggtacccc

SEQ ID NO: 108541 - DNA, 325 bp, Glycine max
  Clone ID: PAT_MRT3847_69026C.1
ggaaatatcaccatcaccacctggattcctaatttaaaccttcctgatttggggggaataaaatccaaaatggcattattacctttaatgggaaccaattccagccgagaggagggcttcaccaccctgtcctttatttaaccaaaagccaggggaagccaaaggacttgctttggtttaattaaaataaaaaccagttttggcaggaaaccattagttgttttttccttacaaaagatcctaaagaaaccaaacattaccaattaaaatgctgcactgaattgcccgacctttaaccaaacacccaaaccccaaattcaataat

SEQ ID NO: 108542 - DNA, 378 bp, Glycine max
  Clone ID: PAT_MRT3847_69027C.1
cggaattcggctcgaggataaagaaggatgacccttgagtctattgttttatctgaacaacggaaacacattagggctaggttcggatgcaacctacagcattctgattagcaatgtgtagaaacatacttgtagactctactctgaatgggatcttcttcctccaaatacaaataaagatcccgaggcttaattaccataagattaggatgacatagaaatttattcctgatcccgaggataaaaaacccaaagggtattgattgacatcccaaaagagctcccacgattcttgaaccccaaaaattctgaaaatttggtatgaatgaggataattggtggagtggacaccccccctacccatttgccaaatccctg

SEQ ID NO: 108543 - DNA, 340 bp, Glycine max
  Clone ID: PAT_MRT3847_69028C.1
agggacaccaaaaacaattaataaagatgagtttgaagaacaacatggtggtcccaaaggtgtgtttgttgcttcttggcggtgtgggggttacacctcccaacatggaagcgagcttcctcacaaatgatccgtcatcaagttatgatgatgatcagtattcaaaaccatgccgtgatctctgcatgtccacaccctcaatgcctcctcaatgcacccgtgaagatatcacgccgaactcataccacccacattgtaacagctgtatgtccacactcccacagccacgacagtctccgtgtggtgacaccaacgaccctcttgccacacaccctgcccc

SEQ ID NO: 108544 - DNA, 273 bp, Glycine max
  Clone ID: PAT_MRT3847_69029C.1
tcacgaaagggatcttcacagactccaacttgcggaaatttccgaggctgggtttacctccaagatcagataaatattcgggaaaattaacaactctcattagacacggagaacgtgactcagccgttatactcaccgctttcgatatatcataggactgtaaactccacaatcactttgatgccgcgtttcaaggttccatcacatgggaatctaactctgtctacatcaacatctctatgatcagtgttcgaatcagttacctcaatgcca

SEQ ID NO: 108545 - DNA, 469 bp, Glycine max
  Clone ID: PAT_MRT3847_6902C.1
ggaaaaaaaaactaggggctacccccaaagcaggggtaacactccagaaaggggggtatgaactaaaagcccccctaaaagattacaggcccgggggcccgacagatatacccacaaatcccgcccccaaagggaaaaataagggaaaagaacaaaaatggccccctaaacaccgccagaagggagaaattttaaaccggcccccccccgtgtttgcaaaaaagaagggcagggccattgtttgcccgtttttttcctcagggtccccccccaaaaaacccaggccaatggccgcttggttttcccccggggaacccgggagggaaaaaccaaggggggggccccggggaaaacccccgggccaccacgggggggcttcacaaaaggtccccctggaggaaaaaaacccgcccggggggggccgggggttcttagggggacccaaggggcttaagcctcccagggggga

SEQ ID NO: 108546 - DNA, 572 bp, Glycine max
  Clone ID: PAT_MRT3847_69030C.1
gggataaaaaatgcccatcccaaaaggtggttaatcgcgtcaagcaaaaacccaatcaaaaaccaaatcctctgagattacctcgttttccttatcgctccgctcacattcaattaataacgcgtatgagtgacatctggaacgattgaagagagaaatacagcggcaataagaacaatggatccacacccccttccattcatagatgctctgcgaaaggattacaaaacgaggagacgcggaggatgacaaggattaagaagctggatgcccagcttactccatataaagagcagattaataaaactagacctggtcctgcccaggaagctgttaaagactacagctcatgatagttcttaagcaaaaactattgcatgaaggccagcttgacatgctgtacaatcatgacggtcaattctagatcaagttcaataatgctgctgatggcattaaagatgctcaacatactaccctttaaggggcatggctcagaggcggagcttaatctctaccctgtaaggaacctgctgcctacctcatgggaggtaggtcatgacatgacagctttg

SEQ ID NO: 108547 - DNA, 323 bp, Glycine max
  unsure (1)..(323): unsure at all n locations
  Clone ID: PAT_MRT3847_69031C.1
tcatcactgtatgacgtcctccttctttggggggggggggggggataccctaagaaccaggggtagaagcacacataggtatggcacaggccccagatgtctaaggaaggagatagagccatcataagagccatgagcgtaaaaaccgtaaaccaatgaggataccggaaaccatcgcgtttggccgtgttgggccgtgtatggggtgggcatggacccaaacccnagaagtgggcagaggttgagaatacccagttgcccccagaaaagccggtggttgcggagatggccagaccaccgcgtaggaacctggaacgttggaa

SEQ ID NO: 108548 - DNA, 725 bp, Glycine max
  unsure (1)..(725): unsure at all n locations
  Clone ID: PAT_MRT3847_69032C.1
cttctgcttttttttataaactatgaccaggggttgttttccttggtgagaggatggaatagtgatgtgcatagacggtatactcactagaaacagactcctatgttccaccgagtgatgcctactggatttcggatttaccccaccgacagaggaacttctcatggagtatcatgagcccaaaggtcgctgggcaccattatgtgtgttgcatatattggcgaatatggctgggaccggtgcgacccatggggtcttccaggtagctctattttcggagaaaaagagtgttgctttttcagacccggagtacaggagatacccgaacgggtctcgacccaacacaggatctgggtcggggtattggtaagcctaccgaaaccaacgagatcatgaccacacgcatgtcctaacgattacataagaaaagtcctagtgctctactttggcaaaaacctcaagggcaccataaccatttgtgatcatgcacgagtatcgtctactcgactcttcccgaaagaacactgtcccaagctgagatgactgtgttctgtgtcgnatatacaacatgaactgctgtgctcagaagactgcgcagaacggcgtggatccgagcgacgagctcactctatacagcaacggttactctctctcttcttcgacccagctggaggactatctggaatctctgccatcgattgatgaacggtgtttcacgatgccac

SEQ ID NO: 108549 - DNA, 900 bp, Glycine max
  Clone ID: PAT_MRT3847_69033C.1
cttctacctttcctccttttgtgttcgtatttcttggtgtccgttgagcgcctgtccctttcccctttttgtgttcgtctagggtttctcaaatttaccaattttcgacacccattgtgtgatttgcgctcggtgtccttgtttatctgttcagatgtggtgggtcgtctattttttcattttcattgtgcaatctgtggaagaaagagatcgtggtctgcaatcgcattgtgtgaatagttgtgatggagaattcttcgtcttcgcagtcgagcaaggtgacagtgttaatgaatatcaatgacatcttgtgtcgttgtggtgcaccttgtcgtattcacccttcatgaaatacacaaaagcctagaaggaagtttgttagttgcagcaaatctcgaggcgaatctactcgagtatgcttttttttcctggtcagaattggtagatgaagtggagtagaaggaagaattgaatgctttagttgcagcccagttggcagacattaaggaattgcaggataaagttgagaaaatgaaggatgatttgaatgaagctagtaggaaggttgaattggggaatgaaatgttagtggttgtgaggaacaagagtgacgaaaatggtgttgaatgtaggaaaattaggttttttgtatgcataatgttgcttttgttggttgcaagattgatgtatagttcctgaggacatgttatggtgtattttggttctggtcatgtagttggtacttatgttttgtatcattgtctgctagggtttttgtccatggctttgtttactttatttaaggacaaagttttaggagattatgatttttgttatttaattattgggtttagtatgtataactgttggtattgtgatgtaaaagaccttgttttgttc

SEQ ID NO: 108550 - DNA, 382 bp, Glycine max
  unsure (1)..(382): unsure at all n locations
  Clone ID: PAT_MRT3847_69034C.1
gagcaacagcttcttttgttccgcataggagtgttgttgggttgctggtacttctgaaaagcccaccccaaagtcgaaacgaaagcgcagagagagcgaaacgatgtcgtacgacgatgtggagatcgaggacatggagtggaacgaggagttgcaggcgtacacgtacccgtgcccgtgcggggacctgttccagatcacgaaggaagaccttaagctcggcgaagagattgctcgatgccctagttgctctctctacatcaccgtcatctacaaactcgacgatttcctctccgattccgatcagnatcgaccanacaacggcctccaaccttccaagcagcaacncctcaacgttgcttgaatttcagatgtcctgaca

SEQ ID NO: 108551 - DNA, 545 bp, Glycine max
  Clone ID: PAT_MRT3847_69035C.1
aagaacaatcaacatggtcttcattcacaccaatatattatcatacatccacatcttcggtcatcttaacaaaatattcaaaaaaaccggaaccacacaggaattatactatcatataatttttggggtttttattgcatttattaatattaaaaacgaagaaaaaattatggataaattttgacattaatatcactttcaaaatatacaaactacaactttcaaatgaatattcaaactatatctatttaaaaggtttttaattaacaatttaatttttttctaattaaataataaaaaaggtatataaaaaaataaatttaagagaaatttacagattggcaatctataaaaagaattatgaaattcatatatttcttacaaattttcaatccataaatttcttacggactatcaatccataagtattacgcaaaaaaaaaaacaagaacttacctgacacaactactccttggcgatgacaaaccacgaaatggacctctaccacaagaacaaacgacaaatttttccgatgaacgaagggg

SEQ ID NO: 108552 - DNA, 893 bp, Glycine max
  Clone ID: PAT_MRT3847_69036C.1
cccacgcgtccgaaaaatcttgctagagatttaaaaatctcatcaccactaagccacactagacactacaatcattatcaagttccaattgggttattttttgtcatttaaaaagaaaatcaaagcaagagtttctttgaagaagacttgtacacaaagatgagttcaagcagaacttgggctgtggcagccagtgttggagttgtggaggccttgaaggaccagggtctgtgtaggtggaacaatgctttaagatcagcacaatatcaagtgaaaaaccatgtgagatccttgtctcaggcaaacaaggtttcttcttcctcatcttctgctgtggtttctagtagattaaaggaagagggtgcgaagcagtcagaggaatcattgaggacagtcatgtacttaagttgttggggtcccaactagagtcataaggcagttactaaataactaaatatttgatagggaaagttggggcagagatttgtagacttgtaatggtgcttgttaattagcattcaaagttgcgacagatattgatgtaaatcttgataaatgtagcaatgccattcataagcttggtagtggcagatgaaagcaacttgaatgctctttttagtttggctgttttcgtcattccttgaattcttggttaatatcaaaacatggaaaggagagtcactgtttatttacttttcctgctactcattgttacaagttcgtagcagcggtatttttttttgtgctaaattttgtattctttaatcatattcacagctgatatgtagagcaccaaactaatggcagatggtcatagttgaaccttgaattctccaaaccaacgaggcataagaaaattgttggaaaattttgcttttgatgcttttgcttgt

SEQ ID NO: 108553 - DNA, 608 bp, Glycine max
  Clone ID: PAT_MRT3847_69037C.1
ggctcgagaattccttttgaatccacagcaccgtggttgtaggtttgttttgcctatgctctttatgcttagtgcttactctgttggcattggcaaacatatattcatctgtttctcaagacaccttcagcaccatcaacatcaatatcgcttactctttcattcctccatttccatgaataacctacgccaaactgaaactcacgtgcattacaaccacactcatccctccaaatacgcaagatggaccgctagagagagcttcgaatttatgtatgcaaggccttggcaacgagtaaatgatttttacttgaacattgtccgtgccaacttgtctctgccacttctcttcggagcccagacacttgttgttgatcacaatgatactggaattgcagcactttctggttcaagtgagttggaaagtgttgcatctgaggatcgcagtgggaggtgggcaaggacaacctttaaaatcattctttcgtatcacgggggttcatttgatgggtggcaaaagcagccaggcttgaacaccgtccaaagcatagttgaagggtcacttggtaaatttgtgatgaaaagaaaactcaactgctcaaggacaa

SEQ ID NO: 108554 - DNA, 528 bp, Glycine max
  unsure (1)..(528): unsure at all n locations
  Clone ID: PAT_MRT3847_69038C.1
cagatacagattgaaannnnntgtatcgaaaatgctaccacagctacacgaatctaaaatattaaaagggagggcagnntaataataagtcaccatggaaaataaaaggatagaacaagttcgactaacacaagaggaacaaattcctgcgatatataaaggataacttaacccataaagaatatttgcttgtatgataagggggcaaaagagactaatcaacggtttgcatgatattttctagagcgaacttgtaacccttatacttatctaaggatttacgacccttgctcttgcgatcaataatggccttacagtccttgtacaattagaacttggtnaatacaaccttggaggttagaattccaacgattacggattaaccattcaccttctaacggattatgcgnnnantgtgaatgactctctttcaatggnntacctgatttaacttcccctagcaacccttgtatgatcctaggatcacctgaaccnnnatctccttacnnactnngatcgaactcacgt

SEQ ID NO: 108555 - DNA, 387 bp, Glycine max
  Clone ID: PAT_MRT3847_69039C.1
cccaattttaacaaagattgaaattccggagaattctttaaattctttgagtatccaaatggagcatttcattaaacagtaatttaaatagcccgataattactttacccgcttgaaaggtcatatccaaacacacatatttggagttaggaattgacttctttaattaccacatgagtggttactctaatattcctgtcacactcaaggagaatggattaatgaaaatgggttggataccctaagtttgtcatgcaactcaacaccagttagcttattggagctgttatgtgagacagtgggattcatgttgatgaccatctcttggacataaaacaagtgtagttctgtgtgtacctttaaggtatgaatgatggtacctttaag

SEQ ID NO: 108556 - DNA, 301 bp, Glycine max
  Clone ID: PAT_MRT3847_6903C.1
gtcactcttactttagctttgtatcctctaggggggcgccaagggtggttcccttactcctacgtattccttacttgagagaaggaaatcacacctaccttagttctttaggaactaaaccgagggtaagtaagttttacctttctcgcacgacctgttctgaccaaaaaaggtctctttaaggcttcggaccatttaaatcgatctttggattctttttgaaagaagagaaccccttagggcataggaccataactgcagtgtgggcttcttcaaagtaaaacaaagaaatgctcaggct

SEQ ID NO: 108557 - DNA, 260 bp, Glycine max
  unsure (1)..(260): unsure at all n locations
  Clone ID: PAT_MRT3847_69040C.1
gcaacttgcagatnctgctctctgactagatgacctcgatcctgatcttgctcttgatgaatatgacaccaggatgccccttagtcagagcttctcgcccagatgataacaatgcctctaagaaatctggcgaaaactctatgcaacatcatgatccatctgagagtaatgggaagaaagaggatactgattgagttagttcctcaccaaagagcccttttggatatgattcgcattcgttcatgattggccctcttagc

SEQ ID NO: 108558 - DNA, 341 bp, Glycine max
  Clone ID: PAT_MRT3847_69041C.1
gggttaaaaggggcccctgtgactaaaaaatatagaggaagacgggcccatattaataatatatggagattattttaaacttagaattttttttttgcccctaatacattgggaatgctaaaaatgtttcacgcctggttcatttcaacttttaacacttggattatgacaccaaccttcaagaacaaaaatttttttttgccaagttttttttgcctccgatttaagaatgggagaaaggccccccctgaataacatccttttttgcatttccaaaaacagccccgttaaaggtcttgtaaaccaattgggcttttttgaaaatcttttgtttttggaca

SEQ ID NO: 108559 - DNA, 252 bp, Glycine max
  Clone ID: PAT_MRT3847_69042C.1
gggaccagaataaaacataatctttttttaatgatccaaaagaaaccccccattgtttttacagccaaaaaaatttcttttccacactttacatttgacttatgggggggggatctgaaattatgattttacttcaaattttccggcccgagtaagagctcgaaaacctttgtaaaatcggtttgggacagttttcaaatccagtttatttttttgcagaccagacagggggacacccataatcctaaaacc

SEQ ID NO: 108560 - DNA, 417 bp, Glycine max
  Clone ID: PAT_MRT3847_69043C.1
tgggttgatttatgtgcttgcatggtcgtgagaagatcataaaaggggagcgtaacccaatcgaagtaaagtaacggtcagcctaaagccgaaaatttagaacgcggccgcactctctctttcaattccaattccggcatcggcgtcatcgattagtaaggtaaatctagtggaaatcgccctccctagtcggaataagcctgcgttgaagtaattaaatacgacttcttaaggagatgtcaccgcgattcttctgggaaagccataatctaacaaggccgatgaaaatggtattttaaaatttctgctctccggctgtgtttctcatcttatttttacttatacccgggataaagaaattggcagtgccgttagtcctgttgtccttcctaatcctattcctcacgttttcgatat

SEQ ID NO: 108561 - DNA, 360 bp, Glycine max
  Clone ID: PAT_MRT3847_69044C.1
gcggtgatttcagtgagtgatcggtggtcacttgatctcatcataatcgtcagcggcaattgaggaagatgccgatgggaaacattgccgtcggaaggcctgaataggctactcacctcgacacgttgaaagctgttctggctgagttcatctcaaccttcatcttcgcgttcgccggctcaggctccggcatcgcctacaacaagctcaccgacaacggcgctgccacccctgccggcctcatctccgccttcatcggccatgcattcgccctcttcgtcgccgtctccgtcggcgccaacatcttctgcggtcacgtcaaccccgtcgtcacctttggcgccttcgtcggcggcaaca

SEQ ID NO: 108562 - DNA, 413 bp, Glycine max
  unsure (1)..(413): unsure at all n locations
  Clone ID: PAT_MRT3847_69045C.1
ggtccggaattcccggggcgaccccgcgtccggtttcagtgagtgatgcggtgttacttgatgccttataagtcgtcatcatcatcatcatcatcaccgttgattgaagaagatgccgatcagaaacatcgccatcggaagggctgaagaggctactcaccccgacacgttgaaggcggggttggctgagttcatctccaccttgatcttcgtgtgcgccgggtcaggtgccggcatcgcctacaacaaggtcaccgacaacggcgccggcactcccgccgggctcatctncgcttccatcggccatgctttcgccctcttcgtcggcgggtccgggggcgccaacatctccggcgggcacgtgaaccccggcgggggctttggggccttcgtggggggggacatcaccttac

SEQ ID NO: 108563 - DNA, 163 bp, Glycine max
  unsure (1)..(163): unsure at all n locations
  Clone ID: PAT_MRT3847_69046C.1
gcgatttgggagttaggttctgcacgctctgcttccgacgagtgtactaacgtcgtttcaacaccttaatttgcgcacgcagcttcatcggcttgagacatggaccnagaaacctttctattcacatctgaatctgtaaacgagggtcaccccgacaagctgt

SEQ ID NO: 108564 - DNA, 659 bp, Glycine max
  Clone ID: PAT_MRT3847_69047C.1
atagcgcgactgagagtggtttcagagagtgatcggagttcacttgatccttcataagtcgtcatcatcatcatcatcgtcaccggtgattgaagaagatgccgatcagaaacatcgccatcggaaggactgaagaggctactcaccccgacacgttgaaggcggcggtggctgaggtcatctccaccttgatcttcgtggtcgccgactcaggttccggcatcgtctacaacaaggtcaccgacaacggtgccgccactcccgacggactcatctccgcttccatcggccatgctttcgccctcttcgtcgccgtctccgtcggcgccgacatctccggcggccacgacaaccccgccgtcaccttcagagacttcgtggtgggaaacatcaccttactccgcgggatcgtcgacgtgatcgaccagatcctcggttgcatcgtggccctacccatcctcctcgacttcgtcactgcatcccctgatccagaattattgctttccggtggagtaaatagatgttgacgctctatagaactagatactattagacaagttcctgatacaaatgttggttaaaataagcgaattatatagtattggataaaaatcttaagttaatattcaaaaaaattgacatcagagatagaggtaaac

SEQ ID NO: 108565 - DNA, 562 bp, Glycine max
  Clone ID: PAT_MRT3847_69048C.1
gccgatcagaaacatcgccggcggaaggcctgaataggctacttaccccaacaccttgaaggcgggtttggctgagtctatctcaaccttcatcttcgcgttcgtccgttcaagctcctgtatcgcctacatcatgctcaccgacaacggcgctgccacccctgccggcctcattttcgccttcatcgcccatgcattcgccctcttcgtcgccgtctccgtcggcgccaacatctccggcggccacgtcaaccccgccgtcaccttcggcgccttcgtcggcggcaacatcaccttcctccgcgggatcgactacgtcatcaaccagctcctcggatccatcggtgactccctgctcctggccttcgtaaccgcctccactgttccagcattcggactctccgctggagttggagttggcaacgccttggtgttggagatcgtgatgaccttcagtctggtgtacacggtctacgcaactgccattgaccccgagaagggtaattggggaatgattgatcccatcgccattggttacattgtcggcgactacattatagta

SEQ ID NO: 108566 - DNA, 504 bp, Glycine max
  Clone ID: PAT_MRT3847_69049C.1
gacagcgaaacaaagagtgatttcaatgaatgattgggggtcacttgatctcaacaaaatcctcaaggtcaattgaagaagatgccgattagaaacatccccgtccgaaaggctgaagaagcgaatcaacccgacacgttgaaagccgctttggctgaattcaactcaaccttcaacctcctgttcgccggctcaagctccggcatcgcctacaacaagctcaccgacaacggcgctgccacccctgccggcctcatctccgcctccatcgcccatgcattcgccctcttcgtcgccgtctccgtcggcgccaacatctccggcggccacgtcaaccccgccgtcaccttcggcgccttcgtcggcggcaacatcaccttcctccgcggcatcgtctacgtcatcgcccagctcctcggctccatcgtaagcttcctcctcctgggcttccgcaccgactgcactgtgccagcattcggactcttcgctggagctggagttgca

SEQ ID NO: 108567 - DNA, 502 bp, Glycine max
  Clone ID: PAT_MRT3847_6904C.1
ccacgcgtccggaaaggagcataatctagtgaggaagaggggcaacatcaacatttgacctcctccgacgttgaaggagatatttgattcttgaaagtgcaagcagcagctagcaagggaattaagttagttagtaaatccgtcaaccatgaactatggccgaaagacatgacatgtgttaaacgaattagctagccggtggccggtggccggtggccggtggcaatgttgcgacttgcggcatgctagcttcttcaacatattagtttatctcccagctcgatcagtattcagtcagtccacatttgaagtcgcaatgattatctagtttgcagcttcaatgatgtgattcactgatgatgactactaatgatgaaagagtcttgcttggacaagagtgtcctgagctacataaagcaaatgctgatggaagaccacaccgaggagaggtacagtatggtccatgatttcttagcccttcaacacactgagaggatatttt

SEQ ID NO: 108568 - DNA, 690 bp, Glycine max
  Clone ID: PAT_MRT3847_69050C.1
tacggttgcgagaagacgacagaaggggatagcgaaacagagagtggtttcagtgagtgatcggtgttcacttgatccttcataagtcgtcatcatcatcatcatcatcaccgttgattgaagaagatgccgatcagaaacatcgccatcggaaggcctgaagaggctactcaccccgacacgttgaaggcggggttggctgagttcatctccaccttgatcttcgtgttcgccggttcaggttccggcatcgcctacaacaagctcaccgacaacggcgccgccactcccgccggcctcatctccgcttccatcgcccatgctttcgccctcttcgtcgccgtctccgtcggcgccaacatctccggcggccacgtcaaccccaccgtcaccttcagcgccttcatgggcggcaacatcaccttactccacagcatcatctacatcatcacccagctcctcaactccatcatggcctccctcctcctcaccttcatcactgcctcccctgttccagcatttcaactttccactagaatgcaaattaacaaacgctttgatatttgaaatcatgataaccttcgatttatgtacacagtctacgccaactcccttaacccccaaaaaaacaaattaaagatttattactccccatcgccattagttttattagtagcgcctaaccttttg

SEQ ID NO: 108569 - DNA, 569 bp, Glycine max
  unsure (1)..(569): unsure at all n locations
  Clone ID: PAT_MRT3847_69051C.1
caaagttgatggacaggatctaaatctgagttttgacgaactgggaagttacggcggaagaaaacctcttgcagttgttgacttgttggtgcaggtagttgaatatagtacattttgtcacacgaaagtttctgtgttacaatggaggagctgaaatctgctatggaggagcacatagaccttatggcagatcttgttcagaagctctcttcagatcttcgcgctggctttcgccccgcttacgataactttatcggttttttccatgccattgactggaaggaaccttggctaatgggattattaggattccatgttgtgttgctgcttgtagctatcatctctaggaagaagacaaactttcaaatgttcttgttccttttgacattggctggtgtatattttgtggagagtctgaacagatttttgggtaaaaacttggaaagcttctctagtcagaattactttgatccaaggggactatntatgtctgttctttcgtcttgaccacttcttgttattttatgataatcttgataatacactttcttcttatgtacatgattgta

SEQ ID NO: 108570 - DNA, 1953 bp, Glycine max
  Clone ID: PAT_MRT3847_69052C.1
tttttcacaaaaatcacaaatataatcattcataaacttcagaaaagaaagaaatattttaattctaatcgagagaggatgcaggaaaaagtaagaagtactagtgaaatggtacaaccaaccagacccgaataatgatactacattcaattcaattgttgtggaccaagtgagagagagagagcatgcacaaaatgataataatttaactttaaagagaacttcatgatcatcaaccatccaaggatttaagacgaaaggaacaagtacaaccctcgaaagtgaattaggaagaaaacacaaggaaggaaaaccatacacagaagaagattccagagaaattcaataatacacaatttttttttttttttattttcatttccccccctctagtagtcagtggtgggaagctgctcgtgggtgtggctgataaagacaacctcgtaaacaaggccagcgattccaccaccgatgagaggcccggcccagtagatccagtggttggtccaggtccagctcacgacagcaggcccaaatgtcacagcggggttcatggccgctccagagaaggccccacccaacaaaatgttagcgccgacaatgaaaccaatggcgatgggagcaataattcccaaattacccttcttggggtcaatggcagttgcgtagaccgtgtacaccagaccgaaggtcatcacgatctccaacaccaaggcgttgccaactccaactccagcggagagtccgaatgctggaacagtggaggcggtgacgaaggccaggaggagggaggcgacgatggagccgaggagctgggcgatgacgtagacgatgccgcggaggaaggtgatgttgccgccgacgaaggcgccgaaggtgacggcggggttgacgtggccgccggagatgttggcgccgacggagacggcgacgaagagggcgaatgcatgggcgatggaggcggagatgaggccggcaggggtggcagcgccgttgtcggtgagcttgttgtaggcgatgccggagcctgagccggcgaacacgaagatgaaggttgagatgaactcagccaaagccgccttcaacgtgtcggggtgagtcgcctacaacaagctcaccgacaacggcgccgccacccctgccggcctcatctccgcctccatcgcccatgcattcgccctcttcgtcgccgtctccgtcggcgccaacatctccggcggccacgtcaaccccgccgtcaccttcggtgccttcgtcggcggcaacatcaccttcctccgcggcatcgtctacgtcatcgcccagctcctcggctccatcgtcgcctccctcctcctggccttcgtcaccgcctccactgttccagcattcggactctccgctggagttggagttggcaacgccttggtgttggagatcgtgatgaccttcggtctggtgtacacggtctacgcaactgccattgaccccaagaagggtaatttgggaattattgctcccatcgccattggtttcattgtcggcgctaacattttgttgggtggggccttctctggagcggccatgaaccccgctgtgacatttgggcctgctgtcgtgagctggacctggaccaaccactggatctactgggccgggcctctcatcggtggtggaatcgctggccttgtttacgaggttgtctttatcagccacacccacgagcagcttcccaccgctgactactagaggggggaaaatgaaaataaaaaaaaaaaaattgtgtattattgaatttctctggaatcttcttctgtgtatggttttccttccttgtgttttcttcctaattcactttcgagggttgtacttgttcctttcgtcttaaatcgttggatggttgatgatcatgaagttctctttaaagttaaattattatcaaaaaaaaaaaaaaaaaactcgagactagttctt

SEQ ID NO: 108571 - DNA, 2077 bp, Glycine max
  Clone ID: PAT_MRT3847_69053C.1
gaatcaattaaccaagaaaccgaaaaaccgcccattccccaaccggctccctccgggggtggcccattccataaagccagcggccccgccggttttccggcttgaaaacgggcaggtaggcccaccccaataaaggtaggtaggtccctccattgggccccccgggttttcccctttaggtttcgggttggaaggtggggggaaatggtaacggaataccattttcccccgggaaccacttaggcccaggattcccccagggggccatttacccccccttaaaggaaccaaaacttgaggttcaaggccccctttttttttttttttttggataataattaaccttaaaaaaaactttcatgttctccacccatccaaggttttaagccaaaagaaccaggtccacccttggaaattgatttagaaagaaaccccaagaaaggaaacccttccccaaaaaaagtttccaaagaaatccattaatccccaattttttttttttttattttcatttccccccctctagtagtcagtggtgggaagctgctcgtgggtgtggctgataaagacaacctcgtaaacaaggccagcgattccaccaccgatgagaggcccggcccagtagatccagtggttggtccatgtttttctcacgacagcaggcccaaatgtcacagcggggttcatggccgctccagagaaagccccacccaacaaaatgttagcgccgacaatgaaaccaatggcgatgggagcaataattcccaaattacccttcttggggtcaatggcagttgcgtagaccgtgtacaccagaccgaaggtcatcacgatctcatcatcatcatcaccgttgattgaagaagatgccgatcagaaacatcgccatcggaaggcctgaagaggctactcaccccgacacgttgaaggcggggttggctgagttcatctccaccttgatcttcgtgttcgccggttcaggttccggcatcgcctacaacaagctcaccgacaacggcgccgccactcccgccggcctcatctccgcttccatcgcccatgctttcgccctcttcgtcgccggtctccgtcggcgccaacatctccggcggccacgtcaaccccgccgtcaccttcggcgccttcgtgggcgggcaacatcaccttactccgcggcatcgtctacgtcatcgcccagctcctcggctccatcgtggcctccctcctcctcgccttcgtcactgcctcccctgttccagcattcgggctttccgctggagtcggagttggcaacgctttggtgttggagatcgtgatgaccttcggtttggtgtacacagtctacgccactgccgttgaccccaagaagggcaatttgggaattattgctcccatcgccattggtttcattgttggcgctaacattttgttgggtggggccttctccggagcagccatgaaccctgctgtgacatttgggcctgctgtcgtgagctggacctggaccaaccactggatctactgggccggccctctcatcggaggtggaattgctgggcttatctacgaggttgtcttcatcagccacacccacgagcagcttcccagcactgactactagaggggaaaaatgaaataataaaaaaaaaaaatgtgtattattgaatttctccggaatcttcttctgtgtatggttttccttcctttgtgttttctttcctgttgaatcggtggccgttgatctttggttggatggttgatgatcctgaagttttcttttaagttaatttaattatcattttgtgcatgctctcgctctcacctggtccacaattgaattgaatgtatgtatcattattcgggtctggttggttgtaccatttcactagtacttcttactttttccggtatcctctgttcccctcacaattaagattagataaatgttaattagtgtcttaaaaaaatttaatatatttttaatttttttaatcaaaaaaaaaaaaaaaaaaaaaaaaaaaaaaaaaaaaaaaaaaaaaaaaaaaaaaaaaaaaaaaaaaaaaaaaaaaaaaaaaaa

SEQ ID NO: 108572 - DNA, 214 bp, Glycine max
  Clone ID: PAT_MRT3847_69054C.1
tcgtccacgcgtccgtccatgcttacgatctcacatggcacaggataactaaatggggtcgaagttgaccaactaattctagaaatctttatttgtttctcaaactaaatcgtttgggattgatataactattatgattatttcgatctgtctgtacaactggacaacataaattaaccaattcaatgtgataccataatcatgcatggacttc

SEQ ID NO: 108573 - DNA, 282 bp, Glycine max
  Clone ID: PAT_MRT3847_69055C.1
gtccatcctctcttaaaccaaacaaagtccttgccattaagccgggcaaactagtggaagtatcattcacattttattatgtatgtgccaaatcaccaacttcataaataatattggcatcaaaacgggatacgtgctctctaggatcctaatatccgaacaaccctcatttagctatgaagccaattccattaaaataagatgtggagactacatatatagtttatcatgaactattgaacgcgcacattatcatcaacaattatatggccacgaaaaaca

SEQ ID NO: 108574 - DNA, 816 bp, Glycine max
  Clone ID: PAT_MRT3847_69056C.1
ctcgccacgcgtacgcccacgcgtccgcccgcgcgttcttggctgctagaagactacagaaggggagcgaaacagagagtgatttcagtgagtgatcggtgttcacttgatctcatcataatcgtcagcgtcaattgaagaagatgccgatcagaaacatcgccgtcggaagggcctgaagaggcgactcaccccgacacgttgaaggcggctttggctgagttcatctcaaccttcatcttcgtgttcgccggctcaggctccggcatcgcctacaacaagctcacccgacaacggcgctgccaccccctgcccggcctcatctccgcctccatcgccccatgggcattcgccctcttcgtcgccggtcttccgtcggggccaacatctccggcggccacgtcaaccccgccgtcaccttcggcgccttcgtcggcggcaacatcaccttcctccgcggcatcgtctacgtcatcgcccagctcctcggctccatgcgtcgcctccctcctcctggccttcgtcaccgcctccactgttccagcattcggactctccgctggagttggagttggcaacgccttggtgttggagatcgtgatgaccttcggtctggtgtacacgggctacgcaactgccattgacccccaagaagggtaatttgggaattattgctcccatcgccattggtttcattggcggcgctaacattttgttgggtggggccttttctggagcggccatgaaccccgctgtgacatttgggcctgctgtcgtgagctggacctggaccaaccactggatctactgggccgg

SEQ ID NO: 108575 - DNA, 361 bp, Glycine max
  Clone ID: PAT_MRT3847_69057C.1
cgaagagacggatactgagttggatgatcaaattggccattctattcgacacgaggatgtgaccgggccagatgccattcttaaagccatgactggtggggttctcctacgtgaaacactctaagaccttgccctagacaaggctcgggtgattggcatggatcaaacccctgaaataacactttacacacatggtctttttggaatattgaaaaaaagggcagcccaacgtcgggatatataagctgatcgtaacatcatcaactatgaatgcccaaaaaattttcaatttatttggaagagacacgagaatcataatcctgggcaaacattatctgcgaatatattatggagtcaattt

SEQ ID NO: 108576 - DNA, 262 bp, Glycine max
  unsure (1)..(262): unsure at all n locations
  Clone ID: PAT_MRT3847_69058C.1
ctgcaccttgcaatggtttcgctatcaacatggtttcgctagattgcccacaatgtcgaatcccccctntngntcagntggaagaantaaaaaggaggtnaaattacagatagagaggtaagtgatgttgtttggacaaaattntttcaaggaaagttgangtanttgtaatggaatacaggagaggagatggnacctaacactgatggaaaagccagtaactcttgttcggaaattaccagttgtagacccaagcgtgttt

SEQ ID NO: 108577 - DNA, 704 bp, Glycine max
  Clone ID: PAT_MRT3847_69059C.1
ccacgcgtccgggcagggcaaagtctgcacttcctgacagatgctcctggtttgcctaaacacaatattaccttactgatcacggcttatgccaagaaccagtgtttgaagcactatttctatgaccagtcttgcaccactcataacgggcgctctgggggggggggaacattctgtgattcccatccacttcgacgtctatgcttgacgtgaagtgctccaacatctggctgtcaataggatgagtctcctataacagatgtaaaactaagtagacacatttattgggaatcaccttgaggatagtggaccgtacggctttcctgatgagcagaaacgatgttcatgggtgcatgcacaactgactccacataacggagattgactaatcagcaaatgaatccatactaaggcctcgatattatgaagatatgggcaagaaaaccatggctctgaatatagctgcaggaaccaatgctccaaggtaagatgccgacctaaatgtctcagaacttgttctacacagattgctcagatgcggatattagagatgatgaacgggaacatgccacaccctatacataaccctagtggaaagcactagcatgtcatgaagcattaactgatcatgcatccacacatgctgaccgtgcgtcaagaatatatgcaggagtggcaaatagcatgcctgttatgagcttagc

SEQ ID NO: 108578 - DNA, 268 bp, Glycine max
  Clone ID: PAT_MRT3847_6905C.1
gtttggcatctgaatccccaaaatatcgaaatctgagagaggcattgattggtaaggtaaggtaatggcggaagagagtaaatctagcagcgaggaaagtgtgaagctgttcgtagggcaagtgcccaagcacatgaccgaacccgaactccttgcaatgttcaaggagttcgcgctcgtcgacgaggtcaacataatcaaagacaaagcaactcgtgcttcccgaggttgttgcttcctgatttgtccgtcaagggaggaggcggat

SEQ ID NO: 108579 - DNA, 301 bp, Glycine max
  Clone ID: PAT_MRT3847_69060C.1
acaggaattattgtataaagataatggaaatacccagggttgggggtatagtgatgctgattgggcaagttgtcccatagacaggcgatccaccactggatgctgtgtatcctttggaggaaatattgtttcttggaaaagcatgaaacacactgtgttgttggctgatcaagggtttaagcagaatatagagctatggctcttgttacttgtgaattgttgtggattaaacaacttgaagaattaaaaatatgggatattcatctgattacgatgcatggagataatcaggcaggttttt

SEQ ID NO: 108580 - DNA, 395 bp, Glycine max
  Clone ID: PAT_MRT3847_69061C.1
ttttgtacaacgagggcccaaagctacagaaacgaagctcatgaaagctgatgctactttgaagcacaacaatgcgaccaagagagagtaggcagagacccaacaaggcagaaaaagggcaaagaagactacgaagatgaaaaagagaaacataaaggcacaacggggactccagcaaagcagcgacaaatggatgcacacagggagaaaaagccaccaaggcaaaaagcaaccctgcgaggaatgggacactggccgacccggaaaagccaagaaacacggaagacggggaggaaggaaaaacctggacaaaagaggaagagcatggaagaaacagaaggaacagaatggccaggaccacggaaaatcacggcgggaaccagcccccgcaacaa

SEQ ID NO: 108581 - DNA, 601 bp, Glycine max
  Clone ID: PAT_MRT3847_69062C.1
agcgggacatcgatcaattaatttttcaacatttcatttcaccgccaaatcaaaaacgagaaatggtgttcttctgcttcctggtggaccagcggcgggaggtgcagcggagcaagcctgcggcggggatctgctcccgctgcggcggcggagccagcgtggccgacatcaagaccgccaccaggttctgctatgtccccttctactggaagtcatggagagccatcgtttgcactttctgcggagccgttcttcgctcttaccaacactagatccattcatatgtactactaataggttactacgagtattatgtagttataactagccacttcttaattgtgcttcctgattcctattattatttgctaacacatgaggagccatcgtcatatcatgtattcattctaacttccaactctttctaatcatcatcattgttaatttctatgtattaattctttcttttttgttctatctaagttagttttagtttctcttaaattgttttcctggtcagaactctccctttatgtatgtgcttcaattagtacaattcaaataacttatttagtgacctttggagatttatatataagag

SEQ ID NO: 108582 - DNA, 382 bp, Glycine max
  unsure (1)..(382): unsure at all n locations
  Clone ID: PAT_MRT3847_69063C.1
ggactggataaagtgtgctcttcaacggaaaattgatcactcctgaaacagtttcacgctgctattttgtttaccaaatacttttgttgaacccttttactcaacaaagatttttctcagttctaactgagaggtctaaagcaactaaatggaggttggagaaacagagagaaacaagcttcaagggcacgttccttgggtccccaccacccctttgatgcncattcttccaaaaccagcgccgatctggactcctatggagggaaaccacctatactctcattccaatgggttttttaaccaatttgctcaatgcgtttaatgcacagttcaaccccccaccgaccctatgcattacttagccatcaatatcatccctctc

SEQ ID NO: 108583 - DNA, 149 bp, Glycine max
  Clone ID: PAT_MRT3847_69064C.1
ggctcgagcgcagtctctggtagacgatggagatacagtctctgagcagatactagcttggggtgtgcttcagcattctgttccgagcaccctttcacgcgcaaacaacaattataggcacctacctggggactgaaggcacactattc

SEQ ID NO: 108584 - DNA, 155 bp, Glycine max
  Clone ID: PAT_MRT3847_69065C.1
accacgcctcacgacagatgagagaagcgacggaaggcgtgtttatgtatgaaatactggtagctgggaaacagcgaatggctctgtttgtttctcttagctcgcttgatggcttgtctacaaaaataaccgtggccactatacagataacacga

SEQ ID NO: 108585 - DNA, 350 bp, Glycine max
  Clone ID: PAT_MRT3847_69066C.1
actacgtggcagtgagccatcctcagacctgcgtgttaagaacgaaaggactcgattgcttctgtggtacaatcttggtagcatgcggatgccatgcctacgatatgctgcctctgtcgacgaacactgcctatggtgcccggactccgcgagggcaatgcgcaaggtcgaagcttgctgggggaacacacaacatctttggctttgttaccattcctgaaaagtgcgcttaagcaactaaacgtttcattcatggcgatccatatgagttcgactccataaccattaaccaacaagcttacttttatgccacaaacctcttcttccatgcccatgacacatttgtgttc

SEQ ID NO: 108586 - DNA, 364 bp, Glycine max
  Clone ID: PAT_MRT3847_69067C.1
aattctacccacctctcaactgtaatttctctttttttcttcacccaaacctaaccctcctaacgttaaaattcaacacctgtccccgcgaatacctaattaaaaatctttccattcttacatctctctatatcttaccttttttttccactttttttcctttccaacattctttttttttttctatttcttctaattttaccccttcaccttacttcattctctttcatttccacttttactctaattttctccctcaattttttaatttatacttctttcatctacttcatacatattttctcttaatttttttcattcctttatcacttcaatttacctcctcttaaccttttcatcttct

SEQ ID NO: 108587 - DNA, 362 bp, Glycine max
  Clone ID: PAT_MRT3847_69068C.1
caaggcaaaaaccaaaaggggggcattctgattttaatttagccttccacattcattattacccgaggttttccttgtcgggctagacaatctacccccgcggtggcccaatcccacataagcggctgacgcaaactggttggctttttttgacataaaaacaaacctgggaccggctcaataatcttttttttcagcccaatgtccttgcgggggcatggttttggcttcccaacatcaaacaccgggcactcaacattttcctcacagtgattgcttaccctcccaaagaaagccctcttgctgagaccataaccatggcttgccatgatctattactttaacacccaacttttgaaccc

SEQ ID NO: 108588 - DNA, 146 bp, Glycine max
  Clone ID: PAT_MRT3847_69069C.1
gtatagggataagagagcaccacgtaatgatggatgcgctgataaaggtgcagctccacgcaccacaaccatgcgaaacgggtctctcgtcttagggcatgtcagaggactcacatgcactgcgtcaacggccaccctacttgatt

SEQ ID NO: 108589 - DNA, 244 bp, Glycine max
  Clone ID: PAT_MRT3847_6906C.1
agcccacattcatcaacgacccacacctatacgcacctgaatgggcgcaaatcttgaccgacatgacctataccgatccatcgtaccgcgccaagagtggtctaacatcggaattcgattcattccctccgtacatggaccacatggacacttatcagttcccaccatatccgccccagatgagcaatgtgctcggttcgctagcagacatcagcgatctgactcagatcgacagcatggactt

SEQ ID NO: 108590 - DNA, 2956 bp, Glycine max
  Clone ID: PAT_MRT3847_69070C.1
gctcgagaaaagatccaacatctgacatggctataatatctcgcaaaggatctactcttgttagagaaatccatgagaagcagagtatgaacaagtctcgccaacgcttttgggaacttgcaggctcaaaacttggtgatatcttgggtgttgaaaaaacagcagagcagattgatgcagacactgctgaagtgggtgaagatggtgaaattgattttaaggaggaagctaagttttcacagcatatgaagaagggagaagccgtgagtgactttgctaagtcaaaaacccttgcagagcaaaggcaatatctgcctattttttcagtgagagaagagttattacaggtggttcgtgaaaatcaggtggtggtggtggttggagaaaccggttcaggaaagacaacacaattgacacagtatctgcatgaatatggctatactatgcatgttagaagtgggctgcacccaaccaaggcgtgtgtcagctcagagagtaaccgattcagtttgcgaagagatggatacagagttgggtgataaaattggctatgctatacgttttgaggatgtgactgggccaaagaccattataaagtacatgactgatggggtacttctacgtgaaacactcaaagactctgatctagacaagtatcgggttattgtcatggatgaagcccatgaaagatctctaagcacagatgttctttttggaatattgaagaaagttgtagcccaacgtcgtgatttcaagctgatcgtcacatcagcaactctgaatgcccagaaattttcaaatttctttggaagtgtaccaatttttcatattcccgggcgaacatttcctgtgaatatattatggagtaaaactccagttgaagattatgttgaaggtgcagtgaagcagactatgactattcacataaccagtcctcctggtgacatccttatcttcatgactggccaagatgagattgaggcagcttgctatgcccttgctgaaagactgcagcaaatctctgtcatcttccaagaaagctgtccctaaactcttgattcttcccatatactctcttcttcctgctgacttgcaagctagaatattccagaaagctgaagatggagcccgtaaatgcattgtggccactaatattgccgagacatcattaactgttgatggtatcttctatgtcattgactctggctatggtaaaatgaatcgtgtataaccctaggatgggcatggatgctctccaagtcttccctgttagtcgtgctgctgctgaccagcgtgccggtcgagctggtagaactggtcctggtacgtgctatcggttgtatactgagagcgcttacctaaatgaaatgttgcccagtcctgttccagagattcagaggacttaccttggcaatgtggttttgttgctgaaatctcttaaagttgaaaatttacttgattttgatttcatggatccacgtgcccgggataatattctcaattcgatgtaccagttgtgggtgttgggtgcccttaacaatgtgggggggttaactgatcttgggtggaaaatggttgaatttccactggaccctccgctggccaagatgcttttgatgggtgaacagttagggtgtcttgaggaggttttgacaattgtttccatgctgtcagtgccatctgttttctttagacccaaggaccgggcggaagagagtgacgctgcacgggaaagattttttgtgccagagtccgaccatttaaccttgtacaacgtttatcagcaatggaaacaacatgattacagaggtgattggtgcaatgatcattttttgcatgttaaaggtctaagaaaggccagagaggttagatcccaactgcttgatattctcaagactttaaagatccccttaacctcatgttggccggatactgacattgtcaggaaagcaatttgttctgcatacttccacaattcagcaagattaaagggtgtgggggagtatgttaactgcaggaacgggatgccatgtcatcttcatcccagtagtgctctctatggtatgggttgcactcctgagtatgtagtttatcatgagttaatcctgaccacaaaggagtacatgcagtgtgcaacagcggtggagccccagtggctggctgagctgggacccatgtttttctctgttaaagattctgatacatcattactggagcataagaagagacaaaaacaagagaaaacagccatggaggaggagatggagaacttgaagaaggtgcaagcagaggttgagaaagaaaggaaacataaggagaaggaaaagatggctaagcatcagcagcaaatctccatgccaggtttaaggaagggttcttccacattcttgaggccaaagaagtttggtttgtaaattatgttgataatacagagaaatatcagcagactgtgaaagagaaggctgcattctgattgtaatgagatgtaagaaatattggcagactaaaaaagagacggccgcagattccttggatggcggcaggactgccagacccccctttttacattatggaaaacctttttcgaaagccctgatatattaggagcactgagctcttatgtcgattgctctgcaagtttcagtaactgcaagctaaacctttgcgattttggggctgggccgcccgacccccctgtttttcccttatggaaaccaattttcgaaagccctgatattttagttttggtaatagccctgagctcttggaatattgtcgattgctctgcaagtttttaggggttataactgcccaaaccagaaactgtccccatgaaacaactggttttgttttcaaaaaaagggtgcccctgtctagttttttccccccctttttcccccttttccttgtaatttagtccttaagcttttcccctcctaagcctcccgttttccct

SEQ ID NO: 108591 - DNA, 811 bp, Glycine max
  unsure (1)..(811): unsure at all n locations
  Clone ID: PAT_MRT3847_69071C.1
tgagtaatgtagtttatcatgagttaatcctgaccaccaagnagtacatgcagtgtgcgacagcggtgaagccccagtggctggctgagctgggacccatgttnttctctgttaaggattctgatacatcattactggagcataagaagagccaaaaccaagagaaaccagctatggaggaggagatggagaacttgaagaaggtgcaagcagaggttgagaaagaaaggaaacagaaggagaaggaaaagatggctaagcatcagcagcaaatctccatgccaggtttacgaaagggttcttccacattcttgagaccaaagaagtttggtttgtaaattatgtttgatacagagaaatattagcagactacgaaagagaaggctgcattctgattgcagtgagatgcaagaaatatgggcagactaagaaagaaaaggttgcagattccttggatggcggcaggactgccagagtacactgtatttacattatggaaaacaatattcgaaagactgatatattattttggtaatagcactgcgctcttggaacattgtcacatccactgcaagtttgtagggttcataactgcacaaagcagaaactgtccacaggaaataactggttatgttttcccaaggtgtgtgaccatgtctagtatttcctgcctcatcttcccgcttatcattgtattttagtcattgtaagctcttcaacatgttcaactcctaagcatcacgttttccatacaacaatgagaattggattttaactccncnngaaaaaataatatttttttggcccaagt

SEQ ID NO: 108592 - DNA, 675 bp, Glycine max
  Clone ID: PAT_MRT3847_69072C.1
cgtgctgctagcatcagcattcaggctagtctgaactactgctcaatcttggaatcacaaggattgaaattgtctaaattactgttggtgcttctgcgcccttctgttgaagaagttttagaatcaaattttagacgtgctagaagagtagtgcttgacatggctgaatgttgcccgttgtcaccacagtttgcatcttcactttctgcaattgctagttcatctagtagcatgcttgttgagagtggaatgcgatttatgcacatagttgaagagatattggaacagctaacgccaacggttagtttgcatttcggaggaaatgtactgaacagaatcttacaactatttgataaatacatggatgctcttaccagagcactaccaggtccttctgatgatgacaatcttccagaactgaaagaggtcgcgcttttcagagctgagactgactcagaacaacttgcaatattgggaatagcatttacgatattggatgaactgttaccaaatgctgtgttatcaaggtggatgctgcaaagtgaaagcaaggcccaaggaaccaaatagtggagcaacagagaatgtaaccttcaatacaaatgctagtgtagaattgaaggagtggaggaaacatcttcagcattcttttgacaaacttcgggatcacttctg

SEQ ID NO: 108593 - DNA, 386 bp, Glycine max
  Clone ID: PAT_MRT3847_69073C.1
tccatgctcccgggcgccatggccgcatgattagcgtggtcgcggccgaggtactaaaaaaggtgtgcaagttaaaggggaatgggtaaccaagagaagagaactcctgctacatgcaagctctgttgcattttctctgtccccttttaactcgatcgcattggcagagaacgatgtccctgaagattttcgagtttattcagatgatgtcaacaagtttaagataatgatacctcgtgattggcaaataggcgcacgagaaggtgatggacttaggtcactcatagctttctatcctcaagaagcttctaacacaaatgttagcattggaatcacaagccttgatgctgatttcaccaaaatggaatcttttgggaaagtttatg

SEQ ID NO: 108594 - DNA, 332 bp, Glycine max
  Clone ID: PAT_MRT3847_69074C.1
aggaaccaaaattaaaaaatcttatcccttggaaggaatgggccccactttcagtattggcccggcctttaaaaagcttgatttgcaaatgaaaggggcccggcaaaatgctaatggggccaaaacaatgggcttgggcctaaccgaaaatgggatgccacctttatcactcccaatgaaaagggccccataccccgggaaactggtcttaacccccaatgaacccaggggaatctggatcatcaattgggtaaagctgaattccaaatttaaaaccctcataaaccctttgattcccccaaaaagacccacaagggttaacaatgcccctg

SEQ ID NO: 108595 - DNA, 292 bp, Glycine max
  Clone ID: PAT_MRT3847_69075C.1
tataattatctaaaacgcactaggtgtgcaattgttatgttctgaaattaagcggatgacaccccacgcactttaaagcgaatgcaaaaggacacccttaaaacatatattagagactttcacaaggccccaagaagtcgcggcagcaaacacaaagaggcctcggagctggagcctgcatatatccgcacactagaacaaacaggcgagccacagaagacgggtcaactatagctggaaaaacagaaaattcaccttacccagggctgtgcgatcctacgttgatgaaaga

SEQ ID NO: 108596 - DNA, 654 bp, Glycine max
  unsure (1)..(654): unsure at all n locations
  Clone ID: PAT_MRT3847_69076C.1
cacgcgtccggaaaactttgttctccacaacccaaaacacatgtcttatgacacaataaaaaaaatgaatctttagagttgtttcttccacgtgttaaaagtttatttccagaaatgtaaacttaaggaatgtgatatttttatgtttgttatgagttttgaaaatttattattgagtacggttgattacggataaattagtaatattacgttttatttcatttctgctctctccatgaaggggtgagaaaatgatattataaccggaaggtgaaaagttattttaagaaaaatattcaaacacccttttgaatttacccaaaaataatattttgagtgaaagggttttcagttgcttaaataaaatatagtgatgtatgagttaaatttttttttaactcccgtctttacttctgatattttttagaatgtcatagaatgtgaaattatattccgatacaaatgttacctatgtttatgttttgccaacttatgtgattgggatgctgtttttttaattttaatcatattattagtacataatattcattaaccttttgttaattattaattcttncgtctaaaaaaattggataattcacttttattngtaattgataccatttggaatgctatatttcaatgaacaaacca

SEQ ID NO: 108597 - DNA, 138 bp, Glycine max
  unsure (1)..(138): unsure at all n locations
  Clone ID: PAT_MRT3847_69077C.1
gncactgctccttattnggaactatctcacanccttnntctcttttcntctttactntcgttttcccttcgcaagtngagagatggngcaaattnctgcttcatgggactctccacgcnaccgtnttngaggttgata

SEQ ID NO: 108598 - DNA, 784 bp, Glycine max
  unsure (1)..(784): unsure at all n locations
  Clone ID: PAT_MRT3847_69078C.1
cacgcgtccggaattataaaaggagccttttgtggcacagtaaactcaaattcactgaaggttccgcaagcccctttttccagaacttgaggatggcacaaaacgcatcatttcagcagcagaaattcataatacctaacaagtatggctataaattagtggggatattacatgaatctggaaccaaagagattgttctcctatgccatgggggtcgagcttccaaggaaaactttatcatgaccaatcttgctgctgctctagagaatgcaggaatcagttctttccgctttgacttcactggaaatggggaaagtgaaggttcatttgaaattggtggcttctggagggaagctgatgatatacatgctgtagctcaacactttcaagaagcaaaccgcacagttattgcaattgttgggcacagtaaaggagctaatgcagcacttctttatgcttcaaaatatcatgatattaaaaccattgtcaacctatctggctgccatgatttgaaggtgggtcttgaaaatcgctttggaaaagattttctggaaagactcaggaaggaaggttttattgagtttaaggcagagtcaggtattaattatcgtgtaactgcataaagtatgacggatcggttagacataattatgcttgatacaagcctgcatattgacaactgtgccaggtatacatgtgtctctactaggactttgttatttgttgcatttgtagctgcgcatgagtcagncaagatcctacctaatcacaagttgcacatcat

SEQ ID NO: 108599 - DNA, 316 bp, Glycine max
  Clone ID: PAT_MRT3847_69079C.1
acttcttcccactcgtcctaccactcctcctcttactcttacaactatccaataatactacatgactggtttaacttcatagtttaccttaaaactacaaaccaacaattcactaaaatcataccaatctatactatccacaacttaattacacttatatccaaaaacttacatcttatataaattcacctatactcaatacaatcaccaatctataacaatctcacaacttctaaaaccctaataaccctcatcaaaatttctattcatattaaactattaatttcatcttcttctcttttcaaacattttaata

SEQ ID NO: 108600 - DNA, 408 bp, Glycine max
  Clone ID: PAT_MRT3847_6907C.1
cccacgcggacgcacgcgtcgcgacacgactacagacgggcgtcatgcgactactacttggccagctagaaacagttaaggtgtatgtactcaaccgtgacgcactagcgatatgggaaaatcactctcgacataaccaatattgcgtccatggaccaggcgcttcaagatgacagaagatctactattgaagactttgatagctgccatataactgcgactcatttagatttcctgtcctaatgtacctaccaagcaagagctgcatgcattgtcgtatgagaaaaagctagtctttgactcaaggagactctgctctcagcacgaaaggaaagggaaagggcaattaccacgttgtaaacgaactcagcgctcatacgcatgcatacaaccctatatactacacct

SEQ ID NO: 108601 - DNA, 453 bp, Glycine max
  Clone ID: PAT_MRT3847_69080C.1
gttcatatcagaattctcaacctcaaggttcacagaatgagaatgatccaaataatacaactatttttgttggtaatttggatcctaatgtcactgatgatcatctgaggcaagttttcagccagtatggagaattagtgcatgtgaagattcccgcagtccttcaaacaaacaggctcaggcagatccaaaccagtggaatggtggtgctggttctggtggtggatactatgggtatgctgcacaaggttatgaaaattatgggtatgctcctgctgctggacaggatcccaacatgtatggcagttatccggggtatcctggttaccaaccacctcagcaacagcaacaaataggatatagttgagaagagaatgttccttttcttctgtaatcttttgtgatacttatcgagttgcgtgtctgttctcgtctcgtggaaaaccgactctg

SEQ ID NO: 108602 - DNA, 417 bp, Glycine max
  Clone ID: PAT_MRT3847_69081C.1
agatgttactgattatcttcttcaggagacatttagggctcgttataactcggtgaagggtgcaaaagttgtcattgataggctaactggccggaccaagggatatggctttgtaaggttttcagatgagagtgagcaagtgagggctatgactgagatgcaaggggttctttgctcaacaagacccatgaggattggacccgcctctaataaaacccccaccactcagtcccagcccaaagatttttgttggtaatttggatcctaatgtcactgatgatcatctgaggcaagttttcagccagtatggagaattagtgcatgtgaagattccagcaggcaagcgatgtgggtttgtccaattcgcagacaggagctgtgctgaagaggcacttctggtgttgaatgggaccctgt

SEQ ID NO: 108603 - DNA, 1071 bp, Glycine max
  Clone ID: PAT_MRT3847_69082C.1
ctctgtctcttctttgccctctccttttctctctctagaattctcagatttgcggggcgagatgatgcagcagccaggacccggcatggcacctcccaccatgggccagcagccgcagcaacagtaccagcagcagcctccgccgcagcagcaacaaccctacgtcatgatgccgccgcagcatcaggcgccgcagcctatgtgggccccatccgcccagcctccgctgccgcagcagcctgctagcgccgacgaggtccgaaccctctggatcggggatctgcagtactggatggacgagaactatctctacacctgctttgctcataccggcgaggtttcgtcagttaaagtgattcggaacaagcaaactagtcaatctgaaggtcatgggtttattgagtttaatagtcgtgctggagctgagagaattctccaaacataatggggctattatgccgaatggggggcagagtttcaggttgaattgggcaacttctagtgccggtgagaggtcgcgtcaagatgattctcctgattacaccatatttgttggtgacttggctgcagatgttactgattatcttcttcaggagacattcagggctcgttacaactcggtgaagggtgcaaaagttgtcattgataggctaactggccgtaccaaggggtatggctttgtaaggttttcagaagagagtgtattttatgagagctatgactgagatgcaaggggttctttgctcaacaagacccatgaggattggaccagcctctaataaaacccctgccactcagtcccagccaaaagcttcatatctgaattctcaacctcaaggctcacagaatgagaatgatccaaataatacgactgtgcgtgcttctttcaatataaagacttctttctttccagcttgtttgtgactttgaatcttaattgcagatttttgttggcaatttggatcctaatgtaaccgatgatcatctgaggcaagttttcagccagtatggagaattagttcatgtgaagattccagcaggcaagcgatgtgggtttgtccaatttgcaga

SEQ ID NO: 108604 - DNA, 706 bp, Glycine max
  Clone ID: PAT_MRT3847_69083C.1
ctgagatgcaaggggttctttgctcaacaagacccatgaggattggaccagcctctaataaaacccctgccactcagtcccagccaaaagggtgtcaagaggctctgtcatcccggagcctggaactgatttcagctgaaatggttaccattttagtgcatgtccttgcttagcttcatatctgaattctcaacctcaaggctcacagaatgagaatgatccaaataatacgactgtgcgtgcttctttcaatataaagacttctttctttccagcttgtttgtgactttgaatcttaattgcagatttttgttggcaatttggatcctaatgtaaccgatgatcatctgaggcaagttttcagccagtatggagaattagttcatgtgaagattccagcaggcaagcgatgtgggtttgtccaatttgcagacaggagctgtgctgaagaggcccttcgggtgttgaatgggacgctgttgggtggacaaaatgtgcgtctttcatggggtcgcagtccttcaaacaaacaggctcaggcagatccaaaccagtggaatggtgctgctggtgctggttctggtggtggatattatgggtatgctgctcaaggatatgaaaattatggttatgctcctgctggacaggatcccaacatgtatggcagttatccgggatatcctggttaccaagctcctcaacaaca

SEQ ID NO: 108605 - DNA, 1312 bp, Glycine max
  Clone ID: PAT_MRT3847_69084C.1
tccacgcgtccgatttcatttcctctgtctttctttgccctctccttttctctctctagaattctcagatttgcggggcgagatgatgcagcagccaggacccggcatggcacctcccaccatgggccagcagccgcagcaacagtaccagcagcagcctccgccgcagcagcaacaaccctacgtcatgatgccgccgcagcatcaggcgccgcagcctatgtgggccccatccgcccagcctccgctgccgcagcagcctgctagcgccgacgaggtccgaaccctctggatcggggatctgcagtactggatggacgagaactatctctacacctgctttgctcataccggcgaggtttcgtcagttaaagtgattcggaacaagcaaactagtcaatctgaaggttatgggtttattgagtttaatagtcgtgctggagctgagagaattctccaaacatataatggggctattatgccgaatggggggcagagtttcaggttgaattgggcaacttttagtgccggtgagaggtcgcgtcaagatgattctcctgattacaccatatttgttggtgacttggctgcagatgttactgattatcttcttcaggagacattcagggctcgttacaactcggtgaagggtgcaaaagttgtcattgataggctaactggccgtaccaaggggtatggctttgtaaggttttcagaagagagtgagcaaatgagagctatgactgagatgcaaggggttctttgctcaacaagacccatgaggattggaccagcctctaataaaacccctgccactcagtcccagccaaaagcttcatatctgaattctcaacctcaaggctcacagaatgagaatgatccaaataatacgactatttttgttggcaatttggatcctaatgtaaccgatgatcatctgaggcaagttttcagccagtatggagaattagttcatgtgaagattccagcaggcaagcgatgtgggtttgtccaatttgcagacaggagctgtgctgaagaggcccttcgggtgttgaatgggacgctgttgggtggacaaaatgtgcgtctttcatggggtcgcagtccttcaaacaaacaggctcaggcagatccaaaccagtggaatggtgctgctggtgctggttctggtggtggatattatgggtatgctgctcaaggatatgaaaattatggttatgctcctgctggacaggatcccaacatgtatggcgagtatccgggatatcctggttaccaagctcctctaccacagcaacaaataggatat

SEQ ID NO: 108606 - DNA, 1913 bp, Glycine max
  unsure (1)..(1913): unsure at all n locations
  Clone ID: PAT_MRT3847_69085C.1
attgggcaacttttagtgccggtgagaggtcgcgtcaagatgattctcctgattacaccatatttgttggtgacttggctgcagatgttactgattatcttcttcaggagacattcagggctcgttacaactcggtgaagggtgcaaaagttgtcattgataggctaactggccgtaccaaggggtatggctttgtaaggttttcagaagagagtgagcaaatgagagctatgactgagatgcaaggggttctttgctcaacaagacccatgaggattggaccagcctctaataaaacccctgccactcagtcccagccaaaagggtgtcaagaggctctgtcatcccggagcctggaactgatttcagctgaaatggttaccattttagtgcatgtccttgcttaggtcagttatccgtttatgttttgcccgttattttttgtggcattttctttttcgcctacaatttcaagttcttttcattccagttgttggttgagtttttactcaaattacatttgcaacttctctcgttaattattttttcagtcctccattcttaatctttgctcctttaaaatttactcctattagtttgtcataagaactacatctttgactttctttgttagcgttcccttgtaccaaagaagaccttatttatgttttagtaatttcttctgttcttctatcaaatgcctattaatttcagtttccaatctctagtccacgaggaaaaaatgtttagtgcctgtgtttattactttgattttccagaaactacacttttgctggctggttatgtttgtgttgtcgtgtggtttcatattttcatgatgattaggttctattcccattcagttattcccaatttctaagcgcaatgccatgcaattgaagttgtattttactttacattgctcattcctttcagttagcatgatctttagaacctgctattgatatctttttcttcttctcaagtgctggaaaattttagatataggattgccaatatgatcaagttcaaggttgtatctctaggctttactttatgttttttttcttcattcttctcccattccatcttcacttccttcctttttccttgtcattttggattttagatattttctgcttggctggaccagtaatattatcttgtggtgcttgtgattttagattagatattttctgtttatcagttaccatgactactttagttgtaactgtgcctctattctgccattgtcactatattaccgctatctttgttgtatttactctgataatctaaatgcacactcaaacttttctactgatttcatttatattggatggtgtccaactgcttttctgaaggtttgtggtgcatgaatggtactaaccaagttgttgattctcaactttgacctctatcttattgttgtatatattgctcatgttaactgactgatttgtttatatattgtttacttataatttcatttctattgttgtgtatattnatcattctatttgaagatctgtggtgctggaaaagtaaggcactggctaattttgttgttcctgagattgaacactaaataagtttcacctttagttattacaatattatttggtatatgattcctctatttttgttttgctatttgttcttggtgatttttccatccgtgttttagataattcatcctttttacttcacttctattttgaaaatgcagcttcatatcagaattctcaacctcaaggttcacagaatgagaatgatccaaataatacaactatttttgttggtaatttggatcctaatgtcactgatgatcatctgaggcaagttttcagccagtatggaggaatttagtgcatggtgaagatttccaagcaggccaagccgatgtggggttt

SEQ ID NO: 108607 - DNA, 2017 bp, Glycine max
  Clone ID: PAT_MRT3847_69086C.1
ggctcgaggttagggttgtgagtcttcctttaaaggggcatcgagactcaatctctttctctctctttctttgccctctctttctctctctagaattctcagatttgcggggcgagatgatgcagcagccaggacccggcatggcacctcccaccatgggccagcagccgccgcaacagtaccagcagcctccgccgcagcagcagcaaccctacgtcatgatgccgccgcaggcccaggccccgcaggccatgtgggccccctccgcccagcctccgcctcagcagcagcccgccagcgccgacgaggtccgaaccctctggatcggggatctgcagtactggatggacgagaactatctctatacctgctttgctcacaccggcgaggttacatcggttaaagtaattcgaaacaagcaaactagtcaatctgaaggttatgggtttattgagtttaatagtcgtgctggagctgagagaattcttcaaacatataatggggcaataatgccaaatggggggcagagtttcaggttgaattgggcaacttttagtgctggtgagaggtcgcgccacgacgattctccagattacaccatatttgttggtgacttggctgcagatgttactgattatcttcttcaggagacatttagggctcgttataactcggtgaagggtgcaaaagttgtcattgataggctaactggccggaccaagggatatggctttgtaaggttttcagatgagagtgagcaagtgagggctatgactgagatgcaaggggttctttgctcaacaagacccatgaggattggacccgcctctaataaaacccccaccactcagtcccagcccaaagcttcatatcagaattctcaacctcaaggttcacagaatgagaatgatccaaataatacaactatttttgttggtaatttggatcctaatgtcactgatgatcatctgaggcaagttttcagccagtatggagaattagtgcatgtgaagattccagcaggcaagcgatgtgggtttgtccaattcgcagacaggagctgtgccgaagaggcacttcgggtgttgaatgggaccctgttgggtggtcaaaatgttcgtctttcatggggccgcagtccttcaaacaaacaggctcaggcagatccaaaccagtggaatggtggtgctggttctggtggtggatactatgggtatgctgcacaaggttatgaaaattatgggtatgctcctgctgctggacaggatcccaacatgtatggcagttatccggggtatcctggttaccaaccacctcagcaacagcaacaaataggatatagttgagaagagaatgttccttttcttctgtaatcttttgtgatacttatcgagttgcgtgtctcttctcgtctcgtggaaaaccgactctgctactctttttcttttttccccttgtttgcttaataacattaaattttatcggagccgccttttgtatccataaattgcttgctgaatacttatttatgaaatgatctctattatgcattatggttttaaaaaaaaaaaaaaaaaaaaaaaaaaaaaaaaaaaaaaaaaaaaaaaaaaaaaaaaaaaaaaaaaaaaagggcggactatataaaaagaacaaacaaaaaaaacaaaaaaatgggggggggcctttttaaagaacccaactttaaaatcccgtccagggaccttttttttttttttttggggaccctaaaaaccattgcctggcccgacttttaacaccggcgggaagggaaaaaccttggggttcccaatttaattccctttggcgcaaatcccctttcttccaaggggtgtataaccaaaaaggccccaccggaccgcctttccaacaggttctcaaccccgaagggcaaagggaacccccccttaacggcccttaaaatggcggggggggtgggggtccccccaaggggaaccttaccttttgcagggcccaaagggccgggtttttccggtaa

SEQ ID NO: 108608 - DNA, 734 bp, Glycine max
  Clone ID: PAT_MRT3847_69087C.1
agtccggaattccctaaatcgacccacgcgtccgggtaaaaaaaaatacaagaagaagaaaggcagagagcgagacacatgaactgaaaacctcataaggataaaacaaaaataaaaattctcgtttctgtctgaaaaaaccaaaggtgatgctgtgtgcaccaccattccaagatgccatttactcttcatccctctaaatctctttgctctcccaacttcacaataacaccaggtaaggatactactcttttcaccaacaccttcttcttcatcaacaaaccacgcaaaaaccccacaaagtttcgttcttttgccaaggttgttctttacactccccgtgcttccatagtttctaagaaagatccaatcttgggctatacccacttcacacttcgctccaggagtgatgggtttgatggcttttccactgatgtatctcaagatgatggaacaagccaagaacttgaacagcttgagttgctgaacaagccttcaccagtgcttgttaccgaagagtcttcttctgaagttgaagtggaggaagagaaaccctccaaggaggaggctttggcacctttcttgaagtttttcaaaggcaaagattctgggcaggatgttgaggaagatggtgaggggttgggaagtttctgaaaaaaaatgatgtggagggtgagaatgaagaaggagataagaaggttagtgttggagtactatgagcccaaacctgggga

SEQ ID NO: 108609 - DNA, 497 bp, Glycine max
  Clone ID: PAT_MRT3847_69088C.1
ctccatcccaatccttctgcgttaacaactattgtatctctgtctctcatttttggacaaggaatctcaacggatcagcccgtccacttcactccttacatcacatgcctaggatggatccattgggcaaactattagctcaaaataatcactgtgtcacgtcttaaaacagataagatgctacccgtcacctgtatgcaacaccctgtatgatcaagcatgttacttcatccacttcaaccttgattcttcgatctattcttgaaatatctctcataattcctacactgctgcatggggcccttctatacgtgcctgtcgtccccattcgcagcatcgcttacttacactgccatgtaccccgatacttcctggatttgcgagaacatggcacttgtcattatgaatgcacgtttgatataaatgcacgtacacatgtgccatgcccaactctcttttccgccagatttttcatgcccttgctccaggacattcac

SEQ ID NO: 108610 - DNA, 1310 bp, Glycine max
  Clone ID: PAT_MRT3847_69089C.1
cacgcgtccggtcatgactggctgtccatagaggcttataataagacatatcaccattttattcagttagtccaaggaccaaaatattgggcccatgcacagtatggacaacactgttctaccacataaaaaggttcaaagaggaaggcctaagaaaaatagaaggagagatgcaaatgaagacaatgtcataggacataggagttttggtggagattaatttatctcagcctaatttgttgcaagatagtgacatggagttcatggtaaatattttgttctcctaagactaaccaatttgtttttatatattacaagtgttatttatgtttggcatttgcatgtaggtccctgcacctattgttgatgttccacccgtagcaaggtataagctaaacataagaagacccaaacaaaagaacatttcaggcacttcaacagtaaacacaccgtgttgtggatgacccgccaacaacacccttactttaaatgaagaaaaatgaatacccattccttgttttatttttttatttggatgtgtagttggatatgactaatttatattcagtaggtactagtttatgttgtgtatttttggtactttaaataggaaagcttgaacgatgtaaacattatggtacttatctatgaaagcttgagttatctattttggtttatgatgtgaaagctttatatggtgtgaacgcttgccctgctaaaggattgcttgtaactagcatgcaatggtgcatgtgcgcatatggtctgtgaaatgaaattatattttcccttctttctttattgttattgatgtgatttatgatatgcgggtgaaggacccatatcacatgcaacaccatataccacgccttcaataacagtatttactatttacagaaaaataaatatgatatgactagtgactttatgcgaaatctgctatgactgaaaacagaattagaaataatgatgtaaattctgaagagaaattttccaatttgaaataaaaataatgtcaaattcattttaatctcatcacaattcacaactaatctaacataggaaattatttaaaaatgctcttattgttcactcccaatatggtagttactagaaataacaaacttaaacatagggtttagttaggcctgctctcactgttagatgtacactactagaaattaggctttctacaccggttatttggccctttctacatcggttatgaaccgatgttgtagcgggagtcgttgaaagcccacaccctacaacgacgattggtggaccgatgtagaaagacatgatacaag

SEQ ID NO: 108611 - DNA, 357 bp, Glycine max
  Clone ID: PAT_MRT3847_6908C.1
gtcaaagcacttcgcgaagcgtgacaagcagtcaataaagaacctggcgtcgtcgccgaagctctaggaggctggcaacgccccctcactggccattaaagccagcgtggataagaccaatatgaggttcgacagttatgcgaagcaggggttgctgtgcagcggtgcatggttgccgcacctgatcgtgaacggataccagacgcactcaggtgagttcatcacacccggtatactaatcctgtacatctccggatggatctgcagggttggtcggacccacttgattgctatcagggaccataagaatcacaccatgaatgagatcatcatcgatgttcctctggcttctcgctt

SEQ ID NO: 108612 - DNA, 584 bp, Glycine max
  Clone ID: PAT_MRT3847_69090C.1
ctgcttggggggggggggggggggggggggggggggggggggggggggggggggggggggatcccagaagagaaggagagggagagggagggagagaaaagaaaagataaccctaatacttgtagggaacacctgtttagagcacggcctacggcaaatcaaaaaaatagccccagaagtatttaaaggaacccaactgatttaagaaccgtaggccggtatggggataggagaatttttaaagggagggaggacccaagaatttatggaataccaaacagaaagaatacaataggaaaattacaaccatggagagtgtttgtatggtagtggcccgtgtagttgtatgttactactagggtaaaagacattgcccacagcgatgcctagtatacttggcaataaagcaggcccatataatgccattattgatgttaactggggtagaccgttggggattataccacgagttgggcagcgttaacccaaaggccggaaccggggtcttagctagcgtaagcgctaaaccaatacaaaatggccgccaagaactggctgaaaatggggttatagcggattggccc

SEQ ID NO: 108613 - DNA, 648 bp, Glycine max
  unsure (1)..(648): unsure at all n locations
  Clone ID: PAT_MRT3847_69091C.1
gtttccgagctccatgcctctgagtactcccttggcatagagggatccacagttacggtggagtgtcaagatggaggaaatgctagaaacctgacacttgaagaggcaacaaatactatacttttttgcagctctatcatccatgatcttgcatatcaggctgcaacgatagcaatggaaaaggaacactcggaaccattggaaggttctgagccaacggtgactatattgacaaaacccaattccgatataaaggattctcgcagccgaactgctggcaagcgtgctatgaaaccccagaaggcaacaaggccaaagatggtggaagttgatgtaaaatccccttccaagattgagaatgacgaaaatattgacgagtctttgacacgcaatgttgggcttcctaacaaaatagacaacgtgaagccccttccaaataagcttgaatcaaagtgtaattgcgtcataatgtgagagtgcaaagttcagattgcccttataatttgtgccggcatttcttctcttcctgttggcttatatatacaccagagcagagcttagccaaatgcttgcgcatttatggctttaggtttatgggctgtttgggataatagccaattngctattggtggntccaatatatatatt

SEQ ID NO: 108614 - DNA, 244 bp, Glycine max
  Clone ID: PAT_MRT3847_69092C.1
acaattcggaaattcgtaaaaaactctagaagcgttttcggttgggtttccgggtcaagctttttattgaaccgaaccgaaccgacctgaatccacagtgtgcttcctcgtcatctcaagttttgctcatcattctcactgcagctattattgactctgtttccaaagacgcaatggcatccttagatattcattcactgcttttattctctgccattttccgtgttattttgattgtgtatgg

SEQ ID NO: 108615 - DNA, 257 bp, Glycine max
  Clone ID: PAT_MRT3847_69093C.1
cggacataaccggctcgacccacgcctccgtttttctctatggggtgcaacaccacgattcaaaaggggggctttgtgggaacctgggggggtaaaccacacacggctgaatagcgacgtgacggggaggacgcaggacatggcgcgataccgataacagccccattaagatagaatggaaccaggtgaacattcacgaggatattcaagccagctctagaaaggaaaaagtggtcctctacaaaggaccactcagt

SEQ ID NO: 108616 - DNA, 684 bp, Glycine max
  Clone ID: PAT_MRT3847_69094C.1
cttggttttttttttttttttttttttttttttttttttttttttttttttttttttttttttttttttttttttttttttttttgaggggggaaaaaggaccccaatctagggattggataggggggggggcttatgcccaaacaaaaaaacaaaggggggcgggggggacaatggggggggaaaaaacccaacaggcaaaattatttcattcctacccacaaaggtttcagcaggggggagggggaaagcaaaaccccccccccaaaaattcaaaatccttaaatttaaaaaaaaggggaccaagggcggaactttaaaagaatattacccccccaagcttggggtccactcaaacaactttttttagaagccctttatttatttaggggcccaaatcacgggctttctaagttccgaacaacatgtgggggttgccatcattggacattctatgcctttggtagcgaaaaaccagaaggtggaacaactggaggagcaagacccccagggggggggaacccgagaaaaacttggaagggctaatatattccccctagggggccaggaagaggtccaacaataaccaagggggggggggggaacacccggtaaaaaacacccaaaaacccatgcttttccaccggaaaaccagacgggggggcccttgggctgggggcgaga

SEQ ID NO: 108617 - DNA, 181 bp, Glycine max
  Clone ID: PAT_MRT3847_69095C.1
ctctctctctccaagagctcgggttcttcttcttaactcgcataaaatgaagatcctgcggggcgacacacttcttacattgaccaagttcccaagacctgttaaggcttactgcaccagatgatgaaagctaactccacagatgatagaatattcacgggatctacatgactcccattat

SEQ ID NO: 108618 - DNA, 682 bp, Glycine max
  unsure (1)..(682): unsure at all n locations
  Clone ID: PAT_MRT3847_69096C.1
gctagttcgagtttttttttttttttttttttttttttgcatcaaaaatccaatnnttcactgcacttaaatacacactcgagaagagaagagaactgagggcacatgacttgaagatgaagtgggtgtttatttgttctagtaggccccatgccgaataggttgttgcaacttccctaagaaacacttattggctatccaaccaacaatatttcttttcacagctgtgcttattggcccggtggacacccacnctaaatggtgcctgttggcccaaaggtttcccattttcttgaaggggattattaaaccaacacccacctattattttgtttggaagcggctttgattttctggacaccccagtagatggagggattcttcaagaccaaccccattttgttgcacattttgggtagaggggtcgtcctccttgtgaaaaaattttccagntggggttaacaggggtgtgtggcatcttgtgtcaaattctgcctgagacaaaaacaggaactgctcccagggcaaccctcatttctccgcgttttgaacgtggtgtaaacctattttctgcgtacncatgaaccattgcaggacctttctctttgacggtctcgcatgtctgctaaggacacattagcggcctttgtatagaatcttgtctctctacatttgggaangt

SEQ ID NO: 108619 - DNA, 306 bp, Glycine max
  Clone ID: PAT_MRT3847_69097C.1
ctttttcagtttatcttcagttatgtatcactaggcttaatatgttgcctttgttcgtttggtttctcagacaacacaacagtgaatttggcgtcttagatatggctgacacagagagtattcattcatttggtgatttggaggagaataccaatttgcgctttctttcaggatgccagactagctcttaatgcccacagtcttggccgggaaatcttgtcaattgtattcgcctgtaccaatggttttgacaggcgatcctattgcttcacttgttgacacaccattctattggtccatataggt

SEQ ID NO: 108620 - DNA, 117 bp, Glycine max
  Clone ID: PAT_MRT3847_69098C.1
cgccgcgggctgagacaacacaacgggagggctgatatgtaacagcgctaaacttgaggccaaccgcatctatatacagctatattcacgtatctgacctcaaagcatcaatatcac

SEQ ID NO: 108621 - DNA, 487 bp, Glycine max
  Clone ID: PAT_MRT3847_69099C.1
ccgttccaaggaaggtttcccgtcatcactgtatgacgtcctccttctttgggggggggggggggggggggggggggaaggcgttaaaatatatcttggccaggaggggactagaaaacgggccggattaaagatatatgcgacgacatgcacaacgaaaagtgaatactaggattgtacactatgcgtttgcaaacgacaatattgaggaaggatggataaatgaaaatacaaatatgacgtaagtcccaacccgtaggggacatactaacaccgaaatttaggccgggaaggggcccaatggtatggttggccgtaggatttgggagggcgtactgctggggttggcagtacagaggttatattagtacaaccaggtttaagaggccaacgtagacgcgacgcacgcaggcacaacagtgcatacgtacttaaagattttaaaagaaaacaagcctatgtattaaatcacaaaagccgctattaa

SEQ ID NO: 108622 - DNA, 477 bp, Glycine max
  Clone ID: PAT_MRT3847_6909C.1
acatacaggaatgattaggatgagatatgtatatcaaaggaacattgaaagaatacaagcaaacaggaacctaaatgtagccatcatgcataccatcagagcttcagaaagcccttcagcaattgcagcatcattaaaaccaccaccattaaagggtatagatgatagccacgagaagaaaacatctgggtctctggtccaaccagaccgttgcacaaggcaacctgcatccaataatgctcaactaagtatatatactcaatagactagtcaattgcatataaattcgccagagtacaagccaggcagaattcaagtagcatactccaagaaattgtattttcaataaatggtcgtagataaactttgttaactttctagtttaacttccaattaagaaaacacacaatgcataaattttatatttagaaactaaacatccttccacacaaacaatttgcagaaactttatatttg

SEQ ID NO: 108623 - DNA, 799 bp, Glycine max
  unsure (1)..(799): unsure at all n locations
  Clone ID: PAT_MRT3847_690C.1
aattcgagctcgttacccggggatcctctagagtcgacctgcagtcgccttcgatgggcatggaattgcgagacgatcagatcctgcaaaacattattgtttcagggagtcctgaaatcgacgtgttcttgaaaccttctctgccggttcccggtaggaggatgaaggtgaaggtgataccgaggaattcgagacacacggtgaagatagaggtgaattccacggacaaagtttcggtgctgaggcaggagctggagaggttgcagcagctcggtgggttttctcttcccgcgaatggtggttattttttcattcacaagcggaatgccatggatgaaaataattcgtttctgtggcaccgagttagggagagtgacaccatagaaacctttgatggattaatttcttctactgctgcatcggcatcttcctcgtcacgccctgcctaatcctagttgcatagttacgcgccacaagccagctatagtttctgtgcataactataataacaaactagctagctgttaataggttcgctaactacgaataaaactttgtaaaatagaagcaggttactttcatgtacaacaganaaaagtataatcattccatcttgtanataaagctttgcaaagagtattgtatgatacctacttatctagctttcttttcttgactgttntcatgttaataaggggtttatttactcggcagttagttacttgggtaaaattttgtaaattatatattatctcatcataagatgtgaataccntcatttatattatcacatcaaaat

SEQ ID NO: 108624 - DNA, 485 bp, Glycine max
  Clone ID: PAT_MRT3847_69100C.1
atggctgacatccacgtgtgaccctctgaatgcagaatggaactgcatggtcaggctggatacgccggacatgatcgctctaagctgatatgcccaccattgtcagacaccctagcaacaccttttttatgctcggagtgggacacagggacgcatgcctgcgccaccaggcgcaggtcatgagggggatcatgaggctcaagtaccttatctaacatggtctcgtcagcaactgagatgatatggacaacacctgacataacacattctacaatgagctgcgtgaggctgtggaggagcaccacgtcctcctgacctatgctactctcaaccccatggtcaatcgcgagaagatgacctatatgatgtttgagaccttcctcgcccttgctatgaacgtcgccatccagggcgtcctgtctgtgagtgccagtgatcgaaccacaggtcttgtggtggactctggtgatgggagaagccacact

SEQ ID NO: 108625 - DNA, 252 bp, Glycine max
  Clone ID: PAT_MRT3847_69101C.1
ttcagcttcactcaataaaccattttaaacaaaataatagtattgtatataacataaacgcaaacacggaataaaactcagatttgcacttggctgctccaatcattgtctatgtgattttctctcttcgggaatgtgattgtctggggggcacagaagaagttgagcagcgcgtgatggagtgggtgaagatgatggggtacgcgagagagttcatggttggagtggcggagatgacggctggagttcgga

SEQ ID NO: 108626 - DNA, 358 bp, Glycine max
  Clone ID: PAT_MRT3847_69102C.1
gagggaaagcctgagaagaagaaagaaagatggtgaaagtggcgacgtacttcgcgatgacgcttggagccttcgtgttctggcagtccatggacaaactccatgtctggatcgctcttcgtcaagacgaaaaggatttttaggttaaattgagccattgaggaattatgaagcattggcaatactgactggaataagcagtctagagtagaagatgttaaacagaatagtgaatagtggggtgccattattgtgctatggttgagcattgtagctgccagtcactacatggaactcctagcatcgcgtggatagtggctgaattgcagtagacagcacaattgtaccaacaagtggc

SEQ ID NO: 108627 - DNA, 148 bp, Glycine max
  Clone ID: PAT_MRT3847_69103C.1
cttggctgcaactgtatataaggcaatgtattttcactttgaccgcactgatttggttgtccttgatgaagcatgtctgttgtttgctcacaaacaaggccttgcaatgacttatactaatgttacaaggccttgtttgtgagcaaaa

SEQ ID NO: 108628 - DNA, 964 bp, Glycine max
  Clone ID: PAT_MRT3847_69104C.1
gcgccttcgtgctcaagcaatacggggactaggacaaaattagtgtgaaaataagtagaaaggaaaagagattctgagactgaaagtaaatcgaagcagagaagaagaaagaaagaaagatggtgaaagtggcgagggaaagcctgagaagaaagaaagaaagatggtgaaagtggcgacgtacttcgcgatgacgcttggagccttcgtgttctggcagtccatggacaaactccatgtctggatcgctcttcgtcaagacgaaaagaaagagaggttggagaaggaagcggagatcagaagggttagagaagaattattgcagcagcaggccagtcagaaggattctctttcttgaattcgaattatgttgtaattttgctttgtaatttccccttgcttctgtttttccaatgcaatgtcttgtgctcaaataaaatctgctactcccgagcacttcaaatttaattgcgtggatttctattgtgttcctctacacatgcacttgtttcattaactgctatgtgtcagtaattgttggaacacttctatcgggttatgaaccagattttaagcgtttagatggattgtttcagtcatacttgaaccttttattcttctttgaaagtgtgagatttggtgaataattcatttgctgcggttgcttctcctgaaaaaaaaaaaaaagtcattttgaatggtttttccatagaaaactgtttatgtggtttgtcatgtaatctatcactggattgtgatgaaactttttaggttaaattgatccattgaggaactatgacgcaatggctatactgactggcatcagcagtctagagtagaagatgttaatcagagtaatgaatagtggggtgccattattgtgctatggctgatcattgtagctgccagtcacttcatggcactcctaccatcgcgtggttagtggctgcattgcagtacacag

SEQ ID NO: 108629 - DNA, 2323 bp, Glycine max
  Clone ID: PAT_MRT3847_69105C.1
ttccggtcccgtccgccgctttctttcggtaggctccccggtatctgccgcagccaacatccaaagtccaacaaacatttggcggagtttacaacaaaactcttcaaaacccacatccaaatcgtcgtaaagttcaaatctttgatacctcatttcgatttagacctatattgttcccagcaacaggcttccattaacttctctctgcggcgatggtcttgaagtcaatggttgcttccgcgagcgatctaagtctcgtgtctgttgcagggaactctccccttgatttcaagaatcgggttttcggtggccgactcattagcctcggatttcgtttcaacaaaggtagtaaatgcaaggggaatgaaaggtttaactttgaggttcgtgcagctgtggaagtgggtgtggagagatcgaagagtaaggctttggagggtggttttgggttggatgtggtttcagaggcagagttaacagtgaagggttttgcggggttgaggaagaccaaactcgtgtgcactgttggtcctgcttgcagctctttggaggatcttgagaacttggctcttggaggcatgagtgttgccaggctcaacatgtgccatgggaccagggagtggcaccgtgatgtgattaggaagatcaagaagttgaatgaggagaaagggttctgtgtttctgtaatgattgacactgagggtagtcagattcatgttgttgatcatggagctccttcctccgttaaagttgaggaaggttcaaattgggtgtttactgctgaacattatgagggttctcgtccattcactgttcaaacgaactatagaggtttttctgaaggtaccgaagtgggtgatgaacttgtaattgatggtggaatggcatgctttgaagtcacagaaaagactggtaatgatttgcattgcaaatgcatagatgctggtcttttcctgcctggagccaaatttagtttttggagagatggaaagcttgtgagggggaataacaagctccccactctatcgacaaaggattgggctgacattgactttggtatagcagagggagttgatttttttgccttatcctttgtcaatcatgctgattctgttaaggatctaaagatgtacctctctacgaagtcaactaaatccattaaagttttggcaaagatagaaagcttagaatcccttcataaactggaggaaatagtgcaagcttctgatgggatcatggtggctcggggtgaccttggtgtcgaaataccacttgaacagattcctacagtccaagaggatataatttacgtatgcagacaattaaacaagccagtgattgtagcttctcagcttcttgagtcaatggtcgagtatccaacgccaacacgtgctgaggtagcagatgtttctgaagcagttcgacagtatgctgatgctttgatgttgtctggagagtcagctattggatcatatggacgaaaagctttggcagtcttggatatggctagcagtagaatggaatcatggagtcgggaggaaaatagacaaagtcttgttagccaccatcaacttggagaatcattgccagaatgcataactgagcaaatatgcaattgtgccgttgaaatggccaacaaccttggtgtggatgccatctttgtgtacacaaagtatggacacatggcatcgcttctatcgcgcaaccgcccgaatcctcccatctttgctttcaccaacgatgacagtacccgcatggctctgactttgcaatggggtgttgtgcccattctggttgatttgtccgatgatgctgaatctaacatctcaaagtctgtgcaacttatgaaatctagagggttgatcagccaaggagatgttgttctagtggtctcagatgttgctccgacacgtgcctctcctatggctttccagtctattcaggtgaagactattatctaaaacacaaggttgcaaaaatattgaagaacacgtgtctgtgtattttctaggcttgggataggatagtattgtattattgtttttttttcttcggtattgtattattggtttcttgtccttttttttatatattggtttcttgtccttattcaaaacaacaaaagtttataaattctaaattgtagaactctagcaagttttggaacctctttcaagagatgcttatgaattacactttgtgaattgcccatcgtaagtcactaatacagttgcactaatatatggcaattatatttgatttatcaactttgattgattgtgatgaaccaccagaatactacaatggcaaagcttttgagctt

SEQ ID NO: 108630 - DNA, 486 bp, Glycine max
  Clone ID: PAT_MRT3847_69106C.1
aaattcaagcgacgcctacaaccaccgcatgtccacctccaatccttgcatctccttcaaccacctccctcatatgaccccaaccatcacctcaaccaccgtgagcttcgctgcgaacggcttcgactttatcaaacgaaacacttccaacgtagccaccaccctcacccaaatctctaaatccaccaccaccataaaagccttcgtgatcgacctcttctgcaccacggcgatggaagcagcttcttcgttgggaatcccagtcttttacttcttcacttccggtgcggcggttctcgaactacactcgtactttccgaaacttcacgaggaaaccaacatgtcgtttaaggatatggtcgcggtggaactgcgcgtgacgggaaacgcgccgctgaaggcggtgaacatgctgcaacccatattttggagagggaggaccctgcgtactgggacatgttacagttccgcacgcgccttccaaag

SEQ ID NO: 108631 - DNA, 250 bp, Glycine max
  Clone ID: PAT_MRT3847_69107C.1
gtaatattaataattttcatgatttgagaagccttcgcttcaaagcgaaaagtcctaatagcggctcgaccctccataaacctggagtgactacatggatgccccccaccctaccacacattcgaagaacccgtatacataaaatctagacaaaaaaggaaggaatcgaaccccccaaagctggtttcaagccaaccccatggcctccatgactttttcaaaaaaaaagtagtgagaaaaaaaggggggc

SEQ ID NO: 108632 - DNA, 166 bp, Glycine max
  Clone ID: PAT_MRT3847_69108C.1
ggccggcaaagatgccggccttgatttgcttggaaggggaagggcccctgggaatttttgcccaaccgttgtggaagggtattattctttcaaggtcccggatattaagcctggatggttttttgtgcctcagataaaaaaggccaaaagtgaatttgagctttcg

SEQ ID NO: 108633 - DNA, 215 bp, Glycine max
  Clone ID: PAT_MRT3847_69109C.1
taccattttcattaacaacaccatttcaagggacgacgtagtaattaacatgggtctgcattcatccttgttcccaccatctctgtcttgtacctcttctactactgtaacaagatggcccacttcccggcttggagcttgtttgaattggatgagctcgtccttgattccctaagcacttaacgcatattattattcttaattgttcaataaaa

SEQ ID NO: 108634 - DNA, 131 bp, Glycine max
  Clone ID: PAT_MRT3847_6910C.1
aattttcttaaaataaagatatttataactttcacaattattatgaaatattgggtggaatgacaccacatgagcacaaatgacaaaaaggtattttggcacccaactggcttcttattaagaataactaa

SEQ ID NO: 108635 - DNA, 604 bp, Glycine max
  Clone ID: PAT_MRT3847_69110C.1
cccacgcgtccgggattggcttttttatatcatttgccatagcattcattgttaatttttgcgaagaataatgactatctagaattataaaggagagtgtatcgtaaagcgaaggactgcgggacttgagattcataccatgtacaactacaaaaccacccgaacttgtgcactataacaggaatgggacctataaggggattgggaaacccagatgtgtaaaatacttaatttaaaactcaaaatatcatgttatctaaattagggataatgcttgtaggatggggaggaaacaacggctcatccgtaaacgacgatgttattgataacctagagggcatttgatgggcgtacatatgacaaggactaacaagtctagtacttgggctctctcaccctatcctgagctatactagtggggtccctacagggagaggaaatctatgctccattcaagagacagcttccaatggctaaccctaacatacacgggcttggtggactagatatcatctatattacacttgctaatgtcattgtcaatgcaaatgtggtagacattgttatgcataagctgttgaggcctaacgtgggacatatgctc

SEQ ID NO: 108636 - DNA, 684 bp, Glycine max
  Clone ID: PAT_MRT3847_69111C.1
gaccacgcgtccgcagaagttgacttggagacaatagtcttgttcttcagatctctggtttttggtttcctggccatggcggaatcatttctcttcagcattgcagagtcactcctttcaaagcttgcttcgcaggcttatgaagaagcttctcgtgtgctgggtttgtacgaccatctcaaaaaccttaaagacaccctatcattagtccaggctgtcctgttggacgctgatcaaaagcaggagaagaaccatgagctgcgggaatggctgaggcagctcaaacgtgtcttctttgatgctgaagatgttctagatgaatttgaatgccaaacactgcaaaaccaagttctcaaagctcatggtaccatcaaagacaaggtaagccacttcttatcaacttctaatccacttgtttttcgttccaagatggctcaacaaatcaaagatatcagcatgaggctagacaaggttgcagctgataggcataagtttggtgtgcacacacactcccatgtgaacgattcaggtgtgataggaagggagaggcgcacaagacacatccgggagagttactcgcagcagaatcccaatgatgatcataaaagtctccccatagcgcttttgcggcagctcattcctgggggcgtcgtcttgcttcgcttctgcctcctcattgtcgtg

SEQ ID NO: 108637 - DNA, 295 bp, Glycine max
  Clone ID: PAT_MRT3847_69112C.1
aattcggcaccaggtttatgctttattgtttttctcgaacactatcaaatagcttgagactgttcttacactagtttctctatacttttggccctgcgtgagaccttccagcaactgttcctttgtttcaaggaagtggggtttggctgtggcagcagtggcttgtgcttatccgaccaacaagtgcaatcacatggctgtgtgtttgcctgcttgagcttttccaggcacataacagattcagattcatttttttggaggtggctcctattggagaggacccgaggatgtcatg

SEQ ID NO: 108638 - DNA, 221 bp, Glycine max
  Clone ID: PAT_MRT3847_69113C.1
ggctgccacaagactacagaatggggttttcctctgttctttctctctctctctctctgtcgacaccacatctttcagtgtcactaacattgactgtttcgtctggggactgggtctctagcaccgagcgttctctcactacacttgccccacttgaacgaatgctctctcccgtacatcgcactcgctccgattcagatccactcccctacgatgccttc

SEQ ID NO: 108639 - DNA, 379 bp, Glycine max
  Clone ID: PAT_MRT3847_69114C.1
ttttagggttctgctgaaaggaaacgacaaaggggtatggttgctagaaaaggagaaagagttacagatgcgagaacacgacatgtggatccggatgaaaaagcactacaaaaggatactgttggtagaacacgacataagggttcagatgcaagaaaacaacaggatggtacggattgcagaggactacagaagggtactgttgctagaaaacaacaaaagggtgtgatagataagataaccggaaccgacctaataactatctgcacggtgaagtgccagaagacgcttatcaagctgaggatggtgccaactcatgcaaaaatcccttttggcgagactgagattgatgaaaatattgatcagtctttcacgcaca

SEQ ID NO: 108640 - DNA, 7628 bp, Glycine max
  unsure (1)..(7628): unsure at all n locations
  Clone ID: PAT_MRT3847_69115C.1
tgcctgcgggtcgactctagaaaatgcgatgtgttattgctcagcnaatcaagtttctaaaagattggctaaaattttgttaaaacatatgcacttagacaatgaaggaaagctggagttgctgcacatgatgtctaacgttatgtcaaggaatcagattgggctgcacaatgcacaaggcaagataaaatgtcaaatgaagaattgaagctgcaggatccacgatgtcggatacaatgtccaggacatcctgcccgaaaatactggacacataaatctgttatatctttaacagattaatgtgcagtcagcaacagattaggagctctatctttaggaacgaattaaaagataattaaagattgaattacaaacttgaatagtttcgttcagggattaaagattgaagataaaaactaaaagataaaactttatcttttagatctttaagtgcagatttttcaggagaatgatagagcttatccagcgcaagttgttgcagcccagatacgtacactgctatataaacatgaaggctgcacgagttttctaccaagtccgggattgaagaccttgatggtaccctaacatcaagtgttggatctgagtgtgtagagttgatctcttgtgtgtagagttgatctcttgtgtgtagagttgatctctagtgtgtagagttgatctcttttgttcagagagcaatctctggtgtgtcttttgatttgattgtaaacacgggagagtgattgagagggagtgagaggggttctcatatctaagagtggctcttaggtagaggttgcacgggtagtggttaggtgagaaggttgtaaacagtggctgttagatcttcgaactaacactattttagtggatttcctccctggcttggtagcccccagatgtaggtgacgttgcaccgaactgggttaacaattctcttgtgttatttacttgtttaatctgttcatactgtcaaatataatctgcatgttctgaagcgtgatgtcgtgacatccggtacgacatctgtcattggtatcagaatttcaattggtatcagagcaggcactcgaaatcactgagtgagatctagggagataaattctgatgaacatggagaaagaaggaggaccagtgaacagaccaccaattctggatggaaccaactatgaatactggaaagcaaggatggtggccttcctcaaatcactggatagcagaacctggaaagctgtcatcaaaggctgggaacatcccaagatgctggacacagaaggaaagcccactgatgaattgaagccagaagaagactggacaaaagaagaagacgaattggcacttggaaactccaaagccttgaatgccctattcaatggagttgacaagaatatcttcagactgatcaacacatgcacagttgccaaggatgcatgggagatcctgaaaaccactcatgaaggaacctccaaagtgaagatgtccagattgcaactattggctacaaaattcgaaaatctgaagatgaaggaggaagaatgcattcatgacttccacatgaacattcttgaaattgccaatgcttgcactgccttgggagaaaggatgacagatgaaaagctggtgagaaagatcctcagatctttgcctaagagatttgacatgaaagtcactgcaatagaggaggcccaagacatttgcaacatgagagtagatgaactcattggttcccttcaaacctttgagctgggactctcggataggactgaaaagaagagcaagagcctggcgttcgtgtccaatgatgaaggagaagaagatgagtatgacctggatactgatgaaggtctgactaacgcaggtgtgctccttggagaacagttcatcaaagtgctgaacagaatggacaggaggcagaaaccacatgtccggaacatccctttcgacatcaggaaaggtagtgaacaccacaggatgtcagatgaaaagcccagccacagcaaaggaattcaatgccatgggtgtgaaggctacgggcacatcaaagctgaatgtcccacccatctcaagaagcagaggaaaggactttctgtatgttggtctgatgatacagagagtgaacaagaaagtgattctgacagaaatgtgaatgcactcactgggatatttgaatctgatgaagattcaagtgatattgatcaagaagcacaactgaagaagatcattgcaaatctggaggctgagaaggaggcacatgaagaggaaatctctgagcttaaaggagaaattggttttctgaactctaaactggaaaacatgacaaaatcaataaagatgctgaataaaggctcagatatgcttgatgaggtgctacagcttggaaagaatgttggaaaccagagaggacttggatttaatcataaatctgctggcagatcaaccatgacagaatttgttcctgccaaaaacagcactggagcctcgatgtcacaacatcggtctcgacatcatggaacgcagcagaaaaagagcaacagaaagaagtggaggtgtcactactgtggcaagtatggtcacataaagcctttttgttatcatctacatggccatccacgtcatggaactcaaaatagcagcagcggaagaaagatggtgtgggttccaaaacacaagattgttagtcttgttgttcatacttcacttagagcatcagctaaggaagattggtacctagatagcggctgttccagacacatgacaggagttaaagaattcctggtgaacattgaaccttgctccactagctatgtgacatttggagatggctctaaaggaaagatcactggaatgggaaagctagtccatgatggacttcctagtctgaacaaagtactgctggtgaagggactgactgcaaacttgatcagcatcagtcagttgtgtgatgaaggattcaatgtaaacttcacaaagtcagaatgcttggtgacaaatgagaagaatgaagttctaatgaagggcagcagatcaaaggacaactgctacctatggacacctcaagaaaccagttactcctccacatgtccatcctccaaagaagatgaagtcaaaatatggcatcaaagatttggacatctgcacttaagaggcatgaagaaaatcattgacaaaggtgctgttagaggcattcccaatctgaaaatagaagaaggcagaatctgtggtgaatgtcagattggaaagcaagtcaagatgtcccaccagaagcttcaacatcagaccacttccagggtgctggaactacttcacatggacttgatggggcctatgcaagttgaaagccttggaggaaagaggtatgcctatgttgttgtggatgatttctccagatttacctgggtcaactttatcagagagaaatcagacacctttgaagtattcaaagagttgagtctaagacttcaaagagaaaaagactgtgtcatcaagagaattaggagtgaccatggcagagagtttgaaaacagcaagtttactgaattctgcacatctgaaggcatcactcatgagttctctgcagccatcacaccacaacaaaatggcatagttgaaaggaaaaacaggactttgcaagaagctgctagggtcatgcttcatgccaaagaacttccctataatttctgggctgaagccatgaacacagcatgctatatccacaacagagtcacacttagaagtgggtctctaacctcactgtatgtgatcgggatggggaggaagccaactgtcaagcactttcaagtctttggaattgcagtgtagagttgatctctgagagctaaagagagattgattctaagagtgaggcaggtatattcttgggatactctataaacatctaagcatatagagtattcaattccagaaccagaactgtgatggaatccatcaatgtggttgttgatgatctaactccagcaagaaagaaggatgtcgaagacgatgtcagaacatcgggagacaatgtagcagatacagctaaaagtgcagaaaatgcagaaaactctgattcggctacagatgaaccaaacatcaatcaacctgacaagagtccttccattagaatccagaagatgcaccccaaggagctgattataggagatccaaacagaggagtcactacaagatcaagggagtctgagattgtctccaattcatgttttgtctccaaaactgagccaaagaatgtgaaagaggcactgactgatgagttctggatcaatgctatgcaaaaagaattggagcaattcaaaaggaatgaagtctgggagctagttcctagacccaagggaactaatgtgattggcaccaagtggatcttcaagaacaaaaccaatgaagaaggtgttataaccagaaacaaggccagacttgttgctcaaggctacactcagattgaaggggtagactttgatgaaactttcgcccctgttgctagacttgagtccatcagactattacttggtgtagcttgcatcctcaaattcaagctgtatcagatggatgtgaagagcgcgtttctgaatggatacctgaatgaagaagtctatgtggagcagccaaagggatttgcagatccaactcatccagatcatgtatacaagctcaagaaggctctctatggattgaagcaagctccaagagcttggtatgaaaggctaacaaagttccttactcagcaagggtataggaagggaggaattgacaagactctctttgtcaaacaagatgctgaaaacttgatgatagcacagatatatgttgatgacattgtgtttggagggatgtcgaatgagatgcttcgacattttgttcaacagatgcaatctgaatttgagatgagtcttgttggagagctgacttattttctgggacttcaagtgaagcagatggaggactccatattcctctcacaaagcaggtatgcaaagaacattgtcaagaagtttgggatggagaatgccagccataaaagaacacctgcacctactcacttgaagctgtcaaaggatgaagctggcaccagtgttgatcaaagtctgtacagaagcatgattgggagcttactatatttaacagcaagcagacccgacatcacctttgcagtaggtgtttgtgcaagatatcaagccaatcccaagataagtcacttgaatcaagtaaagagaattctgaaatatgtaaatggcaccagtgactatgggattatgtactgtcattgttcagattcaatgctggttgggtattgtgatgctgattgggctgggagtgcagatgacagaaaaagcacttctggtggaggtttctatttgggaaacaatcttatttcatggttcagcaagaagcagaactgtgtgtccctatctactgcagaagcagagtatattgcagcaggaagcagctgttcacaactagtttggatgaagcagatgctgaaggagtacaatgtcgaacaagatgtcatgacattgtactgtgacaacatgagtgctattaatatctctaaaaatcctgttcaacacagcagaaccaagcacattgacattagacatcactatattagagatcttgttgatgataaagttatcacactagagcatgttgccacagaggaacaactacttctatctgaacgtgctcaaacgtctcactcaacattaatagcacgttcactactgagccaaaacaaattcaaactccgtccccctaccttcctcattcaaacttacattttcgtggcaatctcgttttcattccccaacacttctcagatattcacgaaaccactccaaaagctctgcttctccatggctacctcaccaaaagaaacctcatcccctgtttcaccctctgtaccatcatctccatcatcctccaaaactccatcaaaccaggaacaacccgaattcaatatccaacccatacaaatgattcctggtccaggccctgttcttgagaaactgatccctaaaagacaacagggagtgaagatttctgaaaaccctagctttgcaacaagccctagggaagtagacactgagatggataagaagatccgcagtcttgtgaatagcattttgaaaaatgcttctgtccctgatgctgataaagatgtcccaacatcttccaccccaaatgctgaagtcctctcttcatccagtaaagagaaatcaacagaggaagaggatcaagccacagaggagacccctgcaccaagggcaccagaacctgctccaggtgacctcattgatctagaagaggtagaatctgatgaggaacccattgtcaaaaagttggcacttggcattgcagaaagattacaaagcagaaagggaaaaacccccattactaggtctggacgaatcaaaactattgcacagaagaagagcacaccaatcactcctaccacatccagatggagcaaagttgcaatcccttccaagaagaggaaagaaatttcctcatctgattctgatgatgatgtcgaactagatgttcccgacatcaagagagccaagaaatcagggaaaaaggtgcctggaaatgtccctgatgccccattggacaacatttcattccactccattggcaatgttgaaaggtggaaatttgtatatcaacgcagacttgctgtagaaagagaactgggaagagatgccttggattgcaaggagatcatggacctcatcaaggctgctggactgctgaaaacagtcaccaagttgggagattgttatgaaagcctagtcagggaattcattgtcaacattccctctaacataacaaacagaaagagtgatgagtatcagaaagtgtttgtcagaggaaaatgtattagattctcccctgctataatcaacaaatacctgggcagaccaactgaaggagtggtggatattgctgtttctgagcatcaaattgccaaggaaatcactgccaagcaagtccagcattggccaaagaaagggaagctttctgcagggaagctaagtgtgaagtatgcaatcctgcataggactggcactgccaactgggtacccaccaatcatacttccactgttgccacaggtttgggtaaatttctgtatgctgttggaatcgagtccaaatttaattttggaaactatatttttgatcaaactattaagcattcagaatcttttgctgtcaaattacccattgccttcccaactgtattgtgtggcattatgttgagtcaacatcccaatatcttaaacaacattgactctgtgaagaagagagaatctcctctatccctgcattacaaactgtttgaggggacacatgtcccagacattgtctcgacatcagggaaagctgctgcttcaggtgctgtgtccaaggatgatttgattgctgaactcaaggacacatgcaaggtgctggaggcaaccatcaaagccaacacagagaagaaaatggagctggaacgcctgatcaaaagactctcagacaatggcattgatgatggagaagcagctgaggaagaagaagatgcagcagaggatacagaatcagatgatgatgattctgatgccaccccatga

SEQ ID NO: 108641 - DNA, 310 bp, Glycine max
  Clone ID: PAT_MRT3847_69116C.1
ggggggggaggcaacatttaaatttttgcccatttaacaatcattttaaacctcaaatttagtaaatttgaattaaaaatgatgaattgaactgacccaacacacaacttccttaataatgcgggctaaaaaaaaaatccgtttggggcttaaaaattagaacctttctattttgcccagagccccataaaggaggaatttgtaacatcaaaccctaatccaactcacacagcctttttaattattttagcctttacacttttcggagccttcaaattcctctttcttttttttttttttttttaccccc

SEQ ID NO: 108642 - DNA, 978 bp, Glycine max
  Clone ID: PAT_MRT3847_69117C.1
atggataagaagatccgcagtattgtgagtagcattctgaaaaatgcttctgtccctgatgctgacaaagatgttccaacatcttccaccccaaatgctgaagtcctctcttcatccagtaaagaggaatcaacagaggaagaggatcaagccacagaggagacccctgcaccaagggcaccagaacctgctccaggtgacctcattgacctagaagaaaaagattacaaagcagaaagggaaaaaccccccattactaggtctggacgaatcaaaactatggcacagaagaagagcactccaatcactcctaccacatccagatggagcaaagttgcaatcccttccaagaagaggaaagaaatttcctcatctgattctgatgatgatgtcgaactagatgttcccgacatcaagagggccaagaaatcagggaaaaaacttgccttagaaagagaactgggaagagatgccttggattgcaaggagatcatggacctcatcaaggctgctggactgctgaaaactgtcaccaagttgggaaattgctatgaaagtctagtcagggaattcattgtcaacattccctctgacataacaaatagaaagagtgatgagtatcagaaagtgtttgtcagaggaaaatgtgttagattctcccctgctgtaatcaacaaatacctgggtagaccaactgaaggagtggtggatattgctgtttctgagcatcaaattgccaaggaaatcactgccaaacaagtccagcattggccaaagaaagggaagctttctgcagggaagctaagtgtgaagtatgcaatcctgcataggattggcactgcaaactgggtacccaccaatcatacttccactgttgccacaggtttgggtaaatttctgttcaggtattgtgaggcaccaaatccctatgataggtggtatgatgaatatgttgagtggtgcaaccctcttttgtaa

SEQ ID NO: 108643 - DNA, 544 bp, Glycine max
  Clone ID: PAT_MRT3847_69118C.1
aaaaattactttacaattttattatcaatatggccaacatagcatcctttatatatccgcaaatatatataggaggaacccccttgggcataattaattaaacccttttaaggctggcacagaatttattcaagggccccctaaaaggggaagatttgatagagatccccgggcggggggatacttgggggctggaatattaattatataggaatatttatcaggtccggccaaacggaggggggggcttttttccaggggctccctaatcttttttttaaactccctttttctaagggggtgcaggcaagacaaaacccccagccccaacggggggggcggcggaaatctcctttttaacctggggccggggagcatgctcggggtctttttgggcctaaggcttttaaggcagggaataagcacggggggccgaagaaccaagttcccaaaggggccaaagaagctgggggggcttctcctccttttaaaaaaaaacctggccgggcacataatcgcccttgtggggggaaagggggggggg

SEQ ID NO: 108644 - DNA, 727 bp, Glycine max
  unsure (1)..(727): unsure at all n locations
  Clone ID: PAT_MRT3847_69119C.1
ccacgcgtccgcacgagttctgtaccaagtccgggattgaagagttattttgtgagtttttgggacttgagtgttttgtgagccaccttgatgttatcctaacatcaagtgttggacctgagtgtgtagagttgatctctatagtttgtgcagagttgatctctattgttcagagagcaatctctggtgtgtatttgatttaattgtaaacacgggagagtgattgagagggagtgagaggggttctcatatctaagagtggctcttaggtagagattgcacgggtagtggttaggtgagaaggttgtaaacagtggctgttagatcttcgaactaacactattttagtggatttcctccctggcttggtagcccccagatgtaggtgacgttgcaccgaactgggttaacaattctcgtgtgttatttacttgtttaatctgttcatactctcaaatataatctgcatgttctgaagcgtgatgtcgtgacatctggtacgacatctggcattggtatcagaatttcacatgggctaagtatgaggtcacttatctctgtacacattagattatggtttcattatttttgggccttgtatttggggctccacaatgtanggagggtaccctagtaatgtaggatttttcagcatttaaggcacctagactagtttttgtattatgagtagtttcgtaattcatatgcattaagtgcactatttgat

SEQ ID NO: 108645 - DNA, 681 bp, Glycine max
  Clone ID: PAT_MRT3847_6911C.1
ggaattgaacactggggtcaggatcatcaacctagctagctagtgtatacaacaacaatatgaggaagcccgaggtttctggaaaaaacaacaacattaataacaagcttagaaaggggttgtggtcacctgaagaagatgacaagctcatgaactacatgctaaacagtggacaaggttgttggagcgatgtagccagaaatgcgggccttcaaaggtgtggcaaaagttgtcgccttcgatggatcaattacttgaggcctgatcttaaacgaggtgcattctcaccacaagaagaggaaatcatcatccatttgcattcccttctcggaaacaggtacaatatcctctacacccttcttttctacctacatatgcatgtttttattaccatatttgtatgatcatgcatctttaactatatatgccataatgcattttatacttaattctatatgatcttcagtgttgcacatgtattatgtatttgtaaatccaaatatacttatatatacgagcgtgtgtacgtatctcaattatttataatgcaaatccaaagtaattaagcgtatctgacatttctaacatatgtaacacccactagctccttctaactttagccatcgtctttatttgaaaaagtgaaagggagatagatgcatgattaatatgtttgaaaag

SEQ ID NO: 108646 - DNA, 139 bp, Glycine max
  Clone ID: PAT_MRT3847_69120C.1
atgcttcccccaacttttgcctacgtgtacaatcacacctcggaacagatactttttgcacactgcatcaagctccacaccacactagccttcttctgttccttcatcttatctctaaccacttggacatctcaatggc

SEQ ID NO: 108647 - DNA, 613 bp, Glycine max
  unsure (1)..(613): unsure at all n locations
  Clone ID: PAT_MRT3847_69121C.1
ttaatgaatattgatgaaatcgcttagcacagcacgctcgtttttcgagttcatcgtgaaattctgataccaatgacagatgtcgtaccggatgtcacgacatctcgcttcagaacatgcagattatatttgacagtatgaacagattaaacaagtaaataacacaagagaattgttaacccagttcggtgcaacgtcacctacatctgggggctaccaagccagggaggaaatccactaaaatagtgttagttcgaagatctaacagccactgtttacaaccttctcacctaaccactacccgtgcaacctctacctaagagccactcttagatatgagaacccctctcactccctctcaatcactctcccgtgtttacaattaaatcaaagacacaccagagattgctctctgaacaaaagagatcaactctacacactcaggtcaaacacttaatgttagggtaacatcaaggtggctcacaaaacactcaagtcccaaaactcacaaaataactcttcaatcccggacttggtagaaaactcgtgcagncttcatgtttatatagcagtgtgcgtatctgggctgcaacaactngcgctggatgagatc

SEQ ID NO: 108648 - DNA, 2685 bp, Glycine max
  unsure (1)..(2685): unsure at all n locations
  Clone ID: PAT_MRT3847_69122C.1
gaattcgagctcggtacccggggatcctctagagtcgacctgcagccattacaccacaacagaatggcatagttgagaggaaaaacaggactttgcaagaggctgctagggtcatgcttcatgccaaagaacttccctataatctctgggctgaagccatgaacacagcatgctacatccacaacagagtcacactgagaagagggactccaaccacactgtatgaaatgtggaaagggaggaagccaactgtcaagcacttccacatctttggaagtccatgttacattttggcagatagagagcaacggagaaagatggatcccaagagtgatgcaggaatattcctgggatactctacaaacagcagagcatatagagtattcaattccagaaccagaactgtgatggaatccatcaatgtggttgttgatgatctaactccagcaagaaagaaggatgtcgaagaagatgtcagaacatcggngagacaatgtagcagatacagctaaaagtgcagaaaatgcagaaaactctgattctgctacagatgaaccaaacatcaatcaacctgacaagagtccctccattagaatccagaagatgcaccccaaggagctgattataggagatccaaacagaggagtcactacaagatcaagggagattgagattgtctccaattcatgttttgtctccaaaattgagcccaagaatgtgaaagaggcactgactgatgagttctggatcaatgctatgcaagaagaattggagcaattcaaaaggaatgaagtttgggagctagttcctagacccgagggaactaatgtgattggcaccaagtggatcttcaagaacaaaaccaatgaagaaggtgttataaccagaaacaaggccagacttgttgctcaaggctacactcagattgaaggtgtagactttgatgaaactttcgcccctgttgctagacttgagtccatcagattgttacttggtgtagcttgcatcctcaaattcaagctgtaccagatggatgtgaagagcgcgtttctgaatggatacctgaatgaagaagcctatgtggagcagccaaagggatttgtagatccaactcatccagatcatgtatacaggctcaagaaggctctctatggattgaagcaagctccaagagcttggtatgaaaggctaacagagttccttactcagcaagggtataggaagggaggaattgacaagactctctttgtcaaacaagatgctgaaaacttgatgatagcacagatatatgttgatgacattgtgtttggagggatgtcgaatgagatgcttcgacattttgtccaacagatgcaatctgaatttgagatgagtcttgttggagagctgacttattttctgggactccaagtgaagcagatgaaagactccatattcctctcacaaagcaagtatgcaaagaacattgtcaagaagtttgggatggaaaatgccagccataaaagaacacctgcacctactcacttgaagctgtcaaaagatgaagctggcaccagtgttgatcaaagtctgtacagaagcatgattgggagcttactatatttaacagcaagcagacctgacatcacctttgcagtaggtgtttgtgcaagatatcaagccaaccctaagataagtcacttgaatcaagtaaagagaattctgaaatatgtaaatggcaccagtgactatgggattatgtactgtcattgttcagattcaatgctggttgggtattgtgatgctgattgggctggaagtgcagatgacagaaaaagcacttctggtggatgtttctatttgggcaacaatcttatttcatggttcagcaagaagcagaactgtgtgtccctatctactgcagaagcagagtatattgcagcaggaagcagctgttcacaactagtttggatgaagcagatgcttaaggagtacaatgtcgaacaagatgtcatgacattgtactgtgacaacctgagtgctattaatatttctaaaaatcctgttcaacacagcagaaccaagcacattgacattagacatcactatattagagatcttgttgatgataaagttatcacactggagcatgttgacactgaggaacaaatagcagatattttcacaaaggcattggatgcaaatcagtttgaaaaactgaggggcaagctgggcatttgtctgctagaggaattatagcagctactgctatctgaacgtgctcaaacgtctcacttaacattaatagcacgttcactactaagccaaaacaaattcgaccgttgcttcacacgtccctctacattcctcattcaaacttatattttcgtggtaatctcgttttcagcattcctcaacagctctaagaaatttgcgaaaccattccaaacgctctgcttttccatggctacctcaccaaaagaaacttcagctcctggttcaccctctgtaccatcatccccatcatccaccaaagcgccatcaatccaggaacaacctgaattccatatccaacccatacagatgattcctggtcaagcccctgttcctgaaaaactggttcccaaacgacaacagggtgtgaagatttctgaaaaccctagccttgcaacaagtcctagggaagtagacacagagatggataag

SEQ ID NO: 108649 - DNA, 381 bp, Glycine max
  Clone ID: PAT_MRT3847_69123C.1
atgttgagtcaccttcccaatattttaaccaccattgattctgtgaagaagagagaatttgttctgtccttgcattacaaactgtttgaggggacacatgtcccagacattgtctcgacatcagggaaagctgctgcttcaggtgctgtgtccaaggatgctttgattgctgaactcaaggacacatgcaaggtgctggaagcaaccatcaaagcgaccacagagaagaaaatggagctggaacgcctgatcaaaagactctcagacagtggcattgatgatggagaagcagctgaggaagaagaagaagcagctgaggaagaagaagatgcagcagaggatacagagtcagatgatgatgattctgataccaccccatga

SEQ ID NO: 108650 - DNA, 2801 bp, Glycine max
  Clone ID: PAT_MRT3847_69124C.1
gatcaagtcaaagattaaagagttattttgtgagttttgtaacttgagtgttttgtgagccactttgatgttaccctaaaatcaagtgttggacctgagtgtgtaaagttgatctctattgttcagagagaaatctctggtgtgtctttaatttgtttgtaaacacgggtgagtgattaagagggagtgaaaggggttctcatatttaagagtggtttttaggtaaaagttgcatgggtagtggataggtgagaaggttgtatacagtggttgttagattttcgaactaatactattttagtggatttccggtccctggcttggtagcccccagatgtaggtgaggttgcaccgaactgggttaacaattctcttgtgttatttacttgtttaatctgttcatacagtcatatataatctgcatgttctgaagcgtgatgtcgtgacatccggtacgacatctgtcattggtatcagaatttcaattggtatcagagcaggcactcgaattcactgagtgagatctagggagataaattctgatgaacatggagaaagaaggaggaccagtgaacagaccaccaattctggatggaaccaactatgaatactggaaagcaaggatggtggccttcctcaaatcactggatagcagaacctggaaagctgtcatcaaagactgggaacatcccaagatgctggacacagaaggaaagcccactgatggattgaagccagaagaagactggactaaagaagaagacgaattggcacttggaaactccaaagctttgaatgctctattcaatggagttgacaagaatatcttcagactgatcaacacatgcacagtggccaaggatgcatgggagatcctgaaaaccactcatgaaggaacctccaaagtgaagatgtccagattgcaactattggccacaaaattcgaaaatctgaagatgaaggaggaagagtgtattcatgactttcacatgaacattcttgaaattgccaatgcttgcactgccttgggagaaagaatgactgatgaaaagctggtgagaaagatcctcagatccttgcctaagagatttgacatgaaagtcactgcaatagaggaggcccaagacatttgcaacctgagagtagatgaactcattggttcccttcaaacctttgagctaggactctcggataggactgaaaagaagagcaagaatctggcgttcgtgtccaatgatgaaggagaagaagatgagtatgacctggatacagatgaaggtctgactaatgcagttgtgctccttggaaaacagttcaacaaagtgctgaacagaatggacaggaggcagaaaccacatgtccggaacatccctttcgacatcaggaaaggtagtgaataccagaaaaggtcagatgaaaagcccagtcacagcaaaggatttcaatgccatgggtgtgaaggctatggacacatcaaagctgaatgtcccactcatctcaagaagcacaggaaaggactttctgtatgtcaatctgatgatacagagagtgaacaagaaagtgattctgacagagatgtgaatgcactcactgggagatttgaatctgctgaagattcaagtgatacagacagtgaaatcacttttgatgagcttgctacatcctatagagaactatgcatcaaaagtgagaagattcttcagcaagaagcacaactgaagaaggtcattgcaaatctggaggctgagaaggaggcacatgaagaggagatctctgagcttaaaggagaagttggttttctgaactctaaactggaaaacatgacaaaatcaataaagatgctgaataaaggctcagatatgcttgatgaggtgctacagcttgggaagaatgttggaaaccagagaggacttgggtttaatcataaatctgctggcagaataaccatgacagaatttgttcctgccaaaatcagcactggagccacgatgtcacaacatcggtctcgacatcatggaacgcagcagaaaaagagtaaaagaaagaagtggaggtgtcactactgtggcaagtatggtcacataaagcccttttgctatcatctacatggccatccacatcatggaactcaaagtagcagcagcagaaggaagatgatgtgggttccaaaacacaagattgtcagtcttgttgttcatacttcacttagagcatcagctaaggaagattggtacctagatagcggctgttccagacacatgacaggagtcaaagaatttctggtgaacattgaaccctgctccactagctatgtgacatttggagatggctctaaaggaaagatcactggaatgggaaagctagtccatgatggacttcgttatgtcaaggaataagatcgggctgcacaatgcacaaggcaagataaaatgtcaaatgaagaattgaagctgcaggatccatgatgtcggatacaatgtccaggacatcctgcccgaaaatactggagttgctgcacaatgcacaaggcaagataaaagaagtgaagctgcaggatccacgatgtcggatacgatgtccaggacatctggcccgaaaatactggacacataaatctgttatatctttaacagattattgtgcagttagcaacaggttagacgatctatctttaggaacgaactcttctagttccgattacaaactggaatagttcgctcagggattaaagatttaagataaaaacttggagatcgatttttatcttttagatctttaagtgcatattttcaggataatga

SEQ ID NO: 108651 - DNA, 193 bp, Glycine max
  Clone ID: PAT_MRT3847_69125C.1
agcaaaggaaaagcagagagaacacggagaaaacgcacggggcggaccacccgcgaagaagaacagcgcgggagagacgcgtcggcccaaagacacaagggagccgaagccaccaaaatcatgtaccatgcaaaccccccaaggccaagacgacccgaggaacccggaaacgccaaccccacccgaagaggga

SEQ ID NO: 108652 - DNA, 275 bp, Glycine max
  unsure (1)..(275): unsure at all n locations
  Clone ID: PAT_MRT3847_69126C.1
gtcgtgtccatttcaagtgtttgcgagagaatggagttcctggacgaggactcaaggcctaggttcgggttccactccggttcagcttccacgagcactgagccaccgtacccgatccacatacctaccaagccatttctcttcgtcaccgatttcctctgctcactacttgctactctctacctcttcttactctaagcgtagcccttcaaatcgctcctcttctggctcgcactctctatnctcgatggcccctttcccacctactccatcac

SEQ ID NO: 108653 - DNA, 990 bp, Glycine max
  Clone ID: PAT_MRT3847_69127C.1
cgtgctcttcatctacaaggtcatgtgggagtagtaatggtggcttctctgtgtagctatatgcttggtggagagactagagttttttttttttttttttttttttttttttttttttttttttttttttttttttttttttttttttttttttttttaaaactattgatatggatttttttttatataaatttaacactctataatctatatgtcagctgtttaatagaaaaaactggataatgtgaaaagtcagctaaatggaatctttaacaactacataaactaagaatcattatgaaatatctgtcagttaaatttaccaagtgactccgtttgaaagtgccaacagagagtgacacatggataatttcatgacactcgatgtctcaaccacctggatttttagacttaaaggagaaaatctgcaaaactgcttcaactgcagaaatgttccaactctcaacatgtctaacaattttgtaatcttcatttaattcataaactgtgcttccatcgattgaaattagaggcctccaaggaagctttaagttggtccttagtttccaagatgccagcacaaaatttgtgtcagagtcaacatcctgcaaatagatgagcagaacatgaagatgtgttttttgagtaaatagtgtagctcaagaggccaatctcctatcagttattgtagagactgattgaaagaaacatccagcaataaggtgtgtatgatttaaattaacaaagaaattgagaatcttaagtgatgaaaacattacaggaacggaatggaggccaggcatgtaacttcaaatatcctcgtaggcgatgtttcctgattaatagaggcatggacactttaaaactgatgactatcatactcgtaccgggcacctaacaaacctaaggaatgcacaaagactataaaattgaccacacatctatgtagtacctaatttcagaacacttaagtgaagcaagtctcgagcc

SEQ ID NO: 108654 - DNA, 193 bp, Glycine max
  Clone ID: PAT_MRT3847_69128C.1
attttagttcacgaaatgtgagagagagcgagagagatctatatgtacggcgggatgctgtaaataccatgagctaactttgcgttctagtattgacaatttttcatagttagaatttcaatatgaaatactacagtctaccgggctgttattcaatgttgaatttatgaaagagtggtcatcaaatgaaacg

SEQ ID NO: 108655 - DNA, 153 bp, Glycine max
  unsure (1)..(153): unsure at all n locations
  Clone ID: PAT_MRT3847_69129C.1
gtnnangcacgcaannncgnaaattcgngnncgaggggacgaatangnannnttntangantnctttgtnngcnggcagtagtnttnggtaggcatgggccatnccatgggcgnaaggctaacaagaggttccctntgccgaatgaaaaacnc

SEQ ID NO: 108656 - DNA, 392 bp, Glycine max
  Clone ID: PAT_MRT3847_6912C.1
gtaggattatataccgaaagccttcaacaattgcttgagacagtgagggggcttcatgctccatcaaatgatgttgttcttgaagacttaagtctgcctggtttatctgaactcaaaggtcactggcatggatctcttgacgctagtggtgggggaaatggagacaccctggcagaatttgactttcatggggaggactgggaatggggagactacaaaactcagcgtgtgttggcagttggtgcttacagtaatgatgatggtatgtacctggagagaatttttatccagaaggataatgccaccatccatgcagatggaacattgctaggacctaaaaccaacctccattttgcggtattaaattttcctgttagtctggtcccaactgt

SEQ ID NO: 108657 - DNA, 467 bp, Glycine max
  unsure (1)..(467): unsure at all n locations
  Clone ID: PAT_MRT3847_69130C.1
ataacaagaatactgcgaatcctctactaaatcataacattcacataccattaccttttctttctcccactctctcccgcacatctattgaatatatgatcgttggctatgcttccctctcagatggcttatatgatgaggnctacgccgttgattaatgctggcatatattatcaccattaggctgctaccaaaccacaagtgcgtgcctcaaaagacgggttgattctgccactcaatctgatgatgcgtgtgaagatctcctattcagttatatgacacagctttctcctactctcaagttgattggggaagatactacatctgcctgtcgacctacagaacttacagatgaaccctcatggctagccgatcccctgcatggaactactaacttcgggcacggctcccccttagatagcgtcccctttggactcacatttggataatctcctacgatgggtgta

SEQ ID NO: 108658 - DNA, 1227 bp, Glycine max
  Clone ID: PAT_MRT3847_69131C.1
gcgatatcttgaaataaggctcttcagcgtttgagatatgctgctaaagccacaaaaagtgaagctgattgcataaatagaatatgattgagagctaataactaattcagatgatcttgtaaaggttacaatcagtcattttacatgaagaggagggatcttttaggggatcctctagaaacttgctgcagtaagatatcaatcccacagttgcactcacagtgtttgaaagtgggccttgcccttgatagtttcgttgttaccaagcttaatgttctttatgctagatatgcatcactttgccatgcacataagctttttgaagaaacaccttgtaaaactgtctatctatggaatgctttacttaggagctattttttggaaggaaaatgggtagagacgttatctctattccatcaaatgaacgctgatgcagtaactgaggaaagacctgacaattacacagtgtctattgctttgaaatcatgttctggtttgcagaagcttgagctgggaaaaatgattcatggatttctcaagaagaagatagatagtgacatgtttgtagggtctgcattgattgagttgtattcaaagtgtggacaaatgaatgatgctgtgaaagtgtttacagagtatccaaaaccagacgtggttttatggacttcaataattactgggtatgagcagaatggaagtcctgaacttgcacttgcgtttttctcccgaatggttgtgttggagcaagtaagtcctgatccagtaacacttgttagtgctgcttctgcttgtgcccagttatctgattttaaccttggaagaagtgtacatggatttgtaaaacgaaggggttttgatactaagttatgtttggccaattctattctaaatttatatggaaaaactggttccatcaggattgcagctaatttgttcagggaaatgccatataaagatattatatcttggagctcaatggttgcctgttatgctgataatggagctgaaactaatgcgttaaatcttttcaatgaaatgatagataagagaattgaactcaacagggttactgtcattagtgcattgcgagcttgtgcttccagttcaaatttggaagaaagtaagcagattcataaattagccgtcaattatggtttttgagtggatattactgtctctacagctcttatggacatgtacctgaagtgcttctcacctgaaaatgca

SEQ ID NO: 108659 - DNA, 455 bp, Glycine max
  unsure (1)..(455): unsure at all n locations
  Clone ID: PAT_MRT3847_69132C.1
caacaacaaccacaacctcatcgttcctaatcctcaagattcactgnacatgatagattatattacaaaggaaacaatgcattctcaatcttatcctgagcttccatatgagccttattgttcatattacatgataacattcctttatagattttattcaacgtttctatttaatcatcctcctaacaagaagctctctattgccacttcaaatattatagtctagttcccacaaagaatactgcaaccataattccattactatcttaatacagtaacatgcaaatttttaaccacatgcaaatttcatcatcctaaatatcaggctttaatttctttaaaaatttccttaaatattttaagctatcctatccttcctaattatccttaatgcacttattatttgataacccgacaattcaaatttgtcaacactttcaaatttcaccattctt

SEQ ID NO: 108660 - DNA, 339 bp, Glycine max
  Clone ID: PAT_MRT3847_69133C.1
atcaaaggggggggggcactttccttgttgctacctgggcctcgtcattctttatcgcttctgaccatgacctctaacctatgcatgattccattgtggtatccaaaaatcgcggaggctgttatgtgaatggaaaatcttgccaagagcctatacctgttcaagggatcaatttccactaagaagcggagactggtaatcctttgaatatactggagatgtcttcactcctgcgtctctttatcaactaccagggctgctagcactcgatcggtccatggctgccctctacctttaatcaaaggttttaaaccatccaactattaccctctatccatt

SEQ ID NO: 108661 - DNA, 551 bp, Glycine max
  Clone ID: PAT_MRT3847_69134C.1
aaaaaagctttattctccgggcggggctttcttaccgaaaaccgggggaaacatgacggcgcccccccttaaaaaaaagggccctcaaaaccgggccccggaaagccaaacccacccaatcggccaaaagttccggggaccagaaaaaccccaaccgcttttttaaccggtaaaaataaaatttttgggccaggattacccccccccccattaaaggggggcccccccacaaagggggtctaaagtttcccccttcgcccccattaggggagggccctggccccccccaaaacccctggggggccttttggcacctctccctcgccccggggaaaaaagcccttaaacaaaaccccgggtttcccagggaaacggccccccccttggcctttttgacgccccaaatccaaaaaagggggtggggggtcccgccccccaaacgggccccttcctatctgtgaaaaaccttttgcccccgggggggtcaccctttttgcggggggggggcaaccttttccccccccgcggaaagcccgcccggtaaaaggggg

SEQ ID NO: 108662 - DNA, 126 bp, Glycine max
  Clone ID: PAT_MRT3847_69135C.1
gttaggactatgctatgcacacacatacgcaagcagaggatctctagtggctcgttcttatcagtactgtatagctctgggttgaagttaaaggcccagttgctctgtctgtgcgttccattcttc

SEQ ID NO: 108663 - DNA, 272 bp, Glycine max
  Clone ID: PAT_MRT3847_69136C.1
acgatgttttgatgtagcgaacaggaaagtgctggattgggattcatatagattaggtatgtggaggaaacaaattctgtctgccgcaagctgaccagagggaccaattgccagcgattggacaaagctaggcacattgtcagacagctgctctcttgcgctataacacaaatagggactttttatgatggggaagctggtggaaattccaacgataagggtggcagctgcttacgtggccagagaatgaatgaaaacgcaggatgtcgggt

SEQ ID NO: 108664 - DNA, 748 bp, Glycine max
  Clone ID: PAT_MRT3847_69137C.1
ctaaacacaaaacattagtattgcttgtatgattactagagagcataggtttatacaacgagcaatatcacagggatataattttctaagccatcataaattacatgaattggctgctcaaattggacctttactgtagaaatcatgcatttctatcatgacgcaaccggagtaccagaatatgagaacttgttgaatgtattgtcatcctttttgggactggcagctggagaattcagcaagggcatactagtccaccgctcctcgaagttagcaacacagtacttcccagcaacatctgggacaaagcttggcctagtttcacggcattccagtttcttccaattgactaatttaaaccacttgtggcttttaatctcctcactgcctcttgatccactgccaaggcgtttactgacatctttctgcaacaacccttttaacagtgaatgtgcctcatttgacaaaaaagctgggagcttgattttgtctttaattatcttctgctggatcttgtgtctatttccaccagagaaaggaggctttcctgtaagcatttcatatagtaaaatccccacactccaccaatcagctgccttatcatggccttttcccataacaatttcaggggccatgtactctacagttccacacatagaatttgacctttcattctcattgaacttcttagccaggccaaaatctgttaacactgcctggtatcaagcacaggaatataccatgatac

SEQ ID NO: 108665 - DNA, 462 bp, Glycine max
  Clone ID: PAT_MRT3847_69138C.1
gccgccgccctttttttttttttttttttttttttttttgttttttttattttttttacttgcgcactcggaaaaaaagaatccctggattttccaaagcgactggcacccttgggacacgctctgaatcccccctttgcacatgcatgcgaacgatcaattcctaccccacgtataaaaatcccggccccgggaaatcaacctgcctgggggaatcaccgagccccccaccggaattgcaaaggccacccagcctatgaacttggacaggaaatgatagccaactgcccagcctaccaagcggcttatgggaccatgggcccagtatcagcgatccacccttgcacaagtaacctctacatatgaaccaccggccctcgaatccgcctttttgaaatgcggggtgacggatttttccaagctgacaaccttcacccgagtgccaagcgtactcacgcgggc

SEQ ID NO: 108666 - DNA, 281 bp, Glycine max
  Clone ID: PAT_MRT3847_69139C.1
ggtacataacttcttgatattttttcttatttcaaaccccatgaaaaaaaaacccaaaaccgtggccaataacctaatctccgagtccaattgtaagcgacatgccggcgatgactcgtttcaatggctgtgtccattaggtattgagggcgaaccttggggaaacaaatggtggggcacggggccctaaaggatagaaaggggaactaaaatgaaataccaggggggcacattattggaaaataagggggggccccttcaaatgaatacacactagcttt

SEQ ID NO: 108667 - DNA, 312 bp, Glycine max
  unsure (1)..(312): unsure at all n locations
  Clone ID: PAT_MRT3847_6913C.1
tcagcttttcccatcgtgaaatgagtatgggttcttcattgaggcacttgtgtctaactttggattcactagtctcttcagcattctgtgcctttccacggcagtcagtcgatgttccattctgcatanactacgttcctacctgggcctctgatcacatcacatacttcagtgcaggttctgacaatcaagttcatctgtgacagtacactggtaatggcttctagtgcaaagggtcatacgtgtatggtcacttcagcatgagcatgaagatggttcctggcgattcagctgtgcaagtcactgcatttt

SEQ ID NO: 108668 - DNA, 715 bp, Glycine max
  Clone ID: PAT_MRT3847_69140C.1
agcaagcagtgtgacagtcttccaagaggcgagtttgcctctaaagctctgagccatagttttttttgtgtatgcgtgtgatatgcttgaggctatcaatttctcaaacttatatgcacctgaacatctaattatcaacgtgaaggatgcagagaagtgggagagttttattgagaatgcaggttctgtgtttttagggccttggactcctgagagtgttggtgattatgcaagtgggacaaaccatgtccttcctacttacggttatgcaagaatgtatggtggtgtgtcattggactccttcctgaagtacataactgtgcagtctctctcagaggaaggtctaagaaggcttgggccatatgtagcaaccatggctgaagttgaaggccttgaagcccacaagcgagcagttaccttgagacttcagtacatactcgagccgaatcggctcgagtgagatgatgcttcaactcattgttctctttatctcttgtaagctactagctcttagtttttggcaagtctaggaccatttgcttggcgagattacctagatttaggtggtattagtagctagaagttgccatttcaagttcatgtaacaatatggattcatattctgtaataacaaacatatacaagtgcctaatttgtcggtgatctttggaataatgcatccgatgtatttgctaccctgtacttttttccttcc

SEQ ID NO: 108669 - DNA, 292 bp, Glycine max
  Clone ID: PAT_MRT3847_69141C.1
catataaccacgttaccatatcttatagaaactcctttgatttgcgagcagagcaactcgagaacaagctatgatgcagagaggcgtcaggccggactttaatgaaagagcccccttgaagtgttgggagcacatgcattactttcgactggggaaatattcctacgcttctgccattcattggggagcctaaagcagtccctatgagagtgccttagcttgaaatgttcaccactcgggaaggtttctcttaaatatttgaaacaaatagcagctctgggaccatagtaat

SEQ ID NO: 108670 - DNA, 269 bp, Glycine max
  Clone ID: PAT_MRT3847_69142C.1
gtccagaaaccatggatctaacactttgtttttcaacttcttttattaatcacccggcgaccaacgtcctcctaacttctgacaatgcccctgcactagctagtaggtcagaacacaagccatcaccatgattgccccagctccggtcctcaccttacctgcatgatgctcatcacactcgtgataacagacatagggcgctggctccagcgtgtcgacatagcgctcatgatacaagagagagtcctgcgcatgtgatgttgccatac

SEQ ID NO: 108671 - DNA, 329 bp, Glycine max
  Clone ID: PAT_MRT3847_69143C.1
aaaaaaaaacataaactacggcgtgctaattaaatgtgaagcactcaaaattcggctcccacatagtacagaatctatatatatccttcttactacctttcaactccctttaacaggggaaccaataagatgacaattttataactactattaataatgtctttgaccatcttaccacatgtggagaccaactttgtcttttccactacatactaacaggtgcaattaaaaaaatgtgcttattcgtacacacattagaattgtgcatcaacacaacctttgataattccatcatatacaaaacatgccttttactatttgaaaatgac

SEQ ID NO: 108672 - DNA, 208 bp, Glycine max
  Clone ID: PAT_MRT3847_69144C.1
ttccccatgccttggctgggcaagggccgtgaagcgtgggcgccatgcatcccccggaagtgcgggagggtcgagcatgaggaagaccgtcaccaagcaggcctcctgcggaagcccatggtgcggcccagaccgggtcaagtacttgggcccattctctggcgagcccgcgtactacctgactggcgaatttccaggtgactacggc

SEQ ID NO: 108673 - DNA, 119 bp, Glycine max
  Clone ID: PAT_MRT3847_69145C.1
ccagaagaatccttcacatttataggtcgtaacacatcatattcttaaaccacaatcattttttgcagtggcatttggtgatttttgcgcacacactttcgaaaacacatgaagatggt

SEQ ID NO: 108674 - DNA, 376 bp, Glycine max
  Clone ID: PAT_MRT3847_69146C.1
ggtcgccctttttttttttttttgatcccatttaatcttcctttcatgaaagaccaactgaaggaatatgctaaagtattacatcagatcaacactaggcaatgctcagtgcaacaaaagcttaaaaacattgacatgcaaggtactatttgaggtaaatgagaaaaaatgttctgaacattcaactggcaattgggaaaacattggggcttagatacactgtgatggaactagcctatatatgaagccacgtattacaaaactgtcctatcgaagtatgtagtataacctatagttatacactgaagaaaaatgaccaacaggaaaatgaatgccgggtgccaaaagcttttgaatgtgtaacctgcttgattgc

SEQ ID NO: 108675 - DNA, 1228 bp, Glycine max
  Clone ID: PAT_MRT3847_69147C.1
aaattcggctcgaggtgtctatgcaaagttctggaatcaacccctaaggtccccccactccttcaaaaatcctctcttttatcctacaacactctaatcatcgtcatcaaccacctcctccatcctcccccagtaacaacacaacataacattcagagaaaaacaaaactatcatacccacatggatttgcaatgaaagtgagagagtccaattatgcgaacgctttgtgatgcttgtgagagcgccgcggctatagttttctgcgccgctgatgaggctgcactttgtcgtgcctgtgatgagaaggttcacatgtgcaacaagctagctagtaggcatgtgagggttggtcttgctagtccaagtgatgtaccacggtgtgacatatgtgagaatgcacctgctttcttctattgcgagacagatggaagttccctttgtttgcagtgtgatatgattgttcatgttggaggtaaaagaacgcatggaagatatcttctgttcaggcaaagagttgagtttccaggagataaatctagtcatgctgaaaatccggcttcacaaccattggaaccaggtgaggctaaaagaggacaaaatccacttcccaaactaaaaatgggagagaagcaacaaaatcacaagatgcctatggttccaacgccaggacctgatgctgatgggcatgccaagatggaaagtaaaatgattgatttgaacatgaagcctaatagaatacatgaacaagcatcaaataatcagaaacacccataaatggcgcaactaggcaatgcagttctgacaggatcctaaaccaaaaatctaccaatggcaaaagcttcgttttgttctcgtgcatgctagtcacaaggatgacatactctattaatatcctatatattctggcaaatgaggcaccagaatcctttgaggagtttgttcgcctacgtaggaacttaatttggtagttcaacacatcatattctgttctgcaaagcattgttaactgtatatctatgacccctttcaatgaattgtgtgttgacttttatttctggtttcagttttgtatgccattacgtcccctagaaaattctgggggaaaataggtttttgatttcttaaaaataaaatgcgacaattagcgagccaaaaaaaaaaaaaaaaccagttaagatattgttgttgaacaatcagcatttgggtatggtggttcagtgggaggaa

SEQ ID NO: 108676 - DNA, 382 bp, Glycine max
  Clone ID: PAT_MRT3847_69148C.1
ttgttttttttttttttatgtttttttttgtttttgtccattaaacaggggtaatttggataacctcctgaacaaaatttgaaatatacgatcagccttcgatgaaacaaaagtttgcccactttatggagaaaaaaaacttgctccccgaaaatccataatttcaaaacagaacctctacattgttgataagggtcggcaaccaaatagatttccagcattgccacccaataaacataactagcttttgaggggtccaaagaacttctgtttctcctgtggggcctgaaaccgaccattcccaaactttgaagaggtatgggtaaacttcatttagttctcgttaagagcaaacctggacgtctgtttaagggggggtgga

SEQ ID NO: 108677 - DNA, 309 bp, Glycine max
  Clone ID: PAT_MRT3847_69149C.1
cgttcgcgtgggtgaagctccaaatccaatcgaggcccctatgcagactcaggctcttaatccgacatcgtgatgcccagagcccaccttcaatttgtgggtcgcaacgttctttcaatgcatgcaagctgagctagggatctctctgatgtgaaccgagccttgtccacgaggaattgcgcatgcaagggattaggtatatgccgagaatccacctgcgtggttgggcaacccctggccgctgagcgagtcttcgcacatacctacgtgcggcacggacgcccacagtaggaagacagggacatcgac

SEQ ID NO: 108678 - DNA, 318 bp, Glycine max
  Clone ID: PAT_MRT3847_6914C.1
ggactgtcaagctgactgactcggctctggagtgtggctgcgtcactgattcaacttatcagaacattctattttctcaatcagctgaaagggactgcctctgcgaacacaccaacgtctgctacgccttctcctgttctaagccggcgaagtctatcaaagagattatcaaagtccaggagaactctgtccatgtgtagcttgccctaaacgcgcttctaattagctctatatctcaccgtatattagacatgcacacacactcctaaaagctcaggtgcgatatgatagatatcttagcatagcgatgctcattac

SEQ ID NO: 108679 - DNA, 894 bp, Glycine max
  Clone ID: PAT_MRT3847_69150C.1
caaaaccaatcgttaacaacaagaaatcctgctggaagtggacttggcctggcaatttgtaggaggtttgtaaatcttatggaaggacatatttgggttgaaagcgaagggttagcaggacagtaacaaagggacttcttatgcatttaggatgtgatgtaaccacagcaagctcaagtgaagaatgtctgcgtgttgtttctctggaacatgaagtggtcttcatggatgtttgtgcagggttagatggttatgaacttgcaaatccgtatacatgaaaagtttactaaacatcaagatagaccactaatagttgctcttactggaaacaccaaaaaggtaacaaaagaaaactgtatgagggttggtatggatgcccttatattgaaacctgtttctgttgacaaaatgaggggtgttttatcagaactattggagcgccgagttctgttccaaagtgtttaccctgttagattgttgtacatagctatatcaaatttggagaagagcccaaacttatgaagcaatgaggcaattgacattagttgtcatcctttttgctgttttgagatcccggcaaaaggaacaacgattgagtctgcgttgttaaataattttttgtgaacacaagttcgtatatgttgtgtattctgcattttatagcagactttcgatgttttgcaatggcggtaaaattgcatttatactgtcctagactgttttgattaattgatttaagtttaattacttgttagatctctatacctgtatagtctttgttttagtctctacattcaaaatatttggtttagcccctacgcatatgtacctccgttcctatggataagacttttttcattttagtttttgtccctctttataagattatctacg

SEQ ID NO: 108680 - DNA, 3291 bp, Glycine max
  unsure (1)..(3291): unsure at all n locations
  Clone ID: PAT_MRT3847_69151C.1
cggacgcgtgggttgaaacccaaaactacctttgaactcgcaagcaacctctccagttgatatgaaccatcgaaatggtaacatgcataaaaaacaaaacaaccacgtgaaccaaatccacatgttcagaacaaaacacacaaaacaaccccgctcccacctcacttgaaaaacctggaccgttcgcaagacgactattggaatcagcatcagacgtttctacctcactccggcatgctcaaatgatagttttctctctccctcgatttcctacacactcgaatcttgcttctcttttgtactttgttttgtagaatttgcctttttttctcttttgtagttatagaagtttggcgatttaattggcgttaaacgaccccattttggttgcgtgttctcgcttctcaagttatgtgaaaaaggaaaaattgcctgaggtggttcaatcactatggaatcctgcaattgtattgacccacaagtgccagctgatgacttattgatgaaataccaatatatctctgatttcttcattgcccttgcttatttctcaatccctttggagcttatctactttgttaagaaatcagcagtatttccatatagatgggtccttgttcagtttggtgcttttatagttttatgtggagcaacacatctaattaatttatggacctttagaattcattcaagaactgtggctgttgtaatgaccactgctaaggttttaactgctgtggtatcatgtgcaactgccctcatgctggtacatattattcctgatttattaagtgttaaaactagggaattatttttgaagaacaaggctgcagagcttgatagagaaatgggcctgattcgcacacaagaagaaactggtcgacatgttaggatgttgactcatgagattagaagcactcttgatagacacacaatattgaaaacgactcttgttgaaatgaggtagaactttggcactagaggaatgtgcgttatggatgccaacacgaactggtttggagcttcaactctcttacacattgcgacagcagaacccagttggatacacagtacccattcatcttcctgttatcaatcaagtatttagtagcaacagggcagtaaaaatttcacctaattgtccagttgctagattacgaccttatgctggaaaatacatgcctggggcagtagtagctgttcgagttcctctcctacatctttctaatttccaaatatatgattggcctgaggtttcgacaagaagttatgctttgatggttttgatgcttccatcagatagtgctagacaatggcatgtgcacgagttagaactggttgaggtagttgctgaccaggtagctgttgctctttcacatgctgcaatcttagaagagtcaatgagggcaagggatcagctcatcgagcagaatgttgcattagatctagcaagaagagaagcagaaactgcaattcgtgctcgtaatgactttttggcagttatgaaccatgagatgagaactcccatgcatgcagttattgcactctcttcattactacaggaaacagatttgacagctgagcaacgactgatggtggagacaatattgaaaagcagcaatttgttggctaccctcatcaatgacgttttggatctttcacggcttgaagatggcagtcttcaacttgaagcagcaacatttaacctccattctttgttcagagaggtccttaacttgattaagcctgttgcatctgttaaaaagttatcactcacttcacatgtagcctcagatttgccaatgtatgccattggtgatgaaaaacgtctcatgcaaactattctgaatgttgttggtaatgctgtgaagttctcaaaagagggttgcatttccatcactgctttcgttgcaaagcctgaatcctttagagatgctagaattcctgactttcttccagtgccaagtgataaccacttttatttgcgagtacaggtaaaagattcaggatcaggaattaatccacaagatatcccgaagttattcactaagtttgcacaaaaccaatcattaacaagaaatcctgctggaagtggacttggcctggcaatttgtaggaggttcgtaaatcttatggaagggcatatttgggttgaaagcgaaggtattggtaaaggatgtacagtcacttttattgtaaaacttggaatcccagaccgatcaaatgaatttaagctaccttttgtacctaaagtaccaggaaatcatggatctacaaactttgctgggctcaaagttcttgtcatggatgacaatggggttagcaggacagtaacaaaaggacttcttatgcatttaggatgtgatgtaacaactgcaagctcaagtgaagaatgtctgcgtgttgtttctctggaacatgaagtggtcttcatggatgtttgtacagggttagatggttatgaacttgcagtccgtatacatgagaagtttacgaagcatcaagatagaccactgatagttgctcttactggaaacaccaaaaaggtaacaaaagagaactgtatgagggttggtatggatggccttatattgaaacctgtttctgttgacaaaatgaggggtgttttatcagaactattggagcgccgagttctgttcgaaagtgtttaacctgttagattgttgtacatagctatatcaaatttggagaagagcacaaacttatgaagcaatgaggcaattgacattagttgtcatcctttttgctgttttgagatcccggcaaaaggaacaacgattgagtctgcgttgttaaataattttttgtgaacacaagttcgtatatgttgtgtattctgcattttatagcagactttcgatgttttgcaatggcggtaaaattgcatttatactgtcctagactgttttgattaattgatttaagtttaattattttaatattactaaataaattaaattgttgtaaatcaagagagtttaatttaattggttgaacgtagtgtatgaacctccgttcctnnngataagacttttttcatttnngtttttgtccctnngnnaanaaaaaaaaaaaaaaaaaaaaaaaaaaaaaaaaaaaaaaaaaaaaaaaaaaaaaaaaaaaaaaaaaaatatgatttaaaaaaatataatattaattattatgagaaagaaaataaaaaaaaaaaaaaataaagggggcgcccctttttagagaaccaagtttaaatacccgggcatggaaaagtaaaaatttttttttttgggcccc

SEQ ID NO: 108681 - DNA, 349 bp, Glycine max
  Clone ID: PAT_MRT3847_69152C.1
ggcccccccaaataaaaattcactggggccttttcaaaccccccaaaaataatggggttttccttcttttcaagatttaaggaaggatccaactttccccctttttttttttttataaaaatccttttttttgaaacctgtttaaaggtttatgcatttttcattaaaacttttccacaaacgcttaaattggaaaagggacaaatccatttgttcccccaacaagcccaagacctttcatgggggctgcaatttggaaaatctccccaccagctttgcttgttgaaaaggcaccccctccccctttgcccttagaggagggttgatttttcaaggggccccccccctt

SEQ ID NO: 108682 - DNA, 370 bp, Glycine max
  Clone ID: PAT_MRT3847_69153C.1
cagcgggcgacctacattcttatttttaaattataaatttttaattttttaacccaaccaaattcattcttgtgcgggttgaaatttaaaaccccataccacccccgcccaattatatcaccaaacttttataaacacaaaccgcacacccctatacaaagaggcttcccacaatcccccctcccgaaaaaaacacacccacccaaccctccccctttaaaaaaaaaaaaaaacccacccccaacccgccatcatttgcagcccctttacaacccgataaacaaccaaaaccccctttatttcttacacgttccctcagagcaaaaaaaacccccttaccaaagaggaaaacccaattgacaaacaaacc

SEQ ID NO: 108683 - DNA, 495 bp, Glycine max
  Clone ID: PAT_MRT3847_69154C.1
tttgagattgatgaggtgtgcggtgattgagtgttcgcggccggtgttttccgtgaacgttgcgtttgggtttctgattctcggcgaggagaatggggttagagtttttggattgaggaggctcgtgaagggtaggagtgggaagagggttgggaattcgaagcagttgaagaatggtggtggtggtcgaggagcgggtttggaggcggtgaactgcaatggtgatttgaaagggaagatggaaagatatgttgttgctactgctgtgaagcagacaaatgttaaattaaaacatgacaacagagatggaggttcctgttttgtgacgttgaaggtaaatgaggttaaaacaaaatccccgacaaaggtatccatgtctataaaggctatttccattcaggctgtgtcccagaggatgtttctgatcttggattctcatggagatttacatttgctatccctgtcaaattctggcataggagtagatatcactgg

SEQ ID NO: 108684 - DNA, 515 bp, Glycine max
  unsure (1)..(515): unsure at all n locations
  Clone ID: PAT_MRT3847_69155C.1
acgaggttggaatgacaccagtcctgccagccttttctggtaatgtccctgctgcactgaaacatatatttccatcagcaaaaataacacggttgggaaattggttttctgtcaagaatgacctcaaatggtgctgcacctatcttcttgatgcaactgattctttgttcgttgagatcgggaaagcattcattgagaagcaactgcaagagtatggaagaaccagccacatatacaactgtgatacttttgatgagaacaccccaccagttgatgatccagagtacatttcatcattaagtgcagcaacttttaaaggaatgcagagtggtgatgatgatgctgtttggttgatgcaaggatggctattttcatataatccattctagagacctcctcaaatgaangcccttttacattctattcctattagaaagctagtggtacttaacctatttactaaantaaaacccatttagataacctcaaaacanttttatagatttccctacatc

SEQ ID NO: 108685 - DNA, 250 bp, Glycine max
  Clone ID: PAT_MRT3847_69156C.1
ctccccaactttccatttttttctattctcatcaaattttaattcatcccacttactcattaacatttaatttaaattccaaaaaacatacttctcccactatacttttacataacttctactacagactatcctatcttatttcttcctacatctattttccttaaatccattaccatatcaccactcaccactatacatctctaatctctatatttatctcaaatataatattcaaaactaaaacaaa

SEQ ID NO: 108686 - DNA, 497 bp, Glycine max
  Clone ID: PAT_MRT3847_69157C.1
ggctcgagcaacaactaatcagtggggattgtgtactgttatattgggcttctacatctatttgggacttcatgagcttattgtcatcggccttttatgccatatttctattttacgtctttgggctgcatcagtttgttggacgggtatctttggaccaacaatcctcatgcttttggaatatggacttgtaatcgcattattaacttattgccttacatttctcttttttgaccataccatggcgcataatgtggctctgttgatccacttgatctctggattgatactgatggtcatctcatatcattatgggactcatgccatcaacaatgaatgccaattctttaattaagaatgtgctcagaatatctcctgtaatgtgtttcgctgatggtcttgctttactagctcttttacggcaaggaatgaaagataaaacatgtgatggggtgatcgattggaatgctactggggctttcatctggaatcttgct

SEQ ID NO: 108687 - DNA, 522 bp, Glycine max
  Clone ID: PAT_MRT3847_69158C.1
ggaacggtaaaaaaaagacgacctacctagctttaaaaactaagggcgcgtctctgaggacagcttttttctgaccctctacatgaacagggcttttatttggtactggccacctactcaggaccacccccattggctgcaaacccttgatgacgacaagacttgcgccacttatgccgtcctttgaaaaaagaacgttatttaaaggtttttgaggggggggggggttgaaccctgtgtttactcctgaacgaaaaccttttttgggtgtatgaaccccctattaaagtacaaacccaccgtgtgtctactggcctagcaagctaaccccttttccaactcttacaatgatgcagcgccctctttgaccatgttgttgacctgaaatgcagacaaccgaaggacccaacacctgcccccaaaaatggcgaggacccgacccatgcatgcagttgagaccctctcacgcaacaaatgcgaatgcttgcaagagaactacatgccaggaaatagcatcagcct

SEQ ID NO: 108688 - DNA, 226 bp, Glycine max
  Clone ID: PAT_MRT3847_69159C.1
ccacgcccccgtacggcgggaaaagacgaccacaagggacagcaagatctggttgtcctcatcagtttgaatggaaacgtggcggtgcgaaacgcgtgtgttgttgcctccttcccatgtgaaggtcggaacggggcacttggggctgaggctcctcatgggtgatcactcctcatgttatgcagatgagtcgtattcagaatcaagctgtgatatccgcatgtgc

SEQ ID NO: 108689 - DNA, 324 bp, Glycine max
  Clone ID: PAT_MRT3847_6915C.1
ttgaagacgacagaagggggggggtcatagtaagatgtgcgctcttttcccccccaccgcgaggagaatatgaagttgtctgcccactttggtgctgaaaagttttggcagcatggtcatgccatggcgcaggctaccaaaggatcactctccgaatgaaaaccgacttatagcgagcgttctttcggtggaaaaatgcacaacgttttaggctttgctgttggaagcacaccatcattccgagcccttttaaaacccattcactgaacgaggtccgttctacaccaaccaaaggacctacatttaaatggccgaacaatttta

SEQ ID NO: 108690 - DNA, 418 bp, Glycine max
  Clone ID: PAT_MRT3847_69160C.1
tcaatacaacgaggttcacgctcacatgaaaacaaattttttcaaattgtctcttaataatcttaaaactcctaaaagttccatattcgatcttaaaatctctcaatctaaaatttcacttcccaataacacactcaaaataaccattctacataataatctattaacaaatgttgtgactacaaacaattttaaaccaagtattaatttgcaccacactcatcatattataaaaataattaaaataatagccacagttaatattcctaacaatacacctatctcattagctctatactgtgaatatttctttcaaaaacacaccacttctgatatttacgccatctactctcaatacgttgaagttatgaatcctgcttacacaataacactaactatatcagtgaatccaaaccca

SEQ ID NO: 108691 - DNA, 655 bp, Glycine max
  unsure (1)..(655): unsure at all n locations
  Clone ID: PAT_MRT3847_69161C.1
gtacgacctcgcagttccggtccggattcccgggtcgacccacgcgtccgaagattgccaaagactatgtgaagttgttgaagtatggtgactcgcttgtctcggtgcaagtgtcttaaggtggcttgcttcttgggccgcactgtgccttgtgaacaagatggttggcccgagtttggctttctcttgaaccggtcagaccaagcacactggcttaggctttcccttcttcttgactcccaaaatacgaggactaatcttgatctgtggactactcccaatgttggcaagagctcgttcacttaacaagaattactagaagctgatgtggatgtgcagccctatgctttcactacaaagtctcttctttgtgggtcatactgattattaaatacctgaggtaccaagtaattgatacaccagggattttggacaggccttttgaagatcgtatattattgaatgtgcagtatcactgctctagcacatttgagagccgcgatatttgtttttttnggnacgtgtctgggtctttgttgttacagtattgctcagcaggcagcttctgtttcacagcatcaagtcttttgttatgaaacaagcgttgattatagtctgcaacagactgacttgcagccacttgaggggatatctg

SEQ ID NO: 108692 - DNA, 349 bp, Glycine max
  Clone ID: PAT_MRT3847_69162C.1
tcccaagatggaccgaaatgacacacgatactcacaatcatcggcaccagtttttgcatccgatggtaccgtgttgttgttgtgtgtaagcaaattccaattctcgcacccatgttcgcattttactcctcgaattgaaatctcgcttctgcagttatcacgttcccatcaccctcaacaacaacaacaacaaaaaaaaaaacgaaattaccttcaaattcttcaatcccaagccattcacgaaccccccaccaactttctctccgacccttttcccaagtcggagaaaagttttgttttttcctcagatctcacgttttcctcttcgttttccttcacgggtcgtgac

SEQ ID NO: 108693 - DNA, 276 bp, Glycine max
  Clone ID: PAT_MRT3847_69163C.1
gcccgatttcagattgcaaaattacgatggataaaacggtgaaagacaactcagggtggagcgacatcttatttcacggggtaattgttctggagatgggactgtgctacttcttgatgcacatactgcccaataagctgtgggaccaactccgtataagtaacacggcccacatgcaagtcaagcaccaattgctccaacgcgcccagatcctggcccggtcccgatcttgcaagtacaaggacactttcaaggaagaacatgcccaggctcaga

SEQ ID NO: 108694 - DNA, 1016 bp, Glycine max
  Clone ID: PAT_MRT3847_69164C.1
gcaaccattaacaataccgcaatgcatgttgatttcatttctcttgtaagtgaccttgtgaaaacgacatagcaactaaaggtgaaaatgcaatacataatagagttggcatatcattacatggagtgaatatatgccacagggtgaggatgaaaaaacatcatattattcttgtattgagaaggaccacatcattcaacttctctgcaaaattactgccttcttcagattgaagagtcatcaaaaagtcaaatacatcatctacaatagctggagtgctggactgcatgtataccacaggccgaccaaatggtctagaaaggcatgctcatttttcaagtgaccaaaagaaactgttgatgatccagatcaggcacagaacgctgaaaatgtccattgctaatcttcactgcacagatgaacacaattcatcgacatttgctataacttccgaggcaaagtatatgataaatgtcaaacccctgaaatcctttttttgatctctcaaaacaaagcttgggataatttgtacaaacaaaaaatgtgaaaagtgaatgagcttgaatataatacccagcagagttcttgcaatggtaatgatttgaaactgaacataagaagaaggggtccccaaaattgagaaattcaatttcctttaaggagcatattgttaaagaatgtgtttcaacttcctattatgattctcctgctcaataaccatagcagaactcttctccaccaagccagacaagttctcaatcttcacaagcatcttctgatacaattcctccaaaaccctcggtgtagttcttggcctcagaccccatcattctgctgagcctcccaacctcgaacccctccgcgcattgcttgagctccctatggtccttggtggcctgcttcatttttccttcatgtctcgcggacgcgtggtggggatgtcaaagtttgtaatgtgttaaaatatcataatcttttcttgaagtgtcaatcttatatagctcaatatgtctcgt

SEQ ID NO: 108695 - DNA, 354 bp, Glycine max
  Clone ID: PAT_MRT3847_69165C.1
acgcgaacacaccagaccgagcatactaacttctaaaatcatcgctcttactctctacaagggtctcaggtcactattttacgacaccaccacaccaaattctattactatctccacatatcacccaccttctaatcttactgattctttcaatttcatctgatttgatccatgactctaagactatccatttaactatcactttccctagatcgatgctactcagccaaccaatctacacatcattcagacgcctactacttcctatcacattcttccttttatacactgcttatcatgtaactaatacatatgttgactacagggcaacacttgccatcatatataaaaaca

SEQ ID NO: 108696 - DNA, 250 bp, Glycine max
  Clone ID: PAT_MRT3847_69166C.1
agcagtttcaactaaacccctctatctctcccaataaactaaagaaaaaaagaaaactgtaagtaacagatccatttctctctccacctcactttcaaaaatctcgcttctcttcaattttcggccaatatccttcaaaaccctaatcctctatcccctttgatccgccccgttttccatttctgggatgatgtatttacatttgggtctctttctgtgcattctttctgtgtgctgctctgcgactttg

SEQ ID NO: 108697 - DNA, 326 bp, Glycine max
  unsure (1)..(326): unsure at all n locations
  Clone ID: PAT_MRT3847_69167C.1
cgnnaacangtacgngtagtnagcncggaatcggntcganatcgagacgnatcncnctggaganccgngaccggagnntccgctcnngnngtgnccacaggttannctctggttctggaancagttttnccattgttcnnctgcggnttntttctctgttgtgcgagctnttgttcnggatcggnttntcatgnttataaaagcaatggcaagtgcantgagtagcagagttgaatctgtncgaaantccnnctttntaagatttcgatcaattcatnagagccctagctcncttcgtcttctnnntatgacgnntnntctgatga

SEQ ID NO: 108698 - DNA, 304 bp, Glycine max
  Clone ID: PAT_MRT3847_69168C.1
gcggccagaggaaaatcccgggttaatatttatagacagcttttgtcaaatgacaaagatttgggcatagagggggggcattttcatggaccctaaaaacaggtgtggatattcccatggcgaagatccaattatacaggggggggaccgcgaacaaattaaaaatattttgcggacgtaaaaaatgaacaaatctgcaagtcaatgctggaaatgttaaaaagccccagcaacggatttagtattatgaatgccaaatattatcctcctcaaacatttgaaactggaggtttaaactactcat

SEQ ID NO: 108699 - DNA, 224 bp, Glycine max
  Clone ID: PAT_MRT3847_69169C.1
tataagattggaggtacttgtttcctttggcacacacactctccgggcctgtgtggtctgcgcgctttaagacaaatttggcttttcccacttcatcctcggtcactaccaaatacaactggctggtctggctgttgcctaacatgggtagttggcgctttttacgcctctgtttgaggcctctgcgtcgaaccggttcttcttgggtccctggatattggccc

SEQ ID NO: 108700 - DNA, 338 bp, Glycine max
  Clone ID: PAT_MRT3847_6916C.1
ggatcgtctgagctctggggccttcaggtaggcctggcatgcggggtatccgtatgaacatcgtccatgatcaatgacctcgtcttgtttccctaagtgaaagaggtggccaccactatggagttggagctctacgggccatgcttagaggacatgtgtatcttgcatgaagaggcctagccaccttcataccatatgatatttataaaagcctctatatatgaaacgatgagctgaggctacgcatgccatgataatttctgttgataatagtgtggaaatcctcttgtaacaaaatgttcaagatctaaccttgatatttatatagccggcttcac

SEQ ID NO: 108701 - DNA, 659 bp, Glycine max
  unsure (1)..(659): unsure at all n locations
  Clone ID: PAT_MRT3847_69170C.1
agcaccaaaagaaaaaattgacttttgactgtatggcatcgcattgtacattcaacacctcatcacatgtcgaaaaaatggtatacaggtaatttttacactcacccgcaatgatttatctcccttcctctcaaatttagtaaaccgttatatatacctcgaataaaaatacgtataaagtagacggacgttccagtcaaattttttcgtagaataaaatgtatgcctcacagcgaagaacttcatcaagggaaacttcacgcacatatgcatcacttgcctgataccatgtggaaccctcattctctttatcaccacccttcccactgttcctctggccccctctcacatacgcaacatagtgaccccctctcatagttccggagtgctccactaagccaaccaagtggtattcatacttctcttcatttatgcacctgggatcaatatagggtctaatatccatcgtttctctgaaattgacatggccatttaatttacttaagcgaccacgggcatcttggctgaatctcttcaaatgaatggtcaagacaggaggagctttataaatgaggaccctcttagttgcatccctcttcactttcacgcttttggagccagcctcttcttctgagtcattgntatcattacctatcatc

SEQ ID NO: 108702 - DNA, 583 bp, Glycine max
  Clone ID: PAT_MRT3847_69171C.1
cccgcgtccggtctgggctcgttgaggtggcagcccctttctagcagtgaagacagaggcatgctgatccagcacatgctgcaagtcctgaggcatatcgttcgggatgatctgatgttccaagcaaaagcaggtagtgttctcagaggctaggcactgcaaaaggccctataaggcagtagagtgagaggaatctttgatatgatgaccttgcaaggcgattaactggtccttgtccttgaagctcacaatctttttgttccaatccatgtggtttgtcctaaagttttcaaccactcaacccctaacacaagatcaacgcccccaagaacacacaagcgttgacaccatgagaggaacatttgttgccgttgtcgaggatgacattgaactccttcgttgctgtgacctccaagttcagggaactcaccagttctcatgcaatgaaattgtgattagccccactgtcaacgaggagaagaataggataactagccaactctccttccaatttgatggtcttcgaatgtgcaaggtcactggattgagagcgcaatagtccaaaacgggcacaccatgtctt

SEQ ID NO: 108703 - DNA, 169 bp, Glycine max
  Clone ID: PAT_MRT3847_69172C.1
gaagttttggcgctgaaagaaaaatggcggcagagcactaggaatgcggtgagagtggagaatacatatccgtttgggagaagaacacctactttatgtggccgaagccttgatacctcacccggttcaaaggccgtaattaagcgaacactggttttcctactctagc

SEQ ID NO: 108704 - DNA, 792 bp, Glycine max
  unsure (1)..(792): unsure at all n locations
  Clone ID: PAT_MRT3847_69173C.1
ccacgcgtcgatactaaacacgatttattttgtcttttttctttatcacagctgcaatcaacaagacttagaatgcgatgagcaaaaatagacctcaattccgaattcagagatagcacgcaccaggagaagccatggctactcaatccccttcacctcagaacctaggtggtgaaattgagcaaacagaaaatgtagatcagcataataggggagaagagcttggtaaacagagttcagacacatcggtgtttgtgaactcagagccattgcgtgaggaacaaattcagaatgctgtgaaatttctgtcgcacccgaaagttagaggttctcctgtcatccacagacgatcgtttctggagaagaagggccttacgaaggaggagattgatgaagcctttcggcgtgtgcctgattcacctccaagtgtgcagacagctggcataaatcaagatggacaattgaagccatcatcaaacattcagcagcaaggccaaccacaggctttgcagctgactgtaccagcttctactggtgttactactacgcttggaaccttatctcgccgcagttttcactggtcacatgcccttattgcagttggattactggctgcttcaggtgctggtacagttatagtaattaagaattctattctccctcggttaaaatcctggatacgcaatgttgtcctagaagaggatcatgaccaatcaaagagaacaggctcaaaaccaacattggcagaaagagctgcacaggctgcaaaagcagctgcagntgcagctgctg

SEQ ID NO: 108705 - DNA, 406 bp, Glycine max
  Clone ID: PAT_MRT3847_69174C.1
gatatcaaggaaggtgccatactcaaccttttgaattgtcctgtggataattataccatcatgtatagcacccagaactgtggcattcatctgtgggatactaggtccaattccaatacctggactcttcaagctactcctaaggagggctatgcttcttctctggcatcaggtccttgtggtaattggtttgtatcggggtcatcccggggggttattacactttgggacctgaggtttcttatacctgtgaattcttggcagtattctcttgcttgccctatagaaaagatgtgcctctttctgcccccttcaaatgcttctgtctcttcagctgctaggccccttgtttatgtggctgctggttgcaatgaaatttctctttggaatgcagagaatgctagct

SEQ ID NO: 108706 - DNA, 811 bp, Glycine max
  Clone ID: PAT_MRT3847_69175C.1
gctcagagaatgaagactgcatgttggaaaagatgtcgctcagaatatcgaagaaaaacaaaaaactaattgccaaagaaaggattccaacacatctgctgatccttcagtagatgatcaccataatgatatgtacttgaataatggttcttgtcatacagaggaacaagcagctcaaagtcttggtgaaattaatgggaatggtatattcaatgctaaaaggttgtaactctaatgatcacctagttcagaaggaaaatagtacaaatactcaactgattgacaaaagatttctcattggtaaatgggatggacacagacacatggatagggtgccagagttcatagctggtggttcatacgggacccctccttacaatgaaaatttccataaatatcttgtttcaaagattcctatcaaaccacttgatttagatacaacaactgcattattgcttgactatttcccagaagaaggtcaatggaaactttttgaacaaccacaaaacatggaaattgcttcttctcatactgaaactagtgaagaggctgggcccaaggtgaaggctccctcatctgcaaaatcttctaatgcagagcaatatattgaaccactatatgtaatattggatactgaaaagcaacaagaacctgtcaaagagttcattacaacagacacagaaaacagaatgactgacataagtgatgacaggtcagatgaattgatgcaatttgtgaaacacagagtgttacattttttgagatggaagttggtcccagctgaatgctgctgaaatgatagaaatgaagt

SEQ ID NO: 108707 - DNA, 293 bp, Glycine max
  Clone ID: PAT_MRT3847_69176C.1
gacaagggaatacttttttcatttttttttttttggttgttccttttttatacagaccggtacttttcaggcgatttattttttcctaaaccggtatgaaaaaaaacaatttctcaacatgttggtctttttttaaagtgggaaaattgttattctgtaaattttccccctgtctaagggggagaattccatttaccttttaatgctaagggttccctaataatgttgatttaataagatcattttacttattttttttggctgtaccttatttagtttttttttcatgtttg

SEQ ID NO: 108708 - DNA, 169 bp, Glycine max
  Clone ID: PAT_MRT3847_69177C.1
cccacgcgtacgaacgaattgatttaaatttttttaacacaacatacaaacatgaaaacgctcattattaaaatggaacgtggaccaaaaccactatccatacaatacaaccaatcattattcaatcctataatgtatacgccttgcatacagctatatcatatacaca

SEQ ID NO: 108709 - DNA, 471 bp, Glycine max
  Clone ID: PAT_MRT3847_69178C.1
ttttaaccttattacgggtgtcataatagcttatttttggtttaacaagacatgagatgtcgtggaattattaaacactgctgaaaaaatcagcggggaattcacccctcttgcttaagcgtaaataaaattggttagtcgaaattagaggctaccgacatttttttacgtctctttaaactgaattactctttttttacctcacaatggtgcttagaaacacagcctgataaacagaacatatttgaatgaataattttggattgtaccttaaattgtccggatgaggaccaaacacttgctggggcggaaacgcctgaaaaggaaagggtgaagtctatctatgactgtgtgccacgatgggtaaattggtaggctaataagctttggtcctaagtttgtgacaggcaccctttgaatcggtccccattgcaagcggcgctttagagttacgaccgccttctcctacat

SEQ ID NO: 108710 - DNA, 467 bp, Glycine max
  Clone ID: PAT_MRT3847_69179C.1
aaaaaaaaaaaatataaaaaattttcggccacccttaaaaaaaaaaaataaaagggaaggggggtatattttttaaagaagaataaaaagaaaaaatatccattaaaaaaatgtaaaaaaaagggggcggccgccaaaaaagagaaaaattatattgcgactccgttctgggtgaaaaaaaaaaaaaaaaaaaatccttaatatggggggcgtcagaatcgggtgggagaaaaaaaaaaaaggggggcgtcaccccctcccggaggaatgaaaaattgaaaaagccccccccatttttggccttttggggatcttgtatccaaaatcccggggggggggagggtgaaaaccaaatgagagagaaactttgttgaacaagcaacaagaaaaggaacttttggggtttgctgtttttaaaaagaggggggcgctttcggggttactcaaaaatggaaagggaggggccg

SEQ ID NO: 108711 - DNA, 265 bp, Glycine max
  Clone ID: PAT_MRT3847_6917C.1
tttgccttctgctctccctgcccccgcggttccccgtcttggtgtgtcgctctccgcggagctgtgtttgccttgccctcgtcttgttcggtgggtccgtttttggcgactcccgtgactcgccgggtgctctccccggcgcgtcgcttgctcggtgtgggctctctggggctgatttcatcgctgaccattccccgccgctattgcgattctcaatcgcatgtcctccactttcttgctcgtcccttgcccctcccgtgacttg

SEQ ID NO: 108712 - DNA, 449 bp, Glycine max
  Clone ID: PAT_MRT3847_69180C.1
tacggctgcgagaagacgacagaagggggggagaaggaagaagattgacagagagagagaggaaggagcgcgaaaagactaaattgaccttggatcttcgtctttcctctctctccgattcgtttttcgttggtcttctaaaagcttcttccaccatgaacagcaaggccaacgtttccaaagagctcaacgccaagcacaagaaggtttctctcttcgtgctttttctttttattattatttcaatttcgatttgtgaatcctgcattcgctgattaaataattgcctcggatcattaatcggaacttgttcttggatttgaatccgtcgctgtccgatatgcatatcgcgaaattttgaaagtgagaaagtttcgattctatctgttttattgcgaatgtatatggcgtaattagcgatgttgcagacaaatgactgaatgagtgat

SEQ ID NO: 108713 - DNA, 789 bp, Glycine max
  Clone ID: PAT_MRT3847_69181C.1
attcggctcgagctcgagccgctttgagaagtccaatgtggtatctccatttgcaatgcatcaacagcagctggccatgctggcacagcaacagtctcttctaatggctggcgctaaatctgctggtggggatcccaagtacctggccagcttacaacaacaacagtctcttctaatggctgctgctgctgctaaatctggtggcacggattccaagtacctggccagcatacaagaacctgggtccaacattcctctccaaagttggctgggtgctggctacccaatgcctggtgcaatgcccatgggtagtcaggaagagttacagaaactcatgcagaccgtgaacatgaatgcagcccattcagctgggagttcagttcaatatccaccatctagctactatgctatgggacaagttgctccctctaatggttccacgccaacggaagcgagcaaacctcaatcagcctctccagcatcatcgaacacttcaaagacagggaacgactatgatttttcctccttaacacaaggaatgtttgcaaaacactgattggcctttgcttaacatcccctgctatgtcatataccacagaagattagttaaaagttacagaaaagtgcactcttcttctttcccttgacccgtatacttgggttgtaaaccatatctagagctactgagccagttcagttttcctgttacgggtgattgcttcatttgtatccataggtgtattcacaataaaatttagtgatatttattatttattccttttctttttc

SEQ ID NO: 108714 - DNA, 1151 bp, Glycine max
  Clone ID: PAT_MRT3847_69182C.1
gtttatcgtgaggagaatacggagtcgtacgctctttataagcgcacggatcaatgacatggcaagtgaatttaaattcccgcctaaaccccacgcgttccctggatttcatttcgtttgcaattgaatttcaatttccctaggggcttaatatctccccgcatttgtgcctagcctcattattatcatagtagatattcattccccttatctttctctcttctctctccccgcccaaaccctaactccctaccctattccgctttctctcatccatcatgaaaggaggaaagtccaagaccgaatctaagagagccgatgccaaacttgctgtgaataagaagggcgccgccaccaagactaggaaacccgccggaaaggggaaggcagcgaaagatcctaacaagccaaagaggcctccaagtgctttcttcgttttcatgtaattataatatattgttatctctacgattcatttgacttccgatgcgctctcttatctttcctccgaataattttatcgtcaaaacttttatccttgtccaattggaggaattcaggaaggtgttcaacaaggaacatcccgacaacaaagcagtgtctgctgtgggcaaagctgctggagcaaaatggaagacgatgtctgatgctgaaaaagcaccttatgtggcaaagtctgagaaaaggaaagtggagtacgagaagaacatgagagcttataacaagaaacaggcggaaggtcctactggtggggatgaagaagaatctgagaagtctgtatctgaggtgaatgatgaggatgatgacgaggaaggcagtggcgaggaggaggatgacgattagagaatggactgatgataatagcatttatgtaggttctgatgattttgatcatccgtgtaggtggtctggtcatttccttataaacatatttctctttccaaaaaatatttccctgctcctccttccgtaaattgctcgtctttccaaaacgtgaatagtttaaagaagggagttctctttatttgtatttctaaatccaactgtttagttaagggatggttatctcttgtagagcttttagtttgatttagagttttcttgttgaaatctggttaagtttgtatcaatataattgacttatcatcccc

SEQ ID NO: 108715 - DNA, 2640 bp, Glycine max
  Clone ID: PAT_MRT3847_69183C.1
acagggagagatacgaacgttttcttcttcgtattttcactttttggtcgcatattaataatcggagacgagaagtgtagttttagtgggagaaggaagaagattgacagagagagagaggaaggagcgcgaaaagactaaattgaccttggatcttcgtctttcctctctctccgattcgtttttcgttggtcttctaaaagcttcttccaccatgaacagcaaggccaacgtttccaaagagctcaacgccaagcacaagaagatactggaaggacttcttaaattaccagagaatagggaatgtgctgactgcaaagctaaaggtccaagatgggctagtgtaaatcttggcatctttatatgcatgcagtgttcaggaatacatcgaagtttgggggtacatatatcaaaggttcgttctgcaaccctggacacttggcttccagagcaagttgcattcattcaatcaatgggaaacgagaaagcaaattgtttctgggaagcagaattacctccaaattatgatagagttggaattgagaatttcattcgtgcaaagtatgatgaaaagagatgggttccaagagatgggaattcaaaaacaccttctggatttcgggaagagaaaagtccttcacattggcagaggcctgtggagagaagtggttatgccgctgtttctgaaaataaatttgaggaaaggaagaaaatccaaccatcaactgcaatttctaccgcaagaattaatgttcctgctcctcccacagcatctgagcaggtaactcctattaccaaacctcagcatgtggagaaagtggaaccagtagcaccacaaccacaagctccccaaccactagctgaaacatcaaagcaagctacagacacagttcaaaatatccctccaaaagttgactatgctacagaccttttcaacatgttgtctatggatggccctaatgaaaatggctctgaggcagctggtacaactactgatgataatcactgggcaggttttcagtctgctgcagaggtgtcaacagctgagaagactagtcccctgaaagcagctgatagtactccaggttctgcatctggaattgaggatcttttcaaagatttacatcctgtgacaccaagtttgactccagaaaaaccacagaaagatgtgaaaaatgatatcatgagcctctttgagaagggcaatatggtgtctccattttctatgcatcaacagcagcttgccatgctagcacagcaacagtctcttctaatggcttctgcagctaaatcttctggtggggatcctaggtatcctgctagcatacaacaacctagacccaatgttcctatccaaagttggccagctactggctattcaattcctggagtaatgcccatgggtggtcagggagagttgcaaaaacttgtgcagggtcagactaggaacatgaccccagcacattttgcagggagttctgttcaatatccaccatccagtttctatggtatgggacaagttcctcctccagttaacggtatgacaatgggagtgagtaaacctcagtcaggagctcctgcagtgtcatctaccacttcacagtctgcgaaggattatgatttttcctccttaacacagggaatgtttatgaaacagtgattgatcttttttgttgggcaatgccagctatgtcatatactaccatagaagattagttaaaattacagcaggtgcgctttcttttctcatttttcccttgacctgtccttgtggtgtaatccatttgtagagctagttcaggttttttctcgttcatttcaggtgattgcttcatttgtatccgtagttgtattcactatttatttatgcacaataaaattagtgatatttattatatattgatattccttcaaataaaaaaaaaaaataaaaaaaaaaaaaaattcaaaatacatagagcaatgaccatgagtagtctggaagagttacagaaactcatgcagacaatgaacatgaatgcagcacattcagcagggagttcatttcagtatccaccatctagttactatgctatgggacaagttgctcccactaatggttcggcaccaacgggagcgagcaaaccacagtcagcatctccggtatcatctaccacttcaaagacagggaacgactatgatttttcctccttaacacaaggaatgtttgcaaaacactgattgaccttggcttaacattccctgctatgtcatataccatagaaaattagttaaaattacagaaaagtgcactctttttctttcccttgacctgcctccttgggttgtaaaccatatctagagctactgagctagttcagttttcttgttacgggtgattgcttcatttgtatccataggtgtattcacaataaaatttagtgatatttattatttattcaaaacttttttttttgttctctcttcgggctttttctttttattattatttcaatttcgatttgtgaatcctgcattcgcttgttaaataattgcctcggatcattaatccgaacttggtcttgggtttgaatccgtcgctggccgatatgcatatcgcgaaattttgaaaggtggaaaggttcgattctatcttgttta

SEQ ID NO: 108716 - DNA, 717 bp, Glycine max
  unsure (1)..(717): unsure at all n locations
  Clone ID: PAT_MRT3847_69184C.1
cgtttttctgcaattctcttcgttttcaagcgattttcttcgtttttctacgaattcacgccgtaaaactatcctgattgtgtgattgcagtatccgtcatgaaaggaggaaagtccaagaccgaatctaagagagccgatcccaaacttgctgtgaataagaagggagccgccaccaaggctaggaaacccgccggcaaggggaaggcagcgaaagaccctaacaagccaaagaggcctccaagtgctttcttcgttttcatggaggagttcaggaaggtattcaacaaagaacatcctgaaaacaaagcagtgtctgctgtgggcaaagctgctggagcaaaatggaagaccatgtctgatgctgaaaaagcaccttatgtggcaaagtctgagaaaaggaaagtggagtacgagaagaacatgagagcctataacaagaaacaggcggaaggtcctactggtggggatgaagaagaatctgagaagtctgtatctgaggtgaatgatgaagatgatgatgaggaaggcagtggcgaggaagaggatgacgattagagaatggactgataattgcatttatgtaggttctgatgattntgatcatctgttgtaggtggtctggtcatttcctgataaacatatttcttgcttccaaaaaatatttccctgctccctccgtaaattggttgtctttccaaaacgtgaatagtttaa

SEQ ID NO: 108717 - DNA, 1310 bp, Glycine max
  Clone ID: PAT_MRT3847_69185C.1
gagggtttctctctcttcttgtcgcgaattctcgttcttctgccataatcaagcgaaaaccatttcgttgcggtcactccttcgaagaactcggtttcagatctgaaccgcaatcgtttgaagagatccacagtggctgcgttctccgttcacttctcccacctttcatgttcttctccgcgtgcgaacagatcttgaaaattggcgcctcaacgacgttcgcagcgccacgcgagtggccagatgccgcagggcaatgccgccgccgcagcagcgctgctggaccacggcggcgatgccggcgacgccatcgatcatcgcctcctccctaaccttctcatgcagggttatggagcacagtctactgaggagaagcagaggcttttaaagttaatgagaaacctcaattttaatggggaatctggttcagagccatatacacccaccactcaatctttaggtgtggctgggtcggatgggttttattctcctgagttcaggggggagtttggagctgggcttttggatcttcatgctatggatgatacagagcttttgtctgagcatgtagtttcagaaccttttgagccatcacccttcatgcctggagatactagagtatttgaagacgatttcgatccaattaacagcaagctggaaagcggggaagcagatactgatgcatcaatttccttacctatgaatagcacaagggaaaataatgttgctaagattaaagttgtggtacgcaaaaggcctttaaacaagaaggagcttgctaagaaggaggatgatgttgtaaccgtaactggcaatgcatatttgacagtccatgaaccgaaactaaaggttgatttgacagcttatgtggagaagcatgagttttgttttgatgctgtgcttgatgagcatgtgaccaatgatgaagtataccgaagcacagttgaaccaattattcctacaatatttgagcgaaccaaagctacctgtttcgcttatggtcagacaggaagtggcaaaacatacacaatgcaacctttaccactcagagctgcagaagaccttgttcgacagttgcatcagccagtttaccgggatcagagatttaaattgtggcttagctactttgagatatatggtggaaaactttatgatcttcttagtgacagaaagaaactttgcatgagggaagatggacggcagcaagtttgtattgtaggactgcaagaatttgaagtttgtgatgtactaattgtcaaagaattcattgaaaagggaagtgctgcaagaagtacaagatccactggtgc

SEQ ID NO: 108718 - DNA, 448 bp, Glycine max
  Clone ID: PAT_MRT3847_69186C.1
gaaaagaggaaagttcaataccgactctaatagagcctatcccaaacttgctgtgaataataagggagccggcaccaaggctaggatacccgccggcaacgggaaggcagttaaagaccctaacaagccaaataggcctgccagtgctatctttgttctcatggaggagttcaggaatgtattcaacaaataacatcctgaaaacaaagcactgtctgctgtgggcaaagctgctggagcaaaatggaagaccatgtctgatgctgaaaaagcaccttatgtggcatagtctgagaaaaggaaagtggagtacgagaagaacatgagagcctataacaagaaacaggcggaatgtcctactggtggggatgaagaataatctgagaagtctgtatctgatgtgaatgatgaacatgatgatgagcaaagcgatggcgaggaagaagat

SEQ ID NO: 108719 - DNA, 426 bp, Glycine max
  Clone ID: PAT_MRT3847_69187C.1
acaggattagactgaaccacagtaacaagggtgccgtatacacaatgaagtttactgctgggtttgagctacatgaagcactaggaccaagctttctgatagggagtctgctgttaaattcgggcagagataagcatagcacgatgtcaaagatgctgaaatgtcagatgaaattaactgtaccccattgactcgtgaatatgatccagagcatgtgtggcaagctatggtggctaacatgaggccatacaataatagcgtgcacagggacagatcatttatcacatcaatgcatgctagcaccgcctaagcaagaaatactaaaggttctgtccacactatcaattctgaacgctgcgcaatagatcacctccctttggttataaaggacaaacatcctaatgcgaggccatctggcatatgcgg

SEQ ID NO: 108720 - DNA, 437 bp, Glycine max
  Clone ID: PAT_MRT3847_69188C.1
ctcgccctttttttttttttttagtagaaagtccagataaattttatagttaagcatgtgaaaatagtgctagtaaagtatttattttcttggagtgtctttatgaaatccatatattacataggaaataatatttgtacaaagttctactctatttttgtatatcctgttgaaaattttgggaacctaaaccattgttgccgaaatcgtgtaaatcaatgaattttaagtcggaaacggatcatcttcattttttttgccaaaggtgctccatctttgtttcaggacgacatattttgctgatcttactagtttcttcgtgtacctacatgctagatattgtttggtatggacattttcttctgagttatgtatggtgcatgacatctcaacaaaactttccaaacgctgtctcatgcttcttagaataaaacctt

SEQ ID NO: 108721 - DNA, 1479 bp, Glycine max
  unsure (1)..(1479): unsure at all n locations
  Clone ID: PAT_MRT3847_69189C.1
cttgantcctctagagcggccgccctttttttttgtgtgtgtgtgtgtaactagttgtgaatggttcttgattgtgttagtagctgagcataatggcatggggattcccttttcaatgaatttaataggtggcatcatataaagcttgttcgtaatgttccacagctactcctttatccccatattttcactccatcactttcatttgttattgtgatgctaatagtgttttactttaaggaagtggcaaaacatacacaatgcaaccattgccgctcagagctgcagaagaccttgttagacagttgcatcgaccagtatatcgaaatcagagatttaaattgtggcttagctactttgagatatatggtggaaaactttttgatcttcttagtgacagaaagtaggtatttctttcttgtgtgtgttgatgtaattgtccttcaggcgttaatttacctatggtatgaatgctttgtatttgtgatatggaccttaactagaatattgcgtttttaggttgagtttttttcaagatatgtaattactttccagtaatgctgttccttggtaaactaaaagcatgtttgcttgngatttaatattccaagttatgtttttcaaatttgaatgatagaagaaatcattagttggaatggaaatcattggttggaatatatgataacttccaacattcctatgggaatgtttcattcccacctctcatcatgggaatttaagactaggcagagtatgaagattattcattcctgggaatcaattatgcttgggaattttttgaagcttgtaactattcttttcctaactgcatgtcnncaggaataattttgcaaaacctgaaacaatcactcttaatgtttgcatcaagcagtttgtatcacagtattacacagtccactaaaaacataacttgtggacagcataatcacagatgctactgaattgagtttaaattattaaataataaaatttgtatcaaatctcaacagtcaagaatatttgctttagaattttcctaagcaacataaacttcattctatatcaagaatgattttgatttatttattttttggggctttcgtggattgtacatatcaatctgtccaaattaatattaattttatgtctagtttactcagtgccttcaacttgcatgttatattctcgcttgaatgcacaacttgttaatacagattgctaagtggctgtgttcgtgtgctgtgaacagaaaactctgcatgagagaagatggacggcagcaagtgtgtattgtaggactgcaagaatttgaagtttctgatgtacagattgtcaaagaattcattaaaaggggaatgcagcaagaagtacagggtcaaccggtgcgaatgaggagtcctccaggtcacatgctatcttacaactggttgtaaagaggcacaatgaggtaaaagagagcaggcggaaaacggacgcgtg

SEQ ID NO: 108722 - DNA, 1069 bp, Glycine max
  Clone ID: PAT_MRT3847_6918C.1
gaagcgaagaaaaagcgaagacaaaaaaatggccaaaagcaaaaactctcatgctttgcctcttctccttcccactctcttcttcactcttcttggaacctctcacgccggtggcatagccatctactggggccaaaaccggaacgagggcaccctctcagaagcatgtgcaacaggcaaatactcacacataaacatagcctttctcaacaaattcggcaatggcaaaaccccagaaatgaaccttgctggtcactgcaaccccacaaccaattcctgcacaaagttcagctctgaaatcaaggactgccaaagcaaaggtatcaaggtgttgctttcaataggtggtggcattggaagctacactttggcttcagtagaagacgcaagaaacgtttcaacgtttctgtggaacactttcttgggaggcaagtcatcttcaaggccactaggtgatgctgtgttggatggcattgattttgacattgaacttggctcaacacaaaactatgagcaccttgcacgttttcttaaggcgtatagtggggttgggaataagagggtgtacctaggtgctgctcctcagtgtccaattcctgataggtttttgggcactgcccttaacactggcctatttgactttgtttgggttcagttctataacaaccctccgtgtcagtatgctaatgggaacatcaataaacttgtaagttcttggaagcgttggactagtacagtgcctgctgggaagatattcttggggttgccggccgctagggctgcggctggcagcggtttcgttccggccgaagtgttgacgtctcggatcctgccggtgattaagcagtcaccaaaatatggtggggtgatgctgtggtcaagattctttgatgtccagaacgggtatagtacttcaattgttgccagcgtgtgaactgtgaagagttgcaattagccgatgatttttttttttggttatcttccagttgtagttttaaaatcaataattataaggaaaagaataatgttgtacttttgcaaaagaaaagtgtgtgaaaaaaaatataaa

SEQ ID NO: 108723 - DNA, 1536 bp, Glycine max
  Clone ID: PAT_MRT3847_69190C.1
cggaggcatacgcttaggaataacgcagccatcgcaaaataagcgcacggatcaatgacatggcaataaatttaaattcccgcctaaacccctgacctcccctggatttcatttcgtttgcaattgaatttcaatttccctaggggcttaatatctcccctcacttgtgcctagccttatgtcatagtattatcattcattctcatctttctctcttctctctccacccaaaccctaactcccgaccctgttcccctctcgtatccgtcatgaaaggaggaaagtccaagaccgaatctaagagagccgatcccaaacttgctgtgaataagaagggagccgccaccaaggctaggaaacccgccggcaaggggaaggcagcgaaagaccctaacaagccaaagaggcctccaagtgctttcttcgttttcatggaggagttcaggaaggtattcaacaaagaacatcctgaaaacaaagcagtgtctgctgtgggcaaagctgctggagcaaaatggaagaccatgtctgatgctgaaaaagcaccttatgtggcaaagtctgagaaaaggaaagtggagtacgagaagaacatgagagcctataacaagaaacaggcggaaggtcctactggtggggatgaagaagaatctgagaagtctgtatctgaggtgaatgatgaagatgatgatgaggaaggcagtggcgaggaagaggatgacgattagagaatggactgataattgcatttatgtaggctctgatgattttgatcatctgttgaaggtgggctggtcatttcctgataaacatattttcttgcttccaaaaaatatttccctgctcccttccgcaaattggttgtctttccaaaacgtgaatagtttaaagaagggagttctttatttgtacttctaaatccaactgtttagttaaggggtgtttatctcttgtagagcttttagtttgatttagagttttcttgttgaaatctggttaagtctgtatcaatataattggcttatcattcgctttctgctgtaaatatgatatttatgttttgttagagaggaagaggtgtgtggagggtggatgaaggagggtgcggtctgggaagaaggcgagcgaggagggggatgacgattagagaatggactgatgataatagcatttatgtaggttctgatgattttgatcatccgtgtaggtggtctggtcatttccttataaacatatttctctttccaaaaaatatttccctgctcctccttccgtaaattgctcgtctttccaaaacgtgaatagtttaaagaagggagttctctttatttgtatttctaaatccaactgtttagttaagggatggttatctcttgtagagcttttagtttgatttagagttttcttgttgaaatctggttaagtttgtatcaatataattgacttatcatcccctttctgctgtatatatgcgatttatgttttttagttcctgaaaaaaaaaaaaaaaaaaaaaaaaaaaaaaaaaaaaaaaaa

SEQ ID NO: 108724 - DNA, 488 bp, Glycine max
  Clone ID: PAT_MRT3847_69191C.1
cttatatgtctatgagatgacttagatgaacatgatattgccttagggttatggagcacagtccgcagaagaaaaacagaggctttttaagttaatgagaaacctcaattttaatggggaatctggttctgagccatatacgcccacttcccaaaatttaggtggagtggctgtatcagatgggttttattctccagacttcaggggagattttggggctgggcttttggatcttcatgccatggatgatacagagcttttgtctgagcatgttatttcagaaccatttgagccatcaccctttatgcctggaggcagtagaggttttgaagatgacttcaatccaattaacagaaagcaggaaagaggagaagcagattctgatgcgtcacttttcttacctacaaatgaaaaagacaatacaagagaaaataatgttgctaagattaaagttgtggtacgcaaaagacctttaaataagaaggagc

SEQ ID NO: 108725 - DNA, 1503 bp, Glycine max
  unsure (1)..(1503): unsure at all n locations
  Clone ID: PAT_MRT3847_69192C.1
cggtnccggnnaactccccgtctcacttgttccgccatcgtttcattccattttcttcactcacacaccaaagcaacacaaaagagaaaattacaagcaacgctctcccatcgttttcgtattttccaccactttcagatctgccaatcaccatttcacaccgcagatctcgattctccgcattcaataactcctttcactcgaatcccagggctcgccgatttggattccgtcctctcactccgctctttcatgttcttcttcggtttccagttctctccccatccgtgtgaaaacagatcttgaaaattggcgccccaaagacggtcgcagcgccacatgggtggccagatgcagcagagcaatgcctccgccactgctctgtatgaccacgccggccccggatccctgcacaatgcggcaggaccggccaccgatgccggcgacgccgtcatggcgcgatggttacaatccgccggcttgcagcacctggcctctccattggcttccactgccatcgatcaacgcctccttcccaaccttcttatgcagggttatggagcacagtctgcagaggaaaagcagaggctttctaagttaatgagaaacctcaattttaatggggaatctggttctgagccatatacgcccacttcccaaaatttaggtgttgtatcagatgggttttattctccagacttcaggggagattttggggctgggcttttggatcttcatgccatggatgatacagagcttttgtctgagcatgttatttcagaaccatttggtgcgaacagctcttgaaaattggcgcctagagtatttgaagacgatttcgatccaattaacagcaagctggagagcggggaagcagatactgatgcatcaatttccttacctatgaatagcacaagggaaaataatgttgctaagattaaagttgtggtacgcaaaagacctttaaacaagaaggagcttgctaagaaggaggatgatgttgtaactgtagctgacaatgcatatttgacagtccatgaaccgaaactaaaggttgatttgacagcttatgtggagaagcatgagttttgttttgatgctgtgcttgatgagcatgttaccaatgatgaagtataccgaagtacagtagaaccaattattcctacaatttttgagaaaaccaaagctacctgttttgcttatggtcagacaggaagtggcaaaacatacacaatgcaacctttaccactcagagctgcagaagaccttgttcgacagttgcatcgaccagtataccggaatcagagatttaaattgtggcttagctactttgagatatatggtggaaaactttatgatcttcttagtgacagaagactttgcatgaggtgacggcagcaagtttgtatactgcagaagttatgtacaaatgactgcattgattttcttagtgacaggtgctaaatgagagtccttccagtcacatgctatcttgcaactggc

SEQ ID NO: 108726 - DNA, 2750 bp, Glycine max
  Clone ID: PAT_MRT3847_69193C.1
ccggattcccgcgtcgacccacgcgtccgctctttttgtcgcgaattctcgttcttctgccataatcaagcgaaaaccatttcgttgcggtcactccttcgaagaactcggtttcagatctgaaccgcaatcgtttgaagagatccacagtggctgcgttctccgttcacttctcccacctttcatgttcttctccgcgtgcgaacagatcttgaaaattggcgcctcaacgacgttcgcagcgccacgcgagtggccagatgccgcagggcaatgccgccgccgcagcagcgctgctggaccacggcggcgatgccggcgacgccgtaatggcgcggtggttgcagtccgctggcctgcagcatctagcctctcccctcgcttccaccgccatcgatcatcgcctcctccctaaccttctcatgcagggttatggagcacagtctactgaggagaagcagaggcttttaaagttaatgagaaacctcaattttaatggggaatctggttcagagccatatacacccaccactcaatctttaggtgtggctgggtcggatgggttttattctccagacttcaggggggattttggggctgggcttttggatcttcatgccatggatgatacagagcttttgtctgagcatgttatttcagaaccatttgaaccatcaccctttatgcctggaggcactagaggttttgtagatgacttcaattcaattagcagaaagcaggagagaggagaagcagattctgatgcatcacttttcttacctacaaatgaaaaagagaataatacaagagaaaataatgttgctaagattaaagttgtggtacgcaaaagaccattaaataagaaggaacttgctaagaaggaggatgatattgtaactgtatatgacaatgcatatttgacagtccatgaacccaaactaaaggttgatttgacagcttatgtggagaagcatgagttttgttttgatgctgtgcttgacgagaatgttaccaatgatgaagtatatcgagttaccgtagaaccaattattcccacaatttttgagaaaaccaaagctacttgttttgcttatggtcagacaggaagtggcaaaacatacacaatgcaaccgttgccgctcagagctgcagaagaccttgttagacaattgcatcgaccagtatatcgaaatcagagatttaaattgtggcttagttactttgagatatatggtggaaaactttttgatcttcttagtgatagaaagaaactctgcatgagagaagatggacggcagcaagtgtgtattgtaggactgcaagaatttgaagtttctgatgtacaaattgtcaaagaattcattgaaaaggggaatgcagcaagaagtacagggtcaaccggtgcaaatgaggagtcctccagatcacatgctatcttacaactggttgtaaagaggcacagtgaagtaaaagcgagcaggcggaacaataatgatgtaaatgaggcataaagtgggctcgagaaggagtgcattcgtgctttagacaaaagacagatccatattccatttcggggaagcaaacttacagaagtgcttcgtgactcctttgtgggtaattcgaagactgttatgatctcttgtatatctccaggtgctgggtcatgtgaacacacacttaataccttgagatacgcagatcgggttaaaagtctatccaaaagtgggaatcctaggaaagaccaggtccctaatgctgtaccacaaactaataataaggacgtttcatccacatcatcctttccagccagttctggggcagaggattttaatgatcaacgtcaagagaaaacaatggatatgggcaggaaatttgtcgaaaaggaaaattctttgcacagctctgcagctgcttctgttgacaaacagccagtaagttattcttcgaattacctatcaaatgggcgagatgaaaaaggctttccttcagcttcagtggacagggagaggtatgaagtgaagaactcacatggtgactctaccagtcaaaagatgaactcttattcacaaagtgatacggatgagaaagtgcaaaaggtgtctcccccgcgcagaaaaggctatagcggtgaaaaatccgaaaggcctgctaactggatgaaaaaagatgccaacggttctgatctcttcactacaagctcaaagcagcagagcacagggaattatgggactgtgtctaaggatgaaaagtctgaaaggcctgcaaactggatgaaaagggatgccaatggttctgatcttgtcactacaagctccaagcagagcaccgggagttatagcactttgtctaaggatgaaaagtctgaaaggcctgcaaactggattaaaagggatgccaacggctctgataccttcactacaagctccaagcagcagagcaccgggaattataacaatatcaccactggatccaggcttaatgaaacagaatcctctcctgatgggaatgtcagtgcagtacttgaggaggaagaagcgctaattgctgctcataggaaaagaattgaagatacaatggagattgttcgtgaaaaaatgaaactcttggcagagggcaccaaccgggaagccttattgacaactatgtaaccaaattgaccttggggcttctcgcaaagcagctagtcctgggggtttttaaggctcggcttgcaagattccacatccactaaaaaaccagaaattctagtg

SEQ ID NO: 108727 - DNA, 455 bp, Glycine max
  Clone ID: PAT_MRT3847_69194C.1
tgttttttgtcgatttgttttttttttacagtcaataagctaaacccgctaaacaggtaatcatgactacagggagctaataaatagtcggcaaggcaaccgctatcgaatgacaagtcatattaccgtcaagccttacgatcactgcaaaatgaccctatcaatgcttaaatattggggacttctggtacccaaactgtacgtgcattagatctagttgtaccatgtggaactgattgatcgtaagtccttgagaaacatggcataaactctatgctgtcttgggcacaattgctcgttagctacattggctcggaaaccactggtatggttatacccaggatatggggcaccatcaggtggatcatcaatttcctggcttggcccaattctactgggtgcttcgttcgaccaatctggattggtggaaagggccccatgtattggttaggtgg

SEQ ID NO: 108728 - DNA, 461 bp, Glycine max
  Clone ID: PAT_MRT3847_69195C.1
atttgcatgtttaaaattatgcaaaatggttgagtttgatgaaactagatgaatttatgtctggatatttgcttatcgattgatagatgggtaacattctattgacttgccaattgggtcttgattcgtcattgtgttttactgctaaatttctacagcatatttgaattcttttgtaggtcgaaacctgattatggaactctgactgtatctagtttaattgttacatggatactgtagtagcatgcatttggcatggtccaggtttatgactactgtcttaaacttccagggcctgtctagttcttattacttactaactcttgtgtgtgcagtgtttgtgtgtgtaggcttccgcaaaattcctaaactacattggtactcactacttatatatatatatatattcatcaatctgattgaggaagatagtcaagatatatatttttgaaacgaacagc

SEQ ID NO: 108729 - DNA, 997 bp, Glycine max
  Clone ID: PAT_MRT3847_69196C.1
aggctcgagggtgttctatggggagaaagtattcttggacggtcagttagcttgctcttggaattaatcgccactttttttgatataacagatcaaactgaagacgctggtcacaataagtgaataaagctcagatcgagtttcatcagagtcacaataatgaagcaagaagtggttccaaggtcactagcaccaccaccaccaccaccacctcctccacttccaaaattcagggtcttctcaagaccaagagcagaagagagtgtcacaaaccgagaaatcgccaagttttggaggcaaaagaggatcgtggaggaggaccacctccttgctgctatcaaggctgtggctagactccgtgcacgcactctcacggagcaagagtacgagaggttcgagttgtctctgaagaccgataataatgactacgatgaaaccgagaaagaaacggtgaagtggatcgtagggacaaatgcttattgcaaaacagttgctaaggaccaagaagtgcgcatcggaatcaaggattggtggacaaaaagcaaatatgcgtatttgaatcaaccagccatagattccatggatcctcctaagaaacgaaccactacgtatgttcccaactttctttcttaccagcccaagcctttgtatccttctgctattggtgtcttttaagccacaggaggcattccatttctgcttgttaattactaataattacttgaactcctgctagttttcacctacgttttcatttcattcgtcatttttttttctttttgtgggggagggttgtccaatgtttcatttgtcattcaaatgcgtgtccatgtccttttatataagtattgctggacattctaaataacatgcgagtattttgtaatttgtatgtgtcattctattgttccgtttccaggttatttatcagtgaaaggattactgaagtactgaccattaaacttgttacatgtttgttacaaaaggtttagtttac

SEQ ID NO: 108730 - DNA, 558 bp, Glycine max
  Clone ID: PAT_MRT3847_69197C.1
ggctcgaggcagattctgattctggtacacctattgacacgagaacatgtgagcctgcaactcctatctatcctgcaggggatgtctctagacaagacaatgatcctctgttgttctccctttcaagtgttgagctcattacagaaccccagttaaatgcagatgttgcaggtaatactgtctctgggccagggcttctgaaattacctaaacgtgggagggagaacaatggttcttttagaggtaatcttcatgctgagttttcaacaagcaatgaaaatgaaatggtgtccaaatctgtaaaagatttatcacctgtagaatatggctctgctgactgcaatcttctgaataactccgaaattgttaaatttgatgcattggtggattttgaacctaatacctacttctctctgactgaactgctccacacagacgataatagtcaatttgaggaagctaatgcatctggggacttagggtatttgaaaaattcttgtagattaggtgtacctggagattgtgggactgttaatttagcatccaactgtggatcta

SEQ ID NO: 108731 - DNA, 392 bp, Glycine max
  Clone ID: PAT_MRT3847_69198C.1
tgtctcgtagttcttaacctcctcgttaccctcgtgactaccgacgaccattccgagaggggatagctcaataaggagaccgagcgataagaagaggccagtcatcatcggagtaaatcccgtaagagtacatattgcggaacctggcagccgtaagcctttcgagaatcctatcggccgttaagactccgttaaataaaagaaagcgttaccttccagcgatgacccggagtccgaacgtgaaggaaaggataaacataagcgtggcctcaacgcccctcggaaacggcgaaaggaggtaattccccacgtttaatcgtgaaccacctgtcccgtgacgcattcaatcgtccgaacacacattacaccccctcgtaccgtccctagccacc

SEQ ID NO: 108732 - DNA, 295 bp, Glycine max
  unsure (1)..(295): unsure at all n locations
  Clone ID: PAT_MRT3847_69199C.1
ttttgacctatgaggnccgnggtaatttgaaaaccccnnaaagaggaaaaaaagggggggggttttaaaaggggaaacacgcggttcccgacaaggaggatcaagaaaaacccaaaaagaccgatgctagattgagacaaagaagagatcctcaatacaatgaggctcaggctcagatggaaacaaacgggaggaaatcgcctctcgatgaagcagaaacgcctaaaggaggcaagcgggaacacaaaaggcctcaagctaaaaaagcacgacggaaaacacacgtggaggaacc

SEQ ID NO: 108733 - DNA, 254 bp, Glycine max
  Clone ID: PAT_MRT3847_6919C.1
attcttttttttttttttttttgtaccatacacgtgggtttttcttttgttgaacaacttttattacctcgcgaaaataagggaaagacaaccctagccccagaactgaattaagacaccacaattggtgcctgatatacagggtcgtaattagatggtgaaatggctagtaaaggagggcacagcgcgacagtgcccaaaatgagggggagcaaatcgtcagaaaagacaataagcggcgccgctgcgttctg

SEQ ID NO: 108734 - DNA, 498 bp, Glycine max
  Clone ID: PAT_MRT3847_691C.1
tgcgtttttgatttttttgtgctggttttattattgattttgtggtttgggggtatttgctttatttgagatagtattttaaaaacttaggttactatacgcggttggaggcggattctaatcggatgattactgtaggatgggacggaaacgggtgtttcccctgggaaaagaacgccgctccagggagggggcaaagagcgcatttggatgatgaaaaggaaaactcaatagcgggggacaagacctgaaggaaggagggcagcaacgggaaaggaaaaacgtcgcctttagtcatcagatgcgtacgatgtataggcgggggaaaaaaaaagggggcccccccccaaaaaaagggggggggcaaaaaggcccctaaagcaaaagggaaaccgcgcatgctcccctaaaaaaaagaaagggggaaggagggggctaaagggggcttgcccccatagggggggggggggggaaaaataaacccccccccgcgcgggg

SEQ ID NO: 108735 - DNA, 392 bp, Glycine max
  Clone ID: PAT_MRT3847_69200C.1
gaattcactcattacaaacagaagatagggagattgatatgacagggagatagaatgacaatgaccactctatgcttacatgaaaagagaatgataaggaactagatgaaaagcgtacaaggtgcgaagagtatgtcgagaagatgacataaagagagtgtgctgggaggaacaagatcttactaggaccacaatatgttggtaattggtaggatcatgcacgtatctatctactggaaagctgcaaaagggcatgctaaactatgcagggcctcatccagactttgtaacagatgggacatcatccctactaccaacaatgatgaggtgccactttagcaaggctgatgggaagattacgatctcaagagaagtcctgttagcgaaccgat

SEQ ID NO: 108736 - DNA, 345 bp, Glycine max
  Clone ID: PAT_MRT3847_69201C.1
acgcccacgcgtacgaccacacgtccggtctatcattaacaggcatatcttctacaagaccgtaaacgacaagaccatcacccttgacgtggaaagctctgacaccatcaacaacgccaaggccaagacccaggacaaggaaggaattcccccagaccaggaacaactcattcacgcgaggatagcaacttgaggacggccggacccttgctgactacaacattcagaaggagagtactgttcacctcgcactgcggctccgaggtggcatacaaacctgtaatcagacactaaccggctagagcataaccctataggtcgcaagctccaacaccatcgataacg

SEQ ID NO: 108737 - DNA, 156 bp, Glycine max
  Clone ID: PAT_MRT3847_69202C.1
caaacaagaaatttatgaaacaagggaatttttcttataaattaggaaccatggccaaaggggatgaaaataccccgaacactacaccttcaaaaaatggcgaatgaagaaaccaagacattgggctttaggggtgatattatgaaccccccttca

SEQ ID NO: 108738 - DNA, 585 bp, Glycine max
  Clone ID: PAT_MRT3847_69203C.1
agtatgttataattgatatgagtgctgttggaaacattgatacaagtggaataagtatgcttgaagaggtcaagaagattccagagagaagagagctccaccttgttttggtcaatcctgtaagcgaggtgatgaagaaactgaacaaatcgaagttccaaaatcatttaggggagaaatggatctatcttactgttgaagaggccgttggagcatgcaacttcaatctacgtccaagcaaaacgaatcccaagaaagatgaatcagagggttggaacaatgtttgactgtgatataccaaggaatattttaaatagcttataacaaagcttatttgttttgtcttagttattttaccactacaatgtgtggcatgagaatttctgaaacatgccacagaagttttagaggcataggaaaatgaaagatgcaagggtcttataatttctcgactctgcttccttagttagaagaaaatctcctacgtataggctgttgaataatctttatgtatcatgcttgataatatattggaatgtaaagtaattgccatgagaattgaaaaatcctttggaaacgtcttaa

SEQ ID NO: 108739 - DNA, 371 bp, Glycine max
  Clone ID: PAT_MRT3847_69204C.1
ccacgcgttcgtttatattttgtgtttttttttttgtttatttaaattatattattattgattgctattttatatgtgttttgttgtattaattactaccaagacagtggtacccatgcacgatgtagaggatgagcaaaagctagggcattcatgataaacgacaaggagaagacgcacccaacggcagctgccataacaaacaagagataaaaaccgaacgcccttaaggacagttaaaccaaacagaatggcgggggggaccaccccctgcagcggtacataaacctcaaagggcgcaacgaaaacacggagggggacggatacactttacaaaacgctagcgctcgctccaatcacggtgcagccac

SEQ ID NO: 108740 - DNA, 435 bp, Glycine max
  Clone ID: PAT_MRT3847_69205C.1
gtattgaagtatacggagaaaaaaaggtattccccataattgcaccaaagtttctgacgatacatgtaaagctatatcctatctatgcatttacaaaacatgacctttgactgtactatgagggacctaacaatcattaaagaagagcaaggcatcctatttacaccataggatgatctatctaactacttaacggtagaaaaatctcactctttacttgagaggagccgaaaatctccttagccctattatttcggctatgtttattattatgaaaaatcttactgattacacataagggttaatataacatgctgcggccccacattgatatcgagacagccctctcttttgggctgacaatcatacgatatctgatgaagagcctgaggatctacagagctgacccccttataaccggttccaaacagactg

SEQ ID NO: 108741 - DNA, 420 bp, Glycine max
  unsure (1)..(420): unsure at all n locations
  Clone ID: PAT_MRT3847_69206C.1
gtaagctcggaacctgtatatcggactcacaaaccatactangagaagatgccacntgaaacccaacatgtagctatagttgaactatgtgttacaaatacaaagcaaggacaggggaactcgacaacaactggttcaatggccataaatacatcaggaggagaggggctattgctgggggccatgcataccccgaagggagctctgaaaattaaaggtgcgactcagtatgctgacagagatgcaaacggagcccggggttcatgacttcattgatgaaaccgcagacagagagaccatgaaggcgggggtatcaacacgctgaggggacggaaaacttgacggtagaagggtgcttggggatgttgagcgtgggaggactgccccaaattggagaccccctccgcctagggggtgggc

SEQ ID NO: 108742 - DNA, 480 bp, Glycine max
  Clone ID: PAT_MRT3847_69207C.1
tttaccgtcgaacgacccttcgcacttcgacctccattattctcagttcagcctacaaagtttggatagggaggagaagctgatggatattggatcgagaaacttttttctgtgtccgaggaagtgtggtggtaatggggacgagggtagtggaacgacgccgtttggttcgtgttcaagagaggctgacaaaacgaacaagggtggcgcgtttggttggttaaggttcatggatttctctcggtaaaaattattattattattggaggctactagtgtttgcccatgccagccacatgttatttggagatatttttttattatttttaattttaattttagaatgcatcagtgagtgaatggcctgctgttgcttgtaaaaaaatacgtctgtgatgtttgacacgggtataatgtctagactcttgcgtaataaaagtcactgatgtttgacatttagatgtcgggatatcatttatc

SEQ ID NO: 108743 - DNA, 296 bp, Glycine max
  Clone ID: PAT_MRT3847_69208C.1
cgaagttgcaggtagagcagatttaaacgttatttatgggcggacatggtaatgtcaggtgctttttatccaggtgcacttaatgggctacttagacgtactgtgtctgacactgttctctgtctcaagtcattgcgatgcactcactgctcgagagactggagtactgcagccgcgacagcacagtatcagtacaagagtgtctgcttgcgatttgacggatcgtgcacaacactacgtgaggaagaagactagagtcgatgacatgcaccttgatcatacattcatagtcagag

SEQ ID NO: 108744 - DNA, 1320 bp, Glycine max
  Clone ID: PAT_MRT3847_69209C.1
cgaactgaaacttgaggaagaagagaaaaacaagacctcttcttttcttgtgtctgatcgaagaaaccaatcagccatgaaaccgtgttcgtgatttggaccacgctacacactctaacttcgatttgaatcatcactgtcttcacacttttccccttcacttttctctccaacaagtgcttcccacaatgatgtccccgaaccgcgtctcagaggatcggggcaccccacctcaacatttcagacacacaccctttcagataatccatattgttgcaaatttcatgaggatatggtcaatatactccatgtaccgctacttcttgcagactggtgcttctgttgttctttttctgtttgcctgcctggccccagcgtccatcctatttttgattttgcaaaagccttggaagggcaggcctctttctaacgcacaggttgttccttctataataaatggtggtataacagcactttatctggtcttgtggggaaagggactgaaatcatgtgggccagttagagcaatattggctgagtattctggtgctcaacttggagtactttctgcagtgttatatggtaggagagttcatttgaggaaaaagatcggtggaataatgctcatgtggacatccttatttcccacgcgtccggcagtctaggagggagtttctcattgggcacaggtggaggtgacaaatctgctagaagaattgtgaaagttaaacataaaccccgcaagaagtaggacctaacagcacaagaaacaagacctaaagaattatgaaaatggttaccttgtatcgtgctgcaggcgacacttgtggaacaaataaataagcccttaagagtgattgccggatattactgctcgcatgacagtctggacaagggggtgctatgctaatcagcatatgcaagcttgtcgtcagtcttcttttgccttccatattcaatagaatacaaggctgaagtttataccaattttgtattagtatgatatgaagaaacatgacgtgctgtactactagtaatggttttgggtcacagtccatgatttagccagttgtgatgatatggtattcacaaagatcgctgtatcctcgttacgtgtaatataaccagaattagaatcaatttatagcttagctggttgtaacttaaaagttctagcgagcaatctgtgaaatgattatttttgtttagaagtcgataaaattagaaaacagtgggtgtaatatttttagcaaaagacggagctcaaatttttttctgaatatattcaaatcatgaactggtgcggacgtttacctattc

SEQ ID NO: 108745 - DNA, 1859 bp, Glycine max
  Clone ID: PAT_MRT3847_6920C.1
ggcctcgagatgaatggaaaaagaagcttcctcgggatgaggataaaggggcttgccggaaaatataaaaaagaaagaaagaggtggtaacacgaaaggcgcgtggcagccgctggtttaaccgaaaagaaagcaactttgtcctacatcagaggcaacggaaaagaggatcctttctgcttcttctcttctcttccacacaaagacatcgtttcattgctctctctcttgtgcggacacaatttttgatggggatatacctcagcactcccaaaacagagaaggcctctgaagatggtgagaacgacaagcttcgcttcggtttgtcttccatgcagggctggcgtgcttccatggaagatgctcatgcagctcatccatatttggacgagtctacgtcatactttggtgtttatgatggccatggaggcaaagcagtttcaaaattctgtgccaagtatctacaccagcaggtgcttaagagtgaagcttacttagctggagatttaggcacatctttacagaaatcttttctcagaatggatgagatgatgcgtggacaaagagggtggagagaattagcagtcttgggggataaaatagaaaagttgtctggtatgctagaaggctttatatggtctcccaggagtagtgaagccaatgaccgtgtcaatgattgggcttttgaggaggggccccattctgattttactggaccaaactctggaagcacagcttgtgtggctgtcatccgaggaaacaaacttgttgttgctaatgctggagattctagatgtgtcttatcaaggaaaggccaggcacacaatttgtccaaggaccacaagcctgaacttgaggctgagaaagacaggattctgaaagctggtggtttcatccaagttggacgggtcaatggaagtttaaacttggctagagcaattggagatatggaattcaagcagaataagtatttgcctgttgaaaagcagattgtaactgctgatccggacataacttcagttgagctttgtgatgatgacgagtttcttgtaatagcttgtgatggaatatgggattgtatgtctagccaacagcttgtggacttcatacatcaacagttaaagactgagaataaactttctgcggtttgtgagaaagtatttgataggtgtttggcaccaacagctggtggtgagggatgtgataacatgaccatgatcttgattcagttcaaaaaaccttccagcagcccagatgcatcatctgtcacgaaccagcctcaatcgtctgctcaaccatctgaagctgatagaagttcagagacaatagaatcgaagtgagagaatttcggacctgacttgatgactaatagtcatcaatttcttactgcatgttgaagcattggtgagctgaggttcttgccttcttgggtactattttatatccaaatttcaggatgttaattctcaatagggggattgtaaattggtgacaaactaattcatggggctagtattggcttttgtacataagtgtgggtgttcagaatatgaaggaacaaaaaaaattcagcaagcatactgatgtacaccgaatgactaaaattaccttttggaagcttacctatgccaatataagtgctgaccggaagaatgtgtagaaactagaaagaacatgtctggatactggagttatatccatgatccatcagtagcagttccttaaggatttagtgcgatgcacggatttgcagaggcattttttgtttctgcaccccctttatcctttatgggttgatgcatccgtgatgctctattgttatttttctcgttttggaaattacaaatcctcgtttactt

SEQ ID NO: 108746 - DNA, 388 bp, Glycine max
  Clone ID: PAT_MRT3847_69210C.1
aatggccagtgcagttgcaattgcctctctagaagtaataaaaaatgagagactcgttgagagatctgggcatacgcaagaggagctgacgtggtcagttacttaagatttagcagcaatacccatactatctgaaggaggtacaccaactaggattgttcatcggagtggagttacacaccatataattgatcccagtttcacgctttattctatgcataatatagaattatacatgagtccttgccactccaacacatgaagcaattattcgctatactccatcattttgcataagagtctatgagatccatcatggtaccaaggtactgcctgttgatctgcaaatggatctatcatagtcgcaaatgacctacccaatccatgc

SEQ ID NO: 108747 - DNA, 712 bp, Glycine max
  Clone ID: PAT_MRT3847_69211C.1
caaaatgttcacaaatcaatgacgaaaaaatcattgcttttcgtatgaaaaattcattgctaccatttgaatctatcatatttggtaatgcaacaatattccgtaaatcttcttcttcgtctctactctttgagaatataaacctttttagcatcatcttactttgacccatcctccgcggctccacctatcaaacgttttctgctgattctcgaccttcgggtctgaatttaagaaatgcacaaagtatggatcaccttagaggcggttcttgattccggttatcacctgtagatcaaggttgtgttggaaatgaatgctgagtagtgaatactgctgaatactacctcagctaaaagaaatactgtatcagtactgcttgtgagaaaagtatgatacaattgccatggatgaaacacaagaccactattattcttccagcctacccgagtcttctttatctcatgatggtggtgggaggtcttatttcaatgggcaaataaatcgtgggactgctatatcaggcctgaagaaaagaggtcatggaagtcgctcttggattaaaattggccaggatgggaattttcagactgtgacacttgacaaggcaactataatgagatattgttctttgccttctagagatctccggctgttggatccgatgttcatttatccttcctccatattaggacgggagaaggctattgta

SEQ ID NO: 108748 - DNA, 910 bp, Glycine max
  Clone ID: PAT_MRT3847_69212C.1
tgcacgcgatcgggcgtcgagccgaaggacccatttcccaagacgtcacctttctgccacgaagcgaaagtctgtctaaaccactcgttggatgagttaaacggaataaccaactcatcagcggctgcagaattagaagcgagacccgctctctccctctctccaccaacatcactgtcatcgtcgtgtgaagtagtgaaggaatcggaatcggtgaaaagcacgctcctttcgccgtgtctcaaattcaatctaccgacactgcccctgcccacgtagtgctccccggaagaccaaggggaggaagaagaaaccgcagcgggaaccgaaacgtcatcgtcttgaatctgggaagtgggaggaagcgtgtgaggaggaggagtggtggtgggcccagataagcgggccttgtgggcttcccagtcagcggtggggatggagaagtcttctgggccggagaggcccagggtctggaagatgcggtcgaattcgccgtcgaagccgaaaaggcggaagctggtttggcgatccaagtgagaagaagaagaagaaggggaaggaggagaaggtggtgattggtaattgatgccttttttggcgttgaggcgctccaagcgcggttgcaactgcggcgaagggtggtggtggttcttcttattcttagtccagcgcctccagtccattggcgtgttgcgttgtacggacggggtagctgctagcaactcaaaacgaataatctgcttagcagctgcctctctttttttaaagcatttaattatttaattctctatttttttatggtctttgcgctttcttttcattttcatttaatcatattcatactactttttattaaaaaaaaaaaaaaaaaaaaaaaaaaaaagggcgccgctctagttctagatcgcga

SEQ ID NO: 108749 - DNA, 506 bp, Glycine max
  Clone ID: PAT_MRT3847_69213C.1
cgtgagcggtcccaacggttattcttttgattgcccaccaaggctgtacttttacttaaccaaacaaagggattacatgttcctgcaaatgctaccaagcacctttaaggggatagataccccaaccatttttattcaccaacaaaggggatttcactctaaagaagcttcctttacttccccaaaaagatgatgacccactttccaagcttacgcttcaaggaaaatgtgccaaaaccacacagatgggacaccaaaacctactacctattttgcacaaccattccttgggccagtcttgctaaagcggctgaaccaacttgaacacaggggtgccacagacccacaggctctggaactgaaagcccaaaaagaaacttcggccccttaaaatgaagcaaaactggcccaaaagaatttttttccaatgccttggagagcttcctgacacggattcttacctgagctggaaaccttggatcccctttggattaataataccccca

SEQ ID NO: 108750 - DNA, 334 bp, Glycine max
  unsure (1)..(334): unsure at all n locations
  Clone ID: PAT_MRT3847_69214C.1
nattgctgcacgcngagnnagntngnaattnngctngagcaanttctgntagacactctcttcttcnaagtncaancacgcttactntntacngtgnatgngcaaggtnaagntcggaatcantggatgtggaggaattggtcngtntggttgncngantcgnntctgcaaagagagcgatgtggagtgcgttgcgttnacgannctttgcnttnnnaccggttnantgacatggcatgtttnaatacgngagtgttcncgganactggaagcatnacgatgtcaccgttaangncgagaagacnttgttcttncggtggnaagccagtgnatn

SEQ ID NO: 108751 - DNA, 404 bp, Glycine max
  Clone ID: PAT_MRT3847_69215C.1
ccctcgcgtccgcttatttttgatcctttattctcctacaatacttcattatgttgttgcggataatttgttctgctgtttttctgctcccattcttcgtttccgactctttggctaaagttgtgagctgcgagggctttgtcaaaaccaaaattcccggcattgacctctccaaagttcaggctaaactcttcacgaaccacggcaatttgaagtatgagacggaatgcaatgcgcagaatggtcactttctgatcccaatttacaacaaagggcattatgtgatcaaagtgtcagggccaaccggatggatattttcagaaccgaacagccgagcggtggaaattgctgacgacggcacgggctgttccaacgacataatcgtcgaattggtcggctttgaa

SEQ ID NO: 108752 - DNA, 455 bp, Glycine max
  unsure (1)..(455): unsure at all n locations
  Clone ID: PAT_MRT3847_69216C.1
tccctggttttttnnngatgtcactggctctagtaggcgatgtgggacgaatgatgaatggttcttcttgcttgtttctgatgatgtctgatgtctgtggaggccttttgatgagccttgagttgaactttttttcattggtagcctttttgcattttggaacaaatttgttgttctgatgaaactctttctgttctggcaccactgcttgaagctttggttttgttaaaactcttggaagctgaggttggtgagtgttaactggagaaggaggtgggggtagtttcagcatgttttgatcttttggggtgagtggtgatggtgctgttgatgttgttgttgcgcttggtttgtgtttgtcaatgaatctaacccttggggagtaggaagattggtttgagtgtttatttgggctggtttcactttcatcaattgctttcagagatgatgttttg

SEQ ID NO: 108753 - DNA, 784 bp, Glycine max
  Clone ID: PAT_MRT3847_69217C.1
attcggctcgagcgcgtatttagtcctccacctccaaattgtagacgaatcattgttgcaacaaatattgctgaaacttccttgactgttgatggtgtagtgtatgttattgactctgggtatgtgaagcaaaggcagtataatccatctagtggcatgtattctcttgatgttgttcaaattagcaaagtgcaagctaaccagcgagcaggccgagctggacggacacgtcctgggaaatgctaccgtctatatccttcccgtatttacaatgatgagtttttggacgttacagttcctgaaattcagagatcttcccttgctggcagtgttctttacttgaagtcattggacctcccagatattgacattctaaaatttgactttctggatcctccatcatctgagtccttacaagatgccttgaagcagttatttctgattgatgctattgatgaaaatggtgcaattacaagtattggacagaaaatggctgagcttcccttagaaccatcattggcaaaaactttaatggaggcaaacaattatggttgcttatatgaggctttgactggtgctgccatgttatcagctgaaactacattgctaccagggcagaggaagactgagaagaagaggaaacatactatatctaaccttcctgatggttctggattgggtgatcacattcaattgctgcagatatacgagtgctgggatcaaactgattttgacattggctggtgcaaagataatggctgcagtgcgagggatgttgttgtca

SEQ ID NO: 108754 - DNA, 507 bp, Glycine max
  Clone ID: PAT_MRT3847_69218C.1
cagagtccgtcactgaaccgcaaaaaccacacagcctactgctaatagtgacgctgcgcggaaatcccgggccagtgtatggtggcgcgccaccaaacaccacttagctttggtggctgctgactaggccacccaaacggccgctggtgcggacgttgaaaacacggaggcgcctacggctgctgctattaaacaacgtagccagttttctgcgaaaaccgccgcccacgggtagacatttacaagcctggcagcctgtctgattaccgcatgagccggggcatttatgagcatgaccaaaccatttcctaggttgcaaagccgagacacaactgcaatgtaggtagccaacgccctaagcctgctacggcgacctagtggtaggccctaactagccacgccacggttagccgggcacctgccactacagttgaagctaaggctgttgggtgtagggcctgtgtgtggaacgatttacggctgttgaagccccgcccggcacactaa

SEQ ID NO: 108755 - DNA, 2025 bp, Glycine max
  Clone ID: PAT_MRT3847_69219C.1
atatcaaaagtattaaagattttttttattgaatgcagaaaacatctaatcaagagttagtgacatatcactagaaatactgaaatttatttaaaagaacctccgatagatgtaaccatcaaagaatacagtgccaacattttttttcttgtgagaatgttacatttatccacgggccgcaagacacggtaaataaatgttatcgatcattagtctaaaggggtaattccgatttcagaaagaatacaaggggatgataaaccccaaaacaataatgcctttattcttatgttccctcaaacctaatttatgcagttcaaaaaaagtgggaaagaccactgtgagggtgaaaaaccaccctttacctaaataccaaaatcttctgaaatagaaaccatgggggagggtaatgaatattcctcattacaatggtaccaaattttcaactcaacaccaccacacatctaccgcagtgtgtattttagaaattattaacagaaatggtgccttaaatttcaggatgatttggcgaccaattgctcgagcttctccagtgttacacttttcggcctttcgagtggcattccaagagccctgtcccatatcaactgagggccaactccaaagctccttgatacaccaaagagaacagtataatagttttcctcagttagaccataatagttcagtagcactccactgtgagcatcaacattaggccatggatttttaaccttgcctaacttggtaagaatgggaggcacaacctcttttatcttagacaccaactggaaatatggatcattaggcaaatgcttcaaagcaaactccctctgacatgtgtatcttggatctgtctggcgtaaaaccccatgtccatatccaggcacaacctggcctctactcaatgttttattaatgtagtcagccaattgttcagtacttatgttaggagttccaaattctgcaactattgatctgatccatcgtagaacctcctgattggccagaccatgcaggggcccagctaacccattcaaagcagccgcaaatgcaagataaggatctgatagcgggctagcaactaggtgtgctgtgtgtgaactaacattgccaccttcatgatcactgtggatggaaatatacagcctcataaactccagcatttccggatcatcaaaccctaacatgtgagcatagtttgcgccataatccaaagaatcgtccaatggtatgatttttccatccttgtatttccgtcgataaatataagcagcaatggctggcaaacgagcaattaaattcattgtatcctcataagttggctcccagtaccttgccttagttatcccaccctcatatgccttctgaaactcactctgcacctgaagggccatgacaccagttgtgaattgagtcattggatgagcagaaacaggcaatgcatcaattgccttataagcataatctgggatagttgcacgacttcgcaattcctgggataatgagtcaacttgtgctttgcttggtatctttcctgtcaatagaagccacagtacagcctcaggcaaaggctccccaccaggaaaagcacctggaagctttttctggcattcaggaattgacatgcccctaaagcgaattccctcatccgggtcaacagctgagcctagccatactaaagctgtcattcctctcattccaccaagtaccatatcaacagtgatttttcctaattcaacacttccatgatctttcttcagcttcttaacacgttcctgatactctggaaccagttccttcaactcagaataaagatcagtgttactggagctcggagtttggagccatctaactgaattcgccagattagattgttggcccacgcgagagcgaagtcgagaaagtgcagaaacgcttctgaagaatgccatttgcgccaacgcaacaaccggtaaaaggtcaaagaaagaaaaaggaagatggcggatccagaaaagttgggaactgaattggtctttaaaa

SEQ ID NO: 108756 - DNA, 373 bp, Glycine max
  Clone ID: PAT_MRT3847_6921C.1
gggatcggatacagcggacgccccgcacttaaacttgtacgatttttattattagtccataaatgaccgaaaaaaacgggcggagggtatttttgtaaagagacggggggcatgcctaaagaaacacgagggggacgttgttttagcgggttaaaaactgtctcaactaaaaaccccacatcatatgcgcacacacatgtcaaaataacaacctatgtgaaaacaggggggatgaaagcacagaagcccctaaaagctctgcccagatgaaacaccgggaaaaaaaaacgctcattcctcgagaggatcggcccacacaggggccgaagtgagccagggaatgaacacccgggcctgcttaacaaaaacacta

SEQ ID NO: 108757 - DNA, 135 bp, Glycine max
  Clone ID: PAT_MRT3847_69220C.1
atttatcactgagcttccttccttgttctctcgataaccactctctcatcaatcaaaggtactcattgtgggaatacaatgtcctccacttcctttagcaatggatggaaatatgatgttttcctcaacttcaga

SEQ ID NO: 108758 - DNA, 301 bp, Glycine max
  Clone ID: PAT_MRT3847_69221C.1
cttcttcgggaaggcgcaccatttaaaattgaaggaaaaaaagcaaattttttctctggccaaagataacataatccccttaacaaataattgtttttcccaagacattttaaacactatttttcccatttgtaattggcatcccatctattggtcaaacttaaaacatagaccaaccgttgattttcccaaggggtctgataaaaagctgcccttctatggacgctgggttcaaagaagtttaaacttttcaagcatgcttggagacctggaagaacaaatcatctccactttattgaaa

SEQ ID NO: 108759 - DNA, 460 bp, Glycine max
  Clone ID: PAT_MRT3847_69222C.1
ggctcgagagcatcctgctccattactatagcttattgatggcggactttaatcggggggaactgtggatcttctcaataccaccacctttgctcccaatcctgactactacagtgcacattatgaggggtttatgaatgagaaagaaggatcttgcaccctcaagcgatggatattcaccctttggactcactatatgcccattggacaaaaaatagagcgtgtgtgacgttacttttgataaacttagacagatagacagatttcatactgaccgtccgagaccctgagactgcaagtgttgtagaaaatgaacaggccacaaacacccataaagaaaggccatttcttgattcactcaagaagacattctattgagttggaacacactggacagaggtcacattcagggaggaggatcacctaactgcaagagatggtacctcagatcccaaccatg

SEQ ID NO: 108760 - DNA, 482 bp, Glycine max
  Clone ID: PAT_MRT3847_69223C.1
gtttgttatattcattcaaagtcgttgattttccacatctgatctcatggccaacctcaacatgctcctccaacaattcttgcatgtgttgttgctccttctgatccctgtttcatctcagcctaaccagctcttctatgatggattcttgggaagcaacatcatgtcccttagaggagtagcagaaatagagtcaaatgggatactgaaactcacagatgattcaagtagagtagtgggtcaagctttttatccaactggtttaaggttcaagaactctagtgatggttactacaccgggggtgatgataattcaaccaaacagaatctcacgctcacaagtggggaacccattatagcttgggttgattatgatgcttctcaaagagttgtcaatgttacaatttctgaatcttctaccaaaccaaagagacctctcttgtcccatcatgtggacctctcaccaatctctgaggatttaa

SEQ ID NO: 108761 - DNA, 466 bp, Glycine max
  Clone ID: PAT_MRT3847_69224C.1
agaagacgacagaaggggtactactcaatctagaagaacttaatatcatttttatagtataatatattttttttgattcttatgatcgatgattattatgttgttttaattctattaagaaattgtgacaggatatttgaaagatttattttaatttatctggacatttatattatgataactactagtataaaatatttatgattgctttggttttaataaaatcatctttggaattcatatataatgattgttttcataaattaaaaataatagaaataagcttttaaagtaattaaacatttattttaaccaatgacttcgttctttaatatttttaactatattaaccttaatttaattatttaagaaatgaatttttcataaatatttttaaaatatctatttaaataagtttgggtctctgggatgacctatttctaacacttctactgacaactgaaat

SEQ ID NO: 108762 - DNA, 497 bp, Glycine max
  Clone ID: PAT_MRT3847_69225C.1
tacggctgagaagacgacagaaggggaaatcaatcaaaactcttattagaagtaggtattttacaattttgtaagactaattgcagtgcatgatgattgggatgaccaagtctatcatgccaaagagaggtgatcctattacatggatttacaatgggcttgtcaggcttattacatggattaacagagggtttttcagaactagaaatacaaggaaaactagaagaagcagaaactggatgttggagaagctgtagagaccatcaggaccaacattacctttaagttagacttcattggtaacctgcgattttacagcacaataattagagtgaaattcaaagaaaacacctttgtcccttgcaaattgattaacattaataagatttttagtaatgttaggaacatgtaagagatgtttaagagacaaagagattttggtattgaaaggagaaattaaggaggaagagctagaggcagtgattgggaaaccttga

SEQ ID NO: 108763 - DNA, 563 bp, Glycine max
  Clone ID: PAT_MRT3847_69226C.1
gaaaatgtgtacaaacattaaatagacaaattaaactagccgatggtaagatcatgccagctagcaagttgaaaaaaaacggttaacttatgtcataacaaagtacaatacaggttgttgtaattaataaccctaataaacaagtaagagccaaagttgaactactcttgattaaagacctaaataagatattaaaaaaaatagaaaaatccaccagaaggaattaggagtatggctcaaagaggctatggaatggaaagtcctcttcacatccccatcagttgtattagattttagcaatttgatctcttgctggcatggttttaccccatatggaacatgacttgttgatattactccaagagggtagcaaaggctagggttgttccaggccccaaaacgtgttctcatttttccataaaactccacagagaatttaagctctcctgtcaaattgttgccactaacatatagtgcattgagacaaggaagagtagatagatttggtgaaaggttgcctgtgaggttgttgtcactaaggcctaaaaacccggacgcgtggg

SEQ ID NO: 108764 - DNA, 222 bp, Glycine max
  unsure (1)..(222): unsure at all n locations
  Clone ID: PAT_MRT3847_69227C.1
acgagcatgaacagttccctacagtgtttagcacatacaccaaagcttgttgattattttctggaagattatattagagaaatcaatcatgataacccattgggcatgaatggtgagatagctttggcattgngagatctgctagggaagttatgggcccctgaggcaagtccttgtgtcaccaagaatatttcaaatcaaaacttgcttagattgcanccc

SEQ ID NO: 108765 - DNA, 406 bp, Glycine max
  Clone ID: PAT_MRT3847_69228C.1
aaccaggatcaggaagtgactgctactactgaagatttgatctggtttcaatgtcgacatgtgataaaaggccttgcaatgaacccgatgccagaagaatgaaatcctctgtttcatatattaagatataagaaaaacaagttgtaaatatgactcatggttgaagctaatgtttccttgttgtagtttcattagatgtgagcttgttaagcttggatgtcattattataaaacagtttggatcaagactatgttataatacaaatgtttgcctggtaagaaatattacgcatctgacgattgttgttatattaaaaaaagaaaacacagtcaggaaaaacagtaattgcaacttttcacatattttgaaccccaggaatatggaagttgtgatcaaattctatat

SEQ ID NO: 108766 - DNA, 340 bp, Glycine max
  unsure (1)..(340): unsure at all n locations
  Clone ID: PAT_MRT3847_69229C.1
caacaacgttagtctgatagagcagggccatagataaattggnggcccataaaataagcttgcttccaaagaaatagcaaacacaattagttccaagatcaactcccataagtgcataaagcatataatgattcattccagaagtatctaagtgacaaacagcaagtacctaaattttagttccatcaccagccaccaatgaaaccatgaaancgtgtgggtcacgaacgttatgncgagaaaatactagcaggctgaaaggtagcccattacacatcactagttggtgtgcaaaattgtagactgctgccacaagatgtagctctgacttataagcaaa

SEQ ID NO: 108767 - DNA, 1160 bp, Glycine max
  Clone ID: PAT_MRT3847_6922C.1
aattcggcaccagacaaaggtggcttccagaaagctctgttgtaattcttcgcgcttggctttttgagcattttcttcatccctatccaaaggattctgataagatcatgctagcaaaacagacaggtttgaccagaagtcaggtgtcaaattggtttataaatgctcgagtgcgtctatggaaacctatgattgaagagatgtacaagcaagataattgtattgctggcatggactcaaattcttcatctgaaaatgtgtccaaggtaacaaaaagttatgtcaagacctccaatgatgtgggtgatgattcgcagcactgtcaaagtccaattgtggccgatacaaatcacagtggtggacaagctaaggacctcagacatgatcaggctcttgatacagaaatgatggcatccattggattagctagtcccataacctccatttatggggctgaaactgaacataggtaagtaatgcaaaggcgaaatttggatgattgtggtctcttctctaatgacacagttgttcagtctgatggagctactaataagaggtttgtgtcagttggtccaacatgccaaatgccagagtctgagaggttcaagtcaggaagtggagtgtctctaacattgggtttgcagcattgtgaaggaggtaattttttgcctggtaagacccatctcagtttggtttccatgagggaggacgacatctccaaagcgaccgcagcttcaacagttggagtagagacaacagaacttgagtgcattggtgctggaaaccaacaacaaaggttaaattcacctcatatgctacatgattttgaagtatgatgataatctcttgcaatcattccgtgggaaggaaaagagtggtgagtgctgatgttgggaccattttacagacagtgaatcatagaaggaactcagtggtccctcaaaggatgataggactgacaaaacagttgtatgatatcatgaaatttattgggaagatctatcttatggttaatgtgtagaaggaaacatgtatatttaggtctattttgctgtgaagaaatcaagaaacgtgagaatggtaaataataaatggattggctgattattgtattaatgcttggaattgaatatattaaacatgaaacttgcacactggac

SEQ ID NO: 108768 - DNA, 369 bp, Glycine max
  Clone ID: PAT_MRT3847_69230C.1
ctggctctcgcgggctgtctatctgcatgatcgcgatgcgcgtgaatgcagatgatcgacgagagattgagtctcattgacactagcgacggacaacagggcagactgaacgtggagactgcatgtagagcacactagtctgacccacatttgtgggaatacgactcttgcaatagagagtatagcctgcgctattaatcggtttcgatatgtgcagttctgagtgagaaactcagacttcatggcatacgactctgcttattgactgttccagacacgcctacatactttgacattttctagagaattactgaggatacagacaccgctgtgaatagtctcatgccaggtcgctatgatgcactagct

SEQ ID NO: 108769 - DNA, 238 bp, Glycine max
  Clone ID: PAT_MRT3847_69231C.1
attggatcctttagagcggccgacagtttatccttttaaaatatttttatataattgattctatttttttttttttttttttttctaaaccacattatgtaccaaaacttaaacctcaacctgcttaaaatgaaagaatctatgtcatatgttaaaatgaaagaatctatgtcatatgtttgatggttatacccttcggtcgtctttctcagcagtccgtacgttacgcgtgggtcga

SEQ ID NO: 108770 - DNA, 398 bp, Glycine max
  Clone ID: PAT_MRT3847_69232C.1
ggaaaaaggcccggttaaaaatggaatgggggggaaaaacccccccaattcgaagcttttccaatcaaaacccaaatcttgccccaccaaaaaaaaaagcccctttttttttccttctttttcccccccttaaaggaaggcttaaccccaaaactaaaaccccggcctttttttaaaaaacccaggggcgacaaaccccaaaggaaaaaaaaaaacccggtccccccatttttttacccaactttttacccccagttaacccagcagcggggggcccaaactcacccaatttgggggacttgaaagcaaaaaacatttcaaaatagggggggttctcacggggggaaaggttaaacccatgcttccaaaacccaaaaaccccggtgagagggaaaacc

SEQ ID NO: 108771 - DNA, 386 bp, Glycine max
  Clone ID: PAT_MRT3847_69233C.1
cggttccggattccccggttggcccaaggcgtccgaaatggaagcctaattacaagctgaagttactttaatgcaaccaaccaaggggggcttggccattcgcaacctaaattttacacattgcttttttaaggctttgggttggaaacccgttgcagttaaactaatttgttcctttaagcccaacctaaaagatttggttaaaaaatgtgtcgacgccaccaaatttgcaggtttggcccttgccacctaagttttggttgtttttgaagcaggtgcaaaaggtgttccaaagaggttaaccttcgacaaattccaaagcaggacttactggaaagtgaagggacctggacctgttattaagggccaaaccttggagggtgggg

SEQ ID NO: 108772 - DNA, 328 bp, Glycine max
  Clone ID: PAT_MRT3847_69234C.1
taccggtccgacccacccgtgcgtacggctgcgagatgacgacagaaggtggaagccatctagtgatctagcgagctaggtaggtttttctgggggaccccgtctttgaggtcataatcactaccttgttgtccatccccatatccatgcaagttgagcgatgttactctgacgatctttgaccagactcatctccttactttccttattaccatttgcaccctcctttgaaatgagctttcttaccatttttccttcctctagcaagaccttaacctcatattcctagccattaaacgcatgtatttcaccctttacaacactactt

SEQ ID NO: 108773 - DNA, 289 bp, Glycine max
  Clone ID: PAT_MRT3847_69235C.1
ggacccaaccaactatttcagtttaatcggatgagccacctgacataatggacaccaccaagaccatacaaattggttactttttctcgcaaataattcccatcacctccatacttaataaaaaaaagctacccttacccttaccttaatccgttgttgttgacaacacgactttcccctggggatgaatataaacctgtaacccttaccaccaaatgggatcacggtccttacctgtttcttaacctcttaaacattgtccatagccgtaaacgcctggctcctaccg

SEQ ID NO: 108774 - DNA, 746 bp, Glycine max
  Clone ID: PAT_MRT3847_69236C.1
gactaaggtatgttctcggactctgagtgcttgccctaagaggagaaggtgctgccaccgccgagacgagagttccgtcgccggcagcgccgcaactcacgcttcaaccctcaaactcacaccgcaggataattcttgtttgttgcaaacaagggaacctatgctactgtacttgtcctaattaggtgcctcatggatccttttgatgatattctaccaacggctcctgctgcacgtactcggctgggtgccaagtttattccaaaggcaaatcgaaacagtttcctcgaaagggaataccagcatcagaacattccacctcatctaaagatggaattttgggaaatgaatgtcaaaatgcagttgcttcagctttaagtatgccagcggaagaaccttaggggtccgttcatcatacacaggtagaaattccaaattcagaggattccacaaatcgtaaacaagttagtgtgaaaggagatagtgcagccttggtagatgattccacaatcaccgcaactgaagttgatgctgatcagaaatctatgaactttttaaaaccaatatgtgaggttactgaggggagatccagtatattttgagggggcctcagtcactagcttcgttcctgagactaacctcaataatggcacaacacaaccagttcaccctgctaatgctgtaaaaaatgaatttaatgtggctggtccatctgcaacatgctcagccatagatagggatgaaag

SEQ ID NO: 108775 - DNA, 343 bp, Glycine max
  Clone ID: PAT_MRT3847_69237C.1
aaaaaaccggaccgggtaaattttttaattccaggattagctaaaatttccagatgaaactaactggtttttaaagatcatttcaggaaacaaaggcaattttaagctttggaaactcaattccccatttttcctactacattttaacggggaaaacaacagaaccttgaattcatcaagggcccattaatgctaaattttttatgcttgggggggcgtttgtttaactatgttaaaggcgggttttaaaagaaggggcaaaaaatggaccccccacggtttaattccaggttcaacttccaattttgggagaggcctgaaagctttttagtttagtttggca

SEQ ID NO: 108776 - DNA, 324 bp, Glycine max
  unsure (1)..(324): unsure at all n locations
  Clone ID: PAT_MRT3847_69238C.1
aaccagnnnaagcangaaaggccccnncagngacggcagcngnggcccncaaaccngccccgggcacngnngagaagnccncagnnagaggccnncccncccncncaaggaaccccncnncanncagaggggnggccagnggnggcaagaagancaagacngacaagcccnanggaannaanggnggcanggcnnngagggaaggagnngangcanccggcaggaaaggaaagggaaagggcgnnnaccagnnnngagacaaanacggngcnaangncganggnnacaggccnancnacgacaccaaggacnggncnncaaccg

SEQ ID NO: 108777 - DNA, 334 bp, Glycine max
  Clone ID: PAT_MRT3847_69239C.1
ggtgctttaatttcagttcactaccaactcaatccttctgcagatgactcaaatgcgtctggttcagagtctcactagtaagttcaaattcatgccacacattatcagatatgatcctatcctttggctcatttgttccctcatctttacctcataaaaccacattactgattcagaaaagataagaaagaatgtcattgcctgtatttaacaaagaaaacatggcatactggtcccttgcttctactacaaactctgtgtcttgactttcacaatatacatttctttacatgttggtaatttaaatactctatgatatggatgcaactacaac

SEQ ID NO: 108778 - DNA, 430 bp, Glycine max
  Clone ID: PAT_MRT3847_6923C.1
gaatctcaatccacgtgtgtcgagcagccagagcaagaagcgaaaggctcatgtgacggcgacatcgagcgggaggcggatgattatgagcgcgcctctgtcgggggagctgcggtataaggagaacgcgaggccgatcccaatacagaaggaggaggaggtgcaggtgatgagaggaacatacaagggtcgcgaggggaatgagactcaggtctaccagcgagagagggagattcagagtgagcgcataaaccgggagaatgtgaatggttccaccgtcgacattgagattcaccactccgagggggcgatgaccaagctcaaataggacaaggaccggaaggtcattctcgatcgcaaggtcaaagaccgcgccgacgccgataaggagaaagataccaagctcgctcacgaagatatcatgcaaaac

SEQ ID NO: 108779 - DNA, 270 bp, Glycine max
  Clone ID: PAT_MRT3847_69240C.1
tggttctgtaattcactggactaggaatgtgctaaaaaagctgattgagacttctatgacaacacggatcgacaaaaatgtgactaatagacatcagactttgacctcacactacagaggtggacagatgcggggactgattgaactactgagattgatagtgcaatccatacatgcctgactgtgatttgatacggaagagtgcggggtttatacataatgtggtgacaagctggaacagttatatgtatagagcagaacatatttgat

SEQ ID NO: 108780 - DNA, 842 bp, Glycine max
  Clone ID: PAT_MRT3847_69241C.1
tttttcaatgacgaaacagttgttttattcaacctggactttaacatagtcaagaacagggaccaaacaattgcagttaattaattcttcaaaaaaatggcaccttatgtacagtgtaatgcgcgaaagtgcgaaatatcgaaattccagaatggttaaaccaaaacaagcacgagagaacaatagattcaaatattaaatctaattaatttgcggtaagagcatcttttttgaggtaagacaaaagcaagagaaaccaataaaaatgtatcgtaacatttggaaacaaaaacatagctgaaataaaacaaaactagtagcaatagttgctggggaaacaagcacactacttcgatctctgcctcatctttcggcgcttcctcttcaacctcctcatacgcttcttcttccacttagctctcatggggatcaaaaactgaaacgaacctccgttatcaaaacgcagccaagtctctgttctgtattctagggtttggattctgagtttcgtttcagtttttgatcaccatgagagctaagtggaagaagaagcgtatgaggaggttgaagaggaagcgccgaaagatgaggcagagatcgaagtagtgtgcttgtttccccagcaactattgctactagttttgttttatttcagctatgtttttgtttccaaatgttacgatacatttttattggtttctcttgcttttgtcttacctcaaaaaagatgctcttaccgcaaattaattagatttaatatttgaatctaaaaaaaaaaaaaaaaaaaaaaaaaaaaaaaaaaaaaaaaaaaaaaaaaaaaaaaaaaaaaaaaaaaaacctta

SEQ ID NO: 108781 - DNA, 1170 bp, Glycine max
  Clone ID: PAT_MRT3847_69242C.1
atacatttttgtttgctacttactgttgttggggtggatgagaatgcttagctactcttggaagccttgggagagtgacctggggaggtgaactgaagagtacacttaagcaaacacaagggaccaatattctctctgaagtggaataagaaaggagattatcttctgactggaagttgtgatcaaactgcaattgtgtgggatgtgaaggcagaagaatggaaacaacaatttgaatttcattcaggtccaacacttgatgttgattggcgcaacaatgtgtcttttgccacaagttccacagacaatatgatatatgtttgcaagattggggaaaacctccccataagaacttttgttgggcaccagagtgaagttaattgtatcaaatgggatcccactggttcattattagcctcatgttctgatgatatgactgcaaagatatggagtatgaaacaagataaatatcttcatgagtttagggagcattccaaggagatatatactatcagatggagcccaactggtcccggtacaaataaccctaataaaaatttggtgttggctagtgcatcatttgattcaacggtaaagctatgggatgtggaacttgggaaacttttatacagcttgaatggacacagagatcgtgtatattctgttgcattcagtcccaatggtgagtacatagccagtgggtctcctgacagatcgatgctcatatggtccttgaaggaaggcaagatcgttaaaacctacactggtgatggaggcatttttgaggtctgttggaataaggagggtgacaagatcgctgcctgttttgccaataatacagtttgtgttttggatttcagaatgtaacctgagaagcaccaagttattttgactatttaattgtttttccctccttacttttgctatgaatcattagtaagaggtagctggtaggagtatattcttgatttaaaaatgtatagatttaattggcctacatcgttaaaacaatcctactggcagcatcctctgccagctgctagattgcccctgggtattctctctattcttgactacgagggtggccaaataactttatatggtttatttgagtttatcttatacaagtatttaaattaacattttgaaaaaaaaaattaaaaccccccc

SEQ ID NO: 108782 - DNA, 268 bp, Glycine max
  Clone ID: PAT_MRT3847_69243C.1
gtagccaatgaggttgaactccatacgtagggcgaaagtaaacctgatcataacagaaacagcctccattgccggagaaaaaccccagagacggtagctcaacccaaaagaacatagtgcgcacaaaaaggaagatccaggaacaaaggacttgcgaccccgacggaggaagtgcaaaccactggagagacgcaacccaaaatgcagatggaagccccctcggagaaaatcgcactgtccaaagaggagcccatgggaggaacctaaa

SEQ ID NO: 108783 - DNA, 148 bp, Glycine max
  Clone ID: PAT_MRT3847_69244C.1
tttcagggcgcagggtgttgagtgtactcggcgtccagatcggcgaacctgtttactatgacgccgtgacctcttcttcgtatcaaacctcttcggtccttgcatccattccatctcttccaaaatggccaaagacccagatacgcgg

SEQ ID NO: 108784 - DNA, 721 bp, Glycine max
  Clone ID: PAT_MRT3847_69245C.1
ccacgcgtccggacgtaaaatggctgtatcggtgctatagtcaaaacgttcaagtgcgtggacaatataaagttgaagtgaggcgctattggattcatgaaattggaatctgacactgctcatcatcctccgcagcaggatataaggattcactggttgttcgatctttccctaagattaataacagcctctactctcaccaccactggtgcaaattcttccaggactaaatcttacgccaacatttaccagtgcaagttcttatgcgccaaatgctgcatggcacaataggaaaatccatcaatgaatataatgtcttgaggcttcggaggccaagattgaaccatcattacaaaggcagtcgagggagcgcgtacatgtaaaaaatggagcataaaatttgtcgagaaagcgacctctgaaaaacctcttgagtctgaacctcaagctttcgatccaaaaagcattccggactctgtcaagaattcctaggatgctttctacaggatctccaggcctcacacaggtattggctcagcattaagcataatttctgtgtctcttcttgctgctgagaaaatatcagatatatcaccattattctttactggtgctgaggacgctgtggttgctgccctgtatatgaatacttatattgatggtaagaatcaattgcccgatgttgaaagagacaagataagcaagccgcatcttccattat

SEQ ID NO: 108785 - DNA, 626 bp, Glycine max
  Clone ID: PAT_MRT3847_69246C.1
attcttttggtagagctcactgctttttcattctagaccgattgtacattttcagtggtattggcagacccgatccaactcttgacacaacttacttgcaacaattgcgccaaatatgcccccaaggtggacctaacaaccttttgaattttgacccaaccactcctgatacattggacaagaactactactccaatcttaaggttaagaagggtttgctccagagtgatcaagagttgttctcaacacctggtgctgataccatcagcattgtcaacaagttcagtagtgaccaaatagctttctttaagagcttttccgcttcgatgattaaaatgggaaacattggtgtgctaactgggaagaaaggagaaatcagaaaacaatgtaactttgttaacaagaaatctgctgaacttgatataggtattgtggcatccgaatcagaggagggtgtggttagctcaatataaatgaattaggaagagttttatatacactgggaaattatgtgaatgaaggtcactaataaagaagctataggcacattattcgtatcaagtgcccccagctagctatagtttattgtattctgaatcatgttgtatttgtattaaaattctctt

SEQ ID NO: 108786 - DNA, 1741 bp, Glycine max
  Clone ID: PAT_MRT3847_69247C.1
agctcgagccgaatcggctcgagaacgtgcctaacaagaagttgtcttgttcttcagtgtcattcttcgtccatcacaatattcacaagcatggctgctatttgtctctataaataaaaggcaagttatatggtgagtcttgcagcagcaacacacacaaacagaggtgttgagtgagttcaaatcaattttaggcagaaaaatgaggtgttttggtcttgtagtgataggtctagtggttgtgcttggagggttacccttctcttcaaatgcaggattagatcccttcttttacaagaagagttgtccccaggtgcatttcattgtatttagagtcgtagagaaagtttcaagaaccgatacacgtatgcctgcggcaaaaacgtaagagaaaaatggggtgtttccatctcacagtgactagtctgtgctttgtagtggttgtggttggagtgcttccactctccttagatgcacaactagatccctcgttttacagagacacgtgtcccaaggttcactccattgttcgcgaagtggtgaggaacgtttccaagaaagatccccgcatgcttgccagtctcattagacttcactttcatgactgttttgttcaaggatgtgacgcatcagttttgttgaacaacactgccaccatagagagtgagcaacaagctctgccaaacaacaactctctaagaggtttggatgttgtgaacgacatcaagacagcagttgaacaggcttgccccggcgtggtttcttgtgctgatattcttacccttgcatctgaaatatcttctattctgggtggtggtcctgattggaaagttccattgggaagaagagatagttaacagcaaatcgaacccttgccaatcaaaaccttcctgctcctttcttcaacctcactcaacctaaagctgcctttgctgttcaaggccttgacactactgatcttgttgcactctcaggagctcattcatttggcagagttcgctgcttattcattcttgaccgattgtacaatttcagtggtactggcagacccgatccaactcttgacacaacttacttaaaacaattgcgccaaatatgcccccaaggtgggccccctaacaaccttgtcaattttgacccaaccactcctgatacattggacaagaactactactccaatcttcaggttaagaagggtttgcttcagagtgatcaagagttgttctcaacacctggtgctgataccatcagcattgtcaacaaattcagtagtgaccaaatagctttctttaagagcttttcggcttccatgattaaaatgggaaatattggtgtgctaactgggaagaaaggagaaatcagaaaacaatgtaactttgttaacaagaaatctgcggaacttgatataggtagtgtggcatccgaatcagaagagggtctggttagctcaatatgaatgaattaggaagagttttatatacactaggaaatcatgtgattgaaggttaccaataaagaagctatatataggcacattatccgtataagtgcccccagctagctatgttttattgtataagtgcccccagctagctatgttttattgtggacgtgtgagatctttattgttttttgaatcatgttgtattcgtaatcaacttctctctttacatctctgtttgttcttttctaccattttcaaattcagatcttttaatatatggatatatacgttggtgat

SEQ ID NO: 108787 - DNA, 781 bp, Glycine max
  Clone ID: PAT_MRT3847_69248C.1
aaggcttaagcatgttaattcgtaggacctactttatcatatccacttggtcgctgaggctttaggactgttcttttgttgttttattttatatatttcgtgccgttattgtgcttttgattatgagctcaacctctgggctttctagtttgggccggtgcctccggcccaaacttgattggattgaggttgaggttataatataaattataattgtatcataattgaacttagttcatattcatacatttgcattttgattacaagttgaaataggaaataaaactttcattctggattctattctctgctattgtttggatacgtggtctctctatgatattgttggcctaattttaatctttaagggttgcagctaccgtgtttactaaaaggattgtttcagagttggagatggtgatggcggcagcattgtagttgtgacatcccggagctgagtgttgtgatactagattatgttattatatatgattatctttaagcatttttacctattcagagacaaagtaaagacaaatgtatagtagaaaagaccaactataaaaacacgattagtatcaactaaaatgtgccaatagcatattgtggaaaattgccgcaccctgaagccgtacagggcagcctgccggccgtaggcagcaccaaaccaatggtgctttccaaaatggaaatctgatggggaataaacctaataagctaaagccaatttaaaccaaaactaaaaccaatcactagcagtactccttctagcttaaggact

SEQ ID NO: 108788 - DNA, 163 bp, Glycine max
  Clone ID: PAT_MRT3847_69249C.1
ccacgcgtccgcccacgcgtccgcggacgcgtgggttcactttcattttaaaatgggttatctatacttcttgagggtcctgtttgctttatgcctctcatctcctaacaatgtttggttggctcaaaattaacaatccaaggtggcgatcttaggaaccggc

SEQ ID NO: 108789 - DNA, 368 bp, Glycine max
  Clone ID: PAT_MRT3847_6924C.1
ataaccaagtcctgcccaactcaaatttcaactgcggttaacttcattggctgttttttacctatacccagattacatttttttttgaaaaccttgatcaacaaaaatatattttctagaaaatcggtcccaattaataaatacatcctaaaaagtttgactaattcccctggctacgggaaccaaggacacaaaaatataactgaatttttggctcctgatggtgaaggggtgatcaatacatgacttgggagccaccaaatacagcattcaatttatcattagagagctcaaggtttttttttttggcctccgcacctctaggctttgtttgagggaaacggcgaatcacttttttcactgggcct

SEQ ID NO: 108790 - DNA, 480 bp, Glycine max
  Clone ID: PAT_MRT3847_69250C.1
gaatagatatctgaaaggaaaaattaaatataaatttaaaaaacttgcaggtgttgttttacgagtttacaaaaggaattatagaggacataatgcagcatatgcatgatcgctaccaccagttgtaatttctaccatgcccatcactactagagttgccaaaccttgatgctgaatatctatgatgatttgacctggctgacccttgagacattgaggttcccgtatgaccattccataccttggaagatttgtaacttggagtatgacttccaccgccaaatgaatgaattctatcgtttctagaagatggtgtccctggagacctgtaacccttgctccttgaggacaagggaggaaagaattcttcaggatgctcggatgtccatccacctctactcttggatttcttgggagttgcatagtcttgttgttctgaaggatgctccgttgtgcagccacctctactcttggatttct

SEQ ID NO: 108791 - DNA, 542 bp, Glycine max
  Clone ID: PAT_MRT3847_69251C.1
tcgggttaaggcaagtgaggcaggttttgggaatgaaatgtacaaggtcttaactgctgcagcacttagtataatgctaaaccggtccttgatcattggtcaaaccaggcatattggttttttctcaagcctttctaatttttcttttcacttttaagaacttttacattctctcaactgaaatttagagaatccatgttcattggcttggctcttatatgaatgactttggtagctttaaagcataacttgtgccagatcttttttgcactcttctgctatgattcccacattgtgtaggacttaagtcgtgagactctttcatttagtagactagtcttttgggttagactctccttgtaagcttaaatcatagtatcatacatatacatattacatttacctacctattttcaagaacttgtggagacaacttagattgttcatggcttctgatatttgaagactaatgacattgtgccattgatatatttgtgaaactgctcttacaaaatatagcatatttgaatcaactatagatc

SEQ ID NO: 108792 - DNA, 310 bp, Glycine max
  unsure (1)..(310): unsure at all n locations
  Clone ID: PAT_MRT3847_69252C.1
antttgntaacncgtanataatctcntaattcnnctcgagntccaatanctgtccangtcnnnctgtnnancnttccnngcgngcccttntagatggagatnngncggtcaaganngntncanngtgcnagancatgatccttgaggnnnaaanngcngagangnagnnacaacgtcaatgnnaaganncagganaaggaaggantcnccccggancagnancgtcnnagtnggcnncggaaagcaacnggaggatggtccntanccttggtgngtacaagatgtcagnaggagtgtattnggcntnttn

SEQ ID NO: 108793 - DNA, 448 bp, Glycine max
  Clone ID: PAT_MRT3847_69253C.1
tccctcccttcttccttcctttcaatgttccaacctaacaaccccaaaatggattcctccaccacattcctcaacgaccttcctcccctcaagagactaagactcttgcaacaacaacagcaacaaaaagaagaacatcagtattatgactcttcttcacctttacccgctaaaaaacgcaaggagtctcgaaccctatctccaccctctcccaccaccaccaaaaccgtttataactattccctccccgccaagaaaagagtgtgggccctacaaccccagagcccaccctcaaatgacgtcgtccccgccttcgacctcaatgtggaatacacacccagccccaacaaccacggagacttagaagaagaccactccgaggacgaggacggggttctatgctgtgtgtgccagagcacggacggcgaccctgcggatccaatagtct

SEQ ID NO: 108794 - DNA, 400 bp, Glycine max
  Clone ID: PAT_MRT3847_69254C.1
ggctcgaggattcttcaccaactgtgttttaggatcgaaaccttttctgaggtgcagtgatgggacactccaacgttagaaagtctcacccaaaagactacggctctggacatcacacttgtcgagggtgaggaaatccacatggagtgatcaggaagtatggccttatgtgatgctggtagggcttccgtagcaaggccaagggaacgggctccataaaccatcgctaagagagctgtggtcacctacggaccaatcttatgtgatgacactaagatgttaagaagatgacatgcctgaagaaactcgatactggatggtttaatctatatcattatcagacataatgagtggaacgaacaatacttttatatagagcgttttgcactattggactaac

SEQ ID NO: 108795 - DNA, 475 bp, Glycine max
  Clone ID: PAT_MRT3847_69255C.1
tttgttttggtttagtcatgctttctttcgttctttgtccctctctttcttctctcgtgttccctttggtcttgtttcggttcgagctgttattctattagcttttactgagttttcattagagcttcagaagtctccttctgaagttgttattattgttagagttcttatatcccctgtaagtcaccttgacgtattttaagcatcatattccattctttctctgttctcgagtctttcttcctctcttgaagagttcatttatgggatcgttgatgatgatggagtttatggagtttattggattcttcctgctctacttaagcttgctcttgatgatgtgcttgattccctgttgccgttagtgagcttggtgatcagacagagacttggtcttgatggctaaggtgtctgatcattgggtgatattgctgggatcttgtatttttctagggttttgagtagaaaacacgaa

SEQ ID NO: 108796 - DNA, 165 bp, Glycine max
  unsure (1)..(165): unsure at all n locations
  Clone ID: PAT_MRT3847_69256C.1
taatanttttttttttttgtggagagatgacaggctggcttttttcctaattcatcccgtgttagacaagacaacacaacaatagccagaagtgcacgtgacacctttagaacagagaagccattttgcaaggatctctggtcaatagaaaatctcgaactaaaa

SEQ ID NO: 108797 - DNA, 290 bp, Glycine max
  Clone ID: PAT_MRT3847_69257C.1
tacggctgcgacgacagaagggcatttataattaaaaaaattgtgccaaattaaatccatgaatgttataactactttacttggagtgacacaattaagaataataggcttgctaacaaaaaaagggaaaataattaaaggcattgtacttattctggctatttaagttaactagcgcttaattataaattccactaagaatattgccttatatttgcagtaattgagtttataattaacttagacatgatcatatctaatattactgatgtattttactactgactcgc

SEQ ID NO: 108798 - DNA, 252 bp, Glycine max
  Clone ID: PAT_MRT3847_69258C.1
ccatcatcgaatcttcacccctttgttattacctcaacaatggctcccgttacgaagcaatcatttctgctgtcggccttgctcctgactgcatctgctcaggcctcctggtggcacaacgacgatgccaggatgttgccacgtggaacgctgcccgcctcacgcagtggctgcgcgacaatggcatcgccactcctacctcgttcaccagcgagcagctctctgagcttgtgcaagccaattgggacgcag

SEQ ID NO: 108799 - DNA, 449 bp, Glycine max
  unsure (1)..(449): unsure at all n locations
  Clone ID: PAT_MRT3847_69259C.1
aataagataatgtatccattacaaaattaatgaaatgttatcactgaagtanacaaataaagatttcaagcacacagatagcaagttgttaaatgtgacaacagtgttagtttataaataaaaacagaaaatcattactaaaatacgataaagtgtgaaacaaacatatttcaagcactaaccttatgtctgatacagagaaatatgtatgatatgcaaaggtgaacgaaaatggcttcccctcactgtttgtgttcctgatccgggatgtcagcatcagatctcctcctggtcccaaagctatcctaagacggaactcaaaactacaagcaaacagaaaggcatattatagcagaaggaaacataatataaacaattaagtataaaataaagagctttaagttaaacaaggtagtaaaaaaaaaatctagacaacatgtagaacaatt

SEQ ID NO: 108800 - DNA, 344 bp, Glycine max
  Clone ID: PAT_MRT3847_6925C.1
atgcatggttggcacgtactcatatatatgctaaagtaatttacacgctcaagctaaattatgtgaggagtgtattaaacgaaaaaaaaaaagacataaattagagacatcttcagcaaagtgttacggtctaccagaaaagaaattgactttgatttcaagtcttccagactaagaagatcttgagtctaaatacttctaagaggtatcacgttgttgttttattgatgtatcatgtagtttgtgttttctggcctgctgctttaattgattatcttatatcatggctgatgtggctggctgacgggaatattaggctactagatacatgcttaatggcagag

SEQ ID NO: 108801 - DNA, 506 bp, Glycine max
  Clone ID: PAT_MRT3847_69260C.1
tccacctgtgtttctagattgagcatacaaccaagcttataagaaacttctttttcttatttttagttatgttctgcactgcaaataaatatacaaactgtgtgtttctttttctttttgtacgcaataaatcatttatctccaaactaaaaaaacgaacaaaacatataccttataatagtttggattaaaagggcaaaattgccaaagccatagtgcaattaattaaatatgtcgggctgaacctgcattgtgcaaaacgttatggctgagaataaaaggggggcccactttattataacaagcattaaatgcctctgcactcgcctaaaaccttttttatggggcccccaaatttaattcctgggcccgttgtttacaacggcgggtcggggaaaacccctgggtttccccatttaaatcccttggaaccaattccctttttccccggttggttaaattggaaaaggccccgaccgattccccttccaaaaaattggcccccc

SEQ ID NO: 108802 - DNA, 134 bp, Glycine max
  Clone ID: PAT_MRT3847_69261C.1
taatccaaaccaattccatcacaaggtttttcatcaacaacactctagaatatgaatactcgccatcaaaatctctatcactccattttacattcgtgtctctagatgaagtcgtcgtgccttgacactgaaca

SEQ ID NO: 108803 - DNA, 211 bp, Glycine max
  Clone ID: PAT_MRT3847_69262C.1
atccatggggtctgggaaagatgggccttggctttgggatacttgggtcttttggggggatcccaagggctggggatcccagtttggtgaatggtggttgaaaaaaccgaaagaccgcttaacacctgaaccgcaaaaaagaacccctcccggggaaattttttgttggacttctgggcttatctttgggaaaggaaaaggtattattgga

SEQ ID NO: 108804 - DNA, 431 bp, Glycine max
  unsure (1)..(431): unsure at all n locations
  Clone ID: PAT_MRT3847_69263C.1
cttcttgcttttatcctccgctctccccccgcctccgcaaacaacaaagaacccagaagacgccagaccccccctcgcctcactgcttgaggcgggcgggggggggaaaaaaaacaccccggccgggacacaaaaaaaaaaaaaaaacgccctggggcgggaggccccccccccccccaaaaccacagaatgggggaccttaaaaaacggggccggggacggcgatcccaatcccatcaaaaggccggccctcggttaaaaaaccgtcttgtaaccaaaaaccgccagcgccaataacaacataaanggaaaaaaaaaaaaagggggggggtatttcctcgcccacaaaaaaagggggggaaaaaacccttataccccccccctcaaaaaaaaaaagaccgttttttccgggggaaaggggggagaaaccc

SEQ ID NO: 108805 - DNA, 461 bp, Glycine max
  unsure (1)..(461): unsure at all n locations
  Clone ID: PAT_MRT3847_69264C.1
ttcccgggggcacccaccccgccgcggttctttccttgatttaataanaggggtgggagggggcccaanaanagcgatgataccaggggctaccaaatcctcggggtgtccaaaaacccttcccangaggatctgaanaaggggtacaagaaagccgcgcttaaaaatcacccccacaagggggggtgatcccgagaagtttaaagaggtggggcgagcgtatgaggtgctgagtgaccctgagaancgtgagatatatgatcaggatggggaaaatgcgcttaaggaaggaatggggggggggggggccatnagccatttgagatcttttcatctttctttggggggggggaggccctttnggtggggggggaggactcnanggangaggcgnaggcgcggagaaaacctgggtcaccctctcaagggctctttggaggacctttatcttggaacttcca

SEQ ID NO: 108806 - DNA, 487 bp, Glycine max
  Clone ID: PAT_MRT3847_69265C.1
caaggatttgaaattagagttccaaatgatagttctatcgtccaaatggaccctagggagcaacagttcacttttgagttccttttccactcgtctgttctggacagttacaaaccacccacctaacagtggattgggctgaaccgtgctgatcaaacataccatcagctctaacaggccaagtcacccaagcacccacccagcaacaatccagccaatcacacatcaacatcccctatcaactaggaaaatatgcattaaaagagaacaaactccagaaaaatttaataatcagatcctactagaaaatacaaaaacaaatatcctcttaataattataaatgtatcataacctagtaatttttggattaacctaatcccttgatcctggggttttacaaaggaatcccatgggatttttagactatgtatacacacacaagcatgactgattcaaagatgagttatgcataatgcattgaaaatt

SEQ ID NO: 108807 - DNA, 118 bp, Glycine max
  Clone ID: PAT_MRT3847_69266C.1
aaaactcaaaccactctactgggacaaaggcagagctgcaccaaatcgcacattggtttgggacaagctacggtcgagttcattcgagttggacgaggaaatgatcgagactctattt

SEQ ID NO: 108808 - DNA, 152 bp, Glycine max
  Clone ID: PAT_MRT3847_69267C.1
tttttacatgaaatgatgaaaacttcaacatatggttacataattactaagagacgtgagccatggatttcatcgacctccagagagagccgacactgtaccgaagcttgacgtgagctgtgtatcaacatgaccgctgggctgaaagcatt

SEQ ID NO: 108809 - DNA, 175 bp, Glycine max
  Clone ID: PAT_MRT3847_69268C.1
atccctacttcaaggatccatttccctcataaaatgctgcggttccttgtagggttcaactgaaaccattccaagccttaatctgtctattctgctgccctctgcaccgagattgacattcttcctcagtcccaagctgtgattacgtataccgagtcgtgttaaatgtctgatc

SEQ ID NO: 108810 - DNA, 249 bp, Glycine max
  unsure (1)..(249): unsure at all n locations
  Clone ID: PAT_MRT3847_69269C.1
agagctctttacctangaaagttgcaaggcagttctggcagcttaagttttcctcttggcaccagaaaatcagaaggaagagtttcctaggcttcctcctgtaaagataaagtcagaagataagccttttacttttaattggggggagaagtttgagtgtgatggacttgctgtganactcgctggtgctgacaacaccttacttattgggtcatatctggatgtccctattggacaagaaattaaaaa

SEQ ID NO: 108811 - DNA, 572 bp, Glycine max
  Clone ID: PAT_MRT3847_6926C.1
tttattttgtgggtattttttttttgggaacaaaacaactagtgatacctgttgaaaataattaaacttggtaataattgccactctccaccaaattacaatagggccagatttttataaaattactgaacactctaaataaccactgccatgtatgatcggccaaaacttcactctaataagaatttcctattacaaattgccatcataaaagcccgactaaatgagaccttgtttgagacttttctttcaagcatggcctgttaaatattaaaagtgtctaacttgctctttggaaggagttctacctttgttgaatgcctcacatttctccttgaagcgaatattttccttacttcacctggatagacaaatctttaactaggccttctatcttcacttttgcattatactttatgtgagcccaagatccctgcggttgcaagtatttatggttccaattaatccataattttcgggactagataagactgcgcgtgggcgtttaacaaaacaggctcttgcttttactttggaactctcaccaacttgggtgaccccttatggcggct

SEQ ID NO: 108812 - DNA, 244 bp, Glycine max
  Clone ID: PAT_MRT3847_69270C.1
tttttgagaaacccaaagggcaaaacatcgtgatttgtgatactccacaaattggaaatcgaaagtattctccgctggagacttagcgtaacaaatcgtgacgatggccaacattaactacggcccggggcgaagctccctcttaaattgtatatgaaccccctgttgaatctggttttggcatgccaaatatcgcataacttacttagtgcagttttctttctattgatgcttgccgctccta

SEQ ID NO: 108813 - DNA, 373 bp, Glycine max
  Clone ID: PAT_MRT3847_69271C.1
ggctcgagctcgagccgcatccatgcggaaactgactcatgtgcaaagcatgccttcaagtccagcgaggcctagactgatccagagggggctgctgctagagacaaagctcatggctggtcagcacagatgcgtggggtctatcaagagacacggggcatgaaggctcgcttgggacgacgagctattatcatgggatctgagcaaggacgccgaccccctgggctcatatgcgagggacatgagcgcttgccacagccctagaacagcaccgcccatgcgaagaaggacttcctacggcgggtgccgtaccatgaaagcctcgcccgtggcacagacgcactctgcctcactatggactggccgttattgc

SEQ ID NO: 108814 - DNA, 1350 bp, Glycine max
  Clone ID: PAT_MRT3847_69272C.1
acggctgcgagaagacgacagaaggggggtgtggataggtggcatctacgacacaacacagcacatcacaacacagcacaggcctaagttattgggacactgggttgcatgtaaatcatgaaatcatgacttctactcatgacctctcagataatgaagctgatgaccagcagcagtcggaatcacaaatggagcctttatctgcaaatggaatttcttatgcaggtaccgcccacttctcgagccgatttggacactgcattgcatgtaaatcaggaaatcatgactacatctactcgtgacatctcagataatgaagctgatgagcagcagccgtcggaaccacaaatgcagcatttatctgcaaatggaatttctcatgcaggtaccacccacttacccatatccagatccatactacagaagtatctttgctccctatgatgcacaaacttatcccccacaaccttatggtggaaacccaatggtccaccttcagttaatgggaattcaacaagcaggtgttcctttgccaactgatacagttgaggagcctgtgtttgtcaatgcaaaacagtatcatggtatattaagacgcaggcagtcccgtgctaaagctgaatcagaaaaaaaagctgcaaggaatcggaagccatacttgcatgaatctcgacatttgcatgcactgagaagagcaagaggatgtggaggtcggtttttgaattcaaagaaagatgagaatcaacaggatgaggttgcatcaactgacgaatcacagtccactatcaatctcaattctgataaaaatgagcttgcaccatcagatagaacatcctaaaactacagaaatggtgatgctgtagattgcagggatctgttgtgtatatctatattgggagatgaatctccaaccaacagtatcctcagatatctccctattattcattctgtcgtacaacgccataggtataagtataggttgtgtagtaggtatgttaggaggttgcaaaataaaacaagtaaaatgtaaattgaagtgattcaactaagtctatccccaatgtggtcctttcttgcctttttaggtatttttattgtgtgggcttttctttgtattatttggtgcctctgagggaaagagaagagattatccgaatgcgtgatggtttggttggatcatgtttatttagcttgtgagaattaattgttgtagcactcttttgatttgttgttataaacgaggatgaaaagttttaacccggattggtcaagttccgcccagttgcagatagaaggaagaggttcccctttcatgaagtataatgaatggatcttattatgttagctgcg

SEQ ID NO: 108815 - DNA, 583 bp, Glycine max
  Clone ID: PAT_MRT3847_69273C.1
acgcgtccgaccacacgtccggcgagaagacgaaagaagggggtcgtgtgcatgtatgtattgttgatgtattttcagcaaaagaaaagatagtgttttcttctttgctcttatcagcgatgatataaaattcgctgttgttattaattccaagcaggcagcacatggggtttgtgtcaaatatctgataaagagttgaaagtacttgggggcagtggaaatttggcagtgctctttagtttggttagtgcccatgtctgccacgaaatttccttcggggccatctatatgcgatggatgcaacttgttccttgcggatgtctcatccaaattaaagaatgaataggaactcacggtaagtgcgtgagatccccttctttatttcctcaaaatttatttggagatattatcatgactaagaataagaatatcacattactctaatgtctgcctcacaaataggtaatagggtattaaatttgggttctgagtttggattaatcctataatatttaggcacaaaatataaacagaaatatagttgggcgatgattctagcttaactggtggttcggggacatta

SEQ ID NO: 108816 - DNA, 255 bp, Glycine max
  Clone ID: PAT_MRT3847_69274C.1
gctgttttttcagtgtttggatatcttgacagagctcagggccctaactatgttcatgggattggtcggtacagaagctgtcccagatttggctcaacagtggcagccacgctgtggcgtgcagcattgttttctttctttcacctgggaaggttgacagcagatgttgagtttgagacacatattctacttgaacgactggtggctgaggtccgcccacatcggcttactgggtgttgtttgcgaagaatgttc

SEQ ID NO: 108817 - DNA, 540 bp, Glycine max
  Clone ID: PAT_MRT3847_69275C.1
aggccccaatagtagggactcccaatcatccttctatgcagggaattcatctgtttggtggtggcactgttggaccaattgaaggtatgtcccaagttgaggctttgaacaacatcaacacaaacagaaattcactacctggatttagttctggccatggtaggaagttgtgtgatctttctcaacagctgcacaaacttggtggataccttcctgagcattggaatagtgtgcagtttccagacttggaagttggtcatgattatagtttcttaaatcctgattatgattttggtttatatgaagagcagaagttacttgatatatgctttccacatgtaggatcttagtatattattaaaggcttacagtgtttttcgctttggtggggtttacttatagcatgttttttttccccaccttggcgattcaataagctatgtttccgtttctctatagtgattttgtactttgtagtaagaattttgtattgagttataaattataaatgttgaagaactatgatgattaccccactcc

SEQ ID NO: 108818 - DNA, 349 bp, Glycine max
  Clone ID: PAT_MRT3847_69276C.1
tttttgaagggtacaacaccctgcaattacattacgtgaaaccatacacagttaaaagggaccattattaatggaatggccaaaacctaaacccggttataagatcgttgaatctctttagcaacaaaaagctctcagacttaaattattaaatcatggcgtatacctactctaaataaaacaacaaagtcgccgccgatgtcagccacatcaacaccggatctgaggtagtggggtaccaaggtgacgaagagctcggaaaagctttggagggtgcagatgttgttataattcctgctggtgtgcccagaaagcctggaatgactcgtgatgatctttttaacatcaa

SEQ ID NO: 108819 - DNA, 537 bp, Glycine max
  Clone ID: PAT_MRT3847_69277C.1
tccccttaaaaacccaaaaattcttttattatctttgctaagaacaaagaatggatctgaatgggcttgcattaaataaacagcacgcaatgagaagggcacagctaccgcacagtatggggacttgctggggggtgaacaaagctgagttggctaccagttgttctctttttcgggtgcattccactgtaaagcagcccccgtggcttgcttcgaggggttttgcacggccttataggagggtgcttgcattgagcaaggactctttataatgatggacatcctttctactcggcatgtgatcttatgggtgccgaccgcagcaaactgccttcgcattggactgaggatcctaggctatgttcttcgcctaatggggatcctcgcgggtgaaagaaacaggcgcctacacgactcatgggacagattgggaggctaagtgaggataaggagtggttgcttggagaccttcatataccatcctacactgggctagcgaataggagcttcattgtgtggctgggaagcaactttgga

SEQ ID NO: 108820 - DNA, 567 bp, Glycine max
  Clone ID: PAT_MRT3847_69278C.1
ttcaatttcttttacgtgagtatgcccttgtaaactcgagagaggagaggaaaaatctgtattcggtgctttttgaccaggttctgcatcaagttaatgaaaattgcatagctactggaatcaatgaatatagtgatgatgagatccaaccccttgcaagtctacttgctcaaacaaatgcagccgaggcatttcatatttctgttaaacttggggtagaaggaattggggagcttttgaggagatcaattgcatctgcactttcgagatatcccaacagtgaacgtctaaatatgctcttggattttgtgacagagaaatttgattcactaataagttcattcactcatttggatggagagttctctcatatgattcagataaccaaaactcacaagtctcttgaaaatgtggaacttatcgctctaagaaatgacattgatctgcaggcaaagcactcgtgggccactttacattcccttcttcattctgaaagaattgcttaccgtcagaatgggtatatctggttaggtgatctgcttatttctgaaatcagtggggaaagca

SEQ ID NO: 108821 - DNA, 417 bp, Glycine max
  Clone ID: PAT_MRT3847_69279C.1
ctttgggttgatttatgtgcttgtttatgtgcttgcatggtcgtgagaagatgcatcgaggggaaggcaaatgatggcgatgaggggcgggcggtgttgcatgttctactttacttactgttactggtattccttccaaatgatactgtgcttactattttcccctctccttctatagctatagtagcggcagtcctttaaaaaagagcgttaacggtacttctcctagatctacgggcgaaggaacacaacgaagtatcgaaatccgtcgacgacactagcggtacgaccctcgagtagagcctacccttcgtactcggattagaaatttagtactacctactcgtcacaacgagaaagaccataacaccggcgattaggtccgacagtccgtagcttttcccgctaaagtccttt

SEQ ID NO: 108822 - DNA, 293 bp, Glycine max
  Clone ID: PAT_MRT3847_6927C.1
atttaattcgagtccagcacacaacaaaacattctatatgtcattttaacataatgactggcaaagaaatactccatatgatgaatgatgaaagcctcggctatgaaacaaccatacaatagggaatcggaatatggtctaacttattaaaaactcattacacatgggtattaattgatgaatggcaaattaccgcatactatggaagattatttagtactattagatttaagcaagaaaaggacagagaattaagcttgtatgcaatattttgatgtgccacttaggtccat

SEQ ID NO: 108823 - DNA, 605 bp, Glycine max
  unsure (1)..(605): unsure at all n locations
  Clone ID: PAT_MRT3847_69280C.1
cgaaggtaaagcttcaaaaaatgaagaggaagagaaagaagaaaaggccaaggaataatgtggatcttgatgatccttcacgcctacagaggagaacaaggtatcttttaatcaaaatgaagctaaagcagaaccttattgatgcttactctggagaaggttggaaaggtcagagtcgagaaaangatntaangngnnncnccaanngnnnaanaannanaaggnggnnnaaaggctacaaagagcaaggaagcagattttaaaatgtagacttggtattcgtgatgccattcgccagttggattctcttggttcactgagtagcattgaagattctgccattgctctagatggatctgtttgccatgaacatgtgagaaagtatcaacactttgaatacttcattgcatttaaatgctttctgtactctttccattttaatacttgtgaacctgcttctcaccttatcttattttgctagcgattcattttctgaagtttagccgtatgaagtgacaaggttcaacatattagaaactgtatattcacttttctattttcctacatctagatattgtgtgtaaagtgcaaggtgcatgaagaac

SEQ ID NO: 108824 - DNA, 605 bp, Glycine max
  Clone ID: PAT_MRT3847_69281C.1
ccagtattaattaccaaattcttgttattgacaataaaaactgcattacaggatacgacgatgacaagtggtgacaacaattgtatcgaagatatatgaagtattactttattctctcacacttttattttatttttgcttctaacatctcattttatttgacacagaatatggtgtgggagatatatggaggataaaaatcattgagatcccttgagcttctttgcaatgcccgcaaagtactttccctgccaattctaattcactctccagcatgagttcctgcaccatatggggagccacctttcaccttctccaactcaaacatgccaccgccaaatgtgtatccaatggggacaaagatcaatccatggtgaacaagctgagtaatagatgtcaacggggtagtttcttggccgcctccttgagaactagtgctatagaagaaccctgcagcctttcctgctagtgcctgtgtacgccaaaggcctccagttgcatcaaaaaatgctttaaattgagcggccatagatccaaatcttgtgggaaaaccaaacaaaaagccatcagcctcagtaagctcattgggagtaataattggaaca

SEQ ID NO: 108825 - DNA, 1127 bp, Glycine max
  Clone ID: PAT_MRT3847_69282C.1
gccggtggaggttctggagaagagttgatcatttcatgatcaacattttttcctgctcttatgtttttcatagttttatattgaaaatccttaaacgtacgccattcctataagaataataagagacagggagacaagacagagcagtacaggttactaccaatggccaccaatttggttactacagagacagggagacaagacagagtagtacagattactaccaatggctaccaaggtttacattgtttattattctacgtatggacatgttgagaagctagctagagagatagaaaaaggggctgcttctgtggagggagtagaagcaaaactgtggcaggtacctgaaacattgcctgaagaagtccttgctaagttgggagcacctccaaagagtgatgttccaattattactcccaatgagcttcctgaggctgatggctttttgtttggttttcccacaagatttggatctatggccgctcaatttaaagcattttttgatgcaactggaggcctttggcgtacacaggcactagcaggaaaggccgcagggttcttctatagcactagttctcaaggaggaggccaagaaactaccccgttgacatctattactcagcttgttcaccatggattgatctttgtccccattggatacacatttggcggtggcatgtttgagttggagaaggtgaaaggtggctccccatatggtgcaggaacttatgctggagatggctcaaggcagcctagtgaattggaattggctcaagctttccatcagggaaagtactttgcgggcattgcaaagaagctcaagggatctcaatgatttttatcctccatatatctcccacaccatattctgtgtcaaataaaatgagatgttagaagcaaaaataaaataaaagtgtgagagaataaagtaatacttcatatatcttcgatacaattgttgtcaccacttgtcatcgtcgtatcctgtaatgcagtttttattgtcaataacaagaatttggtaattaatactggaaactcggagctaataaaattgaacacaaacaaccagccaataaattcttgttccagtcatatttcaatgaataaagttggagggaata

SEQ ID NO: 108826 - DNA, 976 bp, Glycine max
  Clone ID: PAT_MRT3847_69283C.1
actgaactaatttttcgcacccctaaagttcaatatagcaagaccaataatagtatatatatcctgctcatgaagttaaatgtctactgtatttctctatggttaatctgattggaatttgcatcgcatgtttagttattattctacgtatggacatgttgagaagctagctagagagatagaaaaaggggctgcttctgtggagggagtagaagcaaaactgtggcaggtacctgaaacattgcctgaagaagtccttgctaagttgggagcacctccaaagagtgatgttccaattattactcccaatgagcttactgaggctgatggttttttgtttggttttcccacgagatttggttctatggctgctcaatttaaagcatttttcgatgcaaccggaggcctatggcgtacacagtcactagcaggaaagcctgcaggcttcttctatagcacaagttctcaaggaggtggtcaagaaactaccccgttgacatctattactcagcttgttcaccatggattgatctttgtccccattggctacacatttggtggtggcatgtttgagatggaaaaggtgaaaggtggttccccatatggtgcaggaacttatgctggagatggctcaaggcagcctagtgagttagaattggctcaagctttccatcagggtaaatactttgccggcattgcaaaaaagctcaagggatctcaatgatttttatcctccatatatctcccacaccatactctgtgtccagttaccatattttcaaacaaaatgagatgttagacgcaaaaataaaatatagaagtgtgagagaataaagtaatacttcatctacaatacaattgttgtcagcacttgtcatcggggtattctgtaacgcagtttttactgccaataacaagaatttggttattaatactggaaactaggtgctaataaattgatcactatcagccatct

SEQ ID NO: 108827 - DNA, 393 bp, Glycine max
  unsure (1)..(393): unsure at all n locations
  Clone ID: PAT_MRT3847_69284C.1
atattgattgctatatgtaattctctctactcatgaatgatataaacacaacacatcattatgtatctactgtagcatcttaatgtatttgttactcaaagatctaatcctgcatcttaaaactgtttgatcagaaactaactataatagcacatagtttcccgataccagttttccttaggcttctacaagactgaccagaatgctggtcctcgatgtaattactatactagagaggtattattcattgcagagatgcgtaattggtacaatcttgaacttaatgtattcattcttgcttattctatanaatatgttactatatagcagttagaattttttgtaattgggaagataaattatgggaaggtagtattggacaataattgaatg

SEQ ID NO: 108828 - DNA, 251 bp, Glycine max
  unsure (1)..(251): unsure at all n locations
  Clone ID: PAT_MRT3847_69285C.1
cacatcctgnatcttatacactatgaggtcagaatttcagtgtgttttattgtgttctgtaaattaacatgatagtagttttatctatatttgacaatttgtatcttaaatntntttttgacatacgttgagtcattgaggtattgaagttcattttatccggtttaccatcaaagccaaaagatgtttcattcatgtacttncncttattattntccatcacactnacatatnttgtctcatangggggc

SEQ ID NO: 108829 - DNA, 487 bp, Glycine max
  unsure (1)..(487): unsure at all n locations
  Clone ID: PAT_MRT3847_69286C.1
cggacgcccgccgttcttttttttttttcctagcattttgcccagcccacacaggccntataaacacaaagggcggctttagaaagaaaagaaatccccccccaacaaaaggcagaaanccacaaaatataagagaatcatatttaaaaataaacaacaacttacctctgggacatacaccaaggcatagccaaacaacacaaacgccatcaacattaagccaaacattggaaacctaggtcataaaaatacgagcactggaatgcgcagagccaacatgtttgccttcaacacagctgaaagccttaacagagataggggaactgctacctaactgaacccaagcacgagagtcttatgtcgaagaatcaaagcctgacctagatcccttaaaaccatcatgtacaccaccaccaacccccgcaagagcactgaatgatacatcctcgtccataccagtgggaacaggagtcccactgggaccaac

SEQ ID NO: 108830 - DNA, 502 bp, Glycine max
  Clone ID: PAT_MRT3847_69287C.1
agcatggatctagctatctcgatcgaactgtccaaggtcctgtcaccaatcgaggtgccggcgcaggggatatgtgtaccatgggtggaagccgcgtggtataaagaggagttatagctaaactaaaaaatgcaactgtgatatgccgaaggagcagtaagagcggtacatatcggtgcagtgacaacacaattacagcaaatacgataacgcccacgtaccagtacaggcttgtaagcaaccaagataggctttcagggccttagccggtcgtgaaatgagtgtcttacatatacacgaaccacaaaatatgcgtaaaaacgcaatcgccgccatgcatacacaaccgcgcgtacacataaacggggccgagggtcggggatgcagcggcccaaatggtttttgttacggtgttacgggcggcaacacagtagggccggagatgttgcagaagtgtagtgataacaataggcatggcccccggcagggacaggtgcccggc

SEQ ID NO: 108831 - DNA, 276 bp, Glycine max
  unsure (1)..(276): unsure at all n locations
  Clone ID: PAT_MRT3847_69288C.1
gtgctaagtgtgaganaaagaaaatggcaaantctcaatttcgaannccatttcttgtacactattactcttttgttattcatcttcaacctcanncnttcatcacgcacttatggagcatcgacacccgtgcttcanntcactccctcnaanttcaagtccaaggttctgaattgnaatggagtngntcatgntgantnctntnnnncatggtgtnggaactgtcagggcnntgactcctatatgggagaaggcnnntantgtgnntnanggtgt

SEQ ID NO: 108832 - DNA, 457 bp, Glycine max
  unsure (1)..(457): unsure at all n locations
  Clone ID: PAT_MRT3847_69289C.1
ggctcgagcatggaagctggaaaaagatttgcagtgaagactttaaaaaagaaacaagagaaagacaataaatgtacctcaattttggtcactcatcaagtcaaagggttgccactacttttcattttcttaatggttgtgtttaaaaagcaacatttttttatgctttacacanaatgtgtcttctctggatgctggcttgaactaactgctagattcagtttggttcggtttctggtccttaaatttagtaggtccttttatggagtaataatataataatatataagagaaagtgtgaaacaaagaaacgattacatattttatttgtaattaaaaaaaaaaaaaaaaaagctaaaaaaaaaaaaaaataaaaaaaaaaaaaaaaaaaaaaaaaaaaaaaagaagaaaaaaatacactatcaaataaaaaaaaaaaaaaaaaaggggggccccc

SEQ ID NO: 108833 - DNA, 244 bp, Glycine max
  Clone ID: PAT_MRT3847_6928C.1
attttctcctaactttgagagcatgggtaacttctatttttttggcgctgtccccttctccatcatctttacttcaacctttaaacttcctttttcaactattaaaattcctgactatgttgagggaattaagaaaatggggttggtggcggtggcaaccggattggaagtccccaaggtcttaacggtaagcggaaaccgggtgtaaccgggttaggacggcaaggaacaatccccagttttg

SEQ ID NO: 108834 - DNA, 199 bp, Glycine max
  Clone ID: PAT_MRT3847_69290C.1
ggattgtctgattgtgtagcatcttgtagaggaggtatattggagttgaaagtaagcagaaatgcaattcttgtgctggctttccttgcatcatctggacaaccgggttttgaaatttttgttggtcataagctctcttgtagaggagtaaactatcttatgttgattttgcaattactggtatcggagatggatcttg

SEQ ID NO: 108835 - DNA, 173 bp, Glycine max
  Clone ID: PAT_MRT3847_69291C.1
aaaaggtcacgccaccggaaaacgacgccgagagctggaatggattcgtcaagtcgacatacggcgatgagcgggaccaggccggaaagacttaacgagcatggtgccgaagtgcgaggatgcccttgggcgggcggaaagcagttgggcaagcctttttcaataccttcttc

SEQ ID NO: 108836 - DNA, 604 bp, Glycine max
  unsure (1)..(604): unsure at all n locations
  Clone ID: PAT_MRT3847_69292C.1
tcgatctatcgctagctaatgtgccagatgccgtacaccgcacaacacaggcctaagctaaagttaactttatggccaaggctttttagcgtacgttgcgcctgccgtttataatgacgttgcagcccttgcgcgcacctaggtaagcgcaggccataaaggcacggtggtaatacctaaggtttgcagtagagcacaactaggcttaagctaggcggtgtggctgtggggctgcccctgactgagcggactacgctatgacgtattatgcggtagtagcgtatgacaatatagacttatttacaggccggcataaagcagagaaagctgccaacctggcaggagggggatgaggcncgactaccaatgccacgttgtaatggccgggaggggtgcaggcgcctgtaaacagagtaggataacccaacgccgcattgttaacagaagctgtaacagcgccacggactggtaaaaccaaacacggacaggatgagacgctgaataagcaacaggtgaaagaaagaacaagtacagcaacaataaagaaggatagaggagcgagacgcgagagagagagagagatagagagagagagagcgaagag

SEQ ID NO: 108837 - DNA, 314 bp, Glycine max
  Clone ID: PAT_MRT3847_69293C.1
tcgaagctggaattcggtcgaggcgtgaacaagcctaggtagccaaagccatggtaactaacatgtatccgacggcacttcgaagcactggcagactatgtgaagacctgttaatcaccagcacgaaacaaaaacgtggctgtagaaaaactggaaatttccagactaagtgaccttaacccatgacatggcaacttgaaacacatgaaaggagagctgaaggatttccctgaaaactaagcagcaggattccaaaagctgcccaacaattggattgctgtgatcatcgcgcagaccgtctttgaaagctgcag

SEQ ID NO: 108838 - DNA, 434 bp, Glycine max
  Clone ID: PAT_MRT3847_69294C.1
acccttggttgttctcgaaggaccaaccggaaacaggggaacaccacaggggggcctagggacaacccgagaattaccgaaaggaaacctcgaggaaaccaaggttataaatgatgaaggcgtgcaaaggttgggcgatcacaggtccacgggggttacggggcgaaaacttaaaccggtaaccatggcccacctcataagagcccgaagtaacatggggggggcccgggtgacccaaagattgacacaacgcaaatttggtgggccaaccgcaataacgagttggccagcgggaaacctgaggcgccaagcgtattaaaaaataggggcactttcggttaaagccctgagaccgatagggccccatggcccttcaacttttgaccaggaaagaggggcaccagggggtgccctctaacgagaggccctgagaa

SEQ ID NO: 108839 - DNA, 648 bp, Glycine max
  Clone ID: PAT_MRT3847_69295C.1
ggccgctctcattccttccattccacgcatcctctagtatcttatagcttccatttcttctctcctattccctcctagttccaattcttcaccctagtctaaaaataatgtcattcacttccaaggtcattgctctgtggtgcaagaaacatgggaatgatgatggtgtcgatgtgtatgatgctcctgctgccactgcttgcattgaaggaaatgtttgcaattggcatggagattttgtaagttttgtcccagttgcattggtggagggtgacgatgacgacgatgacggaggttatgactacgctcccgcagcataaactataaatgtttggttaccttgtatactatccaacttgtagtgaccgacatattagaatgtctgcttctattcttaatttttagtttggcgccaattgaaagcgattaagctacaaaattatgtgcgaggtgactttatgttgatgtgtaggcatgcactatcaattatttagcagctaggtttgttatccagagtgagatatcgattaaatatgcatgtttgctaatgaaatgtagttgattaatttatgttatccaccataacttgcatcgtcgtcttgatttgacaatctagatgccataaattagctaatttagtttcaaaaa

SEQ ID NO: 108840 - DNA, 307 bp, Glycine max
  Clone ID: PAT_MRT3847_69296C.1
cgactgtccatacatatccacctctctctaaatcacccttgttgcccttatgtacgagccatagctcattgccgcatagaacccagatgctagctacccatgtcgctgaagaaagcctatcgctgcaacaagttctacaaatcgttcaaagaggagctaccgtcggatggcaccatcgaccaagacgaagacgacggcaccagctaagaacctgatagaggtaatagtaaaggatggccaagcatgctgtcgacaatcctctgagaaatcgtgcggagagtggactcctgctatgagcaaagcccga

SEQ ID NO: 108841 - DNA, 178 bp, Glycine max
  Clone ID: PAT_MRT3847_69297C.1
tctagagaggcgcgcccccttttttttttttttgtcttaaatggcatccaataagtaaaaactaagagtatccatgctccgtatttcaatcgtagcatgttaggaacatgtagctacattcacttccaaatatactactaacatagccaattctttcacagttctatataataggaga

SEQ ID NO: 108842 - DNA, 167 bp, Glycine max
  Clone ID: PAT_MRT3847_69298C.1
aaaaaacaagctgaaatagaattttttctaagcttaaaagcccaggttttaaacttttaaagactttgttttaaaccaagttttacggggggggggatcataaattagttttaaccttaaacaattcaaagataaatgtttcggggggacaaaattttagggcctgt

SEQ ID NO: 108843 - DNA, 522 bp, Glycine max
  Clone ID: PAT_MRT3847_69299C.1
ggtgcgctagcttgggtgcacattatgcattgacactcaaataccttaacatcccaaaatagtcaaaccttccattcgtgaattcgaccggcaattccttgcttctttcatctcttctggactacgcacactgcagctctcatcaggtacctctacagatgcttgcacgacccttatactctacaccaccctcatcgagcatggcttcaactaccagagaagacgacagcgaagtagcctacgatctttccacggtcctcaaagtgctacaaaagcggtcgcataaagaggcttgctggcacagcggtgattcctgcgagcctcgacgcgcaaaccaacgtggaatcgatggagatcgtactcttcgaagagaacggaatatacgcgcggtttatggttgccaaaagaaccaccttttgcccgacgccgcagcgaaagctcgctatgcttgtttacacccacggtggcgccttctgcagtcggaccccgttttctccgaactaccacaacctactgaacaag

SEQ ID NO: 108844 - DNA, 420 bp, Glycine max
  Clone ID: PAT_MRT3847_6929C.1
gggccaaaatttgttcagacccaaatacaataaaaacataaaaacaagaaaataaaaatgcaagctaattggaatggctgtgcaaacaaccccaaacttaaagatttgattgtccaattaaagactatataaccaattacatgcaattaatcaaatcaagtccaattagagactcctcctccaaaactaattattgcaaagacaacgttcattcatctcatttcactcaagtgtttaggaggttcacttcgttcacttcactcaagtgttttaggataaaatccttttcactcaacttctcaatgcaaagtgtcttaccataggcttgataaggaacctcatctcaactagtaaccaaataaatgcggccaaatcacaaggtctttatagggatgtaactaggctaggggttgtaatgac

SEQ ID NO: 108845 - DNA, 460 bp, Glycine max
  Clone ID: PAT_MRT3847_692C.1
tatcgatcaagttttgaacttctctcagcagaagttggtggataaatgcaaagagattccagtcgaattatttgccaagcttgagcagacttacgcactcttagcatttgaaaaccccgacacttcaccctttggttatttgatggttcgtttttctgccctattttttaatttccgtaatttttatttatttttagtcgtttaaccaaagaaatgttttggctgccgaattgaacgaagcagttttgtctgcgctgcacaagccatgtgtgtcgagacttgaacaactctttcggttgatggtatggaaccaacaccaattaaaaacaaagagtgacgggaccaaactgacgaccgaaactgtggaagaaatgtcaaaatgtcttttctcgaaggaagacgattcgtttaatgagttactttgattttttttaaatttttgtataaaattattatcatt

SEQ ID NO: 108846 - DNA, 804 bp, Glycine max
  Clone ID: PAT_MRT3847_69300C.1
gagaagtgctatcaagcttgcctcctgggtagggatgttgacttccctaaggattttgaccaagttctttgttggcaaagaaagagggtttcgcttggaagaattgggacctctgaagcttaaaggggatcttgacatcaagcatctaggaaatgtaaaaagtgtaagggattctaaagaagccaatatgccaagtaagcaattgaataaattgcggttgtcatgggacaaaaatgaagactccgaattacaggaaaatgttgaggagattcttgaagtgcttcaacctgatacccaacagctttggagattagatgtggaagaatataaaggcacccatttcccaaaatggatgtctagtccttctcttaagtatttaatccttttaaatctgttgaatggcgaaaactgtttccaacttcctccactggggaaacttccttctctaaagattctaggaataatgaagaataatcatgtagaatacctctatgaggaatcctataatggggaagtagttttcggagccctagaagttctgaccatacgtcatttgtcaaactttaaaaggttgtcaagggaggatgggaaaagcatgttcccccgcctttccaatcttgaaattgatgaatgtcctaaatttttgggagacgaagaattgttgaaaggtttgggagtgtctctcggtattcaattgtgataagttcaatgtgttggcaggttttcaacgcctttggaaatggtggatttccaattgcagagaggttgggagatttgcaggctttacaagtatgacttccctca

SEQ ID NO: 108847 - DNA, 915 bp, Glycine max
  Clone ID: PAT_MRT3847_69301C.1
ggagaggtagaggaggacgtggtaaagcccattctggccgtggaccaagtggcgctcttaatggtggaagaatggctggtgctgttagtagtagaagaatggctggtgctagtaatggtggaagaacaactggtgctgttcgtagaggtcctcttatggttaacactcggccgtcatcgtatgctattgccaaggcaagctcaaaaaacgtggatgcttatacatgtgcttgagaatctgatatgctaaataatacccaattatgagatgattcagcattatagaaactcaaaagtcaaaagcaagtggaatcctcgtctttagtatttgttccatggagaagctcatgctcgatcattttttgcatcatcaatgcctttgtcatagttccataatgtcacaattaatatgcacctaagagttgtttgcttttgttttggggggctttgctacagatctctgatgtgtgcaggggttctttggtgattcctggcatattatgtgaaggagcttcatttggtgaatttcaaaatggagctcttaccagtagcacaaaaaacttataacaataagtggggttaaattctctaatccatgctaatccatttcatttacatgagatgactttaaatgtttggctggttttgtgtggaccggtgttctgttggatcctcttgctaagttgggttctacagtgcaagaattcagtatacttccctaattcatggtattttgcaaaggagcttttcgcatagaaccagaactggagctctcactaatagcatagcaccggtttatatgcagagggttgaattcttactcccatttaccatcttacacctagaacgttgatgtttgagtacaagtgtctcttttaatatatgttactatggaccgatctacttcattaatagc

SEQ ID NO: 108848 - DNA, 164 bp, Glycine max
  Clone ID: PAT_MRT3847_69302C.1
tataaaattaccttctgtggcagtagtctctcagcgaaatttgtctctcaatcaaaacttcccaatacgacctcgagtagcagagccgaggcgcctagcagcacgcctcctgagctcgatcgctacgtagaggtccataagaaagtcgacgatgctggcggaga

SEQ ID NO: 108849 - DNA, 1782 bp, Glycine max
  Clone ID: PAT_MRT3847_69303C.1
aaaacaaaatgaacactttatattcactgatataactttaagatagttaacaaacccgtacatccaaacatcgagaataaaacatttagaagtaattaaaaacccgtcatcctttctagtaatgctcctaaacccaatcaagcctctaccctcttgattttctcaagatgagaaacatcttcggcgtatatcttttcatttacaaaaagatgaacctataccttatggtaattgtttttattatattaactaaagttgggattagcagcaaaatatgctaaaaccccaacaaatggtgcgttaatgtatgtggttggctcggatctcctaaaatcaactcgatcatccacataatcatcattttcgtcaggtcctccaacaatggcaccaacaagaacattaggattgggattggtggaattgtaataaattgaaccttctttgcatgcaatgaactgaggatgatccttgatggagggtaaggaagatccacggtgatgaatacgttgtggatagtagttgctatagccaaccatgtaggataatcccattgggttatcacccaaaatgtaatcaacttgcctcttagcatgttggcgaagtgtttgtgcactaacatagacattgccacaattgatggcttgtgaagcgtgtgttaggtaattggcatagaccaattcaaggaaagcaattgaagttgcatgttgcaagttgctgcctccgggtctgtacacaagtccacctggcgtgtactctatgtgtgagcttggtgattcgggtatgagggtgcaaatgaagctctctgctgaggacttgtaggactcaagagagtacatgtttccttctatgacttccttagagacaacatcaatgagtttggttgggacaacaaacatgctggcctcaacgtacttgtctctaaggaagtcatagaaggaaacatgtactctcttgagtcctacaagtcctcagcagagagcttcatttgcaccctcatacccgaatcaccaagctcacacatagagtacacgccaggtggacttgtgtacagacccggaggcagcaacttgcaacatgcaacttcaattgctttccttgaattggtctatgccaattacctaacacacgcttcacaagccatcaattgtggcaatgtctatgttagtgcacaaacacttcgccaacatgctaagaggcaagttgattacattttgggtgataacccaatgggattatcctacatggttggctatagcaactactatccacaacgtattcatcaccgtggatcttccttaccctccatcaaggatcatcctcagttcattgcatgcaaagaaggttcaatttattacaattccaccaatcccaatcctaatgttcttgttggtgccattgttggaggacctgacgaaaatgatgattatgtggatgatcgagttgattttaggaaatccgagccaaccacatacattaacgcaccatttgttggggttttagcatattttgctgctaatcccaactttagttaatataataaaaacaattaccataaggtataggttcatctttttgtaaatgaaaagatatacgccgaagatgtttctcatcttgagaaaatcaagagggtagaggcttgattgggtttaggagcattactagaaaggatgacgggtttttaattacttctaaatgttttattctcgatgtttggatgtacgggtttgttaactatcttaaagttatatcagtgaatataaagtgttcattttgttttaaaaa

SEQ ID NO: 108850 - DNA, 472 bp, Glycine max
  Clone ID: PAT_MRT3847_69304C.1
gctgaaacaagataaatagccttttcttttaagacaaaatctttgttttaatttgtactttcaccaaaaccccgcctacattaaaaattaattagttaagggaataaccatacattagacgaaattatcgtttcattggttttgtttgatcaactcgaacaaaacttacaaaaaaaaaaagcctgaatggattcaaagctcaaacattggtaacaataactcgctcaaattattgacatcatgccaagaagtgcgttatgatattcttcttgccttcaccgccataaacctaactaagcttcggtctcaacttccaagtttaaaacacatgagactctcatcagcctttatttagaatcaccattgcactagccatgccaactcatcttcaaacttcaaatcaaaaggaaaccaaaaattattagttgtctttcctagaactaaaaacgagctttcttcctttttttaaagt

SEQ ID NO: 108851 - DNA, 226 bp, Glycine max
  Clone ID: PAT_MRT3847_69305C.1
aaaacttgtaaagaatggatcacccatggccggctgtgacattcatagcgttggaatgcatctatcttactgtgttacatgagagacctaattgacaaatttcgacatacatagatcttctgctggggtgtctgctacatatttgggtgaaaatgtgtgcactgggctggaagttgaggatcagattgctgaggggacacgcttggtcttattggttatgacaggg

SEQ ID NO: 108852 - DNA, 293 bp, Glycine max
  Clone ID: PAT_MRT3847_69306C.1
aggcgtgcgaacaggtgcgagaggacgtctgaatgggcgatagttaaatgatgttttaatttaaatttagcgtatgctattcattgatctttcattctaatgtgagattgaccacacacatgaactatataacgtcatctataacaagatacatgtactaatagttcattaatcaagatagggaaaacactggcgattctcaactcaatatactatttttgattaatgatttcatcagtattcgtaattacgaaacagactagtagattgagagatgcaaacagttgcacatt

SEQ ID NO: 108853 - DNA, 343 bp, Glycine max
  Clone ID: PAT_MRT3847_69307C.1
atcctacccttggtcggttcgctctgaggtacattcgttaaactgtagctctcagagtggggatcagtgttgagaggagggacccccccccatccaaagtcaccaacgccactgccaagaagaagtgactgcatttgggcaatgttgctagcacatgtcatcatcatcgagggtactcctttatagtaattgtatccttgcagactcttatgtgtatggtgtaactcatatttttaacaccccaccaatttcatgtggccgtaactttcaaacctaggttctagactcggcggcggtcaatcatcattggtgcaagcattctattagtactggagttccttct

SEQ ID NO: 108854 - DNA, 494 bp, Glycine max
  Clone ID: PAT_MRT3847_69308C.1
cccacgcgtccggtgtgatcgtatattgtggctaggcaaaggaataaaacaactacaatatggacgtgcagaaattaagctctcggatcatagaccagttagttcagccttcttggttgaagttgaagtattcgaccatcgcaagctaaagagagctctaaatttcactagggcagcagtacacccagagatcttccttgatgaagatggagaaatataatcatgttagacattcatcgtggtactatcatattaaacactggtaaatatagttttccatcttctctttacaataatccaattcatgacacgctgtgtaggatatgcttttggatagatatatagaaaaagtctaaccatcatgatgcatttcaaatatatgatttgccagaccgtaattcaattcatttcaaaacaatagtttgacattttttttcacaagtaacgaccacttaatttatttgactcactttttgagaattcgtgtataaact

SEQ ID NO: 108855 - DNA, 500 bp, Glycine max
  Clone ID: PAT_MRT3847_69309C.1
gtcttgaatgtatgtttgataaaatgaaatttgtaataatatagcctaatcacaaatttgaagtttatatgtgccagaaagaattgggccgaacaatattgaagtttaaaataatatagtctaatcacacatttcacctaaaggagttgttattatagatcttttttacttaattatattaactagttacttattttaaaaaattacataaaaatctgcctattataatagattatgtgtttgtaaaaattatagttgtattaactcctgtgagctgaggcatttgtttgcaaattctcggtaagggactcaacagtcaacaccatagagcatagagcatccatatcacgttctctttttccccctgtaatgggatcgcttgggtacagaccgacatcattctaacaaataatacagaagacttatagggatgatttgaatgataaaactgcatggcattttcatttcaccgtcatttcatgaaatactttaagtaaaag

SEQ ID NO: 108856 - DNA, 732 bp, Glycine max
  Clone ID: PAT_MRT3847_6930C.1
atggatcaacctttagatgacaaaacattgattaaagaagcaaattgggcggagcaaatcgcacatggtaagccaagcggtattgatacgcagacgattgtgtcaaataaacccgtctggtttaaacaagggcaggccgaaaaattaaaatcactaaaattaaatggttatatggttgtcattgatactggagtaaagggttctaccaaacaagcagtagaagatgttcatgtattatgtgaatctgatgaatatatgaaatatatagagcacattggtacacttgttcacagtgctagcgaatcgattgaacagcatgatttccatcatttggctgacatatttaacgcatgtcaagaagacttgagacatttaacagtaagtcacgataaaatagaaaaattacttcaaattgggaaagaacatggtgccattgctggtaaactaactggtggaggaagaggtggcagcatgcttcttcttgcggaaaatttaaaaactgcaaagactattgttgctgctgttgaaaaagctggcgcagcacatacatggattgaacatttaggagtgaatgccaaagagaaagaaaagattcaaaactatatgaatatagtgagagatttggctggaaatcgtttgcatgcgcgaattgaaagtgaaaattatgtgccaacagcagcaggacttgcttcttcagcgagtgcttacgctgctttagctgccgcttgtaat

SEQ ID NO: 108857 - DNA, 140 bp, Glycine max
  unsure (1)..(140): unsure at all n locations
  Clone ID: PAT_MRT3847_69310C.1
caaacgcgcccacaananacananacagacattnctctttnttagangcgtcnancacacggaacctcgcaattcttcacacccaccatantaataatntcttcattgtncttntcttctttgttacnattaaaaacaca

SEQ ID NO: 108858 - DNA, 619 bp, Glycine max
  Clone ID: PAT_MRT3847_69311C.1
ggctcgagcacgcacgcagatcctttattcctataatccttccttcgctctctccaaatttcgactctttcgatcagatccgcgacacccaccccaccaaaaccttgcgcaacccatccatgacgcttggctcaggaggatccagtgtcgttgttcctaggaacttcagattgctggaggagcttgaacgtggtgaaaaaggaattggagatggcacagttagctatggaatggatgatggtgatgacatttacatgcgctcttggactggcacgattattggcccccataatactgtacatgaaggaagaatttatcaactgaagctgttttgtgataaagactacccagaaaagccccctagtgttcggtttcattcacggatcaacatgacttgtgttaatcatgaaactggagtggtatcatttataattttccacatgcttttgttttataaatagttcttgataagtgcatgctaggacatataaactgtgctaataacagtgttttccattttaattttacaatggtgatgattcgagatgtctgttattagagatctaatcaagtctgattcggtttttgggagggaatctagatatattctttctactta

SEQ ID NO: 108859 - DNA, 1261 bp, Glycine max
  Clone ID: PAT_MRT3847_69312C.1
ccgacattaatttttgtacacacacacagattcccgggtgtcgatatttcggctcgagtcccacacgtcctatttcccacacttcttctttcatcattcatcgcctttcaccacgcacgcagatcctttattcctataatccttccttcgctctctccaactttcgactctttcgatcagtttccgcgacaacccaccccaccaaaaccttgccgcaacccatccatgacgcttggctcaggaggatgccaggtgtcgttgttcctaggaacttcagattgctggaggagcttgaatcgtggtgaaaaaggaattggagatggcacagttagctatggaatggatgatggtgatgacatttacatgcgctcttggactggcacgattattggcccccataatactgtacatgaaggaagaatttatcaatctgaagctgttttgtgataaagactacccagaaaagccccctagtgttcggtttcattcacggatcaacatgacttgtgttaatcatgaaactggagtggttgaaccaaagaaatttggtcttcttgcaaattggcaaagagagtacaccatggaaggacatactgacccagctgaagaaggaaatggccgctcctcataaccggaagcttgtccaacctccagaaggtacctacttttagcacccaagatggtatagatgttggatcgaattgcatatttgctgtatgcaatatatagtgtgtaatgctttgtggatccatccttctgaattctagaacatataggggaatgccccgaaaagcttcatgtttctatctccatggcttcagagttgttttgttgtctttgttaactgtgttaaagggactgtttgattaaaatagtgtgtgtcaaatatttcgaaaactcttttaagtagtactttcccttctaattacaaaggtgctttcaattttagtttcgcttattaatgcattgcattcttgctgtcttgaaagtaagctgaagccaaagtgaaaagtggtagtggacaactagaaagaaaagggtagagagagaaacttggggtatacgcggagtttgcttacgcgtgcgccaggggcctctgcaaccgccctctcaagtgctacaagcatttggaggccagctctttcaagtggtagtttcatgtgaatgtgtgcttttgaatatggtttggtcactctaatagtggattataaaaaatttaaaaaaaaaaggctcgcagaaaaatgaaggcccttgtttcttt

SEQ ID NO: 108860 - DNA, 708 bp, Glycine max
  unsure (1)..(708): unsure at all n locations
  Clone ID: PAT_MRT3847_69313C.1
aaaaaaaatgggaacaaacataaataaaaaaaatgcgttaaatattactacatgaacgataactttagtagtcctatatacagccttgatgaatcatgacatatacgcccatttcttcagtaggggtttgacgtagaatttgatatccgaaatgcattcttgagaccagttatgaacttactatggcgaaaaaacttggtcatttttggggtcttgctatcatgacgacatgatgatcccacagacaaattacacatccccccggccacttccttatttttcctccttacgttgtcaagcccaaaacccgaagacgaaacagaccctcttcctcccctctgtattttactgctctctgcatctgctggatcgaaatggaaactcgcggaacgctctgagttcaacacattattattccttatcttctcaccctcggcttggtgatgttcatgaaggatcttcttcattccccttagctctttctcgaggctttgaatacgagagtaggtggaatccatggtctctttgatctgtgtcgtttggcgatcagccgtgtcacgctgcagaatttctcttagcgtcgttcgttccagttgttgttgtgcaccggtggtggccgncgcagtgacggagcggcgagtgttgagatgctccatcagtatcgcttgcactatgaatctcagcggcatttgtgggttttgaacacag

SEQ ID NO: 108861 - DNA, 459 bp, Glycine max
  unsure (1)..(459): unsure at all n locations
  Clone ID: PAT_MRT3847_69314C.1
aattcggctcgagcgaagcacgggttgaatcagctccatcttgtgacacttctcatgtttatgattatgagaaaattcagtccgttttattggcttaataactaattatctgtgtgacaagatttatagacttgaatgaaacaggttgaaccaaagaaatttggtcttcttgcaaattggcaaagagagtacaccatggaggacatactgacccagctgaagaaggaaatggccgctcctcataaccggaagcttgtccaacctccagaaggtacctacttttagcacccaagatggtatagatgttggatcgaattgcatatttgctgtatgcaatatatagtgtgtaatgctttgtggatccatccttctgaattctagaacatataggggaatgccccgaaaagcttcatgtttctatctccatggcttcagagntgntttgttggctttggtaac

SEQ ID NO: 108862 - DNA, 1183 bp, Glycine max
  Clone ID: PAT_MRT3847_69315C.1
gtcgtctacgcgtccgcccacgcgtcctttcatcattcatcgctttccaccaggcacgcagattctctccttccttctctctatccaaattttgattctttcgatcaaacccgcaacacccacctcaccaaaaccctacgcaacccatccatgacgcttggcttaggaggatccagtgtcgtggttcctaggaacttcagattgctggaggagcttgaacgtggagaaaaaggaattggagatggcacagttagctatggaatggatgatggtgatgacatttacatgcgctcttggactggcaccattattggcccccataatactgtacatgaaggaagaatttatcaattgaagctgttttgtgataaagactacccagaaaagcccccaagtgttcggtttcattcacgagtcaacatgacttgtgttaatcatgaaactggagtggtatcatttataatttttcacatgctttcattttataaatatctttgtgcagtgcatgctgggacatataaaatgtgctaataacagtgtttttcctctttaattttacaattggcgataacttgagatgcctgttatttctaatcaagttcaatgtggatttttgggaaggaaataattggatatattttattcatactttattcgaaagcaagagtcgactcagcttcatatcgtgacacttctcatatttatgataatgtgaaatccacagtccattttgcaaacttaaagactgtttatctgcgaagcaagatttatagacttgtaaatgaaacaggttgaaccaaagaaatttggtcttcttgcaaattggcaaagagagtacaccatggaggacatactgacccagctgaagaaggaaatggctgctcctcataaccggaagcttgtccagcctccggaaggtacctacttttagcatccaacaagatggtatagatgtcggatcgtattgcatatgctgcatgcaatatatagtgtgtaatgctttgtagatccttccttctgaattcaagaacataggggaatgccccgaaaagcttcatatttccatctccatggcttcagagttgttttgttgtctttgtcaacggtgctgaaggggactgtttgattgaaatattgtgtgtgtcaaaaatttcgaaagcaactctttcaagtaggtattttc

SEQ ID NO: 108863 - DNA, 145 bp, Glycine max
  unsure (1)..(145): unsure at all n locations
  Clone ID: PAT_MRT3847_69316C.1
gatccatcatctcccgcaccgacggcngctngggcctcgccggcangaaggcgcgcnnnggcggctgngtnaagacnggacgcaaagccgacaaggacgctttcgcgttccttgaaatcaacganggaagtgcnccggcanctct

SEQ ID NO: 108864 - DNA, 274 bp, Glycine max
  Clone ID: PAT_MRT3847_69317C.1
taatgggattctataccacaatgaacccagtgcaaaaattggactatgggcaacaattcacacatatttctaaaacactatcttacaaaccccttcattctacatataccctctctattttgtcacacttattaaatacacttcccccatatacacatcttactgtctaccaaaaccccttagattcaaaccaaaactactttcttgcatatcaacctttaccatcttgctcacataatgaaccctcacaacccaatctccgttcctctcacaa

SEQ ID NO: 108865 - DNA, 296 bp, Glycine max
  Clone ID: PAT_MRT3847_69318C.1
attctgaggattagattagttacatatcaattcttaatttcaccaagagtaccacatatttatccatgtgccaataagtagctacaaaaccaagtcctccaagtgatgaaggtctggtaagtaacgttaatatacaacttcagataggaattaatatgcatagattttacacaatcattaggactgaagagcactgtttacaatgaatttctttataaaattgaagtgccttgaaataaactaaaaatcaggatttttttttcttcctttaatttcttttgttttttttggggggg

SEQ ID NO: 108866 - DNA, 436 bp, Glycine max
  unsure (1)..(436): unsure at all n locations
  Clone ID: PAT_MRT3847_69319C.1
ctcacttgcccctcctagaccacctacaccaaacccttttctactcnatcttcaccaccaccaccaccattgatttgtgaaaccatgctacgtaggacttctccaccacctcctgctccaaagaagaatccatactactatcactcccaacctactacgcacccttaccctcaccctcaccctcacccttaccctcaccctataccctaaccctcatgctcaccctcacccacatgcagacgcttacactgcctacgtttacccgtccccacacatctcctcctaagaagccatacaagtaccaatctccgccacctactgcccatcactaccctcaccctgacacgccgttcgcccattactctcctacaccatcttctactaggccatacaagtacccatcacctccaccaccattacaccctgcttacacttg

SEQ ID NO: 108867 - DNA, 1722 bp, Glycine max
  Clone ID: PAT_MRT3847_6931C.1
ccacgcgtccgaaacaacacaagttccatgctttcatcgcagttagagactgatgcaacattattacgaactatagttgttgatcgttcaacaattctgttacagaatattggtttggttgttgcttcatttattgttgccttcatcttgaactggagaataacactggttgtcatagccacatatcctttgatcattagtggtcatatcagtgagaaactttttatgaaaggctatggtggcaacttgagcaaagcatatctaaaagccaacatgctggctggggaggctgtgagcaatatacgcactgttgccgcattttgttctgaagaaaaggtccttgacctttatgctaatgagctcgttgatccctccaaacgctcacttcaccttcaacaacagcatcaattatagcaaaatggaagaacgtaccagatgacgaggccaaattgctggcatattctatggcatttcccagttctttattttctcatcttatggccttgccttgtggtatggatctgttttaatggaaaaggagcttgctagctttaaatcaattatgaaggcattttttgttttgatagtaacagcactggccatgggggagacattggccctggccccagaccttttgaaagggaatcaaatggttgcatcagtttttgaagtgatggatagaaagtcaggaatatcatgtgaggttggagaagagttgaagacagtggatggaacaatcgagctcaaaagaatcaatttcagctacccttcaaggccagatgtaattattttcaaggatttcaatctaagagttcctgcaggcaagagtgttgccttagtggggcaaagtggttctggtaaaagctcggtgatctcccttatactcagattttatgatccaacatccggaagggtgttaattgatggaaaagacatcacaagacttaatctgaaatctcttaggagacacattggtcttgtgcaacaagaaccagctctttttgcaacatcaatttatgaaaacatactttatggaaaagaaggtgcctctgattcagaagtgattgaagcagctaagcttgccaatgctcataacttcatcagtggtcttcctgagggttactccaccaaagtaggtgaaagaggagtgcaactatctggtggccaaagacaaagggtagccattgcaagagcagttctaaagaaccctgaaatcttgcttctggatgaagccactagtgcacttgatgttgagtcagagcgtattgtgcaacaagcattggacagattaatgcagaacagaactacagttatggtggcacataggctatccactataagaaatgcagaccaaatctcagttttgcaagatggaaagataattgaccaagggactcattcaagtcttatagagaataaaaatggagcatactataaattagtcaaccttcaacaacagcagcatcaattatagtatattggaagaacataacaaacgaacatggattttttatactgattttgtatttttttagtttttccccccacgtttatagagaatgatgtgggttgggaagctgatgtcggatccgaataatttcatactatatatatatatatatatatatatatgtttgtaagtgctataaaaaaagtaaaatggcttcatgtatctagttcatgatcctcatttattaagcatcaaaaaaaaaaaaaaaaaac

SEQ ID NO: 108868 - DNA, 597 bp, Glycine max
  Clone ID: PAT_MRT3847_69320C.1
cctacgcgtccgcacccctctcctgagtctcataatattagttgtataagctagcaattcatttgataatttctgtatcgatcaaaatatatatagatatatttcttcgatatatatatagcaatggttgcgccttgtccaacatccatgatggtaagaaccaagaaaacaaaggccatgggagttccgacaatagacctttcaatggaaaggtccaagttgtcggaactggtggtgaaagcatgtgaggaatatggtttcttcaaggtggtgaaccacagtgtgcaaaaagaggtcattgcaagattggaagaggagggaaaggagtttttctccaaaacctcctcggagaagcgccaagctggccctgccaatccttttggctatggttgcagaaatattggccccaatggcgatatgggtcacctcgagtatctcctccttcataccaaccctctttccatatctgagagatccaaaaccatagcaaatgaccctactaagttcagttgtgccgtgaatgattacatagaagcagttaaagaactaacatgtgaggttctcgatatggtggaggagggtttgtgggtccaagac

SEQ ID NO: 108869 - DNA, 397 bp, Glycine max
  Clone ID: PAT_MRT3847_69321C.1
catattcatctggctcgagctcgagccgattcggctcgagcaagcttctaacgagggaagacagacgtcaatgggtttggtgtacgagcaatttatatgggcatttcttgttgggtgcacgttcattagtgtattatctcatcctgatgaagcagctccaaagtacacatttttaaaagaagctgcatctgctccagaaatcttaacttatgactacatagtgattggtggaggaacatgtgggtgtccactagcagcaactctctcacaaggggcaggagttttagtccttgaaagggggggctctccttacacaaaccctgagcgaatcaacataaagaactttgcgaattccctcgttgacataagcccttcatcattttcccagccattcata

SEQ ID NO: 108870 - DNA, 213 bp, Glycine max
  Clone ID: PAT_MRT3847_69322C.1
ctaaacttcacttcacactctcactttaggttcaatttttagtcatattcacccctttccggataagttactatcattttaacgaccatcctacaactctctcaatggtattcacccatagaatactaacaattacaatcaccaatatgttaacctggaattctacatacttcacagctcttgaatgagacacatgaactcatactatctatt

SEQ ID NO: 108871 - DNA, 360 bp, Glycine max
  Clone ID: PAT_MRT3847_69323C.1
gagcgacaccaagtgggagccccaacgacgtcatgggcgaggccaaggccgtgtgaataggtgggctgcaatgggatggtgtgagcggtgtattacataggtaatagagtaataaagcattaagccaagatgggcaataaagcacgagttttagggcatacgcaagatgctaggtggtgagggcgtaagagtggcaggactaaggcatagcaggtgaaatagaattggttgtgattatttgcgttgaaattgatttacagtagtaggaaaccctggagcgccctacatgtacagccgtccaagtgcccattgactgccgtgccgtgatgggcgacccgggccccaagcccgtggtaaggg

SEQ ID NO: 108872 - DNA, 358 bp, Glycine max
  unsure (1)..(358): unsure at all n locations
  Clone ID: PAT_MRT3847_69324C.1
ggcncgaggcaanannggnaaaganacaannncagagaaaanaaacagngangaagaccaggggaggccnaagaagaaacgagaagagganngncccnananngannnggaggcaaananngangancaagaaacagnngcngcaagcaannnnagnaagganaaaaanncaggaacaannangggggangaagancagcaaaggcccaagaggaaacagaaaganaancannananngacnnggaggcaacacnngaagaacaagaaacaggngcngnaagcaanananangagganaaaannncaagaaaaanggacgnngaggaagaaaggcganggcnnaagaggaaacagaaa

SEQ ID NO: 108873 - DNA, 191 bp, Glycine max
  unsure (1)..(191): unsure at all n locations
  Clone ID: PAT_MRT3847_69325C.1
ttttttttttttttnnnnnnnnnnngggaacaaaaacccaacgaacaaatgggttagttttgcttccttaaaggatctttgtcacccaccggaaggaaatccttcctttaccttaaatatgtccaacctttgaaccctatggaaaaatttacccctggttttgcctaatgaattaaacttccaccaccacc

SEQ ID NO: 108874 - DNA, 364 bp, Glycine max
  Clone ID: PAT_MRT3847_69326C.1
ggtaattcagagtttctaacatttcatttcaattatacatccatagataggaagaaagaaacaagtatgaaaacacttcactctctcgcgatgttccagattccatgacattagaaaattattaaaagaaaaatcgagaatcacgacaaaacgaaaaaatttgaacaattcgaaaaaattaaggataaagttcaataaggtaacaaccgcgctatctcaaacaaaaagggggcggctctaaaggttcaagctttagttagcctgcatggcaagttatagctcttccataatgtcccccaaattcaattccatgggcgttggttttaaaacgttctgactgggaaaaacctgggggttccccaac

SEQ ID NO: 108875 - DNA, 337 bp, Glycine max
  Clone ID: PAT_MRT3847_69327C.1
acgcatccgcccactcgtccgtactgcttctaaaacaccacatagagactacacaaactctcttatctgtggccacataaacatgtatccttccttcccctttttctcattaaaatcacatcttactgaatattacatgtcttcaccattattttatcaacaggattgtatactatctttacaaaaccatgctcctatgttgcataaacatcttcaatctttctgcctaaactttcatatactggtcacaattgcctcacttaaaaactttcatctaatcgcttcttcataaaactgaccttctataccataacaccattacatcatcctccaattt

SEQ ID NO: 108876 - DNA, 222 bp, Glycine max
  Clone ID: PAT_MRT3847_69328C.1
gcccatcaactatgcaagtgaccattaaaaggcgtgggggggggtctgataacactaatgggacatggctaacaaagaataactcgctttgaaatgatcctagccaaagaactattagactattattcacggcacctgctggggtgcctcacaaccttattgtttgaaaacctaacgtatgtcaacccttcactggtgcactacgaactttttggttgaacc

SEQ ID NO: 108877 - DNA, 254 bp, Glycine max
  Clone ID: PAT_MRT3847_69329C.1
caacaaacaacacaaatctctaactaatattcatcctttatttttcttcttattcttaactttaccacttatatatatgtaactacttttattaatatgtgagctttttttggaaacttatccaatttacattatatccaaagacgaacgtaaaaaactactacaacgacatctgtacattatctcaaaacttttctctctctatatctaaaaccatatccttcttcaatcatctaccataaacatttctatac

SEQ ID NO: 108878 - DNA, 286 bp, Glycine max
  Clone ID: PAT_MRT3847_6932C.1
taagcttataattgcttcgcttcttgcggctcttctccttcttcatttcactgatgctgatcaatccgaacatgcacaaacactcgggtctcttcttcaccacatacattgtaaccgaccatgtgctgcaaggtgccgattatcatctcggccacgcctctgccaaagaacttgtgaaacttgttgtagacactgcaactgaatgccacctggaactgctggaaaccaaaaactgcgcccctgctatgcaagtttgactactcaaggcggcaaaagcaagagacct

SEQ ID NO: 108879 - DNA, 298 bp, Glycine max
  Clone ID: PAT_MRT3847_69330C.1
gcgacgaagctcggaaacggctcggtgcaaaaaatccctcaaaccacaaggcaaaacacagggggggcacctgaaggcggaagcggcgggccccccccgggagagcctgagaagaagaaaagagggagggcacggacgcacgggcccgacggaaccgaaggcaagaagctcccgcccacggctgccactggaaataccaccccgggatcgggcacgaactcggagaaacgacccagggggcgcccaccaggaagaggaaggaagcaacagacagccaccctaggcgaatggaggaaca

SEQ ID NO: 108880 - DNA, 184 bp, Glycine max
  Clone ID: PAT_MRT3847_69331C.1
gatcatgcccgagaagaaccgtaatgagatctgcagatacctcttccaagagggagtctgctttgcaaagaatgacttcaatctggctaatcacccagagattgatgtgccgaatctgcatgtgataaagctgatgcagagcttcaaatccagagagtatgcgagggagacattggcatggatc

SEQ ID NO: 108881 - DNA, 407 bp, Glycine max
  Clone ID: PAT_MRT3847_69332C.1
ggtcccagttttttttttttttttttcttctcgttagcttttgggctgtgtcgcttcccaaactaccctacgtttgggaactcgtccgactggctcacttaccgccacttgcaccccgggtcgtgcctgcttttcacagcaaacgcaccattcctcccatcgttccacaagaagctccgccagcccatcaacgattcgactcactctgcacgactccttgccgacaagcagcgcttcgttcgtgctcaccacgactcaagttcggttgtcgaaaagcctgttttttccccgcaacctcggaccatactccataccaccgcaaccagctccgaacgacgacgaaagaagaagcaagctcgaactggggcatcacgaagccgaccaccagctccgttcgagctgctttt

SEQ ID NO: 108882 - DNA, 400 bp, Glycine max
  Clone ID: PAT_MRT3847_69333C.1
ggttaaaaaaacttcaagccacacagcttttgattccacccggcgaaacataaaagaggcaaccccctttttaatgttgtttggcaaatgaagaatacgagttggcctgcaaacgaaaaaaaacaccctggttacgggaaaaattattctttggacgaaactttcaaatggctggggggagggcaaaccgggacggggatttaaaaagaatttttgcgggggccggaacaaaaaatatggcgccaacttttgggaccgttggatacaaatatcccactggttgctgatgctaaagggaaacattgccttgttttggggatgcgaccccccttaggcggccaagctggggaggattttatccggcataactcggcaggttggttgtccttgcagaattgtt

SEQ ID NO: 108883 - DNA, 228 bp, Glycine max
  Clone ID: PAT_MRT3847_69334C.1
acaaactccaatcgctcgagactcacctgtcccaaaaagttgtactaccttttaatttttttgctggaaaccaccgcgcgccttgttttttttagcggcatgagaattcatatctttttatattacataactcatattttcaattaacctatgattacatctttgcctccaataaaatattttttatttctatgccaatttaagatctcattctccattttaacatta

SEQ ID NO: 108884 - DNA, 242 bp, Glycine max
  Clone ID: PAT_MRT3847_69335C.1
gtggagttactaatgtgtccaggattggggaaccacagctgttataaaatgaccagtatccaatgactgacgcacagcttgccgtctacagatctgctatcgctaagcacctaaaagaatgggagcaacacttgaagcggctagctattattaaagaaactactaaaaagacccaccactatttagacttcttacaagaatgcatggttactaccaactttggcccatataatatcaaaata

SEQ ID NO: 108885 - DNA, 362 bp, Glycine max
  unsure (1)..(362): unsure at all n locations
  Clone ID: PAT_MRT3847_69336C.1
ccggggaaaaaaccacagcgancaanggcgacgagcaaggccgngaaagcccgccagancnncgacagccgnggaaanccaaccgncgaagnngacgnnnnncncagcganggaagcnnccacagagccgccgngcccagcggngccccaacagggggggangangcnnnggaannaaggganggaggcncanaccaccccgggaaaggngnncncaaggcngnggagaacgccaanncaannacagcacccgcncngcnnggcaaggacccaacgaagcagaccgaaanngacaanngnaggggacagcagcgnganggaaccggnaangaanggggggggggcaagcagaagcccggagc

SEQ ID NO: 108886 - DNA, 205 bp, Glycine max
  Clone ID: PAT_MRT3847_69337C.1
acaacacacaagaaaaataacaaaaagatcaaacgccatgcggaaaatccgaaaaatgggagtgtacacacagaattatacttgaagacactctgtgtaagggcttccaactacaaaaatctcttccaaatccactacccctaagcaccaccccataaggaattgttcattcccaacaggcacaccaatgcagttgtcccaaaca

SEQ ID NO: 108887 - DNA, 1080 bp, Glycine max
  Clone ID: PAT_MRT3847_69338C.1
ccacgcgtccgcactcctgagctagctagggtttccactttccccatttcctctctcccacgtcttcgtctttctagaaaagcaaaaaacaattcacactttcacagtgccaaagattctcttctgccaatttcacttcacacatccatccatccatccatccatgtcttgaaacgatgcttcgcagatcaagcagagtcgattcatattcgcgtaaccccatgcacggagatcggtgatccggcggagcagatcgttgcacgagattcatcacgtgagctagaaagcgaaactagaagtagaagaaggtacttggtagttggttcttttcaaggtttgattttggatgtggaaataatgtcctgcaaggatggtagcagaaacggaatcggaatggataacgggaagtatgtccgttacacgcctgagcaggttgaagccctagaaaggctctatcacgattgccccaaacctagttccattcgccgccagcagctcattcgcgagtgccctattctctccaacattgagcccaaacaaatcaaggtttggttccagaacagaagatgtagagagaagcagaggaaggaagtcgtcacggctgcgagaagacgacagaaggggggaatcgttgctatttctcacagttgcactggagtagcagcaagagcttgtggtttagtgggactagaacccactagggttgcagaaatcctcaaagatcggcctttgtggtttcaggattgccgagctgttgatgttctcaatgtgctgcccacagcaaatggtggaaccattgagctgctttatatgcagctatatgcaccaaccacattggctcctgctcgagacttctggttgttgcgctacacttctgttttagaagatggcagcttagtgatctgtgagaggtcacttaaaaatactcaaaatggtccaagcatgcctcctgtgcagcattttgttagagcagagatgctgcctagtgggtacctgatcagaccatgtgaaggaggcggttccatcatccacattgttgatcatatgaatttagagccatggagtgtgccagaagtgcta

SEQ ID NO: 108888 - DNA, 806 bp, Glycine max
  Clone ID: PAT_MRT3847_69339C.1
gcgagctataatacttattccttaagtatgtacaataattttacccctataaaagaaaaagggttggtctaagaaggggatagtagcaaagtgttacaattcaaaagtcacatgtaaacaggaacaaagaggtgttccaagaaactacaaaactagtactcaatcccatctttttgcaatcccagtttcactgatctctcggagaggatggattatccgtacattctaggagggatcatggcttgtagttttgcatttttgtatgttgtgtacagttttggagcaaaggtcacagattcaagttcaatacatgtaaagagtaatgagtgtgcaaagacatcatcagaggatggaatatgctcttacatgaggatgcaggaagtgctgacatcattattgtgggtgctggggttgctggtgcagctcttgcttacactcttggaaaggatggacggcgagtgcatgtaattgaaagggatttaagtgaacctgacaggatcgtgggtgaattgctacaacctgggggctatctgaggttaattgagttgggtcttgaggattgtgtggatgaaattgattcacagcaagtctttggctatgctctgtatatggatggcaaaaataccaagctgtcttatcctttggaaaaattcagctctgatatttctgggagaagctttcacaatggccgtttcatacagagaatgcgagaaaaggcttcgtctcttccaaatgtaaaattagaacaaggaactgtcacatctctacttgaagagaaaggaaccatcactggggtgcactacaaa

SEQ ID NO: 108889 - DNA, 388 bp, Glycine max
  Clone ID: PAT_MRT3847_6933C.1
cctaaatatagtatgaggataagctagggagtcagggcaagggatttacccattccgtcccattatcatgtctagttatacttgtcaaataaaaaaaagataaagatcaaataaaaaaaaaaaaaaaaaaaaaaaaaaaaaaaaaaaaaaaaaaaaaaaaaaaaaaaaaaaaaaaaaaaatgggcgcccgccacctaaaaaaaatataaaacccagaaagtagtccccgaccagttcctgcatgcgaacaatattttatttaacggggtttttttaaagcttgaccttttcctggtaaaaattgtgccctggataaaattgaaaacagtaaacaattcaccacataaaaaaacccgtaaccataaaatttaaaccccgggcttccaaa

SEQ ID NO: 108890 - DNA, 303 bp, Glycine max
  Clone ID: PAT_MRT3847_69340C.1
ggtattggtaaatacatatatactgagagtctattagcatctattatcatttcttgaactctaacgtgggatatgaggaggaatctgttagatttctggccaaagccatatgtgaagaggggcatgatagcaattgctgcagagggtgttaaatatgagctctatgaagatgactggaagaacaagagtactttcattctacaaatgaaccgacctcacaagaagattccggatctcattcacatcggccaactcataagagaattattaaacgctgatcaaatcatacaagaggattggaat

SEQ ID NO: 108891 - DNA, 397 bp, Glycine max
  Clone ID: PAT_MRT3847_69341C.1
atctaaaacccttttccggtacccgttttgtgacccgcccgcggtgggcttaaaatctcagaatccacaattacaacttatccgcgaacaaaaccaccactaggggggaatcttgatggacacagacttccaagaagttggtgaaaaaaaaaaaatggtccccacaaaaaaatacaacggggggataacgggcgtatccttcaaaaaaaaaaggtaaaaaatttttaggaaaacgtgcgaccctaaaaacctgttccagccccggctggggggtacctccgcagggggggccccattaaaaactcccgggaaccgggtccatctgggaataaagcggggaaaaaaacaacattgggggggaagcctacaaaacgggcgcccacaaaaacccccgccg

SEQ ID NO: 108892 - DNA, 359 bp, Glycine max
  Clone ID: PAT_MRT3847_69343C.1
acggctgcacgacgacgacagaggggctcttctgattaccttgatgacaattaacgattatgagggtcccaaaactgattattcgcctgtatgcggaaccatggatacaacgcttattaaaatgagaaatttggcctccccgtcttttatgctctcacaacaacatgtttttttattcaactttcactgaaatgtgactgcaagtcgctggttagaacggtcaagcaacctgagcttctgaattttgactaccgagtttattaaatcagaaagtgattgctctacatgtctggccagggtgccgcagatgatgagctcacttctgcgtcttacgattgagatctgtcggatgattgact

SEQ ID NO: 108893 - DNA, 803 bp, Glycine max
  Clone ID: PAT_MRT3847_69344C.1
gagagctacgccatgcccacaaaacaatggcagaagcatttcccaaccaagcacattacatgctgaccgatgattcgcagggtgttgaatcacacactccaggagtgccttgtccaaattattccgagtctgagcatgcagagaaagcagatagtgaagttcaaaccttgaggaaagccctggccaaaatacagtctgacaaggatgctatctttcttcagtatcagaagagtatggagaagttatccgaaatggaaagagatcttaataaggcacaaaaagatgctggaggccttgatgaaagagcaagtaaagcagaaattgaaactagagtgttgcaagaagcactggcacatctaaaatctgacaaggaagctagtcaagttcagtacaaccagtgcctagaaagtatagctaaactggagactctgttatctcttgcccagctggatgtcaaggaatttgatgagagagcttctaaggctgaaattgaagccaaaaatctaaagcaagaactaggccagttggaagctcagaaggatgctggtcttcttagatacaagcagtgtgttgaaaagatttcagttttggaggccaagataacccttgctgaggagaattccaggatgttaaatgagcaacttgaaagagcagaactggaagttaaagcgcttagaaaagatcttgctgaactgaatgaagagaaagaatctttagctgtcctttaccatcaatgcttggagaagatatctaaaatggagaatgaaattttgcttgcccaagaaaattctgaaaaactaaat

SEQ ID NO: 108894 - DNA, 718 bp, Glycine max
  Clone ID: PAT_MRT3847_69345C.1
cggcttcgagcttcgagccgcacagttattcttgtgaattagcgagaattgaagcgagtgatggctgcgaaggaagagaatcgaatatttgttggaggtttatcctgggaagttacggagcgtcaactcgagcatgcttttgctcgttacggcaaaattctcgaatccagttgtagaagcatggggcaacagacgtgccatcttatatacttgacaatgcatttgaatgtagctgaattgctcaagaaatgaaagcattgatctccataatggaatgctgtgaatgcctgtcttgcatttctgtctttcagaattatggaaaattattttgctggcagagtttttgttatgaagatatataccaatgtgaaactcatcataaaattggggttacgacaaaatgatccggtgactgttgaagtgaaagccctacagttggatttttgtgattattcatctgtggctacatatcgttgtaatgttaattcttctgggtcggaaaataatagttcctaatataagtgcttttttttcaaataagtcagatgctaagagtatgtttgaggaattagattgttaaaggtcattcatgaagtcatgaaccagtatggaacatgctgaaattctagctcagaatgtggaagtaattgttgtaagagatgtttgttgtcaaatatggacttggaattcctctgaatggcttagctatatgaaaacc

SEQ ID NO: 108895 - DNA, 460 bp, Glycine max
  Clone ID: PAT_MRT3847_69346C.1
gttgaagcattagaaggagaatcacatgccattgaagtgtgggcaaatagaaactctggaatggtttctgctaatgctgaggatgcttgcatttataaacaagatgtggagagtgccatttgtcaaacccagagttacaaagaagggaaaaactcaacttgtgcaggaactaatgataagtcaaattcaactatacttagtagttcttacagccacatttcagcagaattagtccactcagagtttcaccatgaaacttttagtgcaccatatggcactaaagactgtcataaagacaatttgaatgaaaaagatttggtaatggacaataaagttatggtggagaaaggaggttctgtggatttgaatattgatgttatgtctggtgaacctgaaaattattttctgcatgctgctgattaccatcataataagggtgttccatatgtggaaaaagtca

SEQ ID NO: 108896 - DNA, 738 bp, Glycine max
  Clone ID: PAT_MRT3847_69347C.1
aaaaccatgacaacaatagaagagaatggcatggaatattttagaaagtatatcatagctcaagtgctaagacatttcttattttctaagccttttagtttctaccctttgattaatagtataaatttttgagatccatgttcatctttgctcccatattatgcaacatagcctcctccgctcctcaaaacactttaaaagtcatgtgctatcccttgataattgttcctttgttcttccctaaaaccctttggtttctctttactttggccatactatcctcggattgctcaataatttttttttttgcaggcatgtttggttttagagttggctgagactgaattagagtcttgtccacataattctgaatttaggctccagtaataactgcctaaggagataaaagaatatcttcacctatgttcagtgaatcacctttgctgcattacaaagcaaatcatgcaaattttggctcaaaatttgcattgaagaaccaagaaacaattatcaaaggacagaacatgttttttaaagtgtttttgagaagtgcagtctatgtttatgggagcaaagatgaacatagataactctggcatagtatccaatccctttacactttacagatgaagaatttgctaattgctatcattttgaaggattttagaagatgaaggataggagcagggagatggtatagtaaaagagcaaaatgaagaatgaaggagttctattttt

SEQ ID NO: 108897 - DNA, 253 bp, Glycine max
  Clone ID: PAT_MRT3847_69348C.1
gccattgactctcctttcctcttttaactctttctgcctcgccagtcgccggaagttgcaaaacgtctctgcctcgccggaaaatttaaaaaaaaaagataagttcgacgcttccttggaatcgcggccactgcgatgtgcaattgaaacaaagttcattctaattaaacctgccatgcaaattaattcagtcagactttggtgttctatctcattacgatttgagtcgtctaattattatttttttctttgt

SEQ ID NO: 108898 - DNA, 618 bp, Glycine max
  Clone ID: PAT_MRT3847_69349C.1
gtgacgcacccgctcgtgacagtagcactgcctcgttcatttcttcaaaccgaaattgttccttaatttgtcgattcgcttctcagttttcgcgtgcgattctcaaggaaccgaaggacaaagcgctggatcgagaatcttgattcggtttgatttttacgtttttgacttctgattcacgcgcttttcgacaagctgatacgctcttggatttttgcgggattcgatcgtatcgtatttcattgcaatcatgactcaggcggtggaggtcctgaaccggtatgggacggatctggttggggagccgagagattctgattctgagtgtttggcgggttttgagtgttttctgaacattgtgagggcattgggaatgggatcgtgtatctcagaggttggagctggtggtaattcacctcctcttcttccttattcgcctgaatccaacatggatggtggaaagagaagaatgttgaggggttcctcttcgtttgatttcaaagtgcctgggaggatgttcttgaatggttcaagcgaggttgcatccatgtattgcaagcaaggaagaaaagggatcaaccaagatgctatgcttgtttgggagaacttttggtcaaa

SEQ ID NO: 108899 - DNA, 460 bp, Glycine max
  Clone ID: PAT_MRT3847_6934C.1
tttggattgtgaaacccttgtgtcgctcccgacgaaccaccaaccacttccgccaccactctctcccaatgaatctcttttgcaaaaggtaacatctcttcttgagaaccatggccgtcgaatctatatttgaaggtgtcaactgcatcttttgtggaatcttcttgttcatggcaaatccggtgttaaaacaactagatgtggtgtcaaaactcactcgatcaagttccaaaaatgaggggggggagttggtgcttttgcggcgaatgtgcgctagggttatgatggtattacatgggtctgagttggaaacttgtcccctccatggcctccctcgccttttttttgccttttgtttgtgctttttggtggacttctctgtgctttctcttcaccctcgagtagttctgcggccccttattataaggtatgattgtctgtattctctattgctcattaa

SEQ ID NO: 108900 - DNA, 450 bp, Glycine max
  Clone ID: PAT_MRT3847_69350C.1
ccgccctttttttttttttttttttttttttttttttttttttttttttttttttttttttttttttttttaagaggaacaaagcccaccctttgattttttttaagtttctggaatgaaattccaaccgtaacaaatcacagcttcccttacttttatataaccccacattctttcaaaatgggtgggaaaaaaaaaaaatggcctctcaataaattcaaacttttggatcttagggggaaaatgattcagggcccctgaaaaattgcttgaaactgaaacccacttttccattaggccccccattggaccttaaaaacccccattagccacatgacactccgaaaaaataaacaattactggtggttgcactttggagggggttcaccattaccagcctgtgccctttcactttttttaacaggaaaagacttttttttaggcttact

SEQ ID NO: 108901 - DNA, 379 bp, Glycine max
  Clone ID: PAT_MRT3847_69351C.1
ggtctccagcctcagctggaatgaagttcaatattatatcaggaacttctatgtcttgtcctcacataactggaattgcaaccttggtcaaagctgtgcatccttcatggtctccgtctgctatcaaatctgccatcatgacaactggtattacatgagtgtttggtttcacatcttgctctgaatgtattacatgagaaattaataactatagcttctacatccaaacatgatttcttattttttgacaaatttccaaacatgttttacatatatatagaggcatatattacccaatgcagtttgtctgagattcttcttaacagacattaaattttatgtcacttattgcctagatatacatactgaacaccaccac

SEQ ID NO: 108902 - DNA, 480 bp, Glycine max
  Clone ID: PAT_MRT3847_69352C.1
ttcggctcgacaccaccgtagcagcatcgccggcgtcctctccgtctaacccgacaaaaaaaaaaacaattttaaaaatttcccaaaccgaccatctccgcaaaaaaacacgtgacgatcgttgcgatgagcctgagcacgtgacattcccattgttccgcttaaatttcatgactttttgagttcaagttcgtgggtctgctgttcgttgatttcgtggcttgttagtgcaatttcaagcacgacttgcagcttttaattgaattgaagttctggacacttgctgctttggttcttccaatccccaactgtccaaccaaccagttctgctgatggtgaagtgcggatttgggatacacttcagcatcggacagtgtcatcagcatggttacatagtgccgcacatggtattgttgctgttgctggtagttcttcccttggaaacaataaatttgtcagccagggtagggatggactgta

SEQ ID NO: 108903 - DNA, 387 bp, Glycine max
  Clone ID: PAT_MRT3847_69353C.1
aactcaggccttctttttttgttttttgggggaaaaaaattacataactggcttgagtttccaattcccaccgggatccagatttcccaagtaaaaaaccttacccggccccaaacgggtgttttttatgaccttagtgatctttggcccttagtgtccaaatggactctccaatagatccccattttggcggctttttcccagaaattaaaaccctctttcattttatttcttgccgccttgggatttaaataatcatcacccggtttcaagcttctaaaaacccccccttggttttcatctggaatcttcccggaattgcggcccgcattcctttcaaatgagccctcggcccacaagctcttgaagccggtgcctccttcactg

SEQ ID NO: 108904 - DNA, 224 bp, Glycine max
  Clone ID: PAT_MRT3847_69354C.1
gaaaaagagcagcacacgaggacaagaagcgaaaccgggaaaaagcgaacaagcgaccaacgggagctacccccgcctcggaaaagccaaaaaaacatgggcgccaccggaggaacagagaggccccgaacaaaggaggaagagcaaagcctgaagacagaagccgacagcactggacccgcaaccactaggaaaccccgaacgcaggaacccagcacgcaaca

SEQ ID NO: 108905 - DNA, 473 bp, Glycine max
  Clone ID: PAT_MRT3847_69355C.1
gcctcgagccgaatcggctcgagattgcacatatatcagtactcattctcttccctctcctctcactacttgtcatcaaaggctaaaactcacatccactaccgtgcactgttattcataaaaaagattatatttacacaacaatatataatggccagatttctacacatgcttataatgctctctagccttgctctaattatctcagttttgccattggcctccgcatctttgaaggtggacttctataaaactacgtgcccatctgcagaggcaatagtgaaaagagccgtaaacaaagccgtttctctcaacccgggcatcgctgctggtttgataagaatgcattttcatgattgttttgtgaggggttgtgatggttctgtgctattagaatccacccaaggcaacccatcagagagagagcaccctgccaacaacccaagtttacgtggctttgaagttatcgatga

SEQ ID NO: 108906 - DNA, 153 bp, Glycine max
  Clone ID: PAT_MRT3847_69356C.1
cactgttacttgagcaaccaatcgtatctgctccaacgatccctttcgggcgggcactagctacttctgggaggtggattccagctcacccacgggcccgttgtcaaggtgaatgtgctctgtgcttgaaatcattactggactattcgttat

SEQ ID NO: 108907 - DNA, 446 bp, Glycine max
  Clone ID: PAT_MRT3847_69357C.1
ctttctccctactcgggacactgttcaacatgttaatgattctaccacgacagtttagtgaacaaaaagttttttcaaatgattttactgaaaatgaaaaacccctcagttattctccacaatcaattcagggtgggcatcattcttcacatgcccctcatgttgggagatcatcagctggacgtccttctcatgctttggtaacttttggatttgggggaaaactcatcataatgaaagatcctaatcttttgagctcatcatacggaagccaggattctgtacaaggttctgtttctgtgttgaacttgattgaagttgtcacgggaaatatggattctttgagcatcagacataacaccagtaactatttccatgctctgagccagcaatcattcccaggtccgttggttggccggagtgttggaagtaaggaactgtacaaa

SEQ ID NO: 108908 - DNA, 302 bp, Glycine max
  Clone ID: PAT_MRT3847_69358C.1
gtcaaacatacggcctcacattcgtttacttataatatgatcacacttaacaaacagggagggctgctactgacaccatgcgggactcatgtctacacgacaacatatgttctgaatatcaagtgcttccatggctcatacccttatatatgctcctctcatatctttctatttcctcttacttctggatatccaccatctaaaggtgccattgacatgataattctcaataagtctttcatagccgattattacttcctctaattgatgtcctcatgagctaaaaactctatcctcaattt

SEQ ID NO: 108909 - DNA, 2202 bp, Glycine max
  Clone ID: PAT_MRT3847_69359C.1
gacaccatgtccgggaaagtttcgtgggttttgtgtacaccccttcttcggtttcacaaatcccatcttcgttgtttcaattttcctctcgaccacactttcctttttgcaagtaagtagcaccaagaggcaggaactagagagtaacaacaaattcaatgtcaaactcaaacatcacaagttgtgatagttggagcttcactacagagaataataataatggagaagatgcagcagcaactgttaaacagcaattggagatgcttggccagctttatagtccaaattcaaacacttcaaccacaacaaataatagcaatggtggctcaaacgcagattcacaaccacctgctaagaagaaaagaaacctaccaggaaatccagatccaagtgctgaagtcatagcactctcaccaaacaccctggtggccacaaacaggttcatatgtgaaatatgcaacaaagggtttcaaagggaccaaaaccttcaattgcaccgtcgaggccataacctaccgtggaagctgaaactgagaaccaccactgaagttcgaaaacgggtttatgtttgtcctgaaccctcatgtgtgcatcacaacccagctcgtgcactaggtgatctcactggcattaaaaagcactttagcagaaagcacggcgacaagaagtggaaatgtgagaagtgctcaaagaaatatgctgttcagtctgattggaaagcccattcgaaaatatgtggaacaaaggaatacaaatgtgactgtggcaccatcttttctagaagagatagtttcatcacccacagagctttctgcgatgcactgagtgaggagaacaacaagttcaacgaaggacaattgccaaagatgcatggttcaaacttgcaaccaccaacaataatcccaaacctagttgcatcattaccaatcaatggcgccaataatcacaagcacccactatcactccctcacgacctcatgacaacaattcccgcaaaaccctttaacaacaacatggctgcagcattcacgagaagcctttcatccacctctcaactaagctcaaaatcaccaaacattaacatgttcgaggaaaatggtctcctttcacctcacatgtccgccacagcattgctccaaaaagctgcagaaatgggtgcaacagtgaatagtaacagcaacaacaacagcatgatgatgagtggagaaaaaagctttattaatgtcacaagcatggcaccaccatcatatgggatcatgaaccccaacatgcacaacggtcaacaagacttgtctcagtataatttcattgccaatggggtggtggatggtggtagcaatggcatgggaatgggtggtttggatatgtttaatgctatattggatcaaagtaaggccttgtcgaagatcatagagcagaacaacagaaacagtacttataatggtgttttgcatgcaatgaataatggtaagtcaagtgaccccattgaaggtggtggaactaaagggagtgaagctgtgaatcatgtgatgactttggacttgttggggataggaggtggtggtggagatggtaatttctatggtggtgatcaacagtcagaaatagctgctggagatggaatatggggaaattggtcaaataagaatgcagggcttgaatcattttcagcaacaaacagcaccatatgaatgatactgaccttgctggggggagggaagaataatttgcatgtctcttctattatggaaattaaaggtggaattttcagcttagtttggttctatgaactaattaattccttttcgaccatatcaaactagtagtacactgcagaaattaatcgtctacacattaacactgattggttttcctgtgacaaatcagtgtgtggacactttaatttggtcccttaaattagtgttcatcagtatctttaaatggcgaataatcagaagaattgccctgcacatttagttagttcaatgtgcacacttcgacttcacagcatttcaatttcagtcattccattttcatatcttattaataagaatggaatatggcaatatgctgaaaatttgtagcaacgttaatttgtgtattaagttggccatttatgataagacgatcgaaatggtccagatttagttaagttctatagaataccatccaccagtcaccacgtttcaaacttgataaaaa

SEQ ID NO: 108910 - DNA, 391 bp, Glycine max
  Clone ID: PAT_MRT3847_6935C.1
ctttgaagtagccattgctttgcttcaaagttgaaaacccagaatgtggttgtatgtctgttcctaaccacaacggggctgctcaaaaccatcaccaccaagattgaagaattcaaccgccacgccgccaacattcggggctccggcggtggttgccgaccttggcgcgatccaagtgaccgcgtcttgccgctgcttggttcgcaaccctacgcctatctggtttttgactttcttcgccttcaaattttaaaaacgatggccagaatcgagaaatgtcataccgcataacttcatagagctaattgctttctacacagtgctgtcttctgagctctgacttcaattattaaaatgtaagtgcaagaatccgtaatggaaaagacgaaca

SEQ ID NO: 108911 - DNA, 430 bp, Glycine max
  Clone ID: PAT_MRT3847_69360C.1
tcctgggctatcgaggaagaagcattcagcagaaggatattcatagggggtttagcgagagaaatgactattggtttggcatttggataggagggaaccacacgtatattggtttaaggtggagtttcttctgtagtggcaacatatgaagggttggaaacttccattagctggaaatcgaaaatgacaaagaaaatgtttccaggccttgaaggttttcccaatcatactgaaaatgctactgatgtacaggatgggatggataggctatcaaaattacttgacggcataagttcctatatctataaactatagactgcttgatgatcaaagagagggagtgaggttttgacatggttttctcaacaacgatcatggaggcatacttggagatgacattttaattgtagagagggagcaaccatacctc

SEQ ID NO: 108912 - DNA, 484 bp, Glycine max
  Clone ID: PAT_MRT3847_69361C.1
ccggagcccttaaaccgggcatataacattcaaaaactaagctgggccacagggaaaaatgggtaatctcccccaaggggggggtttttttctttttttcaggggacaagaggaaaatttttcttctttttttttggggccccccttctgggggggttcaacagggattttttcatttaaaactagatcatgggggacatcagccccccggggggcagggtttttctcctccaggggggcgggatcattgggagccgcctccttaggggcaatattagctttaaaaagaacactggcggcctaaggagcctcaataccagcagccccggggcaaaagctatggggtatgggctgcttgcaccacttatagccccatgggggatccttccaccaggggccccaaacaggggggggggtgaaaaggaaaacatttttttaatacttgctccgggggggagctgcttccgggcccttaataatttta

SEQ ID NO: 108913 - DNA, 968 bp, Glycine max
  unsure (1)..(968): unsure at all n locations
  Clone ID: PAT_MRT3847_69362C.1
gttgaatttgttgaaganactggaaaaaaangngcaagcagtatcttctccacatcatttcaagtagaatcaccaaattcttcgatgcctcgggaacagacccctcaatctctcactgctgtgacaagatgctctggaggggagttccttgaaaaccatgtcaaaccaacagagaaaagctcagcctttggcagtatctggtcaaggtgtaagcctgctagtgctcccctagttcaagccagaaagagtagatttatgagcacagctaaggttggcactgaagttaaaaggagtaatgagaagaatgttgtcataaataaattaatgccgaaggatctttctgctgtttttgatgaggagaaagaagcattcattctaaataaggaaaatttaagcccaaatacctatcacttgcagtggctcgagaagaaagataagccagaagaaattaaacattccatatcacaaaggtcacccaatttgagctattttagtcccaggatctatttagacaaaagaataagcagtgtttcaaacaaagtgaaccagactccaaaagtagctcaagaatggaagtcacaaagaaagcctcttcaatgtcatatcaacttggtccatgagcaagatatgatggagttaaaaaagaacagagtggaaaaggtagcatccttcccatcactaatgaactcaggagggaaccataaatcagtgactgtttctgctgcaaaaagcattgatgatgtgcctatttgtggacagatttcaaataagtgcactaaaacttctcagcatactagtagagaacaaaagaggagctgggacatggttgtagacactgcttctcttctgaacaaggagtcaaggaaagctttgcagcttttacaaggccttcaggagactcgtttaatcattccaagtttggtcataagggaacttcgcagcatgaagcaaanatttagaattttcag

SEQ ID NO: 108914 - DNA, 587 bp, Glycine max
  Clone ID: PAT_MRT3847_69363C.1
ttcggacaattctagggtggacgacttgacaaccctagctagcagtccctcagcattgtgtgcccacaaagcagctccttttcctgttccgttgagagaagatgggattttgggggacgcgggtgatggagattgtgaagaagcatgattctggagggctggtttggaagagaatcaagctcaccaccacccgaaaagccaatgctaagaagcgtcttcttcgggtttggcagaatgaagctgtcctcaaagcctgttctgccactcccaacgaacctcaacctacaccagtggctacaccagtggctagttaagttcaagcccacccatctcaatttcattacttttcttttcccttcccttcaaaaatattgtcactacttttagggcttcatttacataattaaaaatcatctggaggaggttatgcttgcttgcctaggcatggcttatgctcttcattcttattatgattttttgtttctggagtatcagtaccattacttgcatggcgtttgtatgttttcctttgcttttcaacattgaaatagttggtttgtgtaatttattgaaatctatggatgcgg

SEQ ID NO: 108915 - DNA, 346 bp, Glycine max
  unsure (1)..(346): unsure at all n locations
  Clone ID: PAT_MRT3847_69364C.1
cgttctttttttttttacaaagaaaattggatttttttttatatataatttaacttaataattacattcatatctacttgggcttcccttgacgataacgcttatctttgctgactcaattagaattgaactttgataataagaatctgctatgaaattcaagttatcacatgtactcaactaatctctccaatggaataattgttgcatcaaaagtntgggaccagaatgatcttgttcaacacccgccatgtgaccccaggaaatgagagtatcttaacacgatttctattctatttttgaacacttggttttcaactgttctgataacaatgttctttgaaac

SEQ ID NO: 108916 - DNA, 238 bp, Glycine max
  Clone ID: PAT_MRT3847_69365C.1
ctctttccaatttttgttgaatgtaaccaacaattaaaatggaatggttatgttgtatttgtagtttgagtgttgacatgatataacatggagacattgcattctatctctgtaatcttgaaactctgcatccgtgtaatattacactgtcatttttaagcatattattgcataagatgtggttgatgtatgcttgtgtaacattgttttgtctgcctttgtgtgtgttattcgatga

SEQ ID NO: 108917 - DNA, 2255 bp, Glycine max
  unsure (1)..(2255): unsure at all n locations
  Clone ID: PAT_MRT3847_69366C.1
gcacgcatgcacacgctcggaagcttgtatagctgtacgctcgcgatctagaactacagtcccagtggttagcttagttcacttatatactgaatgctgattagatcctaaaataaacttagtttcccaaatttggctagttttatcaacttgctggaggataacctctcaattttagatgttgcaggcttagcatctggaaagcaaagtactgaatttaaaagcttgtgtgttgatctttttttttgcatccagggtctaacctagttattaaaataaagttttatcacttgccagcctcagtcgtccatagatttatgctttaagttctttttatgtatcccagctttagcataattagtgcaataaataattaatttcacctcatttttgcttttccgccccacccttatcctgtacttcctttgcaggatgggacgcactgaatgcgaacctatactcaatttttttgacgaataacgtaacagtcaagtcggccagggcatgagcattcctagtgcctgaacttggccaatacgatgaccaatctagtgctctggctctggatttgagtggccaattaattattggtgaagtttaattttgacttagaggcaatttctgctagtagctctgaggtcccatcaatattagagttcctgcagcggcggaagttggaagctaacaaggctaaacaattgtgcttgggtataacacgtacacttattctagagcataggcctgtgcctgtggttgccaaggctgtaaatgtactagtcacctcatactcccattcaattaaaaccggtagctatcttaagggactgaaaccagagaacacatcaacttctgttgtacaaaatactggtgctgaggtatctgctaccgaaacaaatgtaattggaaaatcaatcgtccatgaatctacaagaagagtagacagtggatctcttaataaagcttcaactgtttcaagtttggattctgaggatgagtcccagtctgcaaatctgaaacatagttcaaaggaagcccaagtggaggatgaagtgaataatgagatatctttgagcaaaggagctcacagtgcttatgttatgcaatcatctcttcagtctgggcaagaggaatcccaacttacttccgcagcaatttcgccagacgagatgtacagctttgtcttttctcctgttgatgaagagatggttggagacccttcttacttggttgctatcattattgagtttcttcacagtgcaaattcagagaagattcgcatactcccaaatgtttatgtattaataattcaacttctggcccgcaatgaacattatgcagagctcgggttatttgtcttaaacaagattctggagccctctaaagaagttgcactacaactcctagagtctggtcgtcagaatgcccaaactaggaagcttggtctggatatgctgagacaactgggtttacatcatgattatgttttactgctcgtgcaggatggatactaccttgaagccttacgatatgcacggaaatacacggtggataccatccggccatcattgttcttagaagcagcatttgtttccaatgactcccaacatcttgctgcggttcttagattctttacagatttccttcctagcttcaaaaacacctttgaccataatagatactgccgcatactgaatgaaatgaactcatccacgaatgtttgagaagtaaaaaaaaaagggataaattttgaatcattgtcattagggttccttgttcaaccgtgtcgattatctcgttatttatgacatccggtttctattagatacggaatagatttggtaatagtttcatgttgtatgttaaataaatgtcttcctagcaagattagttttagatgcagtgatctaaatgaaattcttctcattgaaattaactgtgtttgcgggtgtactgttgcatagttgtttaataccagtttttggagggagaggagaggggagtacaattgaattttgctctcggaaagatgctaaaatttcataatggaactgaatatcattatttatgtaattaatttcatgtatttatttttagagcaaaattaatcttttggttcgttaattttcngaatattggcgctctgggatttttgtttttttatttactcttataacttttatttgttttattctagttcttttaacatttggtattttctgtaagtttaattcattaataacactattatttcctct

SEQ ID NO: 108918 - DNA, 455 bp, Glycine max
  unsure (1)..(455): unsure at all n locations
  Clone ID: PAT_MRT3847_69367C.1
taaaaaaaattgtcacatttattaattagtctttttttagtacgccattccacttcatatggtctngagaaaaaattttccttcaagtacttaacgcaatccatgtgtttagtcttcaataaattaaactctagcaatctctacaaacttaagttctttacatcagagatcctttctttatatcagttacaaatctttggtccgaaacttcaacactaattatttttttcataactttcccaaagatgtatactacaacaattaatcaaacgtaactcaaagtatattatcaactaagctcaagtgtataccaacaaagtatatctaaatcaaccaaaccgcaccttgtgaggtgaggagaaatgctttgacgcagcaaccatggtggccacaggtccaccaggtgctgcacttttacccgtcttcacgtttccaccaaaaatggacacctggtg

SEQ ID NO: 108919 - DNA, 587 bp, Glycine max
  unsure (1)..(587): unsure at all n locations
  Clone ID: PAT_MRT3847_69368C.1
ggctcgagggaataattctaaaggtttaacataactggaaaacatgtagtagcagttgactcaagtacaaaacccttcttgtctcggtcgttgaattacccttaatttctttgtgttccttccaatcacatggcatagaatttgaggttttccacagaagaagatctagctaggaagaagagacgaagcaaaagactagttagtgagtgaaaattcaagttggaaccatccaaaagtgagatatggaagcagagagaggtggtgcacccaattatgagcttcaagtttcgttcaccaacaccccacaagccttacacgaaatgggttttgttcaatatgaagaaaaccaggtccttggcttcttgtcaccctcttcacaatctcaatcttctcacctctctcaatccttaaatagtgatactggcgttgttgctgtcactgccacgacccccaccgcaaccatcggattcatgagtcatagcggacttgtcacgaaaacttggaataacgaccaggtaggaactctggatcaaagcctgtcgaaatgaaaangcactggaaatgtagtgatcaagcaacacacactt

SEQ ID NO: 108920 - DNA, 660 bp, Glycine max
  Clone ID: PAT_MRT3847_69369C.1
cccgcgtccggcttcatttgctctctccgattgagtgccatcttctcaaaatgttcaatttcttactaaggaaagacgttcgaaagattctcaagcgcaaagatagcgatgctggagaaaaaggaagagcactggaagacttgagaggttctctgtttaatgaatttcgttcctctgaaggtgcaaaacgtcaacaacagcgtacatgtggtccagctgcagcactttccttcaatttttttattgcaattagtattatcttcataaacaaaatggttcttcaaactgttaaattcaaattccccatacttctctcactaattcactatatagtgagctggctcttaatggctgtactaaatgcattttctttacttcctgcatctccctcaaaatcaactaagctatctgctttatttactcttggatttgttatgtctctatctactggccttgctaatgtcagcttgaagtataatagcattggcttctatcagatggcaaagattgcagtaacaccttcaatagttatggcagaatttgtattgtacaagaagaaagtttcttggcccaaggctttagcattaacggtggatctatttggtgtttgctgtggctacagtgacggattttgcagttccatttctttgctgcctgtgt

SEQ ID NO: 108921 - DNA, 628 bp, Glycine max
  Clone ID: PAT_MRT3847_6936C.1
acacatccactcttttatttaattattagcacgaattgatccaagaacaagcttaccagataaacgctgccacagtacataaaagactgagctacccacacccaagcttctgcctaagctggggtgagaaaaaccaacgcccctggataaccaaacgcacaaggacagacgccatacccctccactaactacatgaaataacaccttattattaaactgttgccattaacccttggggacttaacacatcatgtaagttacagtacccctcagcacccgatgacccatacatgatctccgctttgcacccgcacagggataatgagctgcagacggtcccaccccgggcctgtgaaccgttccaatgggatgcgagcccaacaatgcttaggcgacgtgggcccaggactagcccggttccgtgtgcacatatagccgaccactgcagggcccatgtggcctgaccatattccccctcacatgaatacgtaaccagctacaggcccgggtgcgaccgttgcgcgtacatgtcccatgcgcccagcacaggcgaatgatcttggtgatcggactgttatgctctcaactcctgctgattatacaactccggctgattgatcttagccta

SEQ ID NO: 108922 - DNA, 520 bp, Glycine max
  unsure (1)..(520): unsure at all n locations
  Clone ID: PAT_MRT3847_69370C.1
ctatgaagaaaaagtaaataaggagaaaaaaagtccacgcatgtttagcaggagtcttgtaactcttcatttttacttacaaaaagttttgttggattacagagttatcaaacacaaactttaatactgaattttatatggagattgcttttgttactagaaattcttagttaatacacttgaatcgttatgttagataaaagaattttatgaaaatagcttgagttaaccatttacaaatccaaacttaaccatatattttttcaacttgatgaaaatagaaatttgaaaatagcttgagttaaccacttgatgaggttgtcttaaatcgacaactgatggtatgttttttcaaccattgccagcttaagccagcaaatatacaaatgtttcttcaactattcaatcccgtttgaatggttatagaatttctatttcatccctgtaagaatagtctatgtattcttgttcatctgaattntatgcatgatgtgaattcctaattattcatgatctggga

SEQ ID NO: 108923 - DNA, 490 bp, Glycine max
  unsure (1)..(490): unsure at all n locations
  Clone ID: PAT_MRT3847_69371C.1
cctgcagggtacgcggtccggnaattcccggggcgacccacgcgctccgatcacaagtgtgagaaaaattatgagttccaaagggggtggtgaggattgcctgggatgggcagcaagagatgcatccggggttctatcaccttacaaattcagtcgcagggctcttgggaatgaagatgttcatattaaaattacgcgctggggggggtgcgtcnctgatggggtttgggcaagggataaacatggggactcaaagtatcctgtggtgcctgggcatgagattgctgggattgtgacaaaggggggggccaatgggcaccattttaaggggggggaccatggggggggggggacttatatcaactcatgtggggggtgtgagtattgtgatgagggacaanaaggtcattgtgccaagggggtctgtgtacacttttaatggggtggagtttgagggggcaattacaaaagggggagactccagttacat

SEQ ID NO: 108924 - DNA, 484 bp, Glycine max
  unsure (1)..(484): unsure at all n locations
  Clone ID: PAT_MRT3847_69372C.1
cggccggaanccggttgaccctccgccggccctttatttatctttgggcccaaaccgcccnncacggggggagtctatttgaggccttccccctctcaggaacctcttattcaagtgggccagggggcaagaagacaagacgcagcctatggaataatggggcaggcttgaggaaggagtgagcactggcaggaaaggaaagggaaagggcgtaccagttgagacaaaacgggctaagtcgaggtacagcctatctacgacccaaggacggctccaaccgggatgctacgctggcggacgacggctgctatcggctggactctactggcttctgcggggcgcactctgctacaaccaaggcttgcgcaaaacttgcaaacgaggttagccaacttagccaagaacatctaaaaagaaaatatcacgaagaccttgggaaccggtcctctggtctaaaaaggggggagagaaaaacctgggtggc

SEQ ID NO: 108925 - DNA, 442 bp, Glycine max
  Clone ID: PAT_MRT3847_69373C.1
gggggaccaggcgtccgccaattaatgcttttgtttccttttgatctttttaaaaaaaacccaagaagtttttgttttgaggttttaacagaatttgtggttcaaccacttgttgaaattcttgttggaagtgtcctgaaatctgaattgccagggggccttttttgtgccctgtaatgtgcattactgaatccagttgatccaattaaaactcgggtccaagcttaaacaatgtccttccttgaaataatttttaagctgccaaaaattgaaaggcggggttaatccaggggctttatccttgcaatttttgacacagttttaaagccatggtttgcaaactgggatatttgaagcaggaaaatgggggtggttaaaaatggttcctacactgccagaactccaggtccaatttgtggcttaattcttaagcacatttttg

SEQ ID NO: 108926 - DNA, 307 bp, Glycine max
  Clone ID: PAT_MRT3847_69374C.1
caaaccctcttgccatcctctccaaaactcatatcataactttgcatcacatacacggggactcttacaagcgatcacaggtcgttttgaacacatgtttactcactctgattagggctcctgttcgttgtgaccctttcgtagagttctaattccgtactcgttcatattaccctctacaatgctatgcacattttgaactcgctcaccttaccgtcacaattgtaacaattgttttctgaaatacacgacctgtgacactactacacttgcccttatgttgcatactcacctatgactgctgatt

SEQ ID NO: 108927 - DNA, 2526 bp, Glycine max
  Clone ID: PAT_MRT3847_69375C.1
gaatggtccggtgaagtgttcggattgcggcgacgtgagcggttcgctgcccgcgacgttgtgagaagtccactgaaccttatcatttcatcttcctcagcttctgcattcttgatccagatctatcttcttcactcttgattcttatctctcacactgaacactcttgtagttaatcgaatttctcattccgcagaaaccttcaacgatggccgctgaaacgattccctaccagaacggcgtcgttgccagctccaacgattccaccgccacgggcaagaaatcgcgggagaacgaccgccgccgccgccgccggaagcagaagaagaacaacaaggcatctgaggccccggttcctaactcttccgaagagagtgacgatgcgaaagagaacaacgattcaaaacagcttgttgaacaaattgaaattgagtacgtaccggagaagggcagagttagttgaaggcatggatgaagaatttagaaaaatctttgagaaatttactttcactgatgccactgctttggaggatactgataagaaggatggttcagaagaaaatgcagcaactaataagaaggctaattctgattctgaagaggaagaaaacgataatgagcaaaaagagaaaggcatctcaaacaagaagaaaaagcttcaacggaggatgaaaattgctgaactgaaacaaatttgcttaaggccagatgttgttgaggtgtgggatgctactgcatcagacccaaagtttgctggtgttcttgaagtcttatcggaatactgtacctgtacctaggcattccgtgtcagaagagaaaatttttacagggtaaacgaggtatagagaaaccaccctttcagcttcctgatttcattgctgccactggaattgagaaaatcagacaggcttatattgagaaagaggatagtaagaagctgaaacaaaagcaaagggagcgcatgcaaccaaaaatggggaaaatggatatagattatcaggttcttcatgatgcattctttaaataccaaacaaagcctaaactgacctctcttggagacctgtatcatgaaggaaaagagtttgaggtgaagttgagggagatgaaacctggcatgttatcacatgaattgaaagaagctcttggtatgcctgaaggttctcctcctccttggcttattaatatgcagagatatggtcctccaccatcatatcctcatctgaaaatccctggacttgaatgctccaatcccccctggagctagctgtggttatcggcctcgtggatgggtctagcctaggttccgacgaataggggcgtccactgtatggaggtgtttatgttgttcaacatcaagatcagcctaactttgaggaagagccagttgataagaccaagcattggggagactttgaggaggaagaggaagaggaagaggaggaggaggaggaggaagaagatgaagaaagggaggaggaggaacttgaagctggtattcagtctgttgatagtctgtcaagcactcccactggagtggaaacacctgatgttattgacctccggaagcaacagaggaaggtgcctgagaggcctctttatctagtactcgaagagaaggaagaaaaaattgctcctggaactttgcttggaaccactcacacttatgtggttggccatggcacacaggacaagtcagggtgctaaaagggttgatttgcttagaggtcagaagagagataaagtagatgtcactttacagcctgaagagttggaagccatggaaaatgttttgcccgcgaagtacggagaagcaagggaagaagagaagttgcgtagtcagcgtgaagatttcagtgacatggttgcagagaacgagaagaagaggaaaagaaagatgcaagaaaaggagggcaagtcaaagaacagagaattcaagttttagggtacgcctagttcgttacttttgcgggaagatgggggggctgctagccttttctactgggcaagttctaacattccatgagccatgagttgagaatttgttgttagcaggggtctcaattgataagaatatataattatatacaaactatatataatacaatgaagactccatgcagagaacgtggtagtcaagctttagttgaaaattcaatacgatgaatcctaccaaggctttacggattctggccgacatgaatgcatgttacttagaggaataagttattcttactactatatttgtagttttcatttccttttgttctttaaatgacattttatggtaatattttctgttttcttttggaagacaaaaacttttgaatcaagagtggtaaaatctgtttttttcatttcacgttacttaaatctgtatttcactgtttctaaactctagtctgccctttgattgggtgataaggacttagcgtgggcttggccctgattttgggctttcatgagttgtttgcagcccacatgtgtccagaccatgcccttctactaaggtagtaccacaatttgtct

SEQ ID NO: 108928 - DNA, 355 bp, Glycine max
  Clone ID: PAT_MRT3847_69376C.1
tgattcaaacccgtgttctgatgcatggagtgtggaatttctgaagcgtaccggatttaattgtgatatgatttgtgttattggatggaccgccaccccaacccaggatgttgaggttagaattgattggttaattgggtataaggaatgtgttctcaggacctagtggggttgaaatgaagagaagacttttgtgttaattagggggatgggataactggagttggtcgagggaactttatggagggtgaagagaatgcatttgtctatagggagaggagctggtggagagaatgttattatcatgaataatgggaatggtggtgtcccaagggtggagattctggtgtggaga

SEQ ID NO: 108929 - DNA, 428 bp, Glycine max
  Clone ID: PAT_MRT3847_69377C.1
tacggctgcgagaagacgacagaaggggaatggtccggtgaagtgttcggattgcggcgacgtgagcggttcgctgcccgcgacgttgtgagaagtccactgaaccttatcatttagaggaagaggaggaggaggaggaggaagaagaagaagaaatggaggaggaggaacttgaagctggtattcagtctgttgatagtctgtcaagcactcccactggagtggaaacacctgatgttattgacctccggaagcaacagaggaaggagcctgagaggcctctttatcaagtactcgaagagaaggaagaaaaaattgctcctggaactttgcttggaaccactcacacttatgtggttggcactggcacacaagacaagtcaggtgctaaaagggttgatctgcttagaggtcagaagacagataaa

SEQ ID NO: 108930 - DNA, 851 bp, Glycine max
  unsure (1)..(851): unsure at all n locations
  Clone ID: PAT_MRT3847_69378C.1
cagaagacagataaagtggatgtcactttacagcctgaagagttggaagccatggaaaatgttttgcctgccaagtacgaagaagcaagggaagaagagaagttacgtagccagcgagaagatttcagtgacatggttgcagagaacgagaagaagaggaaaagaaagatgcaagaaaaagagggcaagtcaaagaagagagacttcaagttttaggctgcgcctagttcgtttcttttgctggaagatgggcggctgctaccctttttctactggggaagttctcacattcatggggcatgagttgagaatttgttgttagcatttaacgcaactgtattattgcccgaaagttgagaatttgttgttagcaggggtctatagacattataatacaatgaagactccatgcagagcacgcggtggtcaatctttagttgaaaattcaatacgatgaatcctactgaggcttcacagataatggccgacgtgaatgtatgttagagcaatcaatcattcttactgctgttatttatatatgtagttttcctttctttttctttaaatgacattttatggtaatattttctgttttcatttggaagataaaaacttttggatcaagactggtatttttttgttgttgctggtaacgtgcaaaaatttgattaaattgtactctttgctcatggaatgttagaacttgcccagtagaaaagggtagtcaagctttagttgaaaattcaatacgatgaatcctaccaaggctttacggattctggccgacatgaatgcatgttactagaggaatcaaaaaaaaaaaaaaagggcggcgcnngcgatctagaact

SEQ ID NO: 108931 - DNA, 673 bp, Glycine max
  Clone ID: PAT_MRT3847_69379C.1
gaaaatttttacaggggagctgctgaggcaatcaccaatcctggacttgtaggtgtttggcaatgggcaaccttgagtcatttctcttttattatctttgttagattgaatgggaatatcgagcttgcattatgttatataatggggatctataatgaataatcatgacaattttgcataatttttatgggcacttctttatgacaaagatgctaatagttctgctttgaattttcagatgcctttccattgtgcttaatgctcgggctgaattcgtcttatcttcaattttttatgattgatattacttatcccaattacatagtgtatgtccacataaagtacttatatctcatcaattatttttttggcagggtaaacgaggtatagagaaaccaccctttcagcttcctgatttcattgctgccactggaattgagaaaatcagacaggcttatattgagaaagaggatagtacgaagctggtacaaaagcaaagggagcgcatgcaacccataatggggaaaatggatatagattatcaggctcttcatgatgcattctttaaataccaaacaaagcctaaactgacctctcttggagacctgtatcatgaaagaaaagagtttgaggtgaagctgagggagatgaaacctggcatgttatcacatga

SEQ ID NO: 108932 - DNA, 595 bp, Glycine max
  Clone ID: PAT_MRT3847_6937C.1
tggggtcctctactatacgcctcaaattcttgagcaagcaagtgttaattatcttctttcaaccctaagccttaattctacttcttcatcctttcttattagtacaagaacaaccttattaatacttccttatatagccattaccataaagctcataaatatttcaagcagaaagactgtactactgagtacaatccccatcctaatagcagctcttctcatattactcctagaaagtcttgtgaattgacaatccactacaaatacatcaatctcaaccattagtggtattagctattgctagttctgtagcataaatgtaaaccaatgtcctaatatactttatacagagatcttgcccactcaaatgcgtaagctctacattagtattagttcccttacctttggaatctatgatatcattgtgacctacacactcggaggtatactcaatggctgaagcctacgatatattgataatatgtatactgtcatattcttcatagcatatgtgtggtgtgtgtttaatattcggtataccaggagcatacgacttaaagtaatgatggattggttgtctatcggactgcgacgg

SEQ ID NO: 108933 - DNA, 449 bp, Glycine max
  Clone ID: PAT_MRT3847_69380C.1
atataaaaacatcttaccctttttctttaatcatcatccccatcatgacagggtgtacttaagcccctagttttgaaatcattcaaccgtccaaaacagatgttaccatagtcagagaagagactatacagccttatatgactagaatcacacatcccagcgtaggtttatactacactttattacgtatacctaatactcaagaacacgccattcattaattattagccttctagtgaaggaagtgaccgatgagcacaacgacttctttcaacatggacaggacatccatgttgtcccactcagcaccaatgctgctgctaacaggcatctcattctgcaaacctacaaaccattcaactggcatatgacgagctcgtcgtttcctactccgatatatcctatggatccagtggtggaatgagagctgctgctgctgctttcttcat

SEQ ID NO: 108934 - DNA, 213 bp, Glycine max
  Clone ID: PAT_MRT3847_69381C.1
gcgcgcaacgatttgttgaatcctgcgaagtggagataagtttatggatctaccgatagatgttctaatgcttgttatggagcgagagcatggattaggagtctgtggtcaatagccagaaccgacaatgagcgagagagcctgacgcatctctatggagcaacatatagagacagagtgcggctgccagatatgccgatgtccgaggcaaac

SEQ ID NO: 108935 - DNA, 260 bp, Glycine max
  Clone ID: PAT_MRT3847_69382C.1
catttactgacggacgacgtattcagcgaggcttacctatagacttgaggaacgtgcgagctgcccaagggtttggttcccaaatcccgtctgacgtgtcgtcccaagtaaattatgatattgtcctgacggtgggaggaaagtcaaaaatactacatgtaacaggcaacaaatttttagttttctcccgaagcgatgaaaaagttgtaaaacgagtgtgaacaggtgtttgtataaagataaaataacaataaagttaa

SEQ ID NO: 108936 - DNA, 307 bp, Glycine max
  Clone ID: PAT_MRT3847_69383C.1
gcaaaaaaaagacaaaaaaaaaggccacgacaaacaaaagaaaaaaggcagccaaaacaaccacccacaagcataaaacctgggaaagagaaaaaaacaaatgccaaacccccaaagaaaatgaaacgaggcaaaaaaaccataacgaaccaaaaaccgggccacgaggggctgcggcggaaccagatgcaaacaagcaaacactgaaaaggacccggggcagcaaaaacaacaaccccggcataaacaaatcggttcccaacacgcctaaaaagactggcatcaacaacaacaattctaacaaaca

SEQ ID NO: 108937 - DNA, 363 bp, Glycine max
  Clone ID: PAT_MRT3847_69384C.1
gggagaaaataaatctaatatcttcttgcattattgtttgttgctgctaaattttgaggaatactctgttaatttttccatttcagtattctttccttgggcgttaattaactagtttgaactctgaagtaattgcttgtttgattaaatttattttgaatgaataatctcttttttttcaacttttttagaaagcttttaaaaagtaagtattttctaaaaatagtccatttcctaacaagaactaaactagtcttagtgagattgtagtgtcctttccttgcagttgcagattattcttttatggttatgttcttatgttcctttttttctccctaaaccaacctatttatcccttatatg

SEQ ID NO: 108938 - DNA, 582 bp, Glycine max
  Clone ID: PAT_MRT3847_69385C.1
cggaaggaaaccattcccccaacttctgcttgctggaaaactccccagttctactgaagacacacccacttaacccacaccttcttcaatagccaggaaacgacaaaactagatatggggaagcttgtccagggtgaacgaagggcatgcccatgttaccacctagagagtcacaaagtcacaccgggcttgcgtgcttcacccttgggtaacttaagcttatgtggttgaaggtcaacgcttatggtggtgccagagactgacttagccttctgctgagtagcccggactgtttttaaggcaagcagcgagcatgaatgaacttcctattctcttatgcctgcattaacggcaatcttgtccttcccagaaatggccaatgaaaacctggctatgatccaccatgccaaccttttctccgacagattgttaggggcaccaccagcgtcctgctcaacactgacagaatgcactgcttagactacattgtcctaactgggcttgattataaaagacaaagccttcttgctaacatcggaacccctgatactcaacagtgctaacatgttctaaagcttttgc

SEQ ID NO: 108939 - DNA, 216 bp, Glycine max
  Clone ID: PAT_MRT3847_69386C.1
tttatttttaaaatttctttttttttattttttattttttttttggttatggttttttttttttttcttgcaccatttaaaggaaagggccagatttttatatgtccacgggtgccaacagccttttatctttatcaagggtcaaattccccaagtataaaaaaatggacaaaacccgaagtcccagatggtggaacaaaactccaagaccaaaat

SEQ ID NO: 108940 - DNA, 362 bp, Glycine max
  unsure (1)..(362): unsure at all n locations
  Clone ID: PAT_MRT3847_69387C.1
aaagggaaaaaaatgatagattaaaatggccgggaaagaaaacccctttcccagcctttttgtcttaaaaaggggtttcccaccccaaccccgaaacccgggcccccctttaacccccaagggcggggttttcccctgggggcccccccaacccagatcaggtccttgttcttgaaaaaatggggaccccttttccccccccaatgggtataaaactcctctgtttttcattccccatccttaaacatttttgctggggncaacccaaatccgatcccaaacccaccctgtcttaggaacatttgggggccgccgcaattttttactttggcccaaattttttatgccgggaaaaggtcccc

SEQ ID NO: 108941 - DNA, 351 bp, Glycine max
  unsure (1)..(351): unsure at all n locations
  Clone ID: PAT_MRT3847_69388C.1
ctacagcgccgcttgaactgacggtcccaccagaggcggacagcgtggaccaaccattacttaatgcgcatacgctactaacaggcttgttattgccgctgatgtgaaacgttctggtcttctaccatgactgttatggaaaagtacttcatgtggacactagaccaaccgaacattctatgtaccagcaagtggtgctggtgatctaaacagcggtgacgactctnggatatcatcacctactcatgagcttatgaagcctgtcaaggattccgaatatgtggggacgtgcatgagctattacctgcatattatgcctactggttggattgatacaacagctgcatcatt

SEQ ID NO: 108942 - DNA, 258 bp, Glycine max
  Clone ID: PAT_MRT3847_69389C.1
acacttgcgagattaccgaagtgcctaccgggctggacaaaccctagccattggcactatgctgaggctaggcgcatatctctcacgtagggaagcttactaacgctatcttccataggtactgactgcctcataacgatatcccatgagtgggatcgcatttgctaggtgcatgcctagcactagatgaactagggacctatgaatgagctggtgatgctccataggtgctcactgcttatgggacagatacttgac

SEQ ID NO: 108943 - DNA, 445 bp, Glycine max
  unsure (1)..(445): unsure at all n locations
  Clone ID: PAT_MRT3847_6938C.1
ttcgcctttggttttagtcttgatacagtcgtgtccgaataaaagaagcaatgatagaaagaaaaagattaaacctcaaggatagttacaaaatctatcttcttttatgcataggaatagtctctcatatgccaacgccatctttgttgcagnaaacatagatattgcatggtcacggcatgcctttcccctccttgcaagcctttcctttccttccttcaccactgcttcgagtgcctccaagagggactccacattgggagagaacatgaagccaaatgcatcatcaaccacaacactacctttgatgctcggaaacctcgacgccaaaagtggcttcccactcatcatggcttccatcatagtaagatcaagcccttgtggcctaagtgtaggattgacaaaaatgtcaatagcattatagaatgctcttagcatggaagga

SEQ ID NO: 108944 - DNA, 244 bp, Glycine max
  Clone ID: PAT_MRT3847_69390C.1
ccggaccggagtcccggccgcccacgccgtccgagtataaactaaacgtccgcccacgcgtcagaaattctatgccaaaaaaaaaaaacaaaaaaaaaaaaaaaaaaaaaaaaaaaggggcggccgcacaaaaaagaaccaaccaaacatacccgggcaggcgggcgacatggcttcttggatcgggccacctaaatgcaattcacgggccgtggttttacaacgaggggaccgggaaaaccct

SEQ ID NO: 108945 - DNA, 848 bp, Glycine max
  Clone ID: PAT_MRT3847_69391C.1
tcaggacaaaactagtccgattctcttagtattttccaacactttatccaacttggtgctcacccgaaaccaaaactagatagccacgttgccacgcagttaataatacctagtatagtatgtgagtttttcatccaagtttaactctcttctttcttttttaatcctttttaccattactctcttcatcatattttgaacactccttcgtagtagaaacaagaataggtgaataacctgcccattttagatttcgttcctttgagaagcaaagaagatgaatgcattggcttctcaatgcagtagtgggtgtgagtctggttggactctatacctagagcactctttccagctgaaccacaatgcctcttcacatacaacttcgcagttgttcaaagacaaacaagccaaaaaggaggaagctgaggaagaggacttgtccatggtttctgatgcttcttctgggcctccacacttacacttgccagatgcacaagataatgggagcttttattctgcatctaaggcggcaaaccttggcaagagaagtaaaaagaggcagaaagttaaggaaaaccaacacttgccttctttgcttgatgacactgctagctctccggtctttgacttctccatgaccaatgtcactgtgaccaaccaacaaacttccgcagagagcatgctagattactcacaaggcttctctgctacttattatgaggagaggtcctcattgcaagaccactttgggtttttacagcaatctcaatcagaaaatggagttcgtaacaacaaatggtacggagagaaagagatgggaatgatataaagataagttctatttctac

SEQ ID NO: 108946 - DNA, 532 bp, Glycine max
  unsure (1)..(532): unsure at all n locations
  Clone ID: PAT_MRT3847_69392C.1
ggctcgagagattctggaaaatctgtggtataagatcaaaaagaaggttcacaaaatggatatgtgtgcagtggcttgaagaaaagtgaagaaattcggtgggaagatgaattgagtgattcagaatctgatgagggtgactttgaatgggagcatgatgatttagttgaacagctgaaattggaattgaaaaattcaaggcaaggaggacttgccacaattttagaagaagtggaagaggcgaacgaagaggaagaggtggtggcgtttgaagaggaagaaagagtgtccccaagagtggttgaagatccaaagccaatggaaattgaagagaagcttgaatacaaggatcaaattgatgaaattcatatagtttacaagagctatgcagagaagatgaagaaacttgatatcttgaattaccagaccatgcacgcattaggtcttcttcaactaaaagaccctctaaaattaanttcattaccaaaatccgcattccaaggtgcaaagcctgtaatttcttagaacttgt

SEQ ID NO: 108947 - DNA, 509 bp, Glycine max
  Clone ID: PAT_MRT3847_69393C.1
aattgagccattctatctccgaccaaagatcgaacctgtatattgtaaagtaccataaattaacaaagacggagtttcaaaataagaactaaaaaaattgaatcacagtcacaattgatcacaataacgtactcaatgcaaaactaacaaggcataagacacaaaaaaatgtcaatgacaatactttactaaaggacggtgagctagtggggaaaaatgaggaagtacacctataggagtaaaataaaaaaaaaaggatgaaaaaaaaatgttcttgagatgtaacatctaaaaattcagatttttgtacacgttccattttgtaattgtactttgctaaatcctaggataattatttcttcttcattgataaaaacatgaaaaagtaatatgtaacattgcaagaaatgtttaaatgaaaataataaaaacttactatattggcttctttaattagtctagagcaaacaacacccgtggaattttcatcacgatcgaaccatgcaatt

SEQ ID NO: 108948 - DNA, 316 bp, Glycine max
  Clone ID: PAT_MRT3847_69394C.1
gaaagctctctcgcgtatagaatggctggcaaaagctgatgtgcctaccatatgacagattgaagaattccattcgatgcataagatgatgaatgctcctgattcaaatgatacatatagatctactggagatcatcgatactgtggtttacaaggagcaggtgaagctttttcacacaacataggtgaagatgatatactagagccggctagcacacgagaattctttgatggaaataggccagtggatactggactaccaatacgggcgaatagcctttatcctgtatgggaatggcattcgtactctgtcgtt

SEQ ID NO: 108949 - DNA, 651 bp, Glycine max
  Clone ID: PAT_MRT3847_69395C.1
aaagcaattatgacactaatttagaatttcttactgaattgtgatataaacatatcacaatcaaatataattttccatattacataacaagatatataaaattataaaattttactaacattatatgctagtattaatagacgttacaaagaattagctcacatataagccatgtaacaatgataatcccgaaaaaaaattacttgagcttagttctgctcttgcttgttttacctttcttcttaaaaggcgttggattcagcaatcgcctgaaggggaataaaggtagtccctgaggcgtccttcgcttcactctcaatccacctgaggcaaactgatcaaaatcagtgctcacttcactaagccttttatctttcattataacatctggcaataaatgttttgcagcagtggaatcatcttccattttcatctcatcaagttcaagtgcatcagtttcccgtttgtcctccatcgaagtatcagaaattgatgtgtttaactccaagactggttgctctgcaatctttaaatcttcatttggcaaagctgcacaaatcctcccaatttgttcattaaaattaacatcagaacttttctgattattacatttatcatgaaaaccaggggacggaaggccctcagccactg

SEQ ID NO: 108950 - DNA, 174 bp, Glycine max
  unsure (1)..(174): unsure at all n locations
  Clone ID: PAT_MRT3847_69396C.1
ctcaatagtgactaanagggaaagcgaagtgggggctgttttgatgagtaaaactggtgtgcctcaaacaactggagcgactgtgggagttatagagatatgtaatgatggtttcgcaaagacagactgtaactaattgtgcatcctgtgctgtgggtggatactgagaacacg

SEQ ID NO: 108951 - DNA, 583 bp, Glycine max
  Clone ID: PAT_MRT3847_69397C.1
aatattcatgaggcccttagtcatcctagatggcgacaggctatgattgatgaaatgcaggctcttgaacaaagtgatacttgggaacttgttcctcttcctcctgacaagaagactgagggttgtagatgggtctacgcagttaaagttggacctaatggtgagattgatcggcttaaggctcgattagtagctaaaggttatacttagatatatggccttgattattgtgacactttctctccagtagctaagatcactattgtccgtctgtttcttgttatggctgccatgcgccattggcctctccatcagcttgatattaaaaatgtattccttcatggtgaccttgaggaggagatttatatggagcaaccttctgggtttattgctcagggggagtgtggtcttgtgggtaagctgcgtcgatctctttatgggttgaaacaatctcctcaggcctggtttgggaaattcagtcatatttgtcaactctttgagttggaaacaaagcgaagccggatcatttctgcttttttattgggcaattcatcccccctgggaaaaagtgtggtttattttg

SEQ ID NO: 108952 - DNA, 265 bp, Glycine max
  unsure (1)..(265): unsure at all n locations
  Clone ID: PAT_MRT3847_69398C.1
gcaataagctttgggtggccgcaacaatcaaggctagtaatgaattatagcggggagatacaatttctcgagtttaatggaacggaatgggttaagaaatggtggaagccagaccacaagtncgatatacgtgactattgcgggagtttgccatctgcaacaaaaataaccggattcactgcaagtntttgcctggattcattcccgggcatgaaggagaattcccgctccaagggtgtaaaagaaaatcaacattatcgtgtgt

SEQ ID NO: 108953 - DNA, 367 bp, Glycine max
  Clone ID: PAT_MRT3847_69399C.1
ggaaaaatacaacctttttgctgaatgttggacaccaatacgaaggaaaatgacacgcataatggtatttgacatggactgacatatgcaatgccgaagccacaataagttcaagatgagatgatgctcttattcatatcagaagagaatatatatttgatggggtagctcaaacattctggatatgtaggtgccaccaatgcaacctaatccatgcccttaaagattcctgcatataaaggggaacttagacggctggccaattctgatacaccatttccctcactctttaaatggaatcacgcttgttttggccaaacattacagctgtttcagagttagaaggaaaatttggggtgggatcaca

SEQ ID NO: 108954 - DNA, 388 bp, Glycine max
  Clone ID: PAT_MRT3847_6939C.1
aggaaacacacgtgctatacgtatcgtgcgcggccacgattacttaaagcgacagggaaggaggcactcaaagacagcaaaagaaggacacgacggcgctcgagattgcagctaacgaggtgctcttcggccagaccggaagcggcgctgacgagccgtgggttgtggggttgtcatcaaccagcaacgccccgtggggtgcgccagacccagcagctttcaactggttgaacaacaccggagattttactcgtggtggcggtggcaaccacaacccgcgcggtggcaaaaatagtggcagtatgcaaatgccacaccagatacctgcgacagggcatcaattgccaaacagaatgaaaaactcttcaatgagtggaacaaacgcgac

SEQ ID NO: 108955 - DNA, 332 bp, Glycine max
  Clone ID: PAT_MRT3847_693C.1
ggctcgagcacaagcattggctgcaattctttagttggttctcgttacggaacatgtgcacggtgccggtctttcagaacattgcatgggtcaactacgcacggacaagcaacctgtgctccataaagctggaatagacatagggcggctccaggattaagggcacaggttaactcatgttgacgaccccggcggtgatcgagaacatgttgaagacattaaacgcaaaaaggctcacggagcctgttgactttctctaagtgccaacctctaagaaaattctgcaagctcatattgtgatggggctgaggtggtctgacggactcctaccc

SEQ ID NO: 108956 - DNA, 604 bp, Glycine max
  unsure (1)..(604): unsure at all n locations
  Clone ID: PAT_MRT3847_69400C.1
gcttaaannnaaatttaaaggttgtgcttcnnatccagaattagagaaaataaacatcactaaaatgcataataatgtacccttcacaagtctcaccacacacaaactcataattaaattactactgctattatgagctacttctgctaattgatgttcatcaagttggagcaattttgtccattgaaaggttgctcaaagggaggaacgtctaccataacgaccatttcttgccctaaggcgctttaattcttcccgttgcgccttactgacctcgtctttaaactgtgcttctttcctcagagcctctacgatctttctcagccccttaatcctttcatctgaatccatacattctctccggagcctggcaatatttgctgtgaggttagcgtatttaatcttaagcttctgcaccctcttccacagaattatgtaacgaatcttcatctcctttaatgggacgtacagaagattgcctattagcaagaatctcaataatgtcannnnngtgggtggggtgtgggtctcccttgatatttcttccttctactcctttctccttcttccttctttccttatctttttcaagcggacgcgtggg

SEQ ID NO: 108957 - DNA, 408 bp, Glycine max
  Clone ID: PAT_MRT3847_69401C.1
gtttcttttaaggggtgattcggatccatcgttgtcactggtttgctgttgtcactttactgatagcaagcattacggtcatcgttgctctcttcacttgtatatatttattctttcggttatttttattacaaaataattggcggaaaactaggagggaatcttgtggattgcgtatgttacttaccttgagtcacactctaggattgttcatgcttgatcatcaagtaaatcaggcaacatcttatcaatctatagatccccatttccttgtgattgggtcatagctcattggccacttgcttggtgtccgaccaagagtactatgacaagagattgctctgtctggggtgcaataatagctattatccctttaatttgtttatgaatgtcctcggtgctgtgaaa

SEQ ID NO: 108958 - DNA, 371 bp, Glycine max
  Clone ID: PAT_MRT3847_69402C.1
ggaacctgggggaaattggaaaggggggaaaaaaaaggggggacaaacagggaaaaggggtttggaaaaaaaaacaacatcccccccacccctaaaaggaaaacttttcaaaaagaaaaaattgaaaacccccctgaaagggaacgaggccggttttaaattttaaacccacaaaagggccccaaaaatcacaaaaactggaaaaaaaaaaaaactcatgggcttaggggacctcaacaaacccaatttatataaattccttcgggggggcaaacttaatggggctaaaaacaatcgatccatggctttttaaaaaaaaggataaaaaattttttggaacactccttggggggggggaaaaccaccccaaa

SEQ ID NO: 108959 - DNA, 1042 bp, Glycine max
  unsure (1)..(1042): unsure at all n locations
  Clone ID: PAT_MRT3847_69403C.1
cccacgcgtccgcccacgcgtccgcccacgcgtccgcccacgcgtccgcccacgcgtccgtacggctgcgagaagacgacagaaggggacatgccaaaattaacacccctgaatttcacactccctctcccaaactcatcatcctataatacaaagggtttggaatatatatcaaatatcaaaatacatcacaacatcaaaatggcctcaattgttactatggccaccattgtcacattagtcctcgcactagcatgttgtggcatgtctgccccgacctcagtgccgaaaaccactgcagcggccccggccccggagagcaatggctgcttgatggcactagcaaacatgtcagattgtctgacctatgttgaggatgggagtaagttgtcaaagcccgacaaagggtgctgccctgagttggcagggttggttgatagcaaccccatttgcttgtgtgagatgctaggcaaacctgactctattggcatcaaaattgatttgaacaaagccctcaagcttccttctgtttgtggagtgaccactccccctgttagcacctgttccgctgtgggagtccccgtgtccttgcctccatcaatgagtgaaggtccaagtattgcaccgggagccttcagtccttcaaatgcagatgctgcgaatcctgcttcaagtcctaactctgcttctagtcctgcaggtgggctaggcccttcgtccgaggatgctgctgccagcccttctcaaaacaaaaatgaagtttcagccattcacccttctgctttgactaatttcttttttggccttttcactttatttgtctctgtattcttctgattttacacacatttattctgtgtcattattttagtggatattttatttcctcattatttgtatgttgtgagccactttgattaaagcttttgttgtaattttatgcactgttgcaatattgttactgtcattattagtgagccatacactttaattaggaacttcatgcctgcatttntacgccgagatattcatttttttttgg

SEQ ID NO: 108960 - DNA, 583 bp, Glycine max
  Clone ID: PAT_MRT3847_69404C.1
gctaaaatccactgaaaatttcagtcaggaaaacataataggatgcggcggttttggtttggtttacaaagcaacattaccaaatggaactacactggccatcaagaaactttcaggagacttgggcctcatggaaagggaattcaaagcagaagtagaggctttgtcaacagcacaacatgagaatctggtggcattgcaaggctattgtgtgcatgatggattccggcttctcatgtataattacatggaaaatggaagcctggactactggttgcatgaaaagcctgatggtgcatctcaacttgattggccaactcgcttgaagatcgcacaaggtgcaagctgtggtttggcttatttgcatcagatatgcgagccacacattgtgcatcgtgatataaagtcgagcaacatactccttaatgaaaaatttgaggcacatgtggctgattttgggttgtctagattgattcttgcatatcatactcatgttacaactgaacttgtaggtacattaggctacattccaccagagtatggacaagcgtgggtggctactctgagaggagatgtgtacagc

SEQ ID NO: 108961 - DNA, 793 bp, Glycine max
  Clone ID: PAT_MRT3847_69405C.1
aagggaaggtatggaaatggcattccataccctctcaacataagaacggtggttggactgactggagcatgggcgggatcaaggacctgaaggaagcaaattgaagtggccatgggaaggtatggaaatggcataccataccctctaaacttaagcccagtggttggactaagtggttggcttcccggatcaaggagcttaaggaacaagatagaagtgtcacatgaggcaagaaggcgagcagcttcattacccattttgctgtgccatggaatcagtgatgatgtagtcctttacaaatacggagaaaaatctgctcaatccttatgttcagcagggtttcgatatgttgcattcaaatcctatgatgggcttggtcattacacggttcctagagagatggatgaggtttgcacttggtttagttcaagattgggacttgatgggtcctcgtaagtgacataattagtatcagtcagggcatgggcgtagaaggtatatggaacaataacagggaaagtggggagatgcataatgcacaaataggtagatcatggaaaggttcaagcgtatatatataaataggaggatttattttctgggtccctttttttgtcatgttcctcagcaataaagatctgcatgtgttttctaagtattctcctcgttatgtttttttttggtgaaattttccttggtatgttattgtagaacctagggactggattagttgtacgatggaagagatttttagttattattattctaacaaagcacgcaccttagcctcctt

SEQ ID NO: 108962 - DNA, 194 bp, Glycine max
  Clone ID: PAT_MRT3847_69406C.1
aaaaatatatatgctggggagtaaaaagatgtgtcaactacatgcatggctggcggaaaaaattaacctatgcccgcccaaaaacgggtggagaccatgcttttatttgtgagtacaaacatatatccttgttattacaaggagtacactaaaggatatgattgtgttcaattcatataatagagatttttact

SEQ ID NO: 108963 - DNA, 556 bp, Glycine max
  unsure (1)..(556): unsure at all n locations
  Clone ID: PAT_MRT3847_69407C.1
atgaaaggaacactgatacataacgacagataacatctgcaacatgacatctgacgttcactgttaatgatacatatacacatcacagaggctgcttgttcgtttctaaatgatgcttcgccttacgttcacttcataagattggacgtgaacgtaaagggccactgaccgataacaggactgctggcaaacatatactcacctatttggagactgcaaacaacagaaggggttatacggcctgtctgctgagactatacactggacttaacaaggaaagcgtgttcaaaagctacatcaacacagtaataagaatagaaaactaaacacaagagtgctaatacgggaccgaaaagcctcagcaacacacttttctagtattatgaaagatatgcaaacagtaatatcacactgactattgatagcttttctgattgtgataacaaaacaacagaagcgttcattacaactgattgacatggtgaagagcattcatgacttcatgaacttatagattgnacatacactagctaatctcatattccaatataaggag

SEQ ID NO: 108964 - DNA, 465 bp, Glycine max
  Clone ID: PAT_MRT3847_69408C.1
ccacgcgtccgaattcgagcggccgctttttttttttttttttttttttttttttgtaatgttgatgatttggggcttgcattttgattgttgttagttagggattgcattagctgctatttctttatgcagttgttgtgatttgtggaagtagactagacactaggaacatgaaatttgatgtttgattttgttaaaactgatgttaattgaatgtgtttagaatgtttgaatttgaacctcggaagaagagtaataggcgtttgtttagaatgtttgaatttgaacctagggattgcgttagctgttatttctttatgcagcagttgtgatttgtggaagtagactagacactaggaagatgcaatttgatgtttgattttgttaaaactgatgttaattgaatgtgtttagaatgtttgaatttgaacctagaagagtaataggcatttgtttagtttgttt

SEQ ID NO: 108965 - DNA, 243 bp, Glycine max
  Clone ID: PAT_MRT3847_69409C.1
acggtttctctttagtagttaaaatgggccaagaaactttcctatacacatctgaattagtgaacgaggggcaccctttcaagctctgtgaccagatatgagatgctgcgactaagagcatgcttggtgcaggacacagacagcggggttggctgtgaaacctgcaccaagaccaacatggtgatggttttcggagagatcacaaccaaggccaacccggactattagaagattgatcgtgac

SEQ ID NO: 108966 - DNA, 2300 bp, Glycine max
  unsure (1)..(2300): unsure at all n locations
  Clone ID: PAT_MRT3847_6940C.1
ccatagcgtccgcccacgcgtccgcccacgcgngcttttcacttttacgcccagtttcaacaaattgaatattagtggttaaggttgttggaggagctctaacaagagatatggagacacaaaattggttcgagagattgaagcctttcgcagctgtggtatcaatacagtttggatatgcagctatggatgttctatccaaggctgcaatgaacaaagggatgagcaattatgtgtttgtggtttatcgacatgctgttgcattctttgttatggcccctttggcatggttttttgacaagaaagtaaggccaaagatgacattctcaattttcatgaagatagcggtgctcagctggatagagccagttattgaccagaatttgtattttttggggatgaagtacacaacagcaacctttgccgttaccataaccaatatgcttcctgccattacctttatcttcgcatgcattcttaggcttgagaagattaaaataagaagtatacggagccaagcaaaggtggtgggaaccctaacaactgtttcgggagccatggtcatgacactcctgaaagggccagtacttttcgggtcacacggaagcaatgatcacagccagcataatgggacaagtatgcgacatacaataacaggattcatattgatcacaattggatgctttagttgggcttgtttcgtgatcctacaagctattacgcttaaaacctaccctgctgaactctctctttctgcgtggatatgcttaatgggcacaattgaaggtgccgcagtggctttgattatggaaaggggcaacccttcagtttggtctctaaaattggacatgaaactgctatgtgcagtctacactggcatagtgtgctcgggaatgggctattacttgcaaggagtagtgatgaaaactagaggcccagtcttcgtaacagcttttagtcccctctgcatggtaatcgtggctgtcatgagctactttattctggccgaacaagtgtttcttggaagaatgatcggtgccgttattatttgtttgggcctatacgttgtggtgtgggggaaaagcaaagattatagcccaccaaacccaaatactcaagagcccacattaccggcaaaacaaatagtaaatgaggacaatgctaagaaggagaattacaattgcactcacgaagtcatcaacgtcaacaattttgaaaatggaatcactagaaatgaagaactagtgtgaggaaagctttcccttttattatctaaaattcaactattataggacattccagctatgccagtgttcctagttgtttaatctttcaattacgatttacgagagcatagatttttaacgtgttgtaagttatctcaacaaggcaggtagataactaaaaaatagtagtgaaactttgaaaatagattatgatgttgcatataactaaatgtcaaggtgtaacagcagcaataaaatacaaatgtacctattatcaaacttccttttgtcagcctacagatgataccaggaatttgcaagtgtatctaattatacgatatttcgatttgagatatgatacacatagaacaacaaaagaaaacgatgataataagggtattaataagattaagtccttgacaacaaaatcaatttcccttcatgaaatttatcgactgtatgctaccacgatagatccaattgcagcaatacatatttccattttgtttggagagttccctactattttcatcaaaagacgagtttatcctcaaatgggtagaggattcaaaacttatgcattgacaatccgtcagaaaaaggtgtaatcaaaacattactcttatgaaaccaacaaatattgtcctatcttgtaactcaaaattgctccattataaccattgctttacttcttgttttgcacatatgcgttggagttccctgctgtagccaaaaaagattctttccaaatgcaaaaggatttctgatcgataggtgaaccagttatagtctgaataacttcaaacaacatgctctgcggagtgctcctgagctcttgtacaaccccatatatagttttcccattatcaaagtaaatgtgatattggggtggttttgtcttgcaaccagcatgtcgctcaaattcaaatgcattaataaccttggaaaaatacatgagtgacaactgcacaaatagccagcaccttttataaccctcggagttcctcccgtgaccatgccttatactttactgagagaccatccagcataccagtggatagcaaacttctgact

SEQ ID NO: 108967 - DNA, 454 bp, Glycine max
  Clone ID: PAT_MRT3847_69410C.1
aggaaatgaaagagacaggtttcccctgccacccctataaaggatttggtgaaagttaaaatttccctctggaagaaattgaaaccggtttttgggacaaagtcccattgagtaagttttttaaacaaaattcgcggcagctattagcttaaaacttttggaactcaatgggttttttcatcgccctctaaaagcaaaaaatggctccggctcatggttagaacttaacccccaccataggcgtgctttttgcccaacacaaaaacctggagcttggtataaccagtatgcccccacccccgggaacgggacggaggatgttggcaccggcccccttaaacaaggacttgggcccctcatttttgaagatctgggagaatgcatccaaggagcttttggacttgacagcttgaccaaagggtatcatgattttttttctaacagtgtctattgg

SEQ ID NO: 108968 - DNA, 483 bp, Glycine max
  unsure (1)..(483): unsure at all n locations
  Clone ID: PAT_MRT3847_69411C.1
taccggtccggattcccggggcgacccacgcgtccggttgaattcctaattnattgaaggggggaagcagtggggaaccctaagggctacttcnacatgaccattggagggcaaccgggggggcgcatagtgatggagctgtaccccnacacgactcctcgcaccggtgagaacttccgcgccctctgcaccggcaagaagggggtgggccggggggggaagcccctccactacaaggggtccaccttccaccgcgtgagtccgaacttcatgtgccaggggggggacttcaccggcgggaacgggaccggtggggagtccatctacggggccaagggtgcggacgagaacttcataaagaagcacacggggcccgggattctttcgatgggaaacgccggacctgggacgaacggggctcagttcttcatctgcaccggtaagacggagtgggtcnacgggaagcacgtgggtttcggacag

SEQ ID NO: 108969 - DNA, 210 bp, Glycine max
  unsure (1)..(210): unsure at all n locations
  Clone ID: PAT_MRT3847_69412C.1
tttgaaaaccaaaggaattaaagttcattcatttaaaaaataaagtaaagataaaaataacatgcacaacctcagcactctttcttcatccttctttcaacactactaactgtaagcatagtttctcttcactctcagtgctgcaacactcattntatgatcaatgtaatgtgtgtttatcaatgcaggttggttacggtggtcgcaact

SEQ ID NO: 108970 - DNA, 674 bp, Glycine max
  Clone ID: PAT_MRT3847_69413C.1
ttgaggtgttcccactcaaaagagcactagcatagcatagaaccacgcgtccgcaaaagcagagtgcaagataaaaagcaaccaagaaatttctagggagaaactcttcatttcattcacctctcaacctcaccggaaatgcgttcatgattacgcaacagcaacctccagaaaatgccccaagcactcctacttcgtcaccacactgaaagagacacttacaaggcaaccggttggaaccggtcacaaggcggaacccgaagagtcacccccagcgtagaagaagatagcagcctggagaggcggttgccgaacggtgacgtgtacatgggaagcttctcggggaacgcgcccagcggatcggggaagtacctgtggagagacgggtgtgtgtacgaaggtgagtggaagaaaggcaaggcgtgcgggaaaggaaaattctcgtggccttctggagccacctacgagggcgaattcaaatcgggtcgaatggacggcttcggaaccttcaccggatccgacggcgacacctaccgcgggtcctggagctccgacaagaagcacgggtacggtcagaagcgttacgcgaacggggacttgtacgaggggtcgtggaagcggaacgtgcaggagggggaggggcgctacgtctgggaagacgggaacgagtacta

SEQ ID NO: 108971 - DNA, 1375 bp, Glycine max
  Clone ID: PAT_MRT3847_69414C.1
ctcaccgctcccccgactccgacctcccccttcccctctcctttgtgcctctcgtgccgtttctataaaggccaaactcacaaaccacaccctaacaaattcatcttattttgcaacacaattcaattttgagcacttaccaacaccacttccaatggcttcatatcatgaagaagaagtgaggctattgggcaagtgggccagcccatttagcaacagagtagaccttgctctcaagctcaagggtgttccctacaaatactccgaggaagatcttgctaacaagagtgctgatcttctcaagtacaaccccgttcacaagaaggttccggttttggtccacaatgggaacccattgcccgagtcactcatcattgttgaatacatcgatgagacgtggaaaaataaccccctattgcctcaagacccatatgaaagagccttggctcgtttttggtctaagaccttagatgacaagatcttgccagctatatggaatgcttgctggagtgacgagaatgggcgtgagaaagcagtggaggaagccttggaagcattgaaaatcctacaggaaacactgaaagacaagaaattctttggaggagagagcataggattggtagatattgctgccaatttcattgggtattgggttgccatattgcaagagattgcagggttggagttgctcaccattgagaaatttcccaagttatataattggagtcaagactttatcaaccaccctgtgatcaaggagggtctgcctcctagagatgaattgtttgctttcttcaaagcttctgctaaaaagtagaaccattttagaggtaggattcataataagttagtatgattttgttgggaaacaattatcttgttgtgagcaaaggattgttctgttttaaatttaattgactgtgatttggttgggtattggctattttaattttatctaaaaaaaagtgttcagttttattggttgagggtattagctattttaattttaactataaaaaactggtgttctgtgttgttgcctgatttctcaacaaaattgaaccaagctaagaagttgcccgaatgggtgtgcagtataggattttggtgcaagaggaatgagtgttgtgcttaaacctttcttcattattaatgttcctatctcccccatttgtggtgtatggggggaataagacactagtcaaacatcgttagatagtgtatctgctctttcatgatcatttatgattgttcacaaaaggtttctccaagcatgagaaaacactaggtgaatacattgtccactaagttcccaatactttttcttaattgaaaataattacatgatttgatgtgaaaaaaaaaaaaaaaaaaa

SEQ ID NO: 108972 - DNA, 372 bp, Glycine max
  Clone ID: PAT_MRT3847_69415C.1
agcataatgcttacccaataacccaccattatacacatggacccatccatgattctagaaccacaacacaggccgaacatacacacccttcaagcaaaaggtattcccatacttgaactctctgcaataaccaaacacacagatgcagaccctgatacgaactgaaagcaaggtgaagatatagaacctgcataccagagagggcgctacttgcaagcacaaaccatggagtgccaatgactctaaggcgaaacattgagaaatgcctataactgctctttgctcagactctaagagagaagagaaaggttggcataaatgagagccttaccatgggatattatgacacagaacacaccaagaacgtgaggg

SEQ ID NO: 108973 - DNA, 190 bp, Glycine max
  Clone ID: PAT_MRT3847_69416C.1
ggaattcggctcgagagattggttgaagagtgctgttaaatacatcactgagatactttcgttttttgctagtcttcttctttacatgtgaatgagaggttctacatttgtacttatacagtttactttggtggatgttcaccacattaatttcgattgttttatgaaggttttggtataatatgctaat

SEQ ID NO: 108974 - DNA, 235 bp, Glycine max
  Clone ID: PAT_MRT3847_69417C.1
tttcgtccgcttttagctatataggaagattcttgcgtatgcagccataatcctctctctttatctattaccttattatacctttatgtttcatattcctgaaaattctaagaaacctgtttttatgcatatcttttcttctatttaaaatacacacctctgcattgatagttctatcaagtattttccttagcctctagcattgttggttagcactttaacactttccaaccaa

SEQ ID NO: 108975 - DNA, 184 bp, Glycine max
  Clone ID: PAT_MRT3847_69418C.1
gtcgaccgaatcggctcagttggtgttttctcaaacaacccgaccaaacgatcaacaggtgtgacaaccaaagtcggttacgtacgcaaactagaacgtggcatattatgtttttgtgaatttggatattttggagtatcgagattttccgttgggtagtttttgatgatcgaagaagaggaag

SEQ ID NO: 108976 - DNA, 389 bp, Glycine max
  Clone ID: PAT_MRT3847_69419C.1
ttctataagactacttaaggtttttgaagaaattcaactccaccgggtatagtgaattgtttaacaagggcaatccaccatctctgtcctatactcttaataattacaacaagctgcagtctcttgtcttcaatattatattcttgtcaataaaaacactgtacaaacattccttaacagaatcaaacttaaataatgctgtcttccacacattggaaaaattaattctcaaagatccacaagatccttccacttcaaatgcaatttcatacaaaacatctcctaaaaataaacttataagtcaattatacaacattgtttagatcattgtaaaccaaattatcaatctcctttttatccacatattctaaatcatgacctttaatctt

SEQ ID NO: 108977 - DNA, 325 bp, Glycine max
  Clone ID: PAT_MRT3847_6941C.1
gaagcactttcctgggttcgttgtgagagcagatgacctgatagggaacggtgtggccaacatgatctgtatcatggtaactgatccattcgtgatgaactgattggactcaccattcccaaaggacaaccatgtcatgaatgttgttggtggtgcagcctaatacaccaatgccctcggtgttgaacttgacctctctgtctcagagggtggtgtccgctacgagtagtatgctcagctggacgatgaccatgatgtgaatgctgcgatcgtcgatagtcgatgagactacaccatctcctgtgctgaatagatcattaaagcc

SEQ ID NO: 108978 - DNA, 438 bp, Glycine max
  Clone ID: PAT_MRT3847_69420C.1
tacggctgcgagaaacgacagaagggcccttcattcatctcattcttcctccaagctcttattgatggcctcctatggtggtgagcttcttctagactcatcttctccttgaagtggcgtctcctctctctcttcctttctccattctgctgccattcatcttccaagaagcaatggaatccatttatgaaaaagatcctaggcctacaagctccaatgtagcttacatcactttggctcacctgggccaccaaatagcttcatggcgaagaaaccagctcgcctgggcgagttcactgcttcaggttgcaactgccccaaagtgaccctttgcctataaatatgtgtcctacgggtgttttaaggggttccaaggttcacaagtggagagaattgatagaattgagagaatttataaagaagaagaaagaagaggaa

SEQ ID NO: 108979 - DNA, 284 bp, Glycine max
  Clone ID: PAT_MRT3847_69421C.1
ctttttggtactactttagtctttcaaaagatctaaaatgcactggttgtccttatgaaggactaaagtagtaccaaaaagaatctgcgggactaatttgtttactaaggacgaatgatatattaggctagtttgtttaaacttaaaaacaattttaaaataagcgctttttaataaaagtgtttttctaataagcagataagatttgcttcttaaaataagcagaaaaatatttttttaagcataagcagtttagacaaacacatttatgataaaaaaaaaga

SEQ ID NO: 108980 - DNA, 650 bp, Glycine max
  unsure (1)..(650): unsure at all n locations
  Clone ID: PAT_MRT3847_69422C.1
taggatcctggtttattggacttgatgtggagcatatagatgatcgaagactttgttgtggcactcctcctgattgtgagtggaaggcacaagctggaaacatntgtgttgcatcatttgattggagctgcagtggaatttgcaggtctgctgagaggattaaagaggtacataggaggtgtggagagggtgagaatgttttgtggagtgcctctttctaggaggcaacaagtgacgttggagttcttcctaactcaggaagattaatactaaaggcaacgagtcaagcctgcaagattttctatttttttttctttttctatagttttgtgcagtgtagagaaaaaaatgtcattttacacgagaaaagcaggagtgagagagaaatatgatgcttgccccatggaccttcaacattttaagaggagattgaccatggtagcagctagtaagaggacgtgcgcacgagatatatagtccacatcatattcattctttgatatgcttgaagggccattcagtttgttcatagtttcatggctatcaagcacctaataaatagagatataattgggtggctgttgctgccttttattctgcatgaaattgatttttctgttttggttgaaatgaaatatgattcaatggtt

SEQ ID NO: 108981 - DNA, 2186 bp, Glycine max
  Clone ID: PAT_MRT3847_69423C.1
gtggttatgaagtgtttgggaggagagagagagagagggggggtggtgacaagaacctgtactgttgttgctagagagtttccattaaagaaaggaagcctccgacaaggatagtttgggcattacggtaaatataaaaccggtcggttagaaggtcccttcaccacccttcaacgtcccttcaccaaacctccaaagtcactcacatagaaatctaaattacaccgaagcatacctcaaacctcaacacattcataacataaagcaaaccaacaacaacttcaaataaaacagagcatctctctgttctctgttctgttctgattctctctctttctgactttctctttctctcccccctcatatattcttcttttcttcagaaggaccacttcactttcagaaacccagtttcgcatctgggtttttgtttgttgaagtgccaattttgaagataataataaaaacaattatgacttggaaaagcagaggagaattgccttctagaagcgtcatctcgcagagatgggtactgtttctctgcttaggaagtttctgtgctggaatgctcttcactaccaggatatggaccatacctgaaaacaacaaaggactagcacgaccaacagcctcagaagctgaaaaattgagtttagtttctgaaggttgcaattcgagaattttgcaagagatggaaatgaagcgcgataaagacatttatggtgaagttttcaagagtcataattccatacaaacattggacaaggctatttcaaacttagagatggaattggctgctgctagggcaactcaggagtctctacgaagtggtgctcctatttcagatgatataaggttgagtgaatcttcttcgggtaagagaaagtaccttatggtcgttggtattaacactgcattcagcagcaggaaaagaagggactcggttcgagccacttggatgccacaaggtgagaaaagaaagaagctagaggagaagggcattatcatgcgttttgtaattggacacagtgctacatcaggtggtattctagacagagctattgaagcagaggacagaaagcatggagatttcttgaggctgaatcatgtggaaggataccttgaattgtcagcaaagacaaaaacctactttgccactgctgtgaacttatgggatgctgatttctatgtcaaagttgatgatgatgttcatgtaaatatagcaacactgggacaaactctagttagacatcgatcaaaaccacggatatacattggatgcatgaaatctgggcctgtcctatcccaaaaaggggtaaggtaccatgaacctgagtactggaagtttggagaggctggaaacagatacttccgtcatgccacaggacagttgtatgccatttcaaacgatttggctacatacatatcaattaaccagaatgttcttcacaagtattccaacgaggatttctcactaggagtggagtttattggacttaatgaggagtatagagacgattgaagactttgtggtggcacatctcctgattgtcagtggaaggcccaagcagggaacatttgtgttgcatcatttgattggagctgcagtggaatttgcaggtctgctgagaggattaaagaggtacataggaggtgtggagagggtgagaatgctttgtggagtgcctctttctagggggcaaaaaagtgacagtggagttcttcctaactcaggaagattaatactaaggcaatatgagtcaaccctgcaagattttctatttttctttttctttttctatagttttgtgcagtgtagagaaaaatgtcattttacacgagaaaagcaggagtgaaagagagtgtgtgagagagaaatatgataatgcttgccccatggaccttcaacattttaagaggagattgaccatgggagcaagagatcgatatatatatatatagtccacatcatatccattctttgatatgcttgaagggccattcagtttgttcatagttccatggctatcaagctcctaataaatagagatctctgggtggctgttgctgcctttgcttctgcatgaagctgatttttctgttttggttgaaatgaaatatgattcaaatattcaacgataattaaaaaaaaaaaaaaaaactcgagactagttctctcctcgtgc

SEQ ID NO: 108982 - DNA, 249 bp, Glycine max
  Clone ID: PAT_MRT3847_69424C.1
gcgtcggtataaataatgctactcttagatcatacacgtatttgactgtacggtacttgaaaccggcgtcggtttaagcgtagatccacttcgaaccgtgtctgagctgtgagtagttaacacttgactccacagcaggtacagcgttaagcgtgcatcacacgggatccatacgcgcacagtacacttattcgtgcgtctgtaaggtgggcgtgagctatcgcatcacacagcgcacagtgtatacag

SEQ ID NO: 108983 - DNA, 583 bp, Glycine max
  Clone ID: PAT_MRT3847_69425C.1
acaacccaatataatgcataaaaacctattgggattaagtttgagccactggctttttgaatcagttcataagaaggattacacgaggtatcaaagctatctgtgtcagttcagttcactgtttcatccactaaattcaatttgcttcctacataactatttccaaccagatcaccgaataaaataaacaaatgatatttggcattgtaattaaaatttctattcaccaagaacaaacacttgtacttcatttaaggcagtattggaagaatcaccactagaaccattacccccaacatgtcttcccatgatgacatcagtcgtaggaaatgagcatcaagctcgtcactggcaagcagagctcacaaataatatttttacgatcatccccagtttatcatccatcataaaaccatgttgagcgtccattataagtgaggagtcctctgagaaaccctagctttctcggcatcaataatagactccatcaacttgaccgcattatcaagcttccctttcgcattgaccacaacataatcaaaattcttgacatgcttcatctcctccctggcaggaccaatcc

SEQ ID NO: 108984 - DNA, 134 bp, Glycine max
  Clone ID: PAT_MRT3847_69426C.1
tctgccacacccgcgactaatcttatacctgggggcgctttttaaatagaggggggggtatcttaccagaatgcaagacaaggggctcttgcacgggcgaatgctgcttcaacacataacctgattggcattga

SEQ ID NO: 108985 - DNA, 459 bp, Glycine max
  unsure (1)..(459): unsure at all n locations
  Clone ID: PAT_MRT3847_69427C.1
ctattctctctctctgaattctgattctgtatccgaaaccaccaacgacgtcgttgcatggacctcttccttgtcgcattcgatttccgcatagttctctattgccgacgacgattcaattccaatggcgactgagcagttaatgtccggcggcggctcccgctacgtccaaatgaaatcgtctccgccgtcgtctccgtcagccgcggcggccgaggagatgtcctcggtcccgtcgttccggcacagcggcgccgaggccaatcggattttcgaggaattgccgaaagccttcatagtctacgtctcccgccccgacgccagcgacatcagccccatgcaactctcttacacaattcaggttcagtacaaacagttcacgtgggagctaacanagaaagcccatcaagtatttattttgcatttctcgctaaagaaacgtgcccttattgaggaaat

SEQ ID NO: 108986 - DNA, 524 bp, Glycine max
  Clone ID: PAT_MRT3847_69428C.1
ggctcgagctctttcttgtcccaaatctccatccgggtcattagtttctgagcctatcttgttttctttttcaaccctttactccattcctcgtttcaagagagaaaaagggttgccttttctttttaattcttgtctccttattttgtttcttctgccactcattgcttgctgagtgagagagccttttgttctgagttcttggtttctttggttagtgcttctgacaatatattggaacttggtttttggggattggtgcttttttgggggtacccagttgaacatttttttcttcttcttcttcttcttcttctctaacccataaagtcaaagctctcatctttgataagttgtgaacaaggtctatgagttgttccttgtagtgcagagaagggcatggtctttttgttgagtttgagtgattctgctacttactatactagttagtttgacatcttgaggcgaagtagaatgggatctggaaatgaggttcactcagttgtggagttcaatttggatgc

SEQ ID NO: 108987 - DNA, 499 bp, Glycine max
  Clone ID: PAT_MRT3847_69429C.1
gcgctctcgcgttctatttcctagtatcttttggattaagtactgattttctctcttaatccaccatgtcgaatagccaaaatccgaattacgatggtagctcatttctcattgacataaccaccactgtgaattacaccatcagcacagccaaaaaaagatggcgttttgcttatactgctatttattctagaagggtcatgctttccttggccaaagaaatcatatctaagagaaatacaaacactcatccttactctaaactattccaaactcaatctaccggttccggaagcactcttgatatcattgagccactaattccccaacatggtaccaataatcattattctttggttcctgatgttgacaaagccagacttgctagcatggtaaaggacaaaaacttggaagcctttgttgagtttggaagagttgaaggtgttgcaaatactcttggaaccattcctgcaaagggaattagtggcgaccacgatga

SEQ ID NO: 108988 - DNA, 382 bp, Glycine max
  Clone ID: PAT_MRT3847_6942C.1
accacgcgatagctcacgcgtccgactgttatgcctcagtctcctgctcaatcttcattgacctgtaatttcccttgatgacaaaccaagactaacacacacagaacatagcttgtgttggagaggtgagaagacacagaaagaatggcaactgcaggaacaacacagaattgtaaggcctgtgacaaagccgtatatctggtagatacgttgaccgcggataaccgagttttacacaaagcatgcttcagatgccatcactgtcaaggaacactcaagctgagcaactacgactcatttgaggtagtgctatatatgtagccacactttgaccaactgggcaaaagaacagggagcctagacaaaagctttgaaggaacac

SEQ ID NO: 108989 - DNA, 320 bp, Glycine max
  Clone ID: PAT_MRT3847_69430C.1
aaaccaaccagcacagacagttaaggctgtttatcattaaccgaatttcattacaaggagaatttttttcatccaaaattgtggatgaaaaaaattttccatttcttcacaaaatatactatcccctacctaaaccgtattttgaaggaataaaaaaggagtatcctggctttacgtggaaaatagggcttcttaatccgaattaaaacaaaaatgtccaactgtgcctctgggactactaaaacagtggatccctgttggacatcaaaactaaaaacccttgggtatgtgcataaataacaactatgattccaaccatt

SEQ ID NO: 108990 - DNA, 166 bp, Glycine max
  Clone ID: PAT_MRT3847_69431C.1
acacgaccaaaaagcacagcacgcccactacgcccaaaaggcaacaaactagccctctgcgtgaaagacatgtgcaacaacgaccccaacacaaagggcgaaaagagagccacggaaggggaccaagaaggagccaagaacgccacacccgggcgagagataggag

SEQ ID NO: 108991 - DNA, 1212 bp, Glycine max
  Clone ID: PAT_MRT3847_69432C.1
acgcggctcgagcataaatattaggtttatatacacatatgtacagaacatcctctataacttagcttatacaatatacacaacaaaaggctcggtttcgcacagcacacttccctctccaatggaaaatcaattcccagttatcagtgattcctactgtgttccttatcttatcaatctacgaatcaatacagaaaaaggtatcacttacgacgcaaacaatgtccgtcacttttatatcaaagataaattattcacacttcacaagcgacgtgtcctgtgtgataatcaaggaaaccccatcgtcactctatacaagaagagaatgacattgcatgggcgatgccaagtttttaggggttataaaagcaaagatttctctcaattgctcttttcagtgaagagatcagcaatgataccgagtgggatgattaacttagaggtcttcctcgctaacaaccaaagagaaagtgcctgtgactttagagtcaacgtttgtagagataaaagatcatgcactgtttatgccggtgaatctcctagaattgttgccacgatggataataatgacggcttcaatgttttggtctatccccatgcggactacgcattcatagtggcactacttatgattgttagcgagatgaaacattattttgacgaaatggtgtatttggccgccggaatggcaccacttggagttggtatgaattaaaggagctcccaagtaattttactcaattatggacctatttaaaattaaatcatgggcttgatttctgttatagaatagatagggtttggttttcattttcagaggaatgtttatttccacctcattgcatgaatttgagagaacaaaaaagcgttaacaaagtctggttggatggatgatgccaaataacatttgcatcttcaatgagccacgaccatcaaagaggttccttgctacactctcttgagcacgaacactctgtcatgcaaattccctaatcaaatcatctatcttctttgtgggtaggtcttgtatcatacaagcatagttttaaattgcgatcgcggtggtggtttctagttacattgtagtgagtcagaaaacttttatattccaagtaattgtaggaaaatatgaaaaatatgactgatgcgatcataattgtgattgtaattgttgcattgtgatgagttaatatattttgacattaggaccgc

SEQ ID NO: 108992 - DNA, 403 bp, Glycine max
  Clone ID: PAT_MRT3847_69433C.1
caacaaaaggctcggtttcgcacagcacacttccctctccaatggaaaatcaattcccaagtatcagtgattcctactgtgttccttatcttatcaatctacgaatcaatacagaaaaaggtatcacttacgacgcaaacaatgtccgtcacttttatatcaaagataaattattcacacttcacaagcgacgtgtcctgtgtgataatcaaggaaaccccatcgtcactctatacaagaaggtttgactactgaggcatcttatgctcgttgatttccttcaataaagaatgacattgcatgggcgatgccaagtttttaggggttataaaagcaaagatttctctcaattgctcttttcagtgaagagatcagcaatgataccgagtgggatgattaactt

SEQ ID NO: 108993 - DNA, 409 bp, Glycine max
  Clone ID: PAT_MRT3847_69434C.1
gggctcgagcttctaatcttttcacgtcattattctaaacttgcagatgttcacatgccaagcaagatgaaggggacgttaatgtttctggcgctgctcctttgagccacctttcatgtctccttctccattgactgacggcttagaggcgacggcagctacgagctgggtccgaagccctacaccctgaaaggaactgtggtgatcggcggcagccactacatcccagaatgggagacctttggcttcgacgagtacatatagtacggcctgaagcacaccgacatgctgctcttgggccccgaaggggcctgacgagagcgcctcaggaacgaagccttcattagtccatgagcaatgtgatctatggcatggactcctacatcaactgcatggaggccagcacctg

SEQ ID NO: 108994 - DNA, 351 bp, Glycine max
  Clone ID: PAT_MRT3847_69435C.1
ccttctcttggtctactgcaatgcatgtggaagactctctaccaaagcagagatagttcaagaagtccagactgcaacatatatggtgcatggcttatgggcggttcttatcataccaatactgaacacgcaaactgcattgttgtaagttgggcctttacaaaggtgaaaggcccatttgggtggtatacatttacggatgccattgggcagatagaaccagacatgaattcaagggttaagcttttgggtaccactaccaacggtgattattgatcaaggaaaatatatcgcaaatggtaaagtttactgaagcatgtgctgctgttggcttgacatcaagttacactc

SEQ ID NO: 108995 - DNA, 304 bp, Glycine max
  Clone ID: PAT_MRT3847_69436C.1
cacatggtctgatagcacattacactgatcttgtgcagtgcggatactgctaatgaaaaaatgtgaatatatgtgatgttgatggcatgaccccactttattaccttaggcaacaccccaaatttgcgtcatcggatgtactaattaacaactgaatctcggctgggggaatgcttggttgtcatgtgcatatttcgagaaaagccgtaccttaacacgttgagaatgcaaatcattggaggcatttctgggacattgttcatagtctcacactctgatattttttcgacactggcattgtgaa

SEQ ID NO: 108996 - DNA, 150 bp, Glycine max
  Clone ID: PAT_MRT3847_69437C.1
cgaagccgcaccaaagaaccacatgggggggggatttatacaagtttcgcggaagggaacaaccatgcataacgaagtggcctcagacaatgtgcggttggaaaactaacctttgttcttgctgggaagtttgtatgagggaaaccatat

SEQ ID NO: 108997 - DNA, 677 bp, Glycine max
  Clone ID: PAT_MRT3847_69438C.1
cataaatctgttctaacttgtcctctgagcttgtctgctgaatgtgtcgcccttccggctcgttaagatcttgtgccacctaatgggtctctggttatgcccgtcccaacaggctccaattgggatcacaaggcttcctttccttcctcgggcgagaaggttaagtgcacattctgtagaaagcgtaagaaggaggccattagctgtgatgatgtagattgctctcaagataataccagttcaaagaaaaagtgtggagagaagcaagatgatcatgtggagcctcagaaatcttgcacaatgactgaatcatctcgggacagccgacgactagcacaagttgctcgccagctcatatctttgtctgagaagaaatggtggcagtagattcatctatttactgtgatgagttggttggatgggaagagactcaaagcacagtccaatgcgctattgtttccggaggtggcgctttttaaggatgctttacgttgatggagcgtgtgttaatagtaaattattactattattactataactataatgtatatcaacttttctttcatccttagcttagaaatttctagcattatatcatataaaacataaattatatatactattgctacccttttctgggggtcttgtttgcaatacaaaaattgctgatgataata

SEQ ID NO: 108998 - DNA, 575 bp, Glycine max
  Clone ID: PAT_MRT3847_69439C.1
aattcggctcgagggcaaagagagggttaagaaggaagtttgagagcatttctcttgttttgaatttctatttggcttgtagttatagaaaaacttgtagaatatggagccatatatgaataggaatatatataatttgtggtgcacgcagttttatttgaactgcatgcagagaatcatggatcctgttccgggtgacgggtgttgctcatgtacacaggtacctgttgcttggctagtgggtaaaacaattggactctacttctcagcggaatggtgcgtcccatgcgccaagttcactccaaaactgatttctgtttacgagaagataaagcacgagctagccggaaagggagaggaagacttcgaagttgtgctaatatccagcgaccgcgaccaagcatcctttgactcctactacagcaccatgccttggttagccttacctttcggtgacccagaaatcaagaacctcgttagacactacaacgtgcaagggattccctggttggtgatcataggccctgatggtaaaacaataaccgtacatggcaggagtttgataaacttgtacc

SEQ ID NO: 108999 - DNA, 599 bp, Glycine max
  unsure (1)..(599): unsure at all n locations
  Clone ID: PAT_MRT3847_6943C.1
gtcagttaggaaggtttcctgtcatcactgtatgacgtcctccttctttggggggggggggggggggggcgcgtccgcgtggagcgtataccataaccaaaataaagccgcggtgttcgggcgatagaggccatagcggaccaccaatttgagatagcgtagaaaggaggagtagcgttgagttgagtaaacnnggggtacgtaacagccgaaccgagcacgactaaaattagttgtttaaaaaggtaaaagatggaaagagaacaaaaaccgaaataagcgtcgaatgggaaaacaagaggagttaattaagtggcacggttatgtacctaatggtaggtagtacgttgtgagggagggagccgtttgaggtatccgtgggtgaacgggtcgataataggcggcatggcgtagtaggccataggtgagcttgggctgactgtacaattcccagtgccactagtgctacgagtaccattattacgccggcctaagttcatcaacatgggcaagcgtagtagagaggttttaggccctgttacgacacggttaagtagaataaggtcgaccccacattatctcgaacacattttataatt

SEQ ID NO: 109000 - DNA, 345 bp, Glycine max
  Clone ID: PAT_MRT3847_69440C.1
ataacacctattttttcttttttccctctttgccaaaacaaaacacataaaaacaaacggacagaaattccggaaaaaaaaaccaaactcaacctttaaaagaaagggacaaataccccccccccccctctaaaaagcccaaaacaaccccttccattttctccccccctcaaggcgggggaaaaagcccccccttctcttattcctgggacaaaaaaactgacccctactcaaaaaaaccctggcccacctttgctgaggaaaaagccaaataccttgccccccccccccccctcaaacttgttgccaaccaagggaccctttccaaactttcaactccctttt

SEQ ID NO: 109001 - DNA, 246 bp, Glycine max
  Clone ID: PAT_MRT3847_69441C.1
tccaggtctcccacacgtccgacaggagcaaaaagaggagcacaagtggcatagttgattttgatgatcaagataactgtagataatgttatgagtccttgtgtccttcgttgctacaattctagaatcatggtaacatgatacttacaagagtttcacacgttcactcacacacagtgatactgtgctacgtaccccgtacgtcagatgctgcaattgcaagcttgctgtttgatcacacaacat

SEQ ID NO: 109002 - DNA, 246 bp, Glycine max
  Clone ID: PAT_MRT3847_69442C.1
gtctgatccccgatttgatctaattttaactatccacgaacacatttatactgggggttgtcttggttatagagtgaccccatacacttgatgatcacccagacttattgtttggtaccattaacaccctaacattacagcctatgccttcccatgtatgatgtgcggactcaggcaatgtatcaactccttgattatcgaattattgggtggattttttgctgtttcagggaaaatgtaaacaaa

SEQ ID NO: 109003 - DNA, 137 bp, Glycine max
  unsure (1)..(137): unsure at all n locations
  Clone ID: PAT_MRT3847_69443C.1
atnaaatatgtatgantgcncactggcttcagcgctgtttgtnttnnanatgataatttgtttatacaattgtnttatattatttacatgtaagtgtacagtaagcttgtatgcntaanttctttntgcnaaanaaa

SEQ ID NO: 109004 - DNA, 174 bp, Glycine max
  Clone ID: PAT_MRT3847_69444C.1
gatggaaatgggaaggagttaacattactctggttaagacagcatattcagggtgtgagacctgaagaacatacagtgctgatctctatttatgataaaaatgtccaagtagatttatatcaggttattatttttctaccgtgtcttggtaataatctctgttaagaaaacact

SEQ ID NO: 109005 - DNA, 184 bp, Glycine max
  unsure (1)..(184): unsure at all n locations
  Clone ID: PAT_MRT3847_69445C.1
ggggnaaacaagctaatcatattaaaggggcctttgcagagaagacaattaattagtccaagctccttcaaataaatttcagggactaccgaaatcaaagttaaatcccaggggcccaaaaacttccttaagggcaagcctgtgcagttatagaaatagccggaccccggggcggacccctggg

SEQ ID NO: 109006 - DNA, 253 bp, Glycine max
  unsure (1)..(253): unsure at all n locations
  Clone ID: PAT_MRT3847_69446C.1
tacaagtacactcataaaactgagcttcttcaaaaataatgggtcatcaanttataatgataatgagtattcagaagcaggctgtaatctctacatgtgcacacgctcaataccgcctcaatgcagctataaagatattagactaaattcataccactcagattgtaagagctatatatacacacgctcacaggcagaacattatcattagcttaacaccaacaacttctgctacgaaccttacaagtccaaa

SEQ ID NO: 109007 - DNA, 299 bp, Glycine max
  Clone ID: PAT_MRT3847_69447C.1
aagctaaaacaactttaacaagctctaaaaaatccgaccgacaaaatatccaaattgtcggcttctttatgagaaccgtatctcgacaatcaacattacccaagaccttaactattgatgggcatccaaaacctgattctaatccgacaatatgaatgatgaaacctactgtgacacacacatccatttataaaatttgtaggactctgcttgatactattaccacactatattgtgatgccatgcttacccactaagactggaacggacatactaccttcttagagacagtcttgctc

SEQ ID NO: 109008 - DNA, 207 bp, Glycine max
  Clone ID: PAT_MRT3847_69448C.1
gagagactttgaaagtaggcttcctaacaaaataatctatgagaacaggttatcacttggttaaaggataaacctccaggttcaaccggttaaaatcttcctaatgggtggttaccgaaaatactctggagttaggaattcttctcttggacctattacgtggtgggggggggatagccctcatcccagcctcccggagtgttctcc

SEQ ID NO: 109009 - DNA, 303 bp, Glycine max
  Clone ID: PAT_MRT3847_69449C.1
gtcttaagtccattaacctctctaaactaaaatccaataacgaaagggaggggacgcgcgggaaagaccggaaaggcaccggggggggggggggggcgcaccaaagtgagcgaaaaggaggcgtggagaagagaggcagaaagaggggcaaaggggagaagtgggaaaacatgaaatccgcagacaagaccccacaagaaaccagccggaagcaaaaagggggaggccggggggggaaaaagggggagcaaacagacaggaactgaggggggcccagggcccgggtagccggagggaacccgg

SEQ ID NO: 109010 - DNA, 190 bp, Glycine max
  Clone ID: PAT_MRT3847_6944C.1
ggccgatacataaggaagccaagctttcttacgattgcgtgcaacaaaataaattctctggacggtaacctacatcgaatgtgatggccaaaaccttgcaactggccgactgaaacaacttgggggttatccaacttaagccagttgccgtaattacgaataggcccggatcgatcgccctttccaacag

SEQ ID NO: 109011 - DNA, 139 bp, Glycine max
  Clone ID: PAT_MRT3847_69450C.1
ggacgacacctgtcccttccgccccggaattgacacgtgccgctaagaaaaacatccaacttttttctcatacagaaatggcggattcttagaatccaaagccttgacccaccgagttgagctttttaaaaccttacgg

SEQ ID NO: 109012 - DNA, 255 bp, Glycine max
  unsure (1)..(255): unsure at all n locations
  Clone ID: PAT_MRT3847_69451C.1
gtttcatactttttttcttcttcttgaaatggctctccaggcngcttctctngttgcctgcttctttgctgcggttcttaaagagggaaagagnggngngtctctcaaggacttccacctgtttcggtcnttgcattttgcagnaacctatgcaaagcnaacntgcaggnccntcnggcatngaggtttcaacagggnantcgaacaaaagcactgtggctgtgnagggccnaaacagnggnnacaggcctcntc

SEQ ID NO: 109013 - DNA, 129 bp, Glycine max
  Clone ID: PAT_MRT3847_69452C.1
aggaagaaaggaccgaactttgctagatgcaaattaactggccgctcgaccgatcacttacttgattgatttagtctggcctaacataccaaacaaagcctagctgggcttccttcattccaatagagc

SEQ ID NO: 109014 - DNA, 419 bp, Glycine max
  Clone ID: PAT_MRT3847_69453C.1
ggaactcccttcaagcttctctttaacaacacgctaattttttttctttatccaaaatataaaccccccccgatggggctaacctaagaatatcccatcttattctctaaaaaaattgcatattgaactgttatattacatttgaaacataatttgcttgcatttgttacaaactccaataattctcttaaatacactacatacacattttagaggatttggccctgagcatctgatctcaatgtaaaggccagtgagcttatcttttttccaatctctgatgaaacgttcttaacggaagaaagatcctcatctgcctggaaagataatccatttgcgacgtcacccagcagaaaaagcgaaaatgttgcctcttgagtcaccaacaacatcatgttcctgagatgttactcataccc

SEQ ID NO: 109015 - DNA, 353 bp, Glycine max
  Clone ID: PAT_MRT3847_69454C.1
cgtacccttcctcgggcaccgccccctggccggccagcatcgcctacgggtacccgagcatccccgtcccggccggcgtcgcgaccatcaccttcaacaacgacgacatcgccgcgcagcaaagcaccggcagccggggccagggcaagttctacacgctgtacggcagcgggcacagcgcgggcgcgatgacggcgtgggcgtggggcgtgtcgcgcatcatcgacgcgctcgagagcaccgccgcggcgcgcatcgacgccacgcgcgtcggcgtaacggggtgctcgcgcaacggcaagggcgccttcgtggcgggcgcgctggacggtcgcgtcgcgctgacgatcccg

SEQ ID NO: 109016 - DNA, 791 bp, Glycine max
  Clone ID: PAT_MRT3847_69455C.1
aggagccagtaacacttcttgagtactcaatgaatgcagtcacggaaggcatcgatgcaattgccactacccgggttgtgattcgtggggagagtgaaacaagtactagtactactcatgctttaactggagaagctgttcttcgaacatttagtgggactggagcgggaatggatgtcgttgtttccagtgtcaaggcctatattgctgcactaaacaagatgttgggtttcaaggaaacatctccatctgctgaaaaaattccagtttcttcattgaagatttgagaatttgtgttgctgctttggtaacagttgtttgtgttcaaccacaaagaggaagacaaagttgcagcagcattcttggctctcgcaggtctccatatttaaggtgtcgtccctgtgttttgaccggaatgtatttgcagtcaggaatttattgattcacccaagtagccttagcaaagaatgtaacgtaagtccattttgaatattcagactacagggattctttccctttttattttatagggtgccctttatttgaaattataaatgtcctttaagattagagtgttcctgtccgttccagaataaggacatctcaaagtttcgtcttgtggctataataaggtgctatggcaccattttgttggatcaatgtaatatttgtcaattgtcaaaataaaaaatttggaagcggatggctgtaaaaaaaaaaaaaaaaaaaaaaaaaaaaaaaaaaaaaaaaaaaaaaaaaaattaaataaaataattttttatttatatata

SEQ ID NO: 109017 - DNA, 564 bp, Glycine max
  Clone ID: PAT_MRT3847_69456C.1
cttatagttcctgagcagcctagtcgcataggggcaaggcctttaatacaccgctgccaacccagaatctaacgcactcaacctccacctgaacacttcagaggttctgctactgaggaccggtgaaggactccctatgagccacggacacactaagggccataccatgaacctgccataggaatcctcctatgcgcctgacttgaccaaacgcgaccaacttgtgcagcatctatcgctaatgttggcttcttgctagtgaaggctccttcgcgtgctgcaatggaaacatatgttgggcagaacttgaatctgctcctgggacatttgccggtcgctgcttgccatattatggaatgtatctaataggaaattcctgccctggacggaattgccttgcaccgtggctttcctatactagcactactgctattcgtagcatggcaatatatagggaaggtgcgaaacacttaatagatcatgctgatgctgcggaagcattctggaagatgaagtgcaaagcgaacagtgccagtcaacatgagactcgtcaactaatggctt

SEQ ID NO: 109018 - DNA, 2627 bp, Glycine max
  Clone ID: PAT_MRT3847_69457C.1
ccttggtgacgcccacgttcattgtttcttttagcgttttaaagcagtggctgagcagagcaagagcggagttggtatagatccgagagccctccacagtgagtgtttgctcactgaaactgaatattcaacttcagcacactctctctatctagggtttttccatggccaccgtgatccgcaatcctatcctctttccttccacctctcaccgccccaaccaaaaccacacattcctcactctccgcttccctcaaaccttacgctcttctctccactccaaatcccgattcgccgtttcctgctcccaatcggaacctcctcctccttatccttcttctcctcgacggcgtcctccgtacatccccaaccccattcctgacccttcctatgtccgcattttcgacaccactctccgcgacggcgagcagtccccgggcgcctccatgacctcgaaggagaagctggaagtggcgcggcagctcgcgaagctgggcgtagacatcatcgaggccggcttccccgccgcctccaaggacgacttcgaggaagtaaaaatgatcgcccaagcggtcggcaacgccgtataaaacgacggctacgtccccgtcatctgcggcctctcccgctgcaacgagaaacaaattagaagcgcccgtgatctcgtgaggttcccccagaaacgcaggattcattccttcatctgaagcagccctattcacatggagtagtagttgcaaacacacattcatcgattcaaccacattgccctagcaaatggtgtagtgtgcttccagtttgggcttcgatgatatagagattagttccctacttgatgtaaggtctgataggtatttggtttcttaaaatcttgcagaagttattactgtccttgcctttacgctcaacataccttacaaaaatggtataacgatgcaaagttaatttgcaaaggtgcatattgatataaaacatatgaggcctgtaattgaaaaagatataatttagacccacttgtagtatgaaattgtacttttttctacatatattattgagggtgggcgtagcggtgcgatgcaattggaagtgacgattaatgggatgggtgaaagggctggaaatgcctccctagaagaggttgtgatggccttgagatgcggagcacatgtcaatggcaatctctacactggaattaatacaaagcacatctttctgacgagcaagatggtcgaagagtacactggtttgcagatacagccacacaaggctcttgtgggagctaatgccttcgcccatgaaagtggcatacatcaggatggaatgctaaaacacaaaggtacatatgaaataatatcacccgaggacatcggacttgaaagaaccaatgaagcaggtattgtactggggaagcttagtggtcgccatgctttgagaaagcgacttgaagagcttggttatgaacttaatgacgaccaagttcagactttattttggtgttttaaacccgcggctgagcaaaaaaagagggttactgatgctgacctcagagcattggtatcagatgaagtttttcaagcagagcctgtctggaaacttggtgatttgcaggtgacttgtggaactcttggcctttctacagcaactgtcaaacttttgagtagtgatggtagcacacacgttgcctgttccattggtacaggaccagtggattcggcttacaaggctgttgatctgattgtgaaggagcaagtaacacttcttgagtactcgatgaatgcagtgacagaaggcattgatgcaattgccactacccgggttgtaattcgtggggagagtgaaacaagtactattactacccatgctttaacgggagaaactgttattcgaacatttagtgggactggagcgggaatggatgttgttgtttccagtgtcaaggcctatattgctgcactaaacaagatgtcgggtttcaaggaatcctctcaatctgctgaaaaaatttcaatttcttcattgaagatttgagaattgtgtggtgcttctttggtaacaattgtttgtgttaaaccacgaagaggaagacaatgttgcagcagcatccttgcctctcgcagttctccatattaagggttgtccctgtattttgaccggaatatatttgcaacctgtaatttattgattcacccaagtagcctttgcaaagaatgtaacttaagtccgttttaaatattcagactacagggattctttcccttttcattttctaaaaaaaaaaaaaaatgaaatttgaaattataaatgtgcttcatgattggagtgttcctgtccgttccagaataaggacatctcaaagtttcgtcttgtggctataataaggtgctaaaaatggcaccattttgttggatcaatgtaatatttgtcaattgtcaaaataaaaaatttggaagcggatggctgttaaaaaaaaaaaaaaaaaaaaaaaaaaaaaaaaaaaaaaaaaaaaaaaaaaaaaaaaaagaaaaaataaaaaaaatcaaagacaagaaccatggtgagggcggaaaaaaaaaaaaaaaaggggggggcccttttaaagaaccaaattttcctccccgggctttgga

SEQ ID NO: 109019 - DNA, 1127 bp, Glycine max
  Clone ID: PAT_MRT3847_69458C.1
ggttctgcacttgatccttagccctggatctttacgcttttcggtatcttctagaaagctcaagttactcacttcgatgttgttcagtttgggttagtgatacttctaatttcaaaccgttgtaatcccttggaaatttttttcactctcttagcatctagggtttactctatcattttttgcgtttcaagattttctgaatttcttttaccaattttgttcgcgttttaaggtcaatattcatgcatcttattagtgcatggagaatccctgtgaggtgctcggttccaaagggttaattagaaggcatgaatttgtgaggatcataatccagtgtctatattcattagggtacagtagctctgcatcgtgtttggaatcggaatctggtatttcgtacaagtccaatgaggttaagttgcttgaatcacttattttgaacgggagttgggacgaaagcattgattatctcaattccataaaggatgagttgggtgaaaccagggaatctgccctgtttcttgtgttcagacagtgtgttatggagtatttgaattgcggcgagtatgccttagctttaggggtgttaaggaaacaagtttctgccttggatgcgggcaagtgcaaagttcacagcttcgctaagtgcttgctttcgtttaaggatagggagttaggtgcagttgatggtggcgatgttgttgtgcatgatttgcgaaagaagttattagcagatttggagaagttgtttcctcctccgatttcggtgcctgaaggaaggctggagcatttggtagaaaatactgttatgtcttgggttgattcgtgtatgtatcatagttcgtcgagtccaatttcactttatgaggatcatcattgcagcagggatcagattcctactacaacgactcagatattgactggacataaaaatgaagtttggtttgttcaattttctaataatggagagtacctggcctcttcatccaatgattgcaccgccatcatatggaaggtgctggaggatgggaaattgacattgaagcacacactttatggtcaccaacatgctgtatcttttgtagcatggagtcctgatgacaccaagttgcttacatgtgggaaca

SEQ ID NO: 109020 - DNA, 322 bp, Glycine max
  Clone ID: PAT_MRT3847_69459C.1
ccagcgtacgtgcacacgtctgattacagtcactggttattcagacgcacaggcggatgtaatagaaagcgatggtgtgtctacataagacggttatcaaaaacatcttgcttacttgaacagcaacggagatgctggagcagatatgatcgtcactcatttattctatgatacggatatattcctgaactatgcgaacgactgtccccaaattcgcaataaccagccctatcgtacctggtaacatgcccatttattactacaaaggctttatccgcatgactgctttttgcataacaaatataccagctgacattattgc

SEQ ID NO: 109021 - DNA, 373 bp, Glycine max
  Clone ID: PAT_MRT3847_6945C.1
attcggctcgaggcaccagtttcaccgcactaaatcttgttgtttggagcgatccgagaaaaactctgtaaacatgttggtttaccaggacctccttacaggtgatgagcttctctctgacttctttccgttacaaggaaattgagaatggaatgctgcgggaagctgaggggaagtgggttgctaaaggagcagttgatgtacacattggtgcaaacccttctgctgagggctgaggagaagatgagggagttgccgttgctgttggtatggacggcaccataaaccaggcaacaaagaaagcaatggaaataagtcacatggccattcacgtacgttaccccaccccggagggtgttcaagatttgggact

SEQ ID NO: 109022 - DNA, 483 bp, Glycine max
  Clone ID: PAT_MRT3847_69460C.1
cccacgcgtccgcatgactatatacgacgtcactaaatgaatggatactacatggacaggtataattaactggacgtaattcacaaatatgacagcttatgtgctccaaagcatactacttctatgacctcagttcaaaggttttagttttaggcagtttccttgcttttaatcgagataatctggtgatgggctagtagtaccatatgcattataattctatcataatttttaatcagaggctggatgtgtcaatcctttgggccattctttactcaaattgtcatctcgtgcatcaaatttcatgggttctttttattaaatttttattttaggcataaaaggatagaggtagtgttcagtctgaagttaccaattttagacagaaatcttcctttggttccctttcccttataacaaggtcaagggatgggaaaaggtttataaacaaaattgaaaatatcaatgtccaaaaatggaaac

SEQ ID NO: 109023 - DNA, 317 bp, Glycine max
  Clone ID: PAT_MRT3847_69461C.1
aatcaagaactgggtttctcatcaatggacaaaacttacaacaaaatccagtttaactgtttaagctatacgaccggggatgggaatatcgatgggtcaatacaaaccatggctttgtctaatataccggctctatcaagtcccttagactgtgcggtctcacatgttatgatttaagtacttgtccttatacaccacagatgtcggggtttttgatagttgcccttaggtggcataagaaggtgacgaacattacccggtagaacaacttcttcaaaagttgcaagtgtgctgtctcgaaattaaagtggacaaca

SEQ ID NO: 109024 - DNA, 303 bp, Glycine max
  unsure (1)..(303): unsure at all n locations
  Clone ID: PAT_MRT3847_69462C.1
tttttttttntctttttttacnnccanngnnncngnggatgagaaacctcggagcctaatgactcgcggggaagggaaaaacaacaactatcaaacccagaaggaaaaaaataagctccacccggggagaaaccccagcaaagaaaaatacaaggggggggggcgaaaaaaattggaggacaagagaacgggcaaatttacaaaacacgggaccagaacaccacaggaagcacacaaaaccgccgggggcggactgaaaaaaaggtgattacacgggaaaaaaagaggggacaccgccagggg

SEQ ID NO: 109025 - DNA, 841 bp, Glycine max
  Clone ID: PAT_MRT3847_69463C.1
aaaaaccttaaaaaacccttgaaaaggttcacgaaaccaattattaaccgaatataacgactcgtctgaacctttattactcttcagagattacgaaaacaacgacaacgacaacgacgccttctctttcctccttgaaagaaaacgtagtttccaaacggagcctaacaaagccttcttcagcgtgcgagagaatattaataagccatgcgaactaagcaccgaagtggtgaattgcgacaaattggatttggagagtgaagagttcgattgcgaatcgatgctcgacgaggaaatcgaggaaggaatcgatggcatcatgcggggaagaacagttcaaaaagatgatactaattgcactgagggtcacataggactgaaacaaaggtctcagtcaccgttgtatcatccctcgtgtcactgcggtgatggaggaaagttcggttgggtgaggactctccggcgagtgggtgaggatgatgatacgaagtggtggaatttttgtgtggttgatatgcttcaaatctcgccgcggatgaagcacgctgcggcggaggatttggttccggcaaccaccacgacgacaacgaagaagaaggcaaagaataagaaaaacaagaaggatttggtgaaggaattattaccggaggaggtggcagtgagtcagggcttgctgttgaaattgaattacgacgacgttcggaatgcttggtcggaccgggggtcgccgttcgccgatggttcgccgggaaatgacgtcaccctaagctgctcgtctctcgcccgcgatttgaaatctaaaagaaaaaaggtctatttcttcgtggatggagggaggagt

SEQ ID NO: 109026 - DNA, 1006 bp, Glycine max
  Clone ID: PAT_MRT3847_69464C.1
aattcggctcgaggtttttcaatttattcgtagttcattaaagaatatttcttaacaagattgttttcagatagaagaaagaagaaagaaaatgggtggtagcagtgagaagaacaaaaacgcagagctgatcttgattccctcgccaggaattgggcacttgacttcatctctagaatttgcacagcttctaatcaaccgtgacaaccgtctttccgtcacaatcctctgcatcaagttccctttcacaccctttgcagactcttacatcagaacagctttagcctcacaacccaaaatcaaactcattgatctccctctagtggagccaccaccacgggagctagctctcaactcccctgaacactacatatggaccttcatggaaagcctcaaaccccacgtcagagccatcatgcaaaacattttatcacacccagttgttggtttagtccttgatatctttgctatgtctatggttgatgtgggagatgaacttggcataccctcttacatgttcatgacttcaaatgttgcattcacagctttcatgcttttcctcctcagccgtcggatggaggatgtgttcagtgattctgatcctgacttgtcgattcccgggttcccggatccggttcctccgagtgttctgcctgatgctgctttcaacaaagacggtggatacgccacgtattacaagcttgctaagaggttcatggataccaaagggatcattgtcaactctttttcagagctggagcagtatgctattgatgcattgtctgaagaaggtcaaagtcgaacccctcctgtctacgctgttggccctttgattgatctcaagggtcagcctaaccctaatttggatcaagctcagcatgacaaagtggtggaatggctggatgagcagccagggtcttctgttgtttttctttgttttgggagcatgggagggtttgggcccttttaaacaaggggaatagcacttgcactttaggggagtggg

SEQ ID NO: 109027 - DNA, 257 bp, Glycine max
  Clone ID: PAT_MRT3847_69465C.1
tacggctgcgagaagacgacagaagggcacactgagtatataaaaaataatctaagttcgattctcacataatacatccttggagaagagtgtgcaactttaagtgtgattaagtttcagatcaaagattaatcccataatcaactcaaagaaacgaaacttatgagaatactttagagtctcactggggaaccaagtcaaaaatatatattaaaagtttaccattttaaggcactaaaacctatcattaaggactc

SEQ ID NO: 109028 - DNA, 518 bp, Glycine max
  unsure (1)..(518): unsure at all n locations
  Clone ID: PAT_MRT3847_69466C.1
cctatgcttccgcaaatgtttaccaaattcatggggtgtttatctgttagacaagccggtggcaaaggcctactattctctcatacatcaggctcgtaaattttcaacggcagttattaccaattacgaaatgatcaaagtggacagagtgggcgcccacctcatgatgtatctgatcactctgaaccgacctaaggcactgaacgcattgtgcatccaattgatggacgagctgctccattccctcaattatttggacaaagacgacggagtccatgccactcgtctcaccgacagtgaaagagctttctcattcggcgccgacattaaggaaatggtgccgaagaaatcagacgaggctttcggtggcggctacttggagaataggtccccagctgccactgtacgaaagccgacaattgcggtggtgatcggacactctctcaggggtggatgtgagctgtctcttatgtgcnatatcacttacccaggagagcaggccatgtttggacagtccg

SEQ ID NO: 109029 - DNA, 1114 bp, Glycine max
  Clone ID: PAT_MRT3847_69467C.1
ggttagagtaaagtattaaggaaagagaaagaaaacctcgtttattagcagtagcttgggtgttcttaatgggcgtcctttgggcctcttcaaaggctcctgaccctgtccgtcatatgatagagggactttgagaatttaagcgatcaattatcaacgattgaaggaagagttgagaaatgagtcaaatgtcatctggaattgttggtgttggttatattggcaccaactatatggtcccattattactaccaccaccattttcttccttgtgttttaacacctttatcaaacacaagggattggtgttggatagtaatcataaaggaaggagaagaggacatgggattgtggcatctagcaacgttgcttcaccttccatatgggatgattggaaacctgtcaaagccccttccactccttccctcagtgacattctttggccctctgctggggcatttgcggcaatggcaatattgggaaagatggatcagttattggcaccaaaaggactctcaatcgcatttgcgccatttggggctgtttctactatcctctttgccacacccacagctcctactgcccggaagtacaatgtgtttatggcccaaataggctgtgctgcaattggtgttctggcattgacaatatttggacccggatggctggccaggagtgctagtattgcggcctccgttgcttacatgatcatcacaaactctgttcatccaccagctgcaagcatgccattgcttttcattgatggtcctaagttccatcacttgaatttctggtatgctttgtttcctggggcagcagcatgcactctgcttacgatggtgcaagaggtggttgtatacttgaagaaaaatttcaaattttgaacgctgctatgcacattgatagttgatacatctcttctgctgtctctactaatttaatttgctgaagagccaaggaacattctttgatcagaatcataaatataattgtaagtaaagagcattctccaaccaaaaatgaatttgtcctggacttataaacattgtatatcaattagtgtctcctatattagacactgtccaaagccaaataatatacatgcatgggatct

SEQ ID NO: 109030 - DNA, 1096 bp, Glycine max
  Clone ID: PAT_MRT3847_69468C.1
gccccagctcccctccctcctccacgcgcccgaccccgccgcgccacccccccaccccgtccatggcgccctctccgggatcaaggctcctaagcaggcctctggggagcacaagaagaaaaagaagatcaaagtgactttcccatcaggtcaagagcggaatgcaccatcacaggcaattaggaaatgcttgcactgtgagataaccaagacaccacagtggagggcagggccaatggggccgaaaacactctgcaatgcttgtggcgtgcgctacaagtcaggccggcttttccccgaatatcgccctgcagcgagtccaacgttttgtgcggccatgcactccaactcccataagaaggtccttgaaatgaggaacaagacaggcaccaaatctggctttgcaactgtttctgctgcctcaccagaactcattccaaacactaacagcagccttacccttgaatatatgtgaaagggggaaaggaaggattctagttggagaattctctaattctctttcaagtcttctcttgagtcatgtcttatacaaggttttgaattgcattctacaaactgcaatgttaaaggttttagaggtgtctgcaactgcgttgtggttgcggttgtgactgcatcagccatatttgtccacaattttgatggcaaccgcaagttaaaaccttagtctttgtgttatttcttgtctgtcatttatttttctcattggatttttgtacagggctggaatggggggataggagcaaaatagaacatgatcatattgtagctatatttagaactgaagaacaagggatagagatatgcaagtcaaagagggtagagtcaccagagtgttagccattttaggtctagtaattgtagcagtactcaggaggagtctttgttacttttcttattctcatcatttttcatttttttttctttaatttctgtttctaaaaatccctccctgtagcaaattttttttgctgttcatttgtagcaaaacttatgagttgatcaggaaaggaacttttggaatttgccttcttcctttaaaaaaaaaaaattgtgccacacccaagaacgcccc

SEQ ID NO: 109031 - DNA, 560 bp, Glycine max
  unsure (1)..(560): unsure at all n locations
  Clone ID: PAT_MRT3847_69469C.1
ctaaatcaaacccaatggcttctccgccacccttatcgctaaacgtcgtcggatcagacacggacccaaacactaacaccttcccaaccgttacaagttcgttaacgccgccgtcaccgcgtcgttcatctccgttacagaacctcagccccagcattctgatcatcgtgaccgtcctcgccgtcaccgtcatcgtctccctcgcgctctgcttcctcctccgccacctcaaccgccgctgcctccgccgcttctcctcctccgcccctccctccgctgctgcgacgccgattttcgcctccagccgccgcatctcgccggagatactccactcctcggcttccgcttccgcctccgtcatcgacacgctccctgtcttcacgttctcctccgtcacgcgccgatcctcctcggtcgccggcgactgcgccgtgtgcctctcaaagttccaccaccacgacctcctccgcctcctccctctctgatgccacgccttccacgccgagtgcatcgacacgtggctccagtcgaacctctcgtgcccgctctgacgctccgcn

SEQ ID NO: 109032 - DNA, 342 bp, Glycine max
  Clone ID: PAT_MRT3847_6946C.1
tccggttattagaatactacataaattttcggctggtgaaaaactacctaaggtgggagacaatcacattcccacgatgcttcgaaatccactctctctttctacaattacctattgctcttgactgatcacccactttgatccttttctacctatatccccgtccattcctccaccattagttacgacgagctccttcacatacagtcccatgagctgcaatatccctttgcattgacgaagcagatcttctgctcttttcatctggttaatatcactcaccactatatgtctctcaatgtcaacacaactaattctctgaaatattgtgatttacctaac

SEQ ID NO: 109033 - DNA, 313 bp, Glycine max
  Clone ID: PAT_MRT3847_69470C.1
ggaggacgggcgcacccttgcgcgatacaacatgcaaatggagtccagcctccacctgctgctccgcctccgcggcggtgcacagaagcgcaggaagaagacctccactatacccagaaatatcaagcgcactcacaagaaggtcaagctcgccctgcctgagttctgcagagtcaacgactcatgtaagctacacaggcttcgcaaggggtgacctgatgccgaatgtggcgcctggaccttcttggccggccactcttgccgtgactgctgtagctagtgcggatcgagctatgtctaccaaacatgtgaa

SEQ ID NO: 109034 - DNA, 500 bp, Glycine max
  Clone ID: PAT_MRT3847_69471C.1
tgttagtggtcatcataataggcctctcatggattgtgctgtcagatgcttacatttactgtatgaaagggattgcagacacccattttgccctcctgctttgtggctttctcctgctagaaaaagccggccaccaattgcagttgctgccagaactcatgaagttttagcaaccaacctgagatctgatgattcatcagcttcactgagtgtaggttctgttgtcaccattgttcctcatgttttcccttttgaggaaagagttgagatgtttcgtgaatttatcaagatggacaaagcatcccgaaaaatggctggtgaaatttctgaacctggttcacgggccattgagatagtaatacgtcggggccatattgttgaagatggatttcggcaattaaattcccttgggtcaaggttgaagtcatccatccatgtatcatttgtcagtgaatgtggtcttcttgaggctggcctggactatggtggattgtctaaag

SEQ ID NO: 109035 - DNA, 371 bp, Glycine max
  Clone ID: PAT_MRT3847_69472C.1
aaaaaaaaaacttatatttgccttttcatggggaaaaataagggacggggggaacaaacaaagcttcccgggggcaaactattttgggaggggcccccccccatctgggggttcccacaataaaccctcccatttaccccaaggccctttaaatgaacaatagggggggggggaaaaaacaaaacaaaccccgcctccggggtatttggggataaaatccaaccaccaaacccccggggggatcgggttaaagacaaaaagggggggcgccaatggggccccccccctccacccttttggggaagttaatggaaacaaaaacctccagccggcccgccgggataaaaattcaccacacgctgctacattcc

SEQ ID NO: 109036 - DNA, 425 bp, Glycine max
  Clone ID: PAT_MRT3847_69473C.1
gacacccccatattcacatggatatggtccaagcgcttacagagcatcccacccattattatgacggatcaggtcccttacaccatttaagacatatacttatatgtatacactaggttttgtccttgattttataagctgctatgtgcataacatagatctcttccttatttcaccaatgaggtattcctagggtactctgccttttgatggacttacatccacggctttatgagcagtgtatgcatcatcacatgagctgtgacagctattgccacgagctgccttcttggaagacaagaggttagaataatactgagattacttattcagcggaactgacaactacttggcccatgtgagactgaatgtatggtgaaggtaacagatcaatcaagcgaaatcttctgattttgtaccctgag

SEQ ID NO: 109037 - DNA, 1284 bp, Glycine max
  Clone ID: PAT_MRT3847_69474C.1
cttcttataatcaatgtatatttaataatcaatttatgatccctaatgatcatacacacaacagtgcttcaaatgaatcaaaggctgtgtgcctgtgtttagaatcatttaacttgacttgaacttgatttttttttaaaaaaagaaaattatgttgaaaacccaatattaatttatatatcaagttttgtacagatatcaagttttgtataacattgtttcatataaaatcagtaaagcataatcaaaagcaaagtaataccccgttttcttcaatgctcttaatgcacctgatatgagggactctgcatcaccgcacaaacaagttcaaattcagtagaaaaggacacaaatagtaaccagacaccaaaaaaggtgagggagcacatttatgattacataattaaaaccacaacctaatgcctcatctcatctatgatttcacctttgcgtagcatatacaacccactacacactacactaccaacatggtgtacctggatatcgggatgatatgtataatcagtccagtccacaatctaacaaatgccagaacttttgaatggttaaggtcgagatagtgacaggagtgaaggatccttcatcaaaaagtgctctactgattttacattaatgattgtttcaatttctgatgaccaaaatccaatatggaaatacaaatgaatattcttttgcttagttagcttttaatctcaagatttctttagctgttctgcgccgaaagtaagacatgtgttcctggttgaaacatagccccaagtttctgctatagaagtcggcatatttgatcataaacaccccacaatcatacccgttctgctgctcaggaaggtcttcaacaaattcttttttccaagaacttacatcaatatcttttccagtcttgtcctttacttcatctacaatatagctagccagaactttcattacttgggcatctgttcctcttagtgagtccagatactgaaatttcttatctttcttattgataacagccaagcaccaatgaatctctttatggataggaacaaatattttatcacattcatgtaggccatatcccaatttcttttggctggtccatctcctcacagatttgaaatcatacccattcttgccacttattaacatgggtgctgcggcaccacggcaggctccatggtggacagctccatgtgatggcaaataccagatggtgaatggcagagggggtccaaaaacgccacgcatgacgttattgcagcaccataacagttatttaac

SEQ ID NO: 109038 - DNA, 1542 bp, Glycine max
  Clone ID: PAT_MRT3847_69475C.1
catcctagtattaggtgaacacattataactcctgtttctttattaattctctctttcaaatatatggcagaagatgcttcaattattccaacacacacaaaagcttggtactactctgaacatggtagtccaggtgatgttctcaaattagatcctaattggcccttaccccaacaactcaaagatgaccaagtgctcatcaaggtcatcgctgcatccattaatcccgttgattacaagaggatgcacggcgagttcaaggacactgaccctcatctgcctattgtgccgggttatgatgttgctggcatagtagtgaaagtgggaggagaagtaaaaaaatttaaggttggagatgaagtatatggtgatatcaacgagcaaggcttgtcgaaccttaagattcatggcactttgtcagagtatactattgcagaagagagactattggctcataaaccatccaatctaagcttcattgaagctgctagcattcctttagcacttgagactgctaacgaaggttttgaacatgctcacttctctgctggcaaatctatccttgttttgggaggagctggtggagttggaaactatgttattcagctagctaaacaagtttataaggcgtctaagatagcagcaactgctagcaccggcaaacttgaacttttaagggagttgggcgttgacttgcctattgattacacaaaggagaactttgaagaccttccagaaaaatacgatctagtgtatgatgtagtagggcaaggtgatagagcatttaaggccgttaaggaagatgggaaagttgtgacaatagtaccacctggacatccaccagctatgttttttgtgctcacctcaaagggatctatcttagagaatttaagaccttactttgagagtggtaagttgaagcctatactcgatgccaagactccagtgccattttctcaggttattgaagccatttcctacttagaaacttcaagagccacaggaaaagtggtcgtttatcccataccctaaccacaatatattattaactcatcatataattataattaataatgaacattttaaagtgtgtactaagataattgatcaattaattaaggtttgtgtcaaacaaagtcccttgtactactatgctttatgtttatgtatacaaagcaaccttgctgctgaaaataaagattgatatatggttgcaatgtgatcaaatatatcttattggtagacgatatgtaaatattcttgtaagcattctatgagttttgatgcatgttctagtttgagtgaattccggcaactgatcaactcatctatttttatttttttttatcaattagccaataaaagtgaataaataaataaaaaagattggtaattgatgtatctgaaaaaaatgatctagttcgcgtacatgcagttgaaattctaggttgaaacggacaagacctggtttttactctcagaggcagtttgtatactttatatttttcatttttataccatattttatatatatatttttc

SEQ ID NO: 109039 - DNA, 240 bp, Glycine max
  Clone ID: PAT_MRT3847_69476C.1
gttactcatgttaaaaatagacatgactttgcaatcaaaaacgcacaagatagagttagagaaataaatatggaacgaaaccaatgaagataggtaacagtggggactttatctcttcaaaaccaggagctcgagaggctacaaattagggccgcctggttactataatcacccattcagagactctatgagcaactagaggggtccttcgaagtaaaaattgtactatgagtgaccatt

SEQ ID NO: 109040 - DNA, 252 bp, Glycine max
  unsure (1)..(252): unsure at all n locations
  Clone ID: PAT_MRT3847_69477C.1
cgngccgatggcccgagttctcttccagtgtataaggggaggtctttcgatagctcgaattaccaaacacaagatgatggggaaacgattattgatccaaagaaaatccaggctcctgtgaaggaagtcgtctcaagtcctcgatgcagctactagtccactaattcgtagggaaggcacttctcttgaccaatttgttgactttacttatgccttcagaagttccttatatagccagggatcgttatgcga

SEQ ID NO: 109041 - DNA, 339 bp, Glycine max
  Clone ID: PAT_MRT3847_69478C.1
ggaattttgccccaggggaagaaacaactagttaaaacaagattccaaaataattgctgcacatgcaacaagcttatgatggaagaaacagctatttcaagatgccttgtcccttttttgttccatgatattacatatagaagaaccatgttttaaaaacattcccttttttgttcttaaatcttgccactataacctttttctaggcaaaagtgatgttaatatgttctaggcaaaagtgatgttaatatgttagtcattagtcttaactccacgtgattagcacacagcatatacatttaatttgaatttcaaattgagagcaaataaattctaaaa

SEQ ID NO: 109042 - DNA, 527 bp, Glycine max
  unsure (1)..(527): unsure at all n locations
  Clone ID: PAT_MRT3847_69479C.1
gccacttggcatccattatccattttctgtttactacactggaaaaatgtacaaanncattccgtagaacgtagaacttttancctcgtattaaaatnnagccatccttaaccttcaaatcntggatganaaggggcctttacctctgtgaaancttgtaatagatcncttccatatctaagttaaacaaaagctgctcattatatgacttctacttattgatcaatacagatgatggtctctaattttcccaccttatttaaaaaaaaaaatccttattttaagttattttttttaaagttattcaataccttcttttttaaaaataataattaaataaaaaggagtcaattttctaaatttcttcttccaaggatttttaatttattttttaaataattcttttacatatagtattttagtgttatcattttaaggttgagaatatgaaagaaaaaagaatggtcattccatgatgcagttaaaaacatttatcttattttttttctttacacctgtgcattgta

SEQ ID NO: 109043 - DNA, 331 bp, Glycine max
  unsure (1)..(331): unsure at all n locations
  Clone ID: PAT_MRT3847_6947C.1
gaatgattgatgttgtgagggagttagtacacatgactaaagaaagtcttgatggaggaattatgaaaggacctgcactggaggagacattctcaaattcaagccttcttcagatgatatcaatgtctcctgattctatgaatgtcccttgaattttatgtcccagtcagtttagtttgttgtcagtcctttcaaaagaagataaacaaccacaattgcatttgcatgtgtgtactataactcccctgccactgtacattgggcaatgaatccaatattctggttctgacatacttcactannaaaaaaaaaaaaaaaaaaaaaaaaaaaa

SEQ ID NO: 109044 - DNA, 176 bp, Glycine max
  Clone ID: PAT_MRT3847_69480C.1
cccactcgtacgcttagaaagatgattatccgaataccaatccgcgacactgagatccatgggcaaatacactgcatcgatgctttcaccgcttattacgttgcatccctgccttgacttataatctcatcactagaaaccgttcgacctcaacttcaactacccgagcgtcaatc

SEQ ID NO: 109045 - DNA, 290 bp, Glycine max
  Clone ID: PAT_MRT3847_69481C.1
tgactataaagggactgcatttgacatgctcaaataatatgaattgcccaagaccaacgaatgctgagagccacacatcatctccagatagcaaattctacttatcttttttctaatccaatctatataaattatatacgttcactgaaaaatacatctgacaattgtttctctgcttgatagccaccttacatcaaatgtatctcataagaacaatcccggtactgatcagctcgtgaatcttgctcatcaccatcgcattcttcacatgtacctatgcagctgtggga

SEQ ID NO: 109046 - DNA, 527 bp, Glycine max
  Clone ID: PAT_MRT3847_69482C.1
tgtgggcggtttaatggtccgtttaacttgtttagattagtttggaggacgatttttgtaatattggccacaattcttgcgatggtaatgccgttttttagtttggaggacgatttttgtaatattggccacaattcttgcgatggtaatgccgttttttagtgaggttctttcccttcttggagcaattgggtttgggcctctagttgtctttattcccatacaaatgcacattgctcagaaaagcattaggaaactatcattgaggtggtgtggactccaatttttaagttgcctgagctttattgtttcactgggcgctgtggtaggttcagttcatggaattattcaggatttccacaaaagcgaccttttcatgtacaaacaatagtccctttggaaaccaaaatctgaaataaatacctttctatattaatataaggcaaattgttaaaaataaaaaaaaaaaaaaaaaaaaaaaaaaaaaaaaaaaaaaaaaaacaaaaaaaaaaaaaaaaaaaaaaaaa

SEQ ID NO: 109047 - DNA, 480 bp, Glycine max
  Clone ID: PAT_MRT3847_69483C.1
ctgcaacatcatttatttatttgcatcgcttccattgttcttgacaacactggaataaagtgaaaataaacacaacacatcctgaataactgttcctattttgtttttcttttaaaaaaagacattatcatctagatatagtactagaaagttatagcttttgctttgtcttttaatatattcatccttgctcctttataaaatgccttgtgattattattgtcatgtgaccaattgatagaaggtcaaaccatattgtgttttatctgtaacatatgactgatactcaagctgaccatacattgggatttgctgtgttgtcttagttcatactctgaagaatttgatctctcgtgatgatactctcacaaccagtgcaactcctccaaagtgtaagcacttgctcaatttattcaagtgaacttgaataaactcttgctttatcttatcatctagattcctattaatattcttagtatg

SEQ ID NO: 109048 - DNA, 388 bp, Glycine max
  Clone ID: PAT_MRT3847_69484C.1
ctcgagccgattcggctcgaggggagtgtggccatggggttgttgttttccctctttggcgtctttggtttgatcatgattgccattgagaccaggaagaggaggaagaagaaggaggctgctcttgaagcctatggtgatggtaattcccattcgggtccggccaatgtgagctggaagcacaccagtactcgggaagctcttagcataaaccttgcaacatttgagaagccgctccggaagcttacttttgcggaccttcttgacgctaccaatggttttcacaacgacagtctcattggctctggcgggtttggggatggtacaaggctcttggtttatgagtacatgaaatatggaagtttagaggatgttctacatgatcaga

SEQ ID NO: 109049 - DNA, 307 bp, Glycine max
  Clone ID: PAT_MRT3847_69485C.1
ataaaaaaactattccggtttaatgccgtttaattgaaaaaaaaaattttaaaaattccttccaatggttacaactggggaataaatttctaactaactaataaaagaagcgaaaaccctggccataaattgattatttactgcggagatttttctttaaaccattttggctttgggggctggttttggttggtttcccccccagggggacggggccaaaaaatgaatgttgggtaatccgggcaaccccaatgggaaaagaaatgggaaaaaaaaatggcggaatggccaccagggcaagcctaaa

SEQ ID NO: 109050 - DNA, 703 bp, Glycine max
  unsure (1)..(703): unsure at all n locations
  Clone ID: PAT_MRT3847_69486C.1
cggcgtgctgtctccttattttctcaaaaactgcatgaaccctctctttttcaccgaaccttcctttgttctttcccttcaattttttattcacggcaaagatgggtgagagtaacagcaacaagaagaggaagttaatttgccgcgaagaagaacatgaagaggaggaggagaccaaaatggagacgttctttgctctggtgagaaacttccgcgacacacgtgatcggtggatgggtctgaggtcaggtgaccgcaagagcaagaggggtaagattatcactgccaaggaagaaaatatagtttggaaacccacgtttcagcttgaggatttcgctgatgagcaagctcggtgccgaaactctttggaacctagtgcgtcatctcagagcaaaaactgtgataaggaagatgctgcagaaaagggtattgacctcagcctctcactttgacaaacggggtcttttcatgtgaccatggcnttttagcttgctagatgttattgtaatattctatattcagaaaccttaaggctaaaatatggtgttctctctttaaactgattttcactgggcaacttaatttgtagatgtgtcatgtgtggttaattagttaatatggtttttggttttgagggttttagtcagtcgtaatgtattttgaaattcaccttgtgaaataattgtaccttttcagttccccc

SEQ ID NO: 109051 - DNA, 1616 bp, Glycine max
  Clone ID: PAT_MRT3847_69487C.1
gactccccgacgtaggaactggcacaggcggccgcttcctctggacgggagtgtggccatggggcgtgttgttttccctcggctgcgtctttggttggatcattattgccattgagaccaggaagaggaggaagaagaaggaggctgctcttgaagcctatggtgatggtaattcgcattcgggtccggccaatgtgagctggaagcacaccagtactcgagccgattcggctcgagaccttgcaacatttgagaagccgctccggaagcttacttttgcggaccttcttgacgctaccaatggttttcacaacgacagtctcattggctctggcgggtttggggatgtgtacaaggctcagttgaaggatggaagtgttgtggctatcaagaagctgattcatgttagcggacaaggggacagggaattcaccgctgaaatggagactattgggaaaatcaagcacaggaaccttgttcccctgttgggatactgcaaggtaggggaagagaggctcttggtttatgagtacatgaaatatggaagtttagaggatgttctacatgatcagaagaaagctgggatcaagctgaactgggccattaggcggaaaattgctattggagctgctaggggattggcttttcttcaccacaattgtatcccccacatcattcatagagatatgaagtcgagcaatgtgttacttgatgaaaacctggaagccagagtctctgattttggaatggctaggcttatgagtgctatggatacacatttgagtgtgagcacattggctggcacaccggggtatgttcctcccgagtactatcagagcttcagatgctccacaaaaggtgatgtctacagttatggtgtggttttgttggagctgctaactgggaaaaggccaacggactcggctgattttggagataataatcttgttggatgggttaaacaacatgccaagctgaaaatcagtgatatttttgacccggagctcatgaaggaagaccccaatctggagatggagcttttgcagcacttgaagattgcggtttcctgtttggatgatcgaccgtggaggcgtccgacgatgattcaagtgatggcaatgttcaaggagattcaggcgggatccgggattgattctcagtcaaccatagccaatgacgaggaaggtttcaatgcagttgaaatggtggagatgagcattaaagaagcccctgaattgagcaagcattaggcattaaagtgtcgtgtggattctttgggaaacagacaagaagagaggaggagatgacggattcagctcccctcagttttttccttctttgccgcttcaaattatttcagacataagggaaaacggttaaaaggggaatgaatgcttttgatgtatgtattcttgttattttatacataaaaaaaagttgtttaacttgtatataaacagcttcagttgttaccatctgtgttttcctagaattttcaaagtacttttctcattcaaatataatcctgaaaaggttctctgttcaatctggcgaccccagtgatggcgactaagtggaggatcttttggccatttctttaggcctcttgatttgtt

SEQ ID NO: 109052 - DNA, 301 bp, Glycine max
  Clone ID: PAT_MRT3847_69488C.1
cccacgcgttcgcccacgcgtccgcccacgcgtccgaaaaaaaaaataaaaaaaaaaaataaataatggagtaaaaataaaataaaaaaaaataaataaaattgatagaaattttgaaaaaaaaaaaaagattgtggggggggtttttgaatacaagctttttgatagcgacgtgtatgtaagaataagttttttttggtgtggctaaatgtaaatatccagtggcgttttatacacaagggatatatggtaaactctggggtgacacacattaagccgttgactaagaatgtccttttcg

SEQ ID NO: 109053 - DNA, 527 bp, Glycine max
  Clone ID: PAT_MRT3847_69489C.1
ccgcccctttttttttttttttttttttttttttttacagaaaataagcaaacatttctctattattaaaaaatggtttacaaatgagtttatctgaaatttctcaagaactaaaaaaaaaagagtacagttttttttttcaaactaaagaaaaacagcaaacttttgaaacactttcccgatgttgttttggaccaaaaaaattttaaccactaaataatccccgagtctttatgggacaaagaaaatgccttggaaaaataatgcctcaactagaacttggttaacaacccgggaaggaaggacactggcccaaaacacatactggggggcattaaaaccaggtcccggaaattttgaattacccaacaggggatggtgtttttacaggcccggtaccccagcaaccctctgtttgccctcccaaaacccgattttgaaggggatttgcccaaggtctaaaaaggccttgtaatggcgaaaattggaatcttaaaaccaggaaattgctttttgaaaacttgctg

SEQ ID NO: 109054 - DNA, 670 bp, Glycine max
  Clone ID: PAT_MRT3847_6948C.1
gtagcacactcattccctcgatcggagcctcgcttcccaatgggccagagaacaacccaaaccaaagggcccccctcgtggatgggtaccctctccagggcacaagggtaacctcaacccatttctcgcacctgccagaacaatcccacaaaacacaagcttcaccatcaccatagcccacaaaccccaaaacattcaacaccttcgaactgaactttcttcttctaacaactcctaataatcaaaaccaacttgctgagttagtaaccttcaacttctaaccaaacaattccaaccaaaagaccaccaaccccccaaaaggcccctcttcactaaccaatgaaaccttggctaatgcattcaactaaccctgagccctccttttcgctccttgatattcccagatccccagaagaagaccgggtcacccctccaacttttgcaaaataatctgaccatgttccttggttggggttaccaatgttgcaaaaggcttagcacaagaccctaacttcccaacttgggggctatggtatcttggcccaaatctcaatctggtccaacctccctcatagaaaaactgaatctgaataagttccatgttccgggattccctcaaaactaccgtttcaccaaacccactgcataggtttcttcaagcggctgatgg

SEQ ID NO: 109055 - DNA, 473 bp, Glycine max
  Clone ID: PAT_MRT3847_69490C.1
ccacatgttgtacttcaacctaagctctctttatcattaataaaaccttagcttcttaagaaaaaaaaaaacaagtaactttgaccaaacctcttatggatagagaatgaagaacaataattaaagaaaattatttagtcacatacataaaaagaaataacacagatttgaatgtaaatgtttattatgttaattaaggttgtgttatgtaaattttccattttaggttgcaaactagcaagctacttgatcataaagagccttcaagacctcattaactgattgactacaatgcatttagcattttatggtgtgtttcggtctctcaaagttgttttcttgttgatagggtatgctctattttctattgcttgaatttttttcattttccaaaattggattgaatgattgtacttatgggctttcttgatgtaatctatgtggactttttttaatcgtattagttctcttat

SEQ ID NO: 109056 - DNA, 314 bp, Glycine max
  Clone ID: PAT_MRT3847_69491C.1
ggggtgttcttttttttttttttttttttttttttttttttttttttttttattgttcttgtggggaacaggggcccatttttttttaaagcgccaaaagaaaaaacaccatagggaagctctttaaatgaattgggggacccacagcttttttttcaaaaggggaaggcggggcccctattttaacccctttaataaactataaattggggggggccacctttattgttaaaaggggaaagaacctcctggatgtcctccagggggttaagaatcttaaaggctctttttttccctttgggggccccaaggaa

SEQ ID NO: 109057 - DNA, 217 bp, Glycine max
  Clone ID: PAT_MRT3847_69492C.1
tcctccctatgactacatatcccctgcacccccgacgacgtaggctacacctccttaccactacgtgaggcctgcaccaccatctacatctagtaccgcaccgtacgagggcgcataggcagctgcggcttccgcagctcctgctcccaagtacatggacaaatcacctccaccgtgcggttacatctatgcttccccgcactgccctgtcttcagg

SEQ ID NO: 109058 - DNA, 359 bp, Glycine max
  unsure (1)..(359): unsure at all n locations
  Clone ID: PAT_MRT3847_69493C.1
gtatcgggaggactctcaggaccctgggcgctctcggtccgtgtggagaaggtgctgctgagctgttcatttctcagggtcatagcagcctctgggacctcatgcagaagaaaatggcaggtagggttgctaagagaacctatgggctagaggaaatactgcctttggaagagtttggttggagaggaagagaacaatgacagatgatggtgtttgtagtgttagctttagggggtgttggcctatgcttgccttatgacttcttattattatataatttgggcagaagtctttgttgagtcagctatttatctgttcgttgtttttgatgagaggcaatttaaattgggtttngtttg

SEQ ID NO: 109059 - DNA, 189 bp, Glycine max
  Clone ID: PAT_MRT3847_69494C.1
acttccaatccccttatgtgaggtcaatcaaggaccagagaagcggcctgaccacgatgaatgggtaacttgtgacatcgactctgatgagacgtgtgatgatgtatacaacctggcttgctcataagtatgtggatgaggaggaggtcatggttcggatttaactactcaaaggaatggctgcgctgg

SEQ ID NO: 109060 - DNA, 231 bp, Glycine max
  unsure (1)..(231): unsure at all n locations
  Clone ID: PAT_MRT3847_69495C.1
ggtttaaaaacaaaaaggaaagcggggagaaaacaaggggaagnaggcgcggccaaggaccagctgcgaccggcatgcaacataacgggaagcgcactaatcaatcacggccgcttacaacaggactggaaaacagcgtaccaactaatgctgacacatcgccttcgcagtgcgaatagcaaaggccgaccgatcgactttaaaatgacaacgaaggaaatggaccgccgt

SEQ ID NO: 109061 - DNA, 269 bp, Glycine max
  Clone ID: PAT_MRT3847_69496C.1
ctcgatggatttatagagtacacgggcttgggacaaaagggatttattttaaatacatgaggttgaattgatagcaacatgtttaaaaggattactatgtgtaaagctggataagcttatcagttaggactgacgtttttagaacacctaaatctctgaaaagcttaaaaaggattgtggaggggtgaagccctgggcggacttttcaaccggaagcttggaaaaaataaggacgccttaataaaaatgatgttgcgcacgggttaaaa

SEQ ID NO: 109062 - DNA, 220 bp, Glycine max
  Clone ID: PAT_MRT3847_69497C.1
gtttttgaggacactgctttgttcaaagctatgagggggatttaaaagggtaaattaacacttgcggatggacaccatgcacaaggacgcttttgaaccagatgtccgagactattactgatctcaagaatacctcgttcacgtcaagaatggtggccatcgatctccccatgtgatttttggcggaaagaagatcggccagttaaggtattgtttgagg

SEQ ID NO: 109063 - DNA, 355 bp, Glycine max
  Clone ID: PAT_MRT3847_69498C.1
ctaagcatgatacttatgatcagatttactttaagggtgcatgaacagagaaacccctgatgcctaagggaacatatgttactggcatgctccgggacagcgactcaatcacatggtctggacactacaggagtaattcaacagctagaaggaggactggaaaccatgggcacagcctgacaggctgccactgtgtttatttaaaagagagatacaattctgaagatccacactgtgtcttaaagaggggagagaggcttttaatgaacctagcgactgggggggcgaaacctggtgttgtactacaatgcatctgtgagtacggcacctacaagctggccaactacttcggggg

SEQ ID NO: 109064 - DNA, 365 bp, Glycine max
  Clone ID: PAT_MRT3847_69499C.1
gtgtaatgtttgtaaagtggttatgaaaatctgaacaacaagcatggggatcgtgaagaagagcattcgcatggacaggggggcaacggtatttacgtgagcaaaccaaaactacaaaaacgacaaagagaggacaaagttacaaactttaaacgaaacggccacgcgacaaaatcggggggtctcaggctgccagtggacaaaatcgtaaaatagcgacccaaaaaaggtcccaacaactgcaccaaaaacggcgagtaacaaaaaggggagattagggccacatccatttccaacgcttacggaaacactgggacctggtgcaaagaatggaaaaggggacccaaaataggcagcataaccaa

SEQ ID NO: 109065 - DNA, 275 bp, Glycine max
  Clone ID: PAT_MRT3847_6949C.1
catctgttttgtaaggcaaatgcttaacgttgcttctgattgtcatttacatgggttgttacagcgggacatgataccatagaatggtgttttcaactcaaccaatataatattcacctttaaaggctacccattttggcttgtctgattttataaaacctgcaaagaggtttcaagatattgttggcactgcttactatgtttcaccagaagtgttaaaacgaaagtcaggtccctagtcacatttattgagtattggtgttattacatacata

SEQ ID NO: 109066 - DNA, 344 bp, Glycine max
  Clone ID: PAT_MRT3847_694C.1
gccagaagacaacagacgggtgcctggtggctaaaaaattagccacatgttatgatagcttaccaactggaattactagactgctaaatgctctctgagtatattcaactggcagcatgaatagcatcagcagactattcatattatgaacttctgtcttcttcatatcgaacgtacggatagaactcttgctctcactggtgattatgcatggagtagctcgcgccaacatgaatgtcttgactatgcattgagtgtcgatgggttgcagagctagcatggtatgccatgaattctgtaaacacactgctaagattaggagaactctctttatcactatattg

SEQ ID NO: 109067 - DNA, 272 bp, Glycine max
  Clone ID: PAT_MRT3847_69500C.1
aatagttttcggctccacctctggagaaataagggtaaagtgaaaccccatatcccctggtaccaacggtgatacgaagagcctgccacgtcttgaatccttgggcctcccctggacaaagaaagcacctccctggactgaatctcaaggattcttgagtccctcaaggacggaggcatgtgggatctggatcccactaaacctgtgaagtattccacatgatcatagcaagtccgcttcgggactgaatgcaaaattaattctgtggcttt

SEQ ID NO: 109068 - DNA, 272 bp, Glycine max
  Clone ID: PAT_MRT3847_69501C.1
aacacaaattaagaaacttggttaggttgtgaaaatgtacgataccacagtatctagtatgagttacatacattccaggaaaaacatttattctctagcccgctagcctgcggaatcatatgatattatatatatttgcttcacgtacgaaacagtgggggctcccagacacacggaaacaaagatcattaatccgtggcttgatgagggtgaagatcgttccaacaataagatggtagaacgcgccgatggaacaacttgcctgcatgggc

SEQ ID NO: 109069 - DNA, 356 bp, Glycine max
  Clone ID: PAT_MRT3847_69502C.1
cggctcgagtacggctgcgaaagacgacagaaggggcctctctaagttgcacctaacttcgaaaccctcctgcaacaattgcaaagactgttgtatggtctgatgatgacttgtttcctctaacataacttcgaggcccaataagctctgcatggtgcttgacaccatccaaaactgatcttgcaaaaacaatgtcaattactaactatttttaaagtgacaatttaggggggaaaattaacaaaatccattttgatttacctagcaagagtagtctccacctggtacatactctgccagtggttgcctaggcggtagctgtattaggataggcggtaaatgtacaagaagacgtg

SEQ ID NO: 109070 - DNA, 506 bp, Glycine max
  unsure (1)..(506): unsure at all n locations
  Clone ID: PAT_MRT3847_69503C.1
attccgttccaaggaaggtttcccgtcatcactgtatgacgtcctccttctttgggggggggggggggggggggcacgaaggggggtgagggaggagggggtaacgaagagacggaaacagaggaaggcacggaataaaacggaatagaaaccaaaagcaaaacgtaggaaaatacagacaaaaaggacaccaagcaaacgaccaaggaaaatagataaatagcaaacgattagcaccattttgggcagcgcagtagaacgaacagtaaggcaacatcaatcagtaggtggtacggcaagtaccatagtaattagagtggcggttgtcgagcggcgtgagggccagttagcgcggagtaaggattgtggccgacaatggagtgantgttggcaaagggtgggttctgtcgctaggtaagttggcacgggagtaagttaattcgcaagccaagaaaagttcaaagaaacaaccgactttagaagattgcaacgtgaggcactaattt

SEQ ID NO: 109071 - DNA, 510 bp, Glycine max
  Clone ID: PAT_MRT3847_69504C.1
aatatattttacagtttcttgtgaataagaccagagaaaatacaccaaattaacataatagaaatgctgacatacaaacaatacttgtgttttctgccaaatagcatagtaaattttgtttaatatgtgaactgtgaagcatttaaaatttgatgtgaatgtgatgatatcctaaacgggttttgttgcgtgaataggtatacccactcttcgcttcagttggtgtggctgttggaatctgcggtatgcaacttgttaggaatataaccaccaatcctgaagtcaggtatatatggatctttcatatttgtatacaacaagttgttggtttggacttcttttgatcttcattgaccaaagaacaatgttttcctctatcaaaatacaattccacatgtaaattattgtcaagacatgcagctatgtgtaattgcacaatatttttttaaaacatgcataattcttgtctttggatctattccccatattattgaaatgtattgatatcta

SEQ ID NO: 109072 - DNA, 1021 bp, Glycine max
  Clone ID: PAT_MRT3847_69505C.1
aatcaacctcactttcttttaaatatgaaataaacacacacacacaccaaaaaaaaaaaagaagcatcatgaagaagatcaatctattactccgaaaatgcaagagtttgtcaaggcagctaggaagatcttcatcttatagcagcctgaggtcaaaatccacaaaagaagacatatgggggggtggacatggaatgcaagaagatgaaaattgtgaaactatatttgttggcagcacaaggaaacggtacataatcagcaaaaagtatctgaaccatcctcttctgaatgcactaatcaacaagtcaaagcaaattaagaaggacagtgatgaaagtagtgtgttggtggtcaactgtgaggtggttctctttgatcatctattgtggatgctagaaaatgcagatcccaagtttagttctgagtctttggaggaattggctgaactctatgtgttttgatagttttattcaaagtggcagattgcaaaggcctaatgtaattaattaagtatgttgggttgtgcctgcattttgcaaaatgtaatggttgagaatcctttttgttttactttattataagtgcattaaatggttctgcaattgcatagctgatttatgtactaagttctaactcattggatttttctttttcaagagccatatatatgctttgcttttgttaaatgttctggagttctaaagtggaaggttctaaagaggaagtcttaatggcattagatccaacaattggaggaacgcaaatatatgtttgattcttagcaatatggattccaaaatcaattccccagttcagtcatgtaagctgttttaagagagttttttttttcatctttggggtaacagcccaaaacttcagttactttctactgctagatagcatgaaatcatatgtaaacaataaacacaaaaattctatatgtatatatatgtgagatgcatgatcatcaaagatgatatcatctaattcaacagttggatttgtgaattttgtgtgtttt

SEQ ID NO: 109073 - DNA, 3575 bp, Glycine max
  Clone ID: PAT_MRT3847_69506C.1
aagagagagagagagaactagtctcgagtttttttttttttttttttgctgaaataattaaatgaatattacaacgcacggtaaagttcaaacaaaatagaaaaaatccaagaataaaaggtcaaaggcactagggaattttttttttatctataggaatccaacacagtatcaaggagtttacaacacattctactcaaccaactgaattagattcctttaaaaatttagattcatcctattaaaccatctggaagattgacgattgaccaggggattaaacaagacactaacctgtaagggtgtacataattagaatttagaacacaaattgtcgaaagtacatttgaattatatacccctccaaaacacttctgtggacaaggccggtaagaggctaccaaatttttcacacctaaaatagccaaagaaagttctgctcgcaagtgataccgaatatgcaaaaggcacgggggactagatgtgtggagcgtgaaatgagaaccgtaaaacaaactggaaatgcaactatactcgtttgagaaacaaacttgcattgcagagaataagcacaggaatgctacagtgaagtgcgaactccaatagctagctagctaaaaacaacacatgggtataaaagttaaaaagttacttaacttccctattagctatataaataagaaaacaaaccaataggaaagctaaagagtgttaagactaaacaagaatagtttctgcattacatgcatcaagtaaagtttatgtaataacagtagttttctcatctagaagcttgttgggcattatgtactacttgaactaattaatcatgaaatgaaaaacctgattgaagcttggtgggcattatgtactacttgaactgcaatgatatttggaactactttaattaatctccaaaaaagataaatagtagaatattgcaatgttttcacttattcagctctgtccctaagcatcagctttgctactcaaaagtcatgaaacaaagaaatgtcatcaaagtatgaaacttcaattacgaagctaacatatagcattcttgttgctatatgcatactcctaggttctgcctcaaaatgaagtggatttcaaaacttcaaacaacaatgataaagtaaattgcattcttttcagtgttaaattagctcacaagcttagctctaccttgagctgcttagattccaatttaaacagttaaatcaaaacttatcaaagtgtagagtaaataagaaatacaaaagacttcatggggtctcactttcaaacagacaacgatagtatcactcttaatattgattctaaaggctttaatttaaagcaaatagcaactagcattactactttcctgacaaaaatagatttcacttgaaatattgtaaccaagatttattgatttatggaactatgactgacataaagcattctattaattaatgtcatcacccgcttgaaccagatgccacatgggatgagctaggaatgcaagcatttatccacataatgacacatggtttaatttccaagcaagtattaggcacattttcttgaaagcagcactcacctgaaatattcaacacctaccttagcagcaagcaattgggagattatccacttgcctctaaaaaaaacattcacatgattaaattaatccctggtttcaattcaaaacccaccagctagaaacaaaaaggagcggaagaggtattgctcaaagtgagtgaacaacctacctctttgcttccagtttaagaaaccagccaactgaaataattaaaccctcagcccacaattcatagtacataaaacgttcaatgtccaagctctcagtatggacgagaacgatttccataatgatcacgcctatcaggcccagaaccacctccatcactatatttgtctcccttaaaacattgtaactaagatttattgatctatggaaccatgactgacataaagcattctattaattaatgccatcatctgcttgtaccagatgccacatgggatgagctaggaatgcaagcatttatccacataatgacacatggtttcatttccaagcaagtattaggcacattatcgtgaaagcagcactcacctgaaatattcaacacctaccttagcagcaagcaattgggagactatccactttcctctagaaaaaacattcacatgattaaattaatccctggtttaaattcaaaacccaccagctagaaacaaaaaggagcgcggaagaggtattgctcaaagtgagtgaacaacctacctctttgcttccagtttaagaaaccagccaactgaaataattaaaccctcagcccacaattcatagtacataaaacgttcaatgtccaagctctcagtatggacgagaacgatttccataatgatcacgcctatcaggcccagaaccaccacctccatctctataattgtctctgcgtctatctccaccatagccacccctattgcccccttggttatatgcaggtggagctcttggtgcagatttttctgccattgcaacactgattttgtaacccctcaaatcataattattgtaaaaaccgccagcagaatgtgctgcagaagggtcttcataagcaaggcaagcatcacccttattgtttccattatcatcagtgtaaatctttatgttccaaggccactgatctttatagcccctcttctgctttattcttccaacttgtccaatgcctccaaaaagttccctcaattcttcaatagtcacatctggtggtaggtttgagatgtagattctagagttgtcacatgtatcatcacaattctcatcacactgtctcactgcagcagggggctcagcagaagatccaccaaatccacctcgattaccagcaccataagtgctgtcatatccagtaggaggcccggatctaccgccactccgtctgccaaggaggcccgagagcacggcaccttgcacccggcgtcccattgattatctcccccataaccacccacgctacccccatatgatggaggataggaattaggtccaccagtataacttgcaggtggaggatttgattatgttccataaatagcattcccaccggtataagaactgtaagtggatgggtggtttccacctcctccaccgtaagattgggcagtaggggcaggaacttgaccataaccaccatcttctctcccgtgactacctctatatgaaccacctctaccttcactattaccaccccttccactattatattcattgcctctccctccatcataactaccagatctaccccctccgctgctatagtcattacctcttcctcctcgattgttaccatagcctccacctcctctattataaccaccgccactgccactgccctcgagcccattagaactattgggattaggacttggagcaccgcatttgttgcattcaacccttttcgcaaagttcagattcccacaactttggttaggacaacgccagcctccacctctgcctccaccgcgaccgccgaagcgaacaccgcctcgaccaccacgat

SEQ ID NO: 109074 - DNA, 439 bp, Glycine max
  Clone ID: PAT_MRT3847_69507C.1
gaacaatggtatctgttccatcccattccttcttgttccatcctctttttatatatccaaacaaaggaatttaatcccattccattcaatctcatttgaccaatccaaatgtgcacaaactcacatctaagatggttgaaattaacaataagcaattaagtataacccttaaatccagaaagttagtgaataatgaaagtagacaagtagtatgcatcaaaataattttagatataacattagcaatagcatgtcaacatgtacttgaaaaactgagaacaccaagttaacaaagagcataacttcactatttcagctatcttggagtggcaaacttagtattataaccatggaattaatatctaccgactgatacccagatccttattcctaacaatgggtggggtggtttcatgccttatatattaaatttcgcaca

SEQ ID NO: 109075 - DNA, 354 bp, Glycine max
  Clone ID: PAT_MRT3847_69508C.1
catggaagactctaaacgggaaggagtttgtctcctttctggagcagatacttgaagccttgaacaaaggagagattccatcaacaggctctcttgtggaggttttcaacaagaatattcttgagaaatgtcttaagttatacagtgaaaagatggcgaaattagttctacctctttctgagaaatctctacaaggggcccatgataggtctagagatgaagtcacaaaagtcttttatcagcagcattttggtcgtcaccatgctaagaaatcattcatacagctgggtgaacaaatacaacaggtgtataagaatgctgttctgcaaaatgagtaatcaatcttcaaggctc

SEQ ID NO: 109076 - DNA, 480 bp, Glycine max
  Clone ID: PAT_MRT3847_69509C.1
actaagctcaatctttctaaaattgttcgatcagctctccgccatggttctgtcaacaaccgactccgaagcctacgactatgacaactcacccttcgattctaaatctgtcttagcttcgctttccaccttcaagatggcgtgtgcctcttgaccgatggaggcggaatcccacatcataaacaacgagttgatgttggatgggactcccagggagaacttaggcatcattcgtgacgacatacatggatccatagagtgacaaactgatcatgcatgacattaattatatctatgttgacatggacgaacaccctgacaccactgagcttcagactttaagtgctatcatgatacttcatttctgcaatgcaccaccaaaagatactgaggcaacccacgccgtacgaacgggtggatcatcagaggccttgatgtcgactggattggcatgccaaagactgtggcaatgcacaacga

SEQ ID NO: 109077 - DNA, 444 bp, Glycine max
  Clone ID: PAT_MRT3847_6950C.1
aaacaaagattgggctcatattcatttgacaaaaacgatttttttttcccatcaatttcgcgggaacaaaagaaatcaaagaaattcttttcataacccccgaccctttaggacaaagatgagtttcatggaacttaaaacctggcgagattaaaattaaatccctcctttcataacttacaatggattacaaagggggccccatttatctttaaaaagaggacttcctaagcttttcataaatggccttttccagccatgactaagcattttccattattccaggggtaagcctccccataggggggcaaaactcagtttctttaagctttccatctccatcaagaccaccttgtttaaccatagaaaaggcatcctccttggtcatcccttccatgccaaaaaaagccgagtttggccttaaactctcgctcgggaacaaac

SEQ ID NO: 109078 - DNA, 444 bp, Glycine max
  Clone ID: PAT_MRT3847_69510C.1
gtgtttaggttttttttttttttttttttttttttttttttttttttttttttttttttttttttttttttttttttttaaaaaaaaaatcccctttattaggggcctttttttttttttgcagccttttgtttttttaaaagggcactccaaaaaaacgtataaaacccctttatcccatttggggggaacggctcccgggataaacttcccccaaaaggtttaataaaggcccaaactttggggaaaagggcacaaaacccaatttttgaaaaggggcccatggaaactttttttgatttttgaaaaaagaaaaaaaactttggcttcctggggggggaaaaaaaaaaaaaaaaattccccggggaatcgggtctcaaaaaaaaaaaacccttctgcaccccaaaaatttttagggggggctaaaagccccaaatttttttt

SEQ ID NO: 109079 - DNA, 541 bp, Glycine max
  Clone ID: PAT_MRT3847_69511C.1
tacacgtgtaggagtgccgcctgcttgggggggggggggggaaaagaagggtaaatggaccaggaaagcaagggtagcacgataataagcaagtgtttaagtttgggccgcgttaattacaaagaacgctcgggtaagggggcaatacttgaatgcgcggggcctgcgagggaaacatagtagacgatagacgatagaataagaaaggaggcactgagcagcccccttgtacccatttagggagcacggccgcaatacgtttaggtttatcgcgtgggattcgaccatatttgaaaaggtggaccaaattaacgggtgttgggtagcctgtgcgtgtgtaatattggttgtgcgtgggtggttatagtggcggggctggtgtggctgtgggtttaagtgggcggtagaagcctggcctgtaatgtatgttaaataaccctgcaggtccggccttatatatgtgttctagttggcagaagaccacggggcactttgcaaagaatggtggggctagtagagagtatgcgtatggtgttatgag

SEQ ID NO: 109080 - DNA, 727 bp, Glycine max
  Clone ID: PAT_MRT3847_69512C.1
atggaagggaaatatatttgtacgtattaaaagaaaaaagttcaagcagctaagaaatagactacgctataaacatattacaacttaagggcaatgagaaattgcttcctttgcaaagtatcaaatggtatcattgcaaaagtaccaaaaaaaagtagtatcattacaaagaatactttctctttggttgcttggattgggatcatcagacgtattatgtatgtaatattcaaaaatgaaaatgtcaaacttgacgggaagaaaaaaagaaagacacgacgacgaagacgactactgaccacattctccccaagaatcctgctatacatctcatatattgcggcaagcaagcaagcctcctattttgtattttgtattttttgacccttacttttcatgagaaaagtaattattgtttagctcgtggttgtccatgtttgtaattacacaatgaagaatattatgtaccaattacgtttaatccagcagcagactatatatgggatcttatctttcgagcttcattgatcttggcttaggctgcgatacgacagctttctcttgttcagtaagtgcatggcggaaatggcatctatggccatatgggcacacaaccccagcaaggaccattctgcagacctcagttttgtagcgtgggtggcggatcactgggcgaagcttcccaataccatgagcaaattgggagtggtccccatatggacatgtt

SEQ ID NO: 109081 - DNA, 642 bp, Glycine max
  unsure (1)..(642): unsure at all n locations
  Clone ID: PAT_MRT3847_69513C.1
tcctctagngcggccgcttttttttttttttttttttttttttttttttcagaaaaatctggtcaaacacaaaacaaaatcggttaaatctaagttaggtcattccatttccatatattaaacaaccccaagtaaagagtttctttttcttttctttttttctttttttaaaaaagctacaaattaatacacagataacagacaatctgttctcaactgattaattctagttataaatcacattccctttttttctcggaagcttcttcctctcctgtagtcaacctcagcatcagagcacgataaccccatctgatatttcctgcaaattctggaaaattccatttttgaaaatatatcctcatcatcttcaaaagtacggttctctggggtacttaatccaaagctgttgctacaatgcccttgggatatatgatcttcatatcctggacatataggggcctgattgtctttttccttgcctactggacctggatctgatctaaaacttctctgactctgcaatgccacctgcgtatcctgagctttgaatcctttcataaatgaaggctctatgctttcttccattgtggacttgttagaagcaaatggcaacatggaaaatgactcctcccttacatc

SEQ ID NO: 109082 - DNA, 437 bp, Glycine max
  Clone ID: PAT_MRT3847_69514C.1
ttcttcgaatctctctgaaacttttctcttctctttgattcttctctatcaggtataattcttcaccctctcttctttgatttctcctaaggaataaggaaagaaaagaagctcttattttctatttcgtgagaataactgtagtcaggtttgtgaattaatttcataatcggtgccttttgcgaattaatttggtaatcggtgattttattcggtttaatcggtttctagttcgccgatctaaaagtgtttgatgagttttagatggtttgaccttttttttttttctttcaatgaattttgagatttgcgttgttgaatttggctgctgttgtttgaaattttaacttttaacttatagatctggacatgcttatgactgagattgaaggttggattttattattttattggtctagtttctttttaattattta

SEQ ID NO: 109083 - DNA, 615 bp, Glycine max
  Clone ID: PAT_MRT3847_69515C.1
tggtacgcctgcagtccggtccggattctgggtcgcccagaggccggagaaccttagtcaacaacaaagcaaagcgaagcatgggtttactgtggtggcgaaaggggaataaaccccaaccccaactccaagctaagtcatcgtcaattccgaagtcgaacggcacagacgcaacgaaacccctcaccgaggccccagggatgaacggcgccgtggaggttccccgtcccccgaacaccaccgtctcgatttttgagttcggctctgtcaccgcctccaacgaccaggtcacgctcgccggctattgccccgtctccgaagacctcgagccctgccgctgggagattctccccgccgttcagtctaacgccccccagtttcgcgtagtcttttgatacccaactttttatctcatcgccgcttatggaatgtactttttgctataaaacattcgagtttaagggaaattcgcatttttcttattgttaatgttatgtatctcttttcttttcgcctgttcagtttcttactcccaatataagatatgtcactgttatgttgcgttatgttccattaattagtagtaactactcctcaggttgatgaattattatg

SEQ ID NO: 109084 - DNA, 459 bp, Glycine max
  unsure (1)..(459): unsure at all n locations
  Clone ID: PAT_MRT3847_69516C.1
gcaactttctctatcaatgggccttcgccatcgccgccgccggcatcaccagcggctccatcgccgaacgcacacagttcgtggcctatctcatctactcctccttcctcaccggcttcgtctaccccgtcgtctcccactggttctggtccgcagacggctgggcttctgccatttccagcgcagatcatgtattctcccccggagaccggctattgtccaccggcgtgatagacttcgccggctccggcgtagtccacatggttggtggagtagccggcttctggggcgcactgatagaaggcccgagaatcggacgcttcgaccacggcggaacgcgccgntgccctcagaggccacagcgcgtccttagtagtcctggggaccttcatgctttggttcggttggtacggatttaaccctggttcaattaataaaatcctagtttcctacggtaac

SEQ ID NO: 109085 - DNA, 300 bp, Glycine max
  Clone ID: PAT_MRT3847_69517C.1
gcaactttctctatcaatgggccttcgccatcgccgccgccggcatcaccagcggctccatcgccgaacgcacacagttcgtggcctatctcatctactcctccttcctcaccggcttcgtctaccccgtcgtctcccactggttctggtccgcagacggctgggcttctgccatttcccccggagaccggctattttccaccggcgtgatagacttcgccggctccggcgtagtccacatggttggtggagtagccggcttctggggcgcactgatagaaggcccgagaatcggacgct

SEQ ID NO: 109086 - DNA, 746 bp, Glycine max
  unsure (1)..(746): unsure at all n locations
  Clone ID: PAT_MRT3847_69518C.1
gataaccctagcttaccttttcaactttcaaggtaccttctgctcctcttctgttttcgattaagatttcggttgttagggttttctgctatttttttttttatcgatcatcggacctgtcgagctatttgaattttgatctggatttttttttcgtgtctttgattttaccgtctatataattacgcaacctgggatccgttttgaaacttttgttgattatttggctttgtttcaaattatttgttgattgaaagtgatcctgatgttatgaggttatatatttaatttgtcagaacttggggcatgtattgtgtattgtacaggtaaaatctctattatttagatttgttaaaggtattttcctcgtctattttggatatcaatctgattgatttatttattggaatcgagttattaaaagcgttgttgtatttttgttttgtcctggctttaattctgtctatgttgtatatcactacacatgtagttttgtaacttggttttccttgttatattgtttgggagggtttgatggactaatttttcaatttttttaagctgtaaatataatgttggataattttgctttcagttctctgatttctattggctttccattctctgttcttgaacattntaatggttatgatgaagaattggtgactgattcatttattttgttgactgtattgnatgtgtagatgcanatctttgtttagacactcactggtaagacaatcacc

SEQ ID NO: 109087 - DNA, 892 bp, Glycine max
  Clone ID: PAT_MRT3847_69519C.1
gtccagggtcacttccaaaaggtgttgacatccattggtaacttttgtatctgctcaattgctgtgggcatgttgattgagctcgttgtcatgtaccctatccagaagaggtcttacagagatggtattgacaacttgttggtgcttctcattggaggaatcccaattgccatgccaactgtcttgtctgttaccatggctattgggtctcaccgcttgtcccaacaaggagccatcacgaagaggatgacagccatagaagaaatggcagggatggatattctctgcagtgacaaaactggaactctcacccttaacaagcttactgtggacaagagcttgattgaggtgttccccactggcatggacaaggacacccttgtcttatatgcagccagggcttcaaggactgaaaaccaagatgccattgatgcatcaattgttggaatgttagatgaccgtaaggaggcaagagcaggaatcaccgaggtgcatttcttgccttttaatcctgtggacaagcgcactgctattacgttcattgacaacaatggtgactggcacagaagcagcaaaggtgctcctgaggaaatcattgaactttgtggcctcaagggagagactctgaaaaaggcccacaaggttattgatgagtttgctaaccgtggtctgcgttccttaggtgtttctcgccagactgtttctgaaaggaccaaggagagtgcaggagatgcatgggaattcttgggtctcctacccctctttgacccttcaaggcatgatagttctgagactattcgtcgtgctcttgaacttggtgtcaatgttaaaatgatcactggtgaccaacttgccattggcaaagaaaccggtcgcagacttggaatgggca

SEQ ID NO: 109088 - DNA, 908 bp, Glycine max
  Clone ID: PAT_MRT3847_6951C.1
tttttctggaattactgctagtcctaaaatttgactatattcatattcccaacggggagaactagatcaaataattaaggaaattgcataacatctatcttgatggggggaatacagttcaactaaacgaaatataggatacacttgtgaatagtgacttcccacgttttgccaaattgtcaatctggttacatgatgtatttggatgttgctgaattagaattcagttcatgccaattttccatccagttggtaacaaaaattctagcattttttctccctttgcttgggattgttctataaccagtggccaactaaaacaccacttgaccaagggaaaaatgctaccggggtctacacagggttgacatcagtttaaataatacaaggtagcattatcatcacagcatcaattactgttacaatgaacatctgctcgtaatgtcaacagcagactcttatttcttctacttatcctcctttttcttccatttttctctaggaagaattctcattatagagttgtgaacaatagtatgtgtatgagtcatgcgctaggttctgttcctgagagcggaaatacatgaagggtgtataatacaaaaaatttgacaccctacatgtataaatatcagcatatttctcaatttgtctcatcaagtggcttttatcccacagtccagcacgagatagaaaaccccaccttgaattgaagagctccccatctgcctccagcattggagcaattttctcactaggaagaattctcattatagagttgtgtaccatggtatgtgtattatacacccttcatgtatttccgctctcaggaacagaacctagcgcatgactcatacacatactattgttcacaactctaggaagaattctccctcgtgccgaaatcc

SEQ ID NO: 109089 - DNA, 636 bp, Glycine max
  unsure (1)..(636): unsure at all n locations
  Clone ID: PAT_MRT3847_69520C.1
ccacgcgtccgttctttttttcttcatttgtctaacgacatcatgtatatatatatatatatatatatatatatatttgcactgcctggatactgtttgcatcgggttaattaataaaacaaacagtatattaaaaaaatgtataaataacatcaattataaaagaatcgatgttgtatatgtagtttttgcattttttatattttttatcatacgacatcggttttcgtaaaaattgatgttgtatagtgaatttcaacatcaatttttataactgatgttagatgtcaattttctagtagtgattaataattatgcataatcttcattttaatagttattttagaattttatctacaatctacactttttaattatatagatcataaagtattagtcataatatgagagtagttagtcctatcaagacctgngttatggacttgacattcttttgttgtgttcgtatactcattgttgatagacaagaatataggatactttgtatgttcttatgttctctgttgagaaacagaagtataagataagttaaaatgacacgtgtagatttcaagacttacaaaggaaggcgtgcatgtttgggtaagttctagctaaggaaggacttggtactta

SEQ ID NO: 109090 - DNA, 394 bp, Glycine max
  Clone ID: PAT_MRT3847_69521C.1
tggttttttcttttgttttatctcttttcattctttatggtatattacgggattctttttttttttttggacagccatttttgagcgtgtgacctcttaccagtggaattattttgacacaggaaagaccctaccatggaccaccaaatgagctggatgagactccaacagctacggcccacctgggtacttctcaacataggagcgaacgaaaagctgggggcgggtggggacccaatgctggccactgcaacagattaaaagatatggaaggaacatgtgctggaaaaagcagggttagacctggctgtcactgtattctatgagcaaaagcgactcaacaaccctaacgaatgctcgaacatgcagttggccaactacactgctgatattc

SEQ ID NO: 109091 - DNA, 167 bp, Glycine max
  Clone ID: PAT_MRT3847_69522C.1
ggctcgagctcataagcggtgggaggaggctagatactatatccacttgcctgttgaaaaatgagcacgtctaactatgtggcaggatattgtgtataagcaataccaacggttgccgcatatatgagcgacattttgacaggtgcaatcagtcactgttttatgga

SEQ ID NO: 109092 - DNA, 402 bp, Glycine max
  Clone ID: PAT_MRT3847_69523C.1
gtttctttttttttttcacgaattctaactgaggatttattagggggtacatagggcacatgttaatcacatgtgacattacttctaacatagatctgttgcaagatcatttatgttggcctcacacttggaacatgatgcgttctacttgaaacattataaatacacttgaattttggttgaaatgtgtcggggggcacacaccttttctattccttgagatgactcattagtatatatatcatacctgcatttgacgcaagatttcattttagattcgcatttaagaggcgtgccttaagacccgggtcccccacacttattacaccaagaacctgtggcacactgcctgctttacattccacaccggggccagccctgccaagatgtatcccattgaac

SEQ ID NO: 109093 - DNA, 348 bp, Glycine max
  Clone ID: PAT_MRT3847_69524C.1
ccagtttccagtgagacaactccccaagctgaaggaaattagaagtggaagctcaacagggagcatgttttcattgccaccgttgaaaataagtggttcagaagaaacatggaagaaaatcccggttctggaacaaacagccaagtaacctgctgggttacgttgagagcaatgtagtgggatgtggttattttcccatctatttttttcatttaaatcagatacctctgttatgcacgccttagatactaacacagatgtaagattctaaatgtaaagatggaattaattttatagaattataggttccatataataaaacctctggattttgaagaaaaaaatata

SEQ ID NO: 109094 - DNA, 649 bp, Glycine max
  Clone ID: PAT_MRT3847_69525C.1
acggagaaaatttctggtttataacagtacgcttaggtcactatgatattcaaacttcaaaattaacaggctttcacaaaccatagctgtgccgacaatacaaatcttggaagtgactctgatcaaaatacgcttatgtttgtcaacattagagtaggagatattcctactttgctcaacctacgtcttgcttagttatctatcgccatgcttttcttcgaaataacaatctatttgggtagaaagtggcatctgctaaaaacatttcacttgctttaaaatagcgtttcgtgagcataatacgaaacatacaaagacaacccggaaaagcctttccaaaaggcaattgcaagtgagagcgtctgctgggttccatgcattttctttggccccattgccccacgagtttagctcctttaaaatgaaagattacttaagcttttgggtcttatgcattatgatggggagcttctggctgatgaaactcggatcaccatacgcaccagaatcaaaagggtgcccttttgcagacaaagcttgaaatgtagattctctccagcaactctctcgaagtataatggggatttgtacttccaccaaatacacaatgcatacgtgtttctctcagtctaatcaacactccatcaac

SEQ ID NO: 109095 - DNA, 238 bp, Glycine max
  Clone ID: PAT_MRT3847_69526C.1
ccaaaaacaatatctggtctaccgtgggctccatatatacgaaccacctatcaatcgtcgaggtcaagacaatatgagctgtcccatccctatacaatgattctgctacgatgagttctacatatgttttactacccaaaccgctcgactctataacaagatcaatggcctattctatttgacagatacagaagcctcacttggagcatgcaacttataactgcacgatactttctat

SEQ ID NO: 109096 - DNA, 347 bp, Glycine max
  Clone ID: PAT_MRT3847_69527C.1
caccaaaagggaacagacaccacacacataataaccatcaaattcccgagcatacatgcagcatctgccagactctccaaaaatctcacgattgcacgttaagcactgtcatcaagcaatgtgaatactccgtcaacgattaccatcagtctcatctcgaacggttgtaccacacacatgcagccatcaactggtccttgtgcagagtctgcacacctaatttcaaagtcacacactttattctttacgacatcattttgatcattaatggctttaataaacctagttaaactgctctaaccggtttgaaccactgtgacagcattgacattttgagcaacgcttaa

SEQ ID NO: 109097 - DNA, 250 bp, Glycine max
  Clone ID: PAT_MRT3847_69528C.1
tgtgcttttaccgggtttctagaaatgcagaacaaggatgtatttgaacgagttaatcaattaaattaatttaatatggttaaaattataaatacgcttacttgttctttctcattagtgacatttgattcattcttatcttttaaaaaacactttctgaaagtcatctaaaagaaccactctacattttaacaagatatttaaactcatcaagatttgtcataccctaatttcttccgggaatatttac

SEQ ID NO: 109098 - DNA, 426 bp, Glycine max
  Clone ID: PAT_MRT3847_69529C.1
gctacactatagtttatcgataactatatgatcctatcatgtgtttatcaaatctatgctgatagctatgaagaactacggatgagttccaatcgtacgaaactgtctctctaactgattcgtattctgcaatcgtaattatgcgcctgatgattgcgactgcagcactgacttctgcatcagaaggaacaacatttcgtctgatgattcctgcaagatataagacatcgacggattgaagtacaaaaggtcttaaatggtattggggatacctgcaacgatgtagtggaagatttacccgtccgataaggaatctctagggtctatagacgtatatcctagttctacacatagcgtatcatatgctgcatctgcagctatcactaagagatagtgaaatcagatgatccttatgctaagaaacgc

SEQ ID NO: 109099 - DNA, 1005 bp, Glycine max
  Clone ID: PAT_MRT3847_6952C.1
atttgaagagagaatgaacttacaaaaaaaagaattagaaattgagaaaaggggggctgaggaaaaggaggagctaaagagagtataaagcggcgctagagagagtgtgaagatgctaaagacataaacataagaaagagcacaaaacaaaacaaaaaaaaggcagtgcgagtggagtgaagtgaagtgagtgagagaagcgcaaacaagtagaagagaaaatcatggcagtttctgtaaccattttagttctcatcatcgctctgcatctcatagccttcgtctttgccattggggccgaacgacgtcgtagcgaggccaaagtggtccccgacgagtacgacgaccgaaccttctgcgtttacaccaccgacgcttcctccgtctacggcctcgccgccgtcgccctcctgctcctcagccacaccgtccttaacggcgtcacccgatgcctttgctgcggtaaaggcctcgtctccggttgctccgccacttgcgccgtcttctccttcatcctctcatggattagttttttggcggcagaggcgtgtctgttagcagggtctgcgaggaatgcataccacacaaagtacagagggtattttgtgaagcacgatttgtcttgtgctaccctacgcaagggtgtgtttgctgctggagctgccttgaccttgttgtctatgttgactgccattttgtactattgggcacactccaaggctgacactggtttctgggagaagcaccgcaatgaaggacttggattggccacgcaacaccaccaccaaggtcctgactctgataaggcctgaatggtttatttcttggttttaaactcaattttggtggtcctcttattgcttttggataatggatgaatatatagtatttatgctgtaataggagaatgcctgaaatatattgatagatggtcatggtagtattatgttggtggtttaattaatatattccaatcttctagtttttagactagttctctctctc

SEQ ID NO: 109100 - DNA, 599 bp, Glycine max
  Clone ID: PAT_MRT3847_69530C.1
tacacggcacatacacatagtagctaacaccatttgcatattaaagagagtcacaagccaattctgaaccacacactcacttatttgtttctttcaactcactcacagagtaatggcatccatggcggctataggttctctgaatgttccttgttctgcttcttcgcgttcatcgaatgtgggaagaaaaagctttccacgcagcctttcattctctgcatcacaactttgtggagacaagattcacacagattcagtttcattcgcaccaaaaatcggtcgcaatcctgtaattgttacccctaaagcagtttctgattcccaaaactcccaaacctgtcttgatcccgatgctagcagaagtgtgcttggcattatacttggaggtggtgctgggactcgtctttatccactgaccaagaagagggcaaagccagctgttcctcttggagctaactataggctaattgacattcctgttagcaactgcttgaatagcaacgtctccaagatctatgttctcactcaattcaattccgcctcggtaaaccgacacctttctcgtgcttatgcaagcacatgggtggctacaaaaatga

SEQ ID NO: 109101 - DNA, 261 bp, Glycine max
  Clone ID: PAT_MRT3847_69531C.1
accactcgctacatgcacgatgcaagggagcacatacaggtagttaatagaaaaagagtaatctgagataacgatatctcctgtatcttcatcaattgatcatgggtactcctcgaagaaaggtaaggatgtgaagcctcgcgatggatgataatctgatgcttaccttatcatgaggaaacctgctatgtaacttactgaattaaccgataacaaaataacatgaaaatttagacacacacaatcctaacatccattatg

SEQ ID NO: 109102 - DNA, 2028 bp, Glycine max
  Clone ID: PAT_MRT3847_69532C.1
ccacgcgtccggtttctttcaactcaaattcgcaccgtaatttagttccatagatctgccaaattccccactagagagagcacacacacacatagcaatggcatctatggcggctataggttctctcaatgttccacgttctgcttcttcccgttcatcctttgtgggaagaaaaagcgttccacgcagcctttccttctctgcatcacaactttgtggagacaagattcccacagattcagttttattggcaccaaaaataggtcgcagtccagttatcgttactcctaaagcagtttctgattcccaaaactcacaaacgtgccttgatcccgatgctagcagaagtgtgcttggcattatacttggaggtggtgctgggactcggctttatccactcaccaagaagagggcaaagccagctgttcctcttggagctaactataggcttattgatattcctgttagcaactgcttgaatagcaatgtctccaagatctatgttctcactcaattcaattctgcgtcgttaaaccgacacctttctcgtgcttatgcaagcaacatgggtggctacaaaaatgagggatttgttgaggttcttgctgctcagcagagtcctgagaatcctaattggttccagggtactgcagatgctgtgaggcagtatttgtggctttttgaagagcacaatgttttggaattcttggttctggctggtgaccatttgtatcgaatggattacgagaaatttatccaagcgcatagggaaactgatgctgatatcactgtggctgcattgccaatggatgaagcgcgtgccactgcatttggtttgatgaagattgatgaagaggggcgtataattgaatttgctgaaaagccaaaaggagaacagttgaaagctatgaaggttgatactacaattttgggtcttgatgacgagagagcaaaagaaatgccttatattgctagcatgggtatatatgttgttagcaaaaatgtgatgttagacctgctccgtgagaagtttcctggtgcaaatgactttgggagtgaagtgattcctggtgctacttctattggaatgagagtgcaagcttacttgtatgatggctactgggaagacattggtacaatcgaggctttctataatgcaaatctgggaatcaccaaaaagcctgtgcctgacttcagtttctatgatcgttcatctccaatctacacccaaccacgatatttgcctccctctaagatgcttgatgctgatgtcactgatagtgttattggtgaaggatgtgtgattaagaactgcaaaattcaccattctgtggttgggctgcgatcttgcatatcagaaggtgcaattattgaagacacgttattaatgggggcagattattacgagacggaggctgataagaggtttctggctgccaaaggcagtgttccaattggtataggcaggaactctcatatcaaaagggcaattattgacaagaatgctcgaattggggaaaatgtcaagattattaacagtgacaatgtccaagaagctgcaagggaaacagatgggtatttcataaaaagtgggattgtcacagtaatcaaggatgctttaattcctagtggaacagtcatctaaacacaaccacctccccaaaaaatttcttgtaccccaaatcctaatggtgactgcgaagctcattactaccgcaggagagtttatcaagctctgcttccacgtctaagataggcttttgtgtttcatgatatatatttttgggcagtggcttgtaaataatagcggaagagaaggcccgctatgagcaatcacgctgtaaagttcgttaatcaattcaataaaacaagtttctttatttcgtactaataaaagtttcttcgtttcgtactaaaaaaaaaaaaaacaaaaaaaaaaaaaaaaaaaaaaaaaaaaaaaaaaaaaaaaaaaaaaaaaaaaaaaaaaaaaaaaaaaaaaaaaaaaaaaaaaaaaaaaaaaaaaataaa

SEQ ID NO: 109103 - DNA, 192 bp, Glycine max
  Clone ID: PAT_MRT3847_69533C.1
gacatgtctgccctactacttcttcagcaaccgaacctaccttatgtgcatcttcaaataatcaaatggagggttttagatttggaaaacagcgtgcaaaaagcaagtcttgtctatgaagtacatcagaatacaggttaatatttgaaatttattattttgttggacttttgggtttgggtgcttttaatg

SEQ ID NO: 109104 - DNA, 119 bp, Glycine max
  Clone ID: PAT_MRT3847_69534C.1
cacgcgtgcgcacgctcgtaatctgggatttgggctagcgccaagtaactggtagatttaatacttgagtaacaagatcgtcgtggccttaatcctggctctttcatccctagactgcc

SEQ ID NO: 109105 - DNA, 413 bp, Glycine max
  Clone ID: PAT_MRT3847_69535C.1
gtgaccgacagtgaaggatggactgttgctgctgctcacacacatacatacaagctatctagacaggatatgtgtacgattacggagtaaaaaatgaaaatgatcaataatccatgattctgagactgtataaatatataacataacagaccagtgagtgaatagtgtgattaagctattgacgtcgatgcgagaaatgagaatgaagaagctgattttaatactcatagcagcatctaccttcgtttctgtagctagatctgcgtctgatcatttcttcgaaaactatggcgtatcactggcagttgctgcaacacccggacctacacctgtcatggaacccctcactcttattcacggagctgctttcaaaggagccgtctgtttggatggaacatcgcctggttaccact

SEQ ID NO: 109106 - DNA, 251 bp, Glycine max
  Clone ID: PAT_MRT3847_69536C.1
gtgaccgcagtggagattgctaacagtactgtgtatcatctggcctgtggctggagaaaaaagtttcatggggctcgccgtgagcagatatgcacaccatgctctctaattactgaaagcactggattcctgcgtgcacaaaacaaggactacttgatagagtccctacccgtgttctgatgcatactgtttggaatgagtgagacggactgtatgatcattgacagatcattccgtgcactggatgacct

SEQ ID NO: 109107 - DNA, 1720 bp, Glycine max
  Clone ID: PAT_MRT3847_69537C.1
aattcaggctcagatttaatcctatcctatcgtagcaaagaaagaaagaaagaaaaccctagcttaccttttcaactttcaagatgcaaatctttgttaagacactcactggtaagacaatcacccttgaggtggagagttcagataccatagataatgtaaagtccaagattcaagacaaggaagggatcccaccagaccagcaacgtctcatttttgctggcaagcagcttgaggatggacgtacacttgctgattacaacattcaaaaggagtccactctacacttggtgctccgtctccgtggtggaatgcaaatctttgttaagaccttgaccggaaagacaatcacccttgaggtcgagagctctgacaccattgacaatgttaaggctaagattcaggacaaagagggtatcccaccagaccaacaaaggcttatctttgcaggaaagcagctagaagatggcagaaccttggctgattacaatatccagaaggaatctaccctccacttggtgctccgtcttcgtggtgggatgcaaatctttgtcaagaccttgactggaaagacaattacccttgaggtggagagttctgacaccattgacaatgtcaaggctaagattcaagacaaagagggtatcccaccagaccaacagaggctgatctttgctggaaagcagcttgaggatggccgtacccttgccgattacaacattcagaaagagtccaccctccacctggtgctccgtcttcgtggtggcatgcaaatctttgtcaagaccctcactggaaagaccatcacccttgaggtggagagctctgacactattgacaatgtcaaagctaagattcaagacaaagaaggtatcccaccagaccaacagaggctcatttttgctggaaaacagcttgaagatggccgtacccttgcagattacaacatccagaaagaatctaccctccacttggtgctccgtcttcgcggtggtatgcaaatctttgtgaagacccttactgggaagaccattactttggaggtagagagctctgacacaattgacaatgtgaaggcaaagatccaagacaaggagggtattcctccagaccagcaaaggttgatttttgcggggaagcagcttgaagatggacgcacgctggcagactacaacattcaaaaggagtctacccttcaccttgtccttcgtctgaggggaggtatgcagatctttgtgaagactttgacaggaaaaactatcaccttggaggttgaaagttcagacacaattgataatgtcaaggcaaaaatacaggacaaggaaggtatccccccagaccaacagaggttgatctttgctgggaagcaactggaggatggaaggactcttgctgactacaacattcagaaagagtctactcttcaccttgtcttgcgtcttcgtggtgggttttgagtttgagaatggtctgcaggtcccttgtttggtgtgaactgaagtatgtgaaagtctataatctggtcttttctttttttatgttcctgaactttgtgtatgtgtgcatcccgggtccattagcggaccttgaaaagctatgaatgtgtacaatttgcaatcatgttttaatgaatttagtactttcaataccttaaaaaaaaaaaaaaaaaaaaaaaacggaaaaagtttttcgagtggatttcaaaaaaaaaagggttgac

SEQ ID NO: 109108 - DNA, 762 bp, Glycine max
  unsure (1)..(762): unsure at all n locations
  Clone ID: PAT_MRT3847_69538C.1
ctgtttctttttccttccaaattggtttgtggtgtttctctcaaaatggcgattgcgtggttacggaatctgcaaaacctatggccattcagagtggacgagttaagagattcgaagcaattggtgaagaaactgagcatcccccaagacacgaagcaattcgtattcgcgctgcgtgatccccagacccaatccatcatttacattctctcctctctgaatttatcggagcgatcagcttccgatgccacgtgtctcatcaaggagatcaaacccgacgccgttttggtgcaagctggcgtttcccccttctccgagcttcagtccgaagaagactccgttccggtcccgacctcttctttcggggtaatcaaacgctgttttcttgataaaattggtagggacatgtatgagaatgtagcaggtaactttgtgttgagggagatctttggaaccagttttcatggtcccttgttggctgctaagagggctgctgaggatgttggatcttcgtttcttgttatagagtctccttcttgttggggtaatagtaatagtgatagtaatagtaataatagtgatagtcatagtgatagggatagtcattttcggagtcttgttaatagtttggttcctaagcagcatgctgcttcttgggctccttcggctntgaagaggttttctcttgatagggacttangatgatgntggctaaaggcttatctggttctttggatcacttttgcttagtagtgccaatgc

SEQ ID NO: 109109 - DNA, 1019 bp, Glycine max
  Clone ID: PAT_MRT3847_69539C.1
taggaacagaatgaaacacaaaaagacagtcactttttgagctacaggaataaataaattggtctaaattatttggaacaaactttaatatactctgaaaaactagccagtatcacaaacaagtcatgggtgaccaaagcaattggagattttcccatgtgttgtcttcaacatgaaactgtggaggctaacaacttatcctcatttatctgcaggatctgaatatttaagactagcgacacacagaggatataaccagggcaggtaaattttcccaataaatacaaccccctagagtgatggatccaagaatctttccaatggacatatcaacattacaatccctcaaaatccatatcattacagacatgcctcccaatgagagtctgaatactcctttgcatcgttatactgccacttttcacatatcagacacagaccaaagataagcttctctatctctagcttgcttctcatttgttctcttgaacatatccttttcgaacccattactacgatcaacaccatcccagggtcgtccaggccttattccatatcgatttggagcagcgtctaaacctcgttttaaccagctgtgattcggaatatcctgagggattacaaaacccgattccttcatcttttcattttcccccaagttcggaagaacaggctctggatattttttctttaccagatgtgccataggatcaccccaccttaatctctccttcagcattttgtctagttcaggatcatctctggtccgtgcaaaaggcttctccttctcaagttctagttcctttagcctagtctcagcttcacgcttttgagctaagcccttgccccattctatttctatctccttgggtttttcttctactttctgttttgatttcaagtattcctccttcgaaatgcgtactccttttactttatcacgatatacaggttcagcaccacgcccacttatggaagggtccatctgtttgaatctcaacatatcatccctcttcttt

SEQ ID NO: 109110 - DNA, 472 bp, Glycine max
  unsure (1)..(472): unsure at all n locations
  Clone ID: PAT_MRT3847_6953C.1
gagcacaaaacaaaacaaaaaaaaggcagtgcgagtggagtgaagtgaagtgagtgagagaagcgcaaacaagtagaagagaaaatcatggcagtttctgtaaccattttagttctcatcatcgctctgcatctcatagccttcgtctttgccattggggccgaacgacgtcgtagcgaggtaaccctaccccgtctctttctctctcctctcgctttggtttccgcaattgacctctgaaatctgattccctttcaggccaaagtggtccccgacgagtacgacgaccgaaccttctgcgtttacaccaccgacgcttcctccgtctacggcctcgccgccgtcgccctcctgctcctcagccacaccgtccttaacggcgtcacccgatgcctttgctgcggtaaaggcctcgtctncggttgctccgtcacttgcgccgtcttctccttcatcctctcatgttttttgg

SEQ ID NO: 109111 - DNA, 289 bp, Glycine max
  Clone ID: PAT_MRT3847_69540C.1
gatcttctttgtgaatgattattgaagaccatgtatgtgaatgttcatgcaggatgatttatgtcagtgcgcttggggtaagatgaagctcatggcatatgacattcattgcagctcatctggctatacaagaaatgctcctttacctggtatactaaatgcgaagtttctgctgattttaccaagattgaatgagcagttgatagcctgagcaggaagatactgaccatacactccactggtgattactagacttccaggtcacttgtgctgaaataatgagtgttga

SEQ ID NO: 109112 - DNA, 1422 bp, Glycine max
  Clone ID: PAT_MRT3847_69541C.1
cccacgcgtccgaaatgcttctcttcaaattctttttcattctccgtctccctttgggcttatgcagcagaaacacctaacagtttagccattctttctctcattttatttagtaacaacaatttcattcacaggacaagctagaacaaagttcaaccacactaaaccaaattagctacccttttgggtaaagagagtcatggctggagcattaaaaaagtgcatgatgctgtgttgcacgagcaagattgtctcaaacacaaacttccttattttcttccaaatctcaccacccagaaagcacaaaagctacacacatatccaatcttttctttttcttcatttcgtccaccagattcatacacaattcacgtatacgtacaattattaaaaggaagagatggcaggagaatcatacgaggaagccatcacgagtctgaccaagcttctcagtgagaaagctgagctcggtggcgttgccgccgcaaagataaaggagctgacggcggagcttgatgccgccggttcgaagccgtttaacccggaggagaggatcagaaccgggtttattcactttaagaatgagaaatttgagaaaaatccttatctatatggtgagcttgccaaaggccagagcccaaagtttatggtatttgcatgctcagactcgagagtttgtccatctcatattctggatttccaaccgggtgaagcctttatggtccgaaacattgctaacatggttcccccatatgacaagacgaagtattcaggagcaggggctgccatagaatatgcagtgttgcatttaaaggtggagaatattgtagttattggacacagttgctgtggaggtataaaggggctcatgtctatcccagatgacgggaccactgcaagtgaattcatagagcaatgggtccaaatttgtactccagcaaagtccaaggttaaagcaggaaaaagtgacttaagtttttcagagcaatgtactaactgtgagaaggaagctgtgaatgtatcacttggtaacctattaacatatccatttgttagagatggtgttgttaacaaaactctggctttgaaaggagcacattatgatttcgttaatggcaattttgagctgtgggatttgaacttcaaacttttgcccactatatccgtttaagattctctccagcaacatagtaaacctgaagtacaagattgtacactttggcaaagtcaaaagggtttccatagaaaagcagacatattcagaaaataatagtaataataataataatggtctgtgagctattattaaactagttttgttttctaccaaagtatcattctcatttctttgttatgtatacagtgtttttattttattttcattttgttgatatattaatgatttgatgctcccagactagc

SEQ ID NO: 109113 - DNA, 265 bp, Glycine max
  Clone ID: PAT_MRT3847_69542C.1
atgtcaaatttacttgcgggaatagattcttaggtttcactgactaaacacgaaaaggtcatacacagaaaaaatcacaggatattaaattggttttgaatgacatataaaggatgaacggcccatcaattctaactaaacaagaatccgtgtatactttaagagacaccccaacgagatagaggtgttgcacccacgatttccaggaaggttaaaagaataggctaagaccggcttcgtaatattaactatagctatagaaatg

SEQ ID NO: 109114 - DNA, 844 bp, Glycine max
  Clone ID: PAT_MRT3847_69543C.1
aaattttaatcccaacacactttctatggtttgctttcttcttgtttgaatttcctctggggtcttatagcaaattaagagtagtaaaaggtcatatatatacccataataaggcttctgcagactgcaatttgcactggtagtataacaaaaagtgtataaattgagccacccgttagattctatatgccggattaatggtatctttagtttaagaaagaaagtgaaaagaaaataagatgattttataggtttttaataggaaaaaaagttacgtatgtatataaaatatcttaaatatccctaaaaaataaatatacaaaaataatagtatgctgtatatttaatgtataaaaaatctttatctccttttattttttggtatgcaaggatcgataaatttgtaggtcccacccactttttaatatttcttcctcaattgctaaagaatattcaaataaaacaaagatgctttcactatcatcccacgttatttccttagtttcttgcataacaagcgtaagcaaattaagagtaaaatagagactaaagaaatgagagtgaatgaaataaaaaaaaggaatataagagaaataaagtaaagaatatgtattattgggatagatggaagaaaaaaagaagtggaaacaatttctatccacttgtttatatgagtgaaattaaaaagattacataaaaatttctttgattaccatacaaagtttactccattattttatccaacattaaataattcattattgtgcaaaaatcatttaattttttaaccaattaaattaagaaagtcacacatcatcttactttcatcccaagtgaagaagga

SEQ ID NO: 109115 - DNA, 473 bp, Glycine max
  Clone ID: PAT_MRT3847_69544C.1
aattcggctcgagctcgagccgtttaaatcgaacaaagccatacctccttccattgtaatttcttcgactgggtatgaagatttctcttacatcaccccattttttgaaatgctgccatagctccctctccgtgatgtcgtccgcgaaccttgtaaagtagaatgatgaaatgtctttgtgatccctccagtttgttgcagcggcataatgctggactcttcctctgttctcggcatgatcccatcaggattcctttctgaagcctgccctgtttctctcaacattctcacctctacgcccaactctcacccacccagtggttctctctctactcatcctctcaaacatgtgtaatgctctttctatatgcgggtcagtcatttactattatgataattttgtgcatccaacttattcatctaaagtgttcatgctatttatagaaataaaaagtttgaaatggaaattacta

SEQ ID NO: 109116 - DNA, 372 bp, Glycine max
  unsure (1)..(372): unsure at all n locations
  Clone ID: PAT_MRT3847_69545C.1
agaaacacaggggggaaggaggcagacacacgcgggaaaccagaagagaacacacgagggcggagaaagagagacgagaagcagaggaacggcgaccggtgcggggaagcaacagaaaaaaggcaagaaagaagagaagacgaaagccgccaggacagtagaaaaaaaggaaagggaacggcacgacatagaaaccacagggcacaaaaagggcaccagggcaaaaacggaaagagcggcaagaaacagagagaagcaccagngccggcaggacacgtagaggcgcaaaagagcgaggagaaacagcaagcgtaccaagcagcaagcgcggacgaaaacaacaaagagcgaaagagaaacgcaggaaagtga

SEQ ID NO: 109117 - DNA, 219 bp, Glycine max
  unsure (1)..(219): unsure at all n locations
  Clone ID: PAT_MRT3847_69546C.1
cctactattctgaaaacgcggcattgcaaatttggcatatcgtgggagtggggcatgcctcaccgcttgcctcatcattgccatcctctgcacctcacttctatcaccaggtgccgtctccctctgctcctctncctcctctttttttttggcncccccgcccccccccccctcccccctcccccccccccctcgcccccccccctttggggggggggg

SEQ ID NO: 109118 - DNA, 779 bp, Glycine max
  Clone ID: PAT_MRT3847_69547C.1
tacggctgcgagaagacgacagaagggggatcaaattcactttgatattcattccttctttcatttcattagcaaaagtgatcaattaagtgttaattaaccatcgatcatgatgaggagcaagaagcagagccagaacaagtttgttcgaatcatggcatcaccaatcagagcactgggaaaagcacgtgacatgtacgtgcggagcataacgaactgcggccagcacgtgagctactacggcggcgaccccacagaaggcgcgggaaggttctcgaggagccacagcgtggccacgtcgacgaggtccgaggttgtcagcgaggattatgcggagcttctcagggccgcgtccgcgagaaccttggcgaatcgaatcgacatggatttggtcctcaaacaacaacaacatgcgaactcatcgaaaggtaataatttgcccaagtctagcagtgttgggatggcgaggattgaggaggataagccctatgactctgaaaagggtgtgacggattcgtatccgaggagtagaagctatgctgtggaggccaagagaagaccttcttctgcttttcaaattcccagttccagacttgtctccatctaagtatacttagatataattaagtgagagaaagagattttaattaattagttgaatttgtaacaattaatccttctcctttctttatctgttttctcatgataaactttattgattctattgtttttggatagagattttcttgtaaataagattttttttagcttgtcggtag

SEQ ID NO: 109119 - DNA, 432 bp, Glycine max
  Clone ID: PAT_MRT3847_69548C.1
agtcggtcgccgccctattacaccttagttttactggatactacaactatcctgtcacctgaacgaaggcttgggccgatcatcaataaaaagggacgggaaggcactaaatcatatggaggtgcacaacctggtaggaaaagcacaccaattggcatctacatgggcagtgatctattacattactaaagctgctaaacccgccaaacaatacaactcataaacttgctgcagtaagaagtagaccgtcaatagaatggacaaagcctaagacgtgtctgcaaatcatgtgaaggacaggacaccgcgctcccgtccatgcaagagagagtggtgatatatgactccagggtcgataagaacccaaagaccggagagcccgaccttgtgtcttgcgggccagattggagcacgctactattcacctatgat

SEQ ID NO: 109120 - DNA, 754 bp, Glycine max
  Clone ID: PAT_MRT3847_69549C.1
attggaatggacttgtggaatgcatcttctggtggcgctgaagctgcaaaaatgagacataatcaatctggtgccccgggagttgcccttggtgatcaatgggtacaagatgaacgtgagctgaaaagacagaagaggaaacagtcaaaccgagagtcagccaggaggtcaagattacgcaagcaggctgagtgtgaagagttacaaaagagggtggaatcgctgggaggtgagaatcaaactctcagagaagagcttcagagactttctgaagaatgcgagaagcttacatccgaaaataattctatcaaggaagagttggagcggttgtgtggtccagaagcagttgctaacctggattaaacagcaacacatttcagttcctcagtgtagtgtttgatggtaacggcaaaatttgatagattcttaattaagacgaatctgcagctggaattttcttatcaatggcccggccttcttaattgagaataggatataatgtttttttttttctttgtcatactaatttatatcattaaccctcaattgtaattgcccttgtgattttacatgtcatttgtttgtaatattaaccagtaccgtagaatagaaaatgtaggctacttgagcactttttgtttagaacttagtattgcaagtgatgttaagaatcctgcttcaacttttcaaatcttcactagttgactatggagtcatttttgttctactatgcatgtgcttgagctgattgatg

SEQ ID NO: 109121 - DNA, 1059 bp, Glycine max
  Clone ID: PAT_MRT3847_6954C.1
gaatttaggaaaaagaagttgaaatgtaggaataaaagaaaaaggaagaattaggctgaggaaaagccggagctaaagagagtgtgaagatgctaaagacataacaacataagcacaaaaaaggcagtgagtggagtgagagaaagagagaaatcatggcagtttctgtaaccattttagtcctcatcatcgctctgcatctcatagccttcgtcttcgccgttggcgccgaacgacgtcgtagcgaggtaaccctacccccctctcgctttggtttccgcaattgagctctcaaatttgattccttttcaggccaaagtggtccccgacgagtacgacgaccaaaccttctgccattacaccaccgacgcctccaccgtctacggcctctccgccgtcgccctcctcctcctcagccacaccgtccttaacggcgtcacgcgatgcctttgctgcggtaaaggcctcgtctccggctgctccgccacctgcgccgtcttctccttcatcctctcatggattagttttttggcggcagaggcgtgtctgttagcagggtctgcgaggaatgcataccacacaaagtacagagggtattttgtgaagcacgatttgtcttgtgctaccctacgcaagggtgtgtttgctgctggagctgccttgaccttgttgtctatgttgactgccattttgtactattgggcacactccaaggctgacactggtttttgggagaagcaccgcaatgaagggcttggattggccacgcaacaccaccaccaccaaggtcctgactctgataaggcctgaatggtgatttcttggtttggactgatttactcaattttggtggtcctctttttgcttctggataaaggggtgttgggggataagggactagggaggaatagtgttttcaaaaccttgttcttgtattaatggatgaatatatagtatttatgctgtaataggagaatgcttgaaatatatagatagatggtcgtggatgatagtagtatggtggtggtttaactaatatattccaatcttctagttttt

SEQ ID NO: 109122 - DNA, 108 bp, Glycine max
  Clone ID: PAT_MRT3847_69550C.1
ataaatttccggttcacaacctttcttctccagcgttttcgatgctgcaaacacccttgaacaggttttccgcacgcgttgcgtattgagactggtccttcttcggaa

SEQ ID NO: 109123 - DNA, 450 bp, Glycine max
  unsure (1)..(450): unsure at all n locations
  Clone ID: PAT_MRT3847_69551C.1
gttcgggagaaggaggcggacggcggggaagaagttgtggtcggtgcagaaggcgtcgaggaacttgcggaacttggcgcgcttcttcgccgcagacttgctccgctgtgtccacgtgaagaggctgcagagcacgctcagcttggtttgctccgtcatttgaagttttgaacttcgattaaccgctaaggcgtttttgtttgtgagagtgatttatacagtatttatgttggttcagttgttacttgtgagagaaacacaaagtgaataccgagacttctatagtcaactagcgcgacttgctagatacgtttcatgtatttttttatttttttttagggtaaaagagatccggatgtcttctaatgtaatagacgactaatttcacttgacatacatggagatgttatttaccagaattttacacacaagaaattcaannnngatcgc

SEQ ID NO: 109124 - DNA, 544 bp, Glycine max
  Clone ID: PAT_MRT3847_69552C.1
gatttttgttttccccgccggcagcagcgccgccttcaatccacatgacacaaccactcgacccaaaccttctcactgtcacaaacatcacacttttgtgtctctgatatactaacaataatttccttagatttcttctctgttttcactcccattgctttgtcacgatgaacataattacccttattcgcaaccgcgccatgaattctgctcgcaggattctcatcggttctagaaattcatcgttttccgggtccacacctgcaaaatctgaccacactctttccattgctaacaattcgctgaaacctcgtttctatcatgaccactccaatcaccacctttttcaaattcatcgcacaaagggtattgctcagaaattttttggcttaccctcttcgaatttcgccccttcaccaatgcatttcagttttagcacatttaacagcgacgtttccaccttcaaggttcgaaatttctcgaactctgttgagacccgcatcaatgacaacaattttgagaggatttacgtacagggtggaat

SEQ ID NO: 109125 - DNA, 329 bp, Glycine max
  Clone ID: PAT_MRT3847_69553C.1
ctgaacctttacacacgagcactagaacagatttatgcgatggcgcttgctaagaaggtggctgccttcgatcctcatgacctgttaaggtttttgagttagagctacaccttacctaatttccgcagaatcaactctgggaaccaatctgtttaagaaaaaacatatggcttcgaacagaatggcagcgatgtcaacggtaacgggaccgtagcaacggactggctaagattcagacgcacactatgcatagcggaatatgtcacgactacagcagaccaaccgcaaaggctcaaaccatagatgagctaaactcgctgcagaagaag

SEQ ID NO: 109126 - DNA, 1740 bp, Glycine max
  unsure (1)..(1740): unsure at all n locations
  Clone ID: PAT_MRT3847_69554C.1
tacggctgcgagaagacgacagaaggggaatcctctgttgtttctcagccgcctcggctagggttcggaaacgaagaagggttctgttttcttttcgcgatgagggccacgtggaagaagaagcgtatgaggaggctgaagaggaagcgccgaaagatgagacagagatccaagtagtgcgttaaacctagtttgtttccgttgcttttacaattgcttatgttgtcaaataggacacccggttgttagtggcactggtctctcctttttgatgttttgatacattttgttggattttatttcgtcttatgttcttagctgaaaacaatgctgttactgcgtttgcgaatcaacaggatatcttgtttgcaaaaaaaaaaaaaaaaaaaaaaaaaaactcgagctggtgccgaattcggcacgaggtaaagttcccagagcaaacttgccccattcaaggaatgttccagaaacttctggtagtatgctagttccacctcagatcagtggaaggaaaaatgttgttacagaagacataagcaagctctttgtaaaaaaacaacactaacattcatataacgttagaagtttgcatattaaaattaatgatgggtaagaaatgtaaacccgaagatgtggcacttctcctgcttgaaagtgcttgctatcgtagaaagtgtacttgtttaacttttaagtttgtttacccgtaagtagtacttcgtctagttgatcatattacgttgttaacttacagcttagccaagtaaaaaaaaatggagcagaaacccgacgggtgatttgcttcaccgcatatttattggatttgcagttacgatttaggattcttgagaatactatgaaagatattttcaaaaaaaaaaaaaaaaaattcctgcggccgcgaattcttcctccgcagcaatggtgaacgttccgaagacaaagaagacctactgcaagagcaaggagtgcaggaagcacacgctccacaaggtcacccaatacaagaagggcaaggacagcatcgccgctcagggaaaacgccgttatgaccgcaaacagtccggttacggtggccagactaagcctgttttccacaaaaaggccaaaaccaccaagaaaattgtgttgaggctccagtgtcagggatgcaagcatgtctcgcagcacgctatcaagaggtgcaagcattttgagatcggtggtgacaagaagggaaaaggaacctctctgttctagatggaatattagaatttgccatttcacacactctctctacctctctcagtttttattgtcatcttcggcttttaatttttgcagaaatattttgtgtttggggatgttagaatttgcaattttgtttttgtttatgcactgattatagtattaatgactagtttctcttcctttccttcaaaaaaaaaaaaaaaaaaaaaaaaaaaaaaaaaaaaaaaaaaaaaaaaaaaaaaaaaaaaaaaaaattggnaccttttcttaagggacccaaaaaaaaaaaaaaaatcttgggggggggccccggcccccatttcccccttatggggggcgttttacccccccctattggcccgtgttttaacaacttgggaatgggaaaaccccggggttccccaacttaatggctttggaaaaaaatccccttttccccgggtgggtaataacaaaaaggccccccccgggtccccttcccaaaagtttgccaaccttaaatggaaa

SEQ ID NO: 109127 - DNA, 394 bp, Glycine max
  Clone ID: PAT_MRT3847_69555C.1
tcgaccggcgcgtccgctttttactttgagtctactcgatccgtctttttctccttgtactcatacattgcatatgaggtggttctgctagatggctggccaattccatttttgatgatggtcacgattgcacttgctgaaaagggtatcaaatatgtacacaatgaagaggacttgatgaacatgattcctcttctcctccaaattaacccttttcacatgaaaattcctattctcatccacaattgcaaacccatttttgaatccctcattgcatgcccactacattatactagtttttggattgacataaacttccttgttgccttgtgacccttaccagagatctcattctttattctggtctgattatttttatattaatatatattat

SEQ ID NO: 109128 - DNA, 388 bp, Glycine max
  Clone ID: PAT_MRT3847_69556C.1
gcccttaatttttttttggtcaaaaaagtttttaaaattcaattctgggggggaaagtttccattgaaagctcccaatgttgttaaaaagaaaaggctaaaatggaattttcgcccctttattttttcaaatttgggattttaggccccccattttttaattgggacatttcatcccccattttaaaaaggtttcccttttaagcccccattttttaattaaaacggcccccacttttaaaaaaattcccaattttaggctttgggggtaatttcaaaccttggtttatttcccttggaaaacttaacctgcccggggctatttattatctaccggacaacttttttttaaatatttaattcccaacaagctttatttatttaaaaag

SEQ ID NO: 109129 - DNA, 1658 bp, Glycine max
  Clone ID: PAT_MRT3847_69557C.1
ggagttactattggtggaaccttgttcaaagcattcaagagaattcgggagcacccgacgttggatgaaatttcgtccttgctagctgaaagcctcccaggcaatgctacttttttcttgacctacgtggcccttaaatttttcattggctatggtcttgaactgtcccgaatagttccccttattatctaccatttgaagagaaaatatctttgcaagactgaagctgagttgaaagaagcttggcgtccaggagatcttggttatggaactagagttcctggtgacatgctgattgtcacaattgtcttctgttactctgttattgctcctgtgataatcccatttggtgctctatattttggtctaggatggcttgttctgcgaaatcaggtgaagttcttggaattttgtttaatgaacccagttttatgttttatgtggtaattttatatggctaaattttagttttcattccttatgtttatgaagtttaatgatcacacactaataatgtaatttcactctgtcaactaataaaaaatcactgttgatatgacttttaatgtatttattgtaaaagtcaataaacttaccatgaagatttgtaattaaatgactctgttaaactttttcacagggcatgacctattttctctatgcttattttaagtctcaatttagtccttttaaaaagttattttgaaatcaagtctgttagtaaatatattattttaagagtttgtgtatacttgtattaatcaacaggcactcaaagtctatgtaccaacatttgaaagttatggaagaatgtggccacacatacacaaccgtatactagcatctttgatattataccaaattacaatgtttgggtactttgggacgcagaaattctactatacaccacttgtgcttcctcttcccatattgtcattgatctttggttttgtctgtgcaaagaaattttaccccgcctttcaacatccagcacttgaggttgcagctaatacacttaaggaagttcccaatatggaattgattttcagagcttacattccaccaagcttgaggtctgagaagatagatgatgatcgggttgaagatgcattgtctcaatgttcgagaacagcacctgtttgatgtaattatctgaatttcaacttgtttttacgtgttagatgtagtcttgtagagatacttttagatattttattaattgttcagaatacgtcataggaaccagaggtgttgagtgttgatgttgtgaatgtgattgtgtaagaaaatgttgggtggtctcgtaatattttcttttagtgtgatgtttgttcgacttgtgatagttgcggatcagtgttctctatgtattcaacattttctttatttgttctgaatgagaattcatgacttttcattgtgtaaaattaacaatgttgattgatatgttctaaaaggagtttgtggtaggccttaccgcgttctgccatgtgctctgccagcagcctgttcccaaatgataagggaaattgtaaggaataaaagtgggaaagtagaatgtgactagaaatctagaatgaatgaaaaaagtttttttttttttttgtacaacatatatcaaattgaaagaaagcttgtaccacaatacgtacacaacc

SEQ ID NO: 109130 - DNA, 634 bp, Glycine max
  Clone ID: PAT_MRT3847_69558C.1
gtttttgtttaaatttgaaggcattccaactgaaagtcatgcagttagggctgcatctggaaaatatttttattttaccgtgctgaatgttttcattggagttactattggtggaaccttgttcaaagcattcaagagaattagggagcacccgacgttggatgaaatttcatccttgctagctgaaagcctcccaggcaatgctacttttttcttgacctatgtggcccttaaatttttcattggctatggccttgaactgtcccgaatagttccccttattatataccatttgaagagaaaatatctttgcaagactgaggctgagttgaaagaagcttggcgtcctggagatcttggttacggaactagagttcctggtgacatgctgattgtcacaattgtcttctgttactctgttattgctcctgtgataatcccatttggtgctctatattttggcctaggatggcttgttttgcgaaatcaggcactcaaagtctatgtaccaacatttgaaagttatggaagaatgtggccacacatacacaaccgtattctagcatctttgatattataccaaattacaatggttgggtactttgggacgcagaaattctactatacaccactt

SEQ ID NO: 109131 - DNA, 423 bp, Glycine max
  Clone ID: PAT_MRT3847_69559C.1
ggttatcatttgtcatttgttctgtaattacagtctgcagtgaccgtcatatctaaattcagctaagccatgttttgaaagaaaagaagtgtatgtatgattttgtgttcactttaatgtgaatgtggagtttctgtattcatatttatcttttataacctgtgttattcctttgtaatgttacaaatacagggtgtgatttagacggtcaataacacttgtcttcctatcatcttaaaaaagcattggaatgtaattacacacttttatcatgacaattccggtatagtgaaagagattaactatatatatcctgccacattttctttatggttctggattcagattttttttcctgggtcatgttgatatagctttttaataattatgtgtttgtttagaatatagctttgtgtccctgca

SEQ ID NO: 109132 - DNA, 182 bp, Glycine max
  Clone ID: PAT_MRT3847_6955C.1
ttctttgcgtacgcccacgcgtccggcaggaggaaccattttgcgaagagatctatcggcaaattattagacagagggcaattttagagcaagggtcgattacgcagcgcactcattcgttttaaaggaaagattaaaacggtggccacagtaggaattcctgagaaaacaggcatagcatt

SEQ ID NO: 109133 - DNA, 3310 bp, Glycine max
  Clone ID: PAT_MRT3847_69560C.1
agagtgcatctttccatttctgatttctgtggcatttaggaacctaagagagaataccaaatatctattagtttttccttcctgtgaaaattgtaatatataatttaatttctctaagtttattgccaacaggtgaacaaggcgcgcagtccgaaaaccattcaatgcatcggctttcatttccctttcaaaacgttaaggtgcccccacaaacacaactaccacctttgctaataaaaaatatctccttttttccattttcattttgaatttcctttcatcttctatatgttattgccattgctacacaaacaatacaaaacaccaccctttaacccttggcaacggttgcttagttccaagggagcagtaacggctatgttataatttctgagtttgtgttgtagagagaagttacgttctgagaggccaagatggattttacgttcgttcttgaacttccctggggacttccatttgtgatatttctggtttttattattattgtttgcgttgttgtaaaggaagctagggatctatgtgttgttctatactgacttggtcttcaaggtgatgtactcattgtcaatatagcaaaatgttaatatgatgttgttctggagataagccgatttgactccttccgtacatgtttgttatggcttgtcttgggtatgcagggccacttactttgtctttcatcctactgtgttaagtattctagttgcacttgcattcatttcggtattctttcgtctgctattttcaattaatgatcatggtatgtttcaacaaacaaccagcaacggaactttcagtgaacttgacaaattatcaatggctaacatcacggcaaagagttcaaggttgtggggattttttattgcctgttattgggtttcaattgttacgtttgctctcctatggagggcttacaaacatgtgtcatggctgcgagctgaagctcttaagtctcctgatgtgaagcctgagcagtttgctatagttgtgagagacatacctcatgttcctcaaggtcagactaggaaggaacaggttgactcttactttagagacatctatcctgagacattttacagatctatgattgtaacagacaacaaagtggtgaacaagatttgggagtcattagaaaagtatacaaagaagcttgcccgtgctgaagcagtatatgcagggtcgaaaacaactgccaaaccagaaggaacaagacctacaaacaagactggcttccttggacttgttggtaaaaaggtggataccatagaatattgcaacgagaagattaatgaacttgaggccagattggaatctgagcaaaaggtcactctcagagagaagcagcaagatgctgctgtagtatttttctcaagtagggtggttgcagcatctgcatctcagagtttacatgctcaaatggttgacacttggtcagtctttgatgctccggaacccaatcaactaatatggcctaatttgaaaatcaagtattttcagagagagctgaggcaatacttggtgtatttcattgtggcactgactatattcttctacatgattccaattacatttatatctgcattaactactttggataatttggtgaaatatctcccattcataaagccaattgttaatataaaggcattgaaaacagtgttggaagcttacctccctcaactcgcactgattattttcttggctttgttgcccaagttgcttctgtttttgtctaaatttgaaggcattccaactgaaagtcatgcagttagggctgcatctggaaaatatttttattttaccgtgctgaatgttttcattggagttactattggtggaaccttgttcaaagcattcaagagaattagggagcacccgacgttggatgaaatttcatccttgctagctgaaagcctcccaggcaatgctacttttttcttgacctatgtggcccttaagtaagataacttcttaactttattctgtttagtttatttatctgtggtgatacttcatttttttcatttataagttaaggtgcataactactttatggtgatggtagaaggaaatgtagaggccatgcttcatctacaaatggtgtttcacattatatcttgttattatcttttcctagattcttttgaagcaggagttaccatgtattccaaaagcacatctgtaacaaatattttctcacatgatattgtgtgtaaactgtaaaatttataatttggactattcctaccagacatatagataggaaaagacttcaccttttctttatttttaattacttggcatgacacaaattaattgttttttctttgtcttagatttttcattggctatggccttgaactgtcccgaatagttccccttattatataccatttgaagagaaaatatctttgcaagactgaggctgagttgaaagaagcttggcgtcctggagatcttggttacggaactagagttcctggtgacatgctgattgtcacaattgtcttctgttactctgttattgctcctgtgataatcccatttggtgctctatattttggcctaggatggcttgttttgcgaaatcaggcactcaaagtctatgtaccaacatttgaaagttatggaagaatgtggccacacatacacaaccgtattctagcatctttgatattataccaaattacaatgtttgggtactttgggacgcagaaattctactatacaccacttgtgcttcctcttcccatattgtcattggtctttggttttgtctgtgcaaagaaattttaccccgcctttcaacatccagcacttgaggttgcagctaatacgcttaaggaagttcccaatatggaattgatttttggagcttacattccaccaagcttgaggtctgagaagatagatggtgaccgggttgaagatgcattgtctcaagcttcaagaacaacacctgtttgatgtaattatctgaatttcaactttttttttacgtgttagatgtagtcttgtagagatacttttagatattttattaattgttcagaatacgtcataggaactagaggtgttgagtgttgatgttgtgaatgtgattgtgtaaatgttgggtggtctcgtaatattttcttttagtgtgatgtttgttcgacttgtgatagttgcggatcagtgttctctatgtattcaacattttctttatttgttctgaatgagaattcatgacttttcattgtgtaaaattaacaatgttgattgatatgttctaaaaggagtttgtgtg

SEQ ID NO: 109134 - DNA, 436 bp, Glycine max
  Clone ID: PAT_MRT3847_69561C.1
caataaaagaaaatggcttaacttaacaaaatttgtttccgagggggaccaaaacaatgttttacacttttttacatttgcacaaggggggggttttttttgctttctaaagtgttgtttgtgtcctttttaaaaaggatctcccccctaaacagaattgtttccgataaatattacaatacaaacatgctgtgcaaaaacttgttttttttttttaactacaaaaagatggatgctcttatggcttttctttttccttttcatcgggaatggccctcatatgggcagtgatgtttgaaaacttggaattgtcctttccaccttttttgggatcaaaatcttttttttcaccatcccatttgcgaagttttgggcttctatccctgttcttttccgccttttccggaattttcaaggtttgtggtgttttcttaaa

SEQ ID NO: 109135 - DNA, 471 bp, Glycine max
  Clone ID: PAT_MRT3847_69562C.1
atctttcaaccccaaagggaggccccaggcaggaccccttcttgcttcacgactcaacgacgcacgcaaggaacaaggaacagggggactccacgatgctaatggagatagaaccaaagcgatggtaagaatagctacaaacatatactttgttttcttcattgcctgactgctagctataatatatatcgatctcgtccatctttttcttcaaatattcagaatgttcccatctgggaccaagatccgccatataagtaacgagaggaaccatagcgctggtaaggatacctacaaacatatactttcttttcttttattttattttcatctactatcttctttgttttttttattacatcatttatcatatatatttattatttttcttttctttttatctctctttccacaacctcaattcttctcatagaataaatgtttacaattttcttagacctaatattaatg

SEQ ID NO: 109136 - DNA, 474 bp, Glycine max
  Clone ID: PAT_MRT3847_69563C.1
cacgagcttttatgcttactttgcagtaatttgttactaatcaaagtttatgaaaaagccggaaaacggggttcgttggtccaggtttggaaggtgatccagaattttagactgaaagtgttgtacaactcatttggaacactgaataatagtctcaaagattgggtaaagtagctggaaaacagtgtatatcccaatgttagcagagggcaggttggtgggttttctgtttctggaatcattctattctcatgttcttctccatgaatagtttggagccaaattttttctgctgctgttaaaagaattattttttttctgcctctctcattatgttttttttatttgttttcataacattgatttgaaatgtttattaattttatcagataattaatcttataaaaaatataattaaataatttttagtaagatcttacaagctccatatctgaaaagttgcgtaaagactga

SEQ ID NO: 109137 - DNA, 433 bp, Glycine max
  Clone ID: PAT_MRT3847_69564C.1
gaaaacctggtgtttttataactattcccaacgggacagggtagattatgcccccacctcccccccccaaaaaaaaagaataccatcagaactaccataacggtgatttttcctaatagaaatcgaatgcactacaatatttatcccaaaaacacttaaaaaaatagcttcactcgtcctttctgcttgtagtttcaaccccttgtctctttgtgagcatcaggtttacctttttactcaaagtgcatgtgcacacagttgtagacggaaacttcattagtatgactgaagtatctaaaggtcagtgcctgctccaaacataggcaaaagcctgataaatgatcaacggtgttgacttgggatccctttcctttatttgccaatctgttgtttttggttttattcgaaatcaccaataagtcgtctttgtaag

SEQ ID NO: 109138 - DNA, 611 bp, Glycine max
  unsure (1)..(611): unsure at all n locations
  Clone ID: PAT_MRT3847_69565C.1
tacggctgcgagaagacgacagaaggggagaataaggttaaataaattctcgtagcagcgttttgtttcccatcgcccccttttgctctccctctgtgcagacatggtacagattcgtttctttgttttctgttttctgtttcctgattttcgtttgagtggtgaaaattgggtgggttgtggtggcagttgttcttctcgtacttcaaggatttggtggggagggaagtaatcgtggagctgaagaacgatttggccatcaaaggaacattgcattctgttgatcagtacctcaacatcaagctcgaaaacactagcgtcgtcgatcaagaaaagtaccctcacatgctttctgtaagaaactgcttcatcagaggttcggtagtgagatatgtgcaattgcctccagaaggggtggacattgaattattgcacgatgccacaagaagagaagcccggggcggttagtgtcttcattttgtgacgtatcttatttatgagaattcggtgggcttacataaggtggatgttaaccttcctacttcagaaagaaactctnttcagatgttaaaggttatgtaactgtattggcttttccttttagtcttttg

SEQ ID NO: 109139 - DNA, 183 bp, Glycine max
  Clone ID: PAT_MRT3847_69566C.1
gggtttggtatcaataaaaggaatgggactttcccaaaattaaagataaaaaagggttggattggcaacaccattccctccgggaaaaataaagaccagcaacctactaaaacaagttaacttataaaaatctacaacattattgaagggttctacctggggtgagaactattttttactaag

SEQ ID NO: 109140 - DNA, 539 bp, Glycine max
  Clone ID: PAT_MRT3847_69567C.1
ctttcattttctctccttctattaccaacatatctatttgaaagatgggttcgaagatggctatagtgatcgtagccttgttcgccgtgctccttttcatctccccagaggtggcatgcagggatttcaaagaggagctaggtgaggttgtcaaagagactaatgaggagagtgatgccagattagccggtagtggtggtggtgaccttgatctgtctcatggtccgtggataggaaattgccgtcgtgaaaggcacgttcctgatcgcccgagccgaccgcgagcttattaacaattgagacaatgtatacagttctacgtactaaataatatatttcatgaataaaatctggtgttgtatgtgagaggcatgcacagacagcaaggcctgtctttcttaccactagagatatatttcaaaaacagaaataatgttgaataatacgattgtgccgttgtgactagtttaagaccaaactcaaatatatactgtaatagtttgtccctgctcgtgactgacttatatgttaatatatat

SEQ ID NO: 109141 - DNA, 587 bp, Glycine max
  Clone ID: PAT_MRT3847_69568C.1
aacggttcgtgagtcggtgccgtaagacggcgctcgcctcctcactggtctcgtcctggcgaaagccaggacccattaccccgacggagggaaagaaaagataaaaaaaagaaaccaccgcgacccctttcgctctccctctgcgcaaacatgttgttcttctcgtacttcaaggatttggtggggagggaagtaatcgtggagctgaagaacgatttggccatcaaagggacgttgcattctgttgatcagtacctcaacatcaagctcgaaaacactagcgtcgtcaatcaagaaaagtaccctcacatgctttctgtaaggaactgcttcatcagaggttcggtagtgagatatgtgcaattgcctccagaaggtgtggacattgaattattgcacgatgccacaagaagagaagctcggggcggttaatgtcttcattttgtgttgtaatcttatttaatgagagaattcagtgggcttccataaggtggatgttatccttcctactgcagaaggaaactcttttcagatgttaaggctatgtaactgcattgctttttccttcccctagtgcctctattttc

SEQ ID NO: 109142 - DNA, 374 bp, Glycine max
  unsure (1)..(374): unsure at all n locations
  Clone ID: PAT_MRT3847_69569C.1
gggtggaggaaaggaaaataaaaaatttaacaacatttagttttcaaaacacaaaaacaaattgcgctgttaatttctaacagcggccccgccacaaaccttccacaattaccacttttaattcctataaactatcatccactacagccaccaagacacaacatcctttaatcctaacaccattcaaatattttttttccaacacacaccaccatcacactcacatatacatctcaaatgctggtcccgagagaccccaaacacccaattccatattaaattgcactcaacaactcacttntaaacctcaacctccattagctaaaacacttataaatcacacacatccttgtctccaattttaaaacctcata

SEQ ID NO: 109143 - DNA, 152 bp, Glycine max
  Clone ID: PAT_MRT3847_6956C.1
acgcgtcactgcgacccgttctagatcgctgcagttcgatcgcgatctatacttcactagcaagggtcatactttcctttggccttgtcatcaaatcgaatcgccgcaccgcgattctactgtgcctgaataccacagagaacattgaagca

SEQ ID NO: 109144 - DNA, 1102 bp, Glycine max
  Clone ID: PAT_MRT3847_69570C.1
cccacgcgtccgtacggctgcgagaagacgacagaaggggagaataaggttaaataaattctcgtagcagcgttttgtttcccatcgcccccttttgctctccctctgtgcagacatggtacagattcgtttctttgttttctgttttctgtttcctgattttcgtttgagtggtgaaaattgggtgggttgtggtggcagagtaattttctcatctttcatattaccaaacatatcttatttgaaagatgggttcgaagatggctatagtgatcgtagccttgttcgccatgctccttttcatctcccctgaggtggcatgcaggaatttcaaagaggagctaggtgaggttgtcaaagagactaatgaggagagtgatgccagattagccggtagtagtggtggtgaccttgataagtcttattgtcctgtccacttgcccttgatggagtatagaaagtggataggaaattgccgttgtggctgttgtcagtggaccacagagccggaagtttgcctatattgctgtccagaaagtcacgttcctgatctcccgagccgaccgcgagcttattaacaattgagacaatgtatacagttctacgtactaaataatatatttcatgaataaaatctggtgttgtatgtgagaggcatgcacagacagcaaggcctgtctttcttaccactagagatatatttcaaaaacagaaataatattgaataatacgattgtgcccggaagctttgtcctagttttaatgtgacaaaaatgatactggtgtaactgcatttctttttctttcccctagtgcctctttgtttgcagacatctcaacacgtttaattcattcatatattgttcttctcgtacttcaaggatttggtggggagggaagtaatcgtggagctgaagaacgatttggccatcaaaggaacattgcattctgttgatcagtccctcaacatcaagctcgaaaacactatcgtcgtcgatcaagaaaagtaccctcacatgctttctgtaagaaactgcttcatcagaggttcggtagtgagatatgtgcaattgcctccacaaggggtggacattgaattatt

SEQ ID NO: 109145 - DNA, 140 bp, Glycine max
  Clone ID: PAT_MRT3847_69571C.1
tccacacaagggtatctagcccaaccagcatacgacgccttgggacaacatagacaattgcggccgctctatatgatccaagcttaggtacgtgtgcatgtgacggggtagcgcgcctaccttgtcacggaaattcaatt

SEQ ID NO: 109146 - DNA, 1717 bp, Glycine max
  Clone ID: PAT_MRT3847_69572C.1
cttacaatttgactaaaccaaaaccacccgcgtcttgtgttttctaggtctctcaacgcgatgcaaatcggcttgagcttttgtgttggcatgcttgttttgattccttctatcttgtgaaacaaatctttcaactggtgttggtgttggtgttgcgttggcggaagagaaacttgtgtttcaaatttcaatgacttctgctactagttatactcctttacctgaaaacaaacctcagatccagcacataattaacattcctgaacagattgagcctgaggtgcatgaccaatgttgcatttacaaggttcctcctcatctcctgaaattgaatgcagaagcctatacaccacagttcatctcaataggccctcttcacagtgacaaaccagaactaaagcaggagaagcagaaacaaaggtattttcatgctttttggaaacgctatctcgcaaggtttagctttgtcacaatacttccttgacccttggagaatcaacaaaggttagaaaagataggtaattgttattccaagccagaacttcacaaggaggaaaagtttgttgacttgatcctcttagactctgtcttcataatggagctgtttttgagaaaagcaaacaaatctgaacggaagaatgatcacatgttcaccacatcatgggtgtgcaagttggctcaacgtgatttgttactacttgaaaatcagattcccatgtttgtgttggaggaattgcacacaagggtcatccttggagacaatggcacaaaagaaaacagtgttaaatttgttgagcttgcctttaactactttgaagactattatttttcacacaagccaagttttgaagtggagatgatcaagaagtgtaaatcttgcagacacttcactgatttgatcagatacaccttcttgcctacaaaaatccaggttgagggggtgaataatgtgagtgtgaatccatcacaacatttcaccccttgtcaagtggaatgtgttcttagaactgcaacaaagttgaatgaggctggtgttagctttgagaaagttcaaggtaggagctatttggacataaagtttgagaagactccaatcctcagctggttcttatgttttggttgcttaccattctccaaatggttcaaagctcgtttgcaaataccccatttgaaagtagaccaagtcacagaatgtgttctaaggaacctcattgcattggagcagtgtcactattccgaccaacctttcatatgcaactatgtgactctaattgattctttgattcacactcaagaggatgtggagctgctggttgacacagaaatcattgagcatgaacttggaagccacactgaattggcaactatgataaatggtctttgcaagcatgttttggtgacttcaaattattatggcaaaaccccaaaggaactcaatgaacactataactgctgttggaaacactacttgggtatgctgatatctgtgtacttccgtgacccttggagattcagttcaactattgtaggaactgctgttttcttatttgctgttgttaactttctaagaattattggtgtgtttcgtccaaattactgagatactaatgatcttagaatttttttttcctagcacatgctaactacttagtttgaaatgtatgtttctttttttatcactagcaatgaaatgtgttattatgaaaaaagtttcttt

SEQ ID NO: 109147 - DNA, 2053 bp, Glycine max
  Clone ID: PAT_MRT3847_69573C.1
gtaagtaactcaagacaaaaatgtgaggagtgacacgtgtggggtagaggcatcatatcataggcatacacagcagagggtggcatcggtgccaatgaaagaagatagtaatggataacaaacatgatcactgatcaaaactattcacatcttcacacaattcctcttcacatttttagatatcatccttctacctttgcctatggaggctttctccgtacaatcactcaccgccaccaccattccctcctctctgtcacgtagaggtgccactgacaaaccttctgccacctcccatgttaacctttcccatttcatgaggtacccttgtaccacaagatcaacaaaacaaaaaattctttgcaccagagctcaagcttcaggttcaacgaaatctagtacgggtagtgcagaggggatttctgagaaaacagattccaaggatgacaacttagtatttgttgccggtgctactggtagagttggttcacggacagtgagggagcttataaagcttggatttagagtcagagctggagtgcggagtgctcagagggccggtgcattagttcagagtgttgaacaattgaagcttgatggtgcaagtggagggggacaagcccagctgtagagaagcttgaaattgtggaatgtgatttggagaaaccagaaacaattggatcggcgttaggggatgcgtcaacagtgatatgtagcattggtgccagtgagaaggaagtttttgacatcactggaccctttcggatagattatcaggccaccaaaaatctaattgatgctgcaactgttgccaaagtaaatcacttcatattggttacttcactgggaacaaacaaaattggctttcctgcagctatccttaatttgttttggggagtcctagtttggaaaaggaaggcagaagaagcactgctggccagtggacttccatacacaatagtgagaccctggaggtatggaacggcctactgatgcttttaaggaaactcataatataaccctatcaacggaagatactttatttgggggtctggtgtcaaaccttcagattgctgaactcttggcagtcatggccaaaaatcgtgatctttcatattgtaaaatagtggaggcaattgcagagacaactgctccactgactcccatggaggaacttcttgcaaagataccttctcaacgtccttacatttcttcacccaagaaaccagatattgcagctgtcagtgttccagatccccctgctaatgttgtgactgtggaacctaaagttgccactcaacaagaaactgcacaacctaaaccagtggcaaaacaaccactttctccttatatcgtttatgatgatttgaagccaccatcatctccttctccatctcagcctggtggtgggaaaccaacaaagatcagtgagacagtgccaaaaccaagtgcttcagatactccaagtagtgtgccaggagtagatggcatctctcagacaacatcgtcatctaaagtggagaagcctctttctccttatgtagcatatcctgacttaaagcctcccacatcaccatctcctaatgcaccaactgtatcagtttccacacctgctgcagctggggtgccggagatagacacaatatcaagcaatggaccggcccaactttcagcagcagatgaaccaaaggaagaacatctccctgaacccaagtcaagaccactttcaccttataccatgtatgaagacttgaagcctcctgcatcaccatcaccttccttcagaaattcttaggaattgcctgcctattgattgaatcagacaagaactgttgaagagtctatgcggcactcatatggaggatcaggatggtcactcaaatatgaagagaagcatttctacgaattgaaattttcagcggtgtaatttatttctttatgaccatttggcgaaactcaacgaacactatttctccttttagtaatttattttcccaatgttgcaatttaaatttaaataaaggaaaaggtatcacttttcatgttcaatttt

SEQ ID NO: 109148 - DNA, 509 bp, Glycine max
  Clone ID: PAT_MRT3847_69574C.1
acggctgcgagaagacgacagaaggggtatggtacatgtttttgttctcattttttatgatagcacccgtatgttttttattacttataatctcgcaagagttgctctcacccgcgtcatgaaattatttaaagattaataacaccctaaaatttagggtgcaatttttgcattcttaaaacttgttcattgattgccatacttatgaagaatttaattagaatatattgatagtatatttttttaataaaagaacattttttataataagattactgattttttataataattattctcttcgttcaagattatatgatattttagaaaaaaattgttctaaaatagattcatttttataaaacctatgttgtgttaaatattttttttttcaaaactatccttaattaatatttagtgagagtagtgtatatgaatgataaataagtgattaatgagagggataaaagatatattagaaaattatttgatgttttataaaattcaat

SEQ ID NO: 109149 - DNA, 914 bp, Glycine max
  Clone ID: PAT_MRT3847_69575C.1
ctgcttgggggggggggggggggaaagatgtaatggggtgggaatggcaggcagatcagtagatcagataacagacaagctagatataaggataggcataatgaaaaaccagaaggaaaatatagaaaaaacatacacactatatatagaataatcggtaagttgcgggcagaaagccaaataagtgccggaactaaacttggactaggggtatacggtccagttaatagagcaaacatcgcatttgtcgttggacgtgtaactatagttataatgttacattacgtatgtggtgtaactaatgttggagacgataaattgtgctttggtactaaagttggtgttcttataaaaataactatgtgtttacaccttactggctttacaggtccagttgcatttcccggcagaagtcccgtcgtccagtttcggcgccgcccctatcgaaattcttatactgccggtttcccgtcatcactgtatgacgtcctcctctctttgggggggggggggggggagttaaagcaaataggcgagtagggcagaacgcaaagctataatagctaaatagtaataaaaggcggtacctaagttggaagcagtaaagatgtaaggcgagatagataggagagattaaaagagaggtaaaggagataacacaaacaaaatagtaaaccttaaaagagagccataaacgaagagaagtgagatataaaggaataagcacgcgttatgttaaatgtcgggtatgtgtatgtcagttcaaggttcactggatcgatgtcggtaggtcatcgtagactgtggtgagacgcgtattgaaaggtaaggtatgccttcgtcggggataatcgtcgcatgcccaaaatttgcctcggatttaatggaagtcttggctactatagattttgggt

SEQ ID NO: 109150 - DNA, 743 bp, Glycine max
  unsure (1)..(743): unsure at all n locations
  Clone ID: PAT_MRT3847_69576C.1
aaagatcagtgagacagtgccaaaaccaagtgcttcagatactccaagtagtgtgccaggagtagatggcatctctcagacaacatcgtcatctaaagtggagaagcctctttctccttatgtagcatatcctgacttaaagcctcccacatcaccatctcntaatgcaccaactgtatcagtttccacacctgctgcagctggggtgccggagatagacacaatatcaagcaatggaccggcccaactttcagcagcagatgaaccaaaggaagaacatctccctgaacccaagtcaagaccactttcaccttataccatgtatgaagacttgaagcctcctgcatcaccatcaccttccttcagaaattcttaggaattgcctgcctattgattgaatcagacaaggttagaaatgcaaattattatatgtatacccttgattatattttactatggtttaagctctatttttactgccaaagttactggacacataattttaatagaactgttgaagagtctatgcggcactcatatggaggatcaggatggtcactcaaatatgaagagaagcatttctacgaattgaaattttcagcggtgtaatttatttctttatgaccatttggcgaaactcaacgaacactatttctccttttagtaatttattttcccaatgttgcaatttaaatttaaataaaggaaaaggtatcacttttcatgttcaatttttaaaaacc

SEQ ID NO: 109151 - DNA, 340 bp, Glycine max
  Clone ID: PAT_MRT3847_69577C.1
taattacataaaaaatcatactttcactaggagacgttccaaatcaaaaagggtcataatatcatcatatgtgcacaccaacaataactcagtccttccctgctattaactcttcactctctaccatcttcattcttcaaacaatcaacatccctgctaatcaacaaagaggccacttacctcacaacaataacaaatattgcactttaaatatcaaaaattaccaatgcccatcacaaatctccatgatatgtaaccagacccaataccacaagccctgcatcgttttctgtcaaaagtgctgcaacacattcctttcttttccctcagggtattatcc

SEQ ID NO: 109152 - DNA, 226 bp, Glycine max
  unsure (1)..(226): unsure at all n locations
  Clone ID: PAT_MRT3847_69578C.1
atcgagcgaatcggctcgaggagtttttgctctaatttcaaacttgaccccttttttagctgattttatggttgaaaattttaattttgtggttgattgcttcgataaaaaaatctgctaagatgtgtgacttctctatgcattcccaagtgtccttttttcaattggttcatcaattttcattatcgacacaactttgaattccggcntagagagggggagtggt

SEQ ID NO: 109153 - DNA, 382 bp, Glycine max
  Clone ID: PAT_MRT3847_69579C.1
gttcaaacaggggatcgtatttattacacgtgttgcaacaaaaccgtgcaataagtagacggatctatttttacttacaccttcagagagaccggaagttttgacccatagcgcaccgtaaacagctatatttcttaatacaagatcagaaggtgcgagagaccaaatcggctcccaaaaaaataatcatctctatccaaactgtgcaaaactctcctgagtccaggggggtggatccatcacagaacagggatctgatttttcaaaggcaggaaccttaccttgacatttaggacaggagtgatctttatgccaaaggctgtccattgaagggcaaagaaagcaaactgcaagcatcatggggacaaagcattcaacaaat

SEQ ID NO: 109154 - DNA, 255 bp, Glycine max
  unsure (1)..(255): unsure at all n locations
  Clone ID: PAT_MRT3847_6957C.1
gtcgtcgcgtgtactttcttgcgaaacagaanggcgaaggggcnaacacaanttttttntttttttgtaganccgagagnggnnaaaatgttggggatctncancagttccgtggtgtncgcngccggagganctggtggctgccggcagcagaacgncgtnggncgtanacgacggcngggnaagntgnccaaaccggttcgtngagaacaaggcnttcnnnggtgtcgctgccaggtgggngaacangtgcat

SEQ ID NO: 109155 - DNA, 360 bp, Glycine max
  Clone ID: PAT_MRT3847_69580C.1
aaactcaggcctccaagaaggttcagttatctctttgatgaatgagggcgacgagatgtacatccgatcgtgaacgggttccattattgattgctaacatagtgtacattcagtgtaccattgatgatatgtagcttgttttgttgaaacagacttttgttttggcgacaactgaaatttcagggaaatacagtcaccactagatggtccagttttacatgcacatttatgagaagtcaaaccacatcgacattgtcacctaacttcatttcaatgatcgacgctttagacagttctcatagtgaaacctattccattaccaattttcatcactatgcataatatacccctttctccaac

SEQ ID NO: 109156 - DNA, 271 bp, Glycine max
  Clone ID: PAT_MRT3847_69581C.1
gcgatcaaggggtctgagagtgagtggtgtcaagtctgatctcatcccatacttctctcattcattgttgcgactttggagtcgtgttgcgatgtctagctcgctgaatctgatctatccctcgcgacacgagtatggacaaggggaacgcgtcaatccgagacgtctaagaacaaagtgaccagtagttgcatggatgatgttctcggggagcgggtatataaggaactacgatctctcagttgtgatttggccgtgaaaactcgcagtt

SEQ ID NO: 109157 - DNA, 529 bp, Glycine max
  Clone ID: PAT_MRT3847_69582C.1
ggttacatatttattattattattgtgagacattaatatttgtagcatttaacctaaagttcctatagctaacaacagctacactaactagctaactacagcttcttcagaagacagaggaaccagacaagggatcattcaccaaattgaatatgttattccagcaatgcttattattctcatcgaggctgttcacgttgcagaggcttccgcccccgttgattattgccaggttgtctgcttcctccgtgcccaagtcatcgttcgagtcatacacaaccaaagcagccttactatgatcatcattgtcgttattgagtccttcaaggatgacactggtggagagtgagggaggaacaacaacattgggattattatatttgttcgtactgctgatgttgtctgacgctctaaatgcttgcactgccggcataatatcgtcatcttgcatttgcaaattcaacattgaggtggtgtcgtcttttatgaacacaccatcgtcgatgagttgcgctagaggatacatgtt

SEQ ID NO: 109158 - DNA, 562 bp, Glycine max
  Clone ID: PAT_MRT3847_69583C.1
gtgattcgaagctcgctcgtgagactcatctctctccttttttgtgcaaaatgtaatacctcataaacatttctaattggggcttattacttacacgttgatgtacagtttttaattactaacttaggccgttatttacacaacgaattaagtatacaatacaaaaaaaaaggctaaagaaaatgaaaaatagaaaatggaaacaatttttggagtgtagttccattaccattatgccacagtacttgatctaatcactaaagagtacaccaattttcacctaccctcccaaagagtctccttaaggatcggtttagaaacatctcttggtgaataatagtctacaccacccatcatgctggtacttccggatgaattctggtaatttgtatctgatcctttgatttcaatgccagtcatgaagctgctcacatcctcaaatttccagtcagataggtatccgggctttgaagttacagtgcttacttcaatatctcctgaaagcattgccaccacacgtgacattgatggtcgtaatgttggtgatgtctgagtgcacaaa

SEQ ID NO: 109159 - DNA, 212 bp, Glycine max
  Clone ID: PAT_MRT3847_69584C.1
cttggtacgacctttttgatttttgggccaacaccaaaaacagacgggccagggcaaaggacaaccatccccaaccatatacgggtctagcttaacgatgctgcaataaaacacatgatctacttataggtcaccgggtatacagtttccacgtcggagaaaaccaacgcggcgcctacaccccattcaaatccattttaggaggttaactc

SEQ ID NO: 109160 - DNA, 445 bp, Glycine max
  Clone ID: PAT_MRT3847_69585C.1
tgaatacactaagacttacatgagtggagataaataaaaaagctatctagcaggaaataaaaagataatgacagaaggtataaaaaaaagtagagagagtgagcaagagagaaagagagcagagagagagtgacgtaaaagaaaatgtaagtatatgtataaagaagggtagaaggaaggggaggacaaggtaagtatatggacaaaaattaatgatgaagcgtgtaattggatggacatgcaagaagcagagagagtcaatgtaataaatggatgaagagaaatgtatatacagagaagagaggaagcacgcagacagagaatgaaagatatagatagagttggatggctgaaagtaacggatgtgcgtaacagagaagagatagaagaatgatatgtgaagcgaaggaggatgaatgagagtgatagaaatggaaagatggat

SEQ ID NO: 109161 - DNA, 128 bp, Glycine max
  unsure (1)..(128): unsure at all n locations
  Clone ID: PAT_MRT3847_69586C.1
ttcngccttatttngatattagttcttgttggaganagatttaannacatgannccaacaaaaaggaaggnntctcaagcattcagtgtgagtcccatttgtganttaagggtgccacttangaccag

SEQ ID NO: 109162 - DNA, 191 bp, Glycine max
  Clone ID: PAT_MRT3847_69587C.1
cctcaacagcaccagacattcataaaagctctccaccttccctaaaatcgatcatactctcgcaatcttatttaacaaatgacgtacataccttgccttctaactcaacaatgcataacaaactataccattactaaagtatgtactagcgctgctaaaccgaaattgaaacaaaagcctcttcactggaa

SEQ ID NO: 109163 - DNA, 278 bp, Glycine max
  Clone ID: PAT_MRT3847_69588C.1
tacagaacgtgcctgatacttgttaatggccttgtggaaagttattccaataggattgccttaaggcagttctggcgaagggcagcggaacctctatattattagctacggataatgttaatgtatgtagttatatctaatggatgtttagactattgcaaatgtatatggcaagccaaaggaggagctggatgccactttatcatggccttgtgagatcttagtgggggataaaaaaccatatagagtgatgtgaattatcgataacccttattaag

SEQ ID NO: 109164 - DNA, 490 bp, Glycine max
  unsure (1)..(490): unsure at all n locations
  Clone ID: PAT_MRT3847_69589C.1
gtcgatccagctgccatcgcatccgccagcgccggcacatcccgctctgggctttaaacgtgacccctcgcctcgactcgccctgccctgtgaaaatgttggtgcttcttgctttcatcatcagccttccacatcacctctgcagccttgctgttcattgccaccgtcgacaatgcctggtgggtaggagatgagttttttgcagatgtctggagaatatgtaccaacaacacgaattgcacagtcatcaatgacagctttcaagagtactccacgctgcaggcggtccaggccaccatgatcctctacaccattctctgctagatagacttcttcatcttcgtgctccagctcttccgcctgaagcaaggagagaggtttgtcctaacctccatcatccagctaatgtcatgtctgtgtgtcatgattgcagactccatttatacagacaggcgtgaagacattcacgacanaaacgcgaaattctatc

SEQ ID NO: 109165 - DNA, 330 bp, Glycine max
  Clone ID: PAT_MRT3847_6958C.1
gggcacaaaaaatattttttttccaagggaaaaatttttaatacaggggggaattttattgatggggccgggggggcctctaaattttttataaaaacccctggggggccaagcttcccctgaccattagccagcatgctaaaaaacaactgtttaaacaaggaaccccctggcaaaacaacaaaaagagaattattttctcctttcaaaaataaacccccatcccaaaatccttaacctgatactcccaaaaaccccctgggaaaaaatccctttaaataatcctttccccaaaaaattaaaggccctttaaacccccaaaaccgtttt

SEQ ID NO: 109166 - DNA, 455 bp, Glycine max
  unsure (1)..(455): unsure at all n locations
  Clone ID: PAT_MRT3847_69590C.1
gcagagatatcatatagattgtttagagtataanaaaagtaatcgcctgcccaatagaattgaaatctgtaaatgttgcagagagcattagccaatgaatcatatacatttctttatataggttaatccaattcttacttgttcttcggtgatatttatgtttattcaagttcttctggaaaactttggatttttaaataaccaaagataatctgcattgcagctttggaacaccaatgagcacgaggacttacaggtgcttgtcataatatctcgtcctccagttaaagtgtatgtgcttctcttcatgtttcatactttactaacaagttgatagtggtaactcttgtcctggctctttcaaacatggcaaactgctgaagctctttattgattagtgcaaatgcattgttatttccaagtaactcagtaaattgtatccccaaaaatacctg

SEQ ID NO: 109167 - DNA, 210 bp, Glycine max
  Clone ID: PAT_MRT3847_69591C.1
catattgtcgcgctccttcttatattgtgcgtcaacgacctttgattgctactactggtgctcgaagccacagatctgctacagagctaccgtatcctgtatttattcttcttcacctagaaacgtcttacactcgaaaatatggaatttgatacactggatcggatatacctgtcactgcattcactatatacttgttgaacactacgc

SEQ ID NO: 109168 - DNA, 527 bp, Glycine max
  Clone ID: PAT_MRT3847_69592C.1
tcgttccaggaaggtttcccgtcatcactgtatgacgtcctccttctttgggggggggggggggcaaaacgtagagagctaaagccggaggcctagaagaccatggctacgttggggatagcgcgtgatgactaaggataggatgttcacggttgaaagtttacgatagacgaaaaatagggaaagatgaggggaaaagacaaaataatttacaatggtacaaaccattaaaccgaaatcaacatgatgaagaaccgaaggtaccaggaactattagtggttgaagtaacaaggtgggcagtaacccgttaaatattcgcatttgggttaatttggtgtaatgcagttatagatgtgcaaaggggtggaaggcaggtaattgcggtacataaaaatgcgtgggtaagcaacgtgcttaaggcacccgtaggcgcttcagtgcttatatgcgcgtataggtacaacgggtgcaggtatgaatggtgttaacataaagtgaaggttagctagataagctagtttttggg

SEQ ID NO: 109169 - DNA, 128 bp, Glycine max
  Clone ID: PAT_MRT3847_69593C.1
ttttatcttaaataccacacttagccttaaagcaaataacaaagaatgactgaacaagatataacacattggaaaacaaaaggtaaaccctgaggtataaaccacaaaattcgatacaaaatcacata

SEQ ID NO: 109170 - DNA, 148 bp, Glycine max
  Clone ID: PAT_MRT3847_69594C.1
tttacgcgtgggtcaatggtggaaggtggaagtgtgtttgatgtcaaccttgtgaatatctcacctacttttaattacaatgtctccgaacactttgttctgtgaatgaatgctttttagctcaaaaaaaaaaactactaataaaaag

SEQ ID NO: 109171 - DNA, 2582 bp, Glycine max
  Clone ID: PAT_MRT3847_69595C.1
gtactgatagtctgggtgatgctggatatcccggggctgcctcgcttggggatgcagtttgtgggatggcggttgcttatattacagagaaggattttcttttctggttcaggtcgcacacggccaaagagatcaaatggggtggtgcaaagcatcatcctgaggacaaggatgatgggcagagaatgcatccccgttcttccttcaaggcgtttttagaagtggtgaaaagccgtagcttgccgtgggagaatgcggaaatggatgcaattcactctttgcagcttattctgcgtgactcgtttaaagatgctgagcatagaaattctaaggctgttgtggatccccatgtgtcagaacaagagttgcaaggggtggatgaactaagttctgtggccagagagatggttagattgatagaaacagccactgctccaatatttgctgttgatgtcgatggccacgtaaatgggtggaatgcaaaggtttcagaattaacaggactcccagttgaggaggctatggggaagtccttggttcacgatcttgtgtttaaggagtctgaagaaactatgaacaagcttctttctcgtgctttaaaaggtgaagaagataagaatgttgagataaaaatgaggacgtttggcccagaacatcaaaataaggcagtgtttttagtggtgaatgcttgctccagcaaggattttacaaataatgtagttggagtgtgctttgttggtcaggatgttactggtcaaaaaattgtaatggacaaattcatcaacatacaaggtgactacaaggctattgtacatagcccaaatcctttgatccctcccatttttgcatcggacgataacacatgttgcttagagtggaacactgcaatggaaaagcttactggttggggccgtgtggatgtcattggaaaaatgttggtgggagaggtttttggtagttgctgtcagttgaagggttcagattcaataacaaagttcatgattgtcttacacaatgcacttggtggacaagatacagataaattccctttctcatttcttgatcggcacggaaagtatgtacaaactttcctgactgcaaataagagggttaacatggagggtcagatcataggagctttttgctttttgcaaatcatgagtccggaacttcagcaggctcttaaggcacagagacaacaagaaaagaattcctttggtaggatgaaagagttagcttatatttgtcaaggagttaagaatcctttgagtggcatacgctttacaaactctcttttggaggctacaagcttgaccaatgagcaaaagcagtttcttgagactagtgttgcttgtgagaagcaaatgttaaagataatacgcgacgttgatcttgaaagcattgaggatgggtccctggagcttgaaaagggggaattcttgcttggaaatgtcataaatgcagttgttagccaagtaatgttactgttaagagaaagaaatttacagttgattcgtgatattcctgaagaaatcaagacattggcagtttatggtgatcaattgaggattcaacaagtgttgtctgatttcttgttgaatatagtgcgctatgcaccatctccagatggctgggtagagattcatgtacgtccaagaataaaacaaatctcagatgggctcactcttctccatgctgaatttagaatggtatgtcctggtgaaggtcttcctcctgaattgattcaagacatgttcaataacagtcggtgggggactcaagaaggtttagggctgagcatgagcaggaagattctaaagctaatgaacggcgaagtgcagtatatcagggaggccgaacggtgctacttctatgttcttcttgaactacctgtgacacggagaagctctaaaaagtgttaaatatgtattctgtagctgtaagattaagtttaaagccctggcattgcccctcatgctgaccgtagatagtttgttgttatagattatgctctcacctaacaaggcaacttaaggggcaagcatttgaacaagctgatttggctagctatctcagtcacatgtaattctaccaaattggactgttgttttgcaccctgacaaaacttgttcggtacagcaagagtggctagttaatatgtggctaaatgtaaccttaaatcttactgataaagatatggcagagtagatgaaatgaagtttcgccaatatgcgcacatgtttatggccaagtggagtctcctgtgaacattttcaagcaaatgcttacatcattagcagctgtagtgaactccaatctatagttggattgaactgcatccatctcctgcactgttgtatgttctgatagtaactgcttataccaaatgcgttcccaagtgggcaaataattgtaaaatcttagtctccaacaagatttgccatctgcaatgttgctttccaactctccaccttttttttttccatcattgcctgtaaatcccttcctactctgtaataaaagctgggttatttatcccgtaatttttttttaatttcgtgaaaaaaaaaaaaaaagggcgc

SEQ ID NO: 109172 - DNA, 252 bp, Glycine max
  Clone ID: PAT_MRT3847_69596C.1
aaaggaagtataggagcaatggaactcatggtggtttggataatgtggaatatacctctgatagagaaattaggaggcgcttattaaagttgaacaagaaatctatggactcagagagtgaaacatctgatgatgatcttgataagtcttatgaagatgggaagagtgacagtcatactagaacctctgactctgaaagtgaccgagaagtacattcagaaagtctaagtagggagtcaagaggggatggat

SEQ ID NO: 109173 - DNA, 1862 bp, Glycine max
  Clone ID: PAT_MRT3847_69597C.1
gacaaattcatcaacatacaaggcgactacaaggctattgtacataatccaaatcctttgatccctcccatttttgcatcggatgataacacgtgttgcttagagtggaacactgcaatggaaaagcttactggttggagccgcgcggatgtcattggaaaaatgttggtgggagaggttttcggcagttgctgtcagttgaagggttcagattcaataacaaagttcatgattgtcttacacaatgcgcttggtggacatgatacagatagattccctttttcatttcttgatcggtatggcaagcatgtgcaagctttcctgactgcaaataagagggttaacatggatggtcagatcattggggcattttgctttttgcaaattgtgagtccggaacttcaacaggctctgaaggcacagagacaacaagagaagaattcatttgctaggatgaaagagttagcttatatttgtcaaggagttaagaatcctttgagtggcatacgctttacaaactctcttttggaggctacatgcttgtccaatgagcaaaaacagtttcttgagactagtgctgcttgtgagaagcaaatgttaaagataatacacgatgttgatattgaaagcattgaggatgggtccctggagcttgaaaagggggaattcttgcttggaaatgtcataaatgcagttgttagccaagtaatgctactgttaagagaaagaaatttacagttgattcgtgatattcctgaagaaatcaagacattggctgtttatggtgatcaattgaggattcaacaagtgttgtctgatttcttattgaatatagtgcgctatgcaccatctccagatggctgggtagagattcatgtacatccaagaataaaacaaatctcagatgggctcactcttctccatgctgaatttagaatggtatgtcctggtgaaggtcttcctcctgaattgattcaaaacatgttcaataacagtgggtgggggactcaagaaggtttagggctgagcatgagcaggaagattctaaagctaatgaacggcgaagtgcagtatatcagggaggcccaacggtgctacttctatgttcttcttgaactacctgtgacacggagaagctctaaaaagtgttaaatatgtattctgtagctgtaagattaagtttaaaggtgctacttctatgttcttcttgaactacctgtgacacggagaagctctaaaaagtgttaaatatgtattctgtagctgtaagattaagtttaaagccctggcactgcccctcatgctgaccattagatagtttgttgtcatagattatgctctcacctaacaaggcaacttaagggacaagcgtttgaacaagctgatttggcaagctatcccagtcacatgtaattctaccaaattggactgttgttttgcaccttgacaaaacttgttcggtaaagcaagagtggccatttaatatgtagctaaatgtaaccttaaatcttactgataaagttatggctgagtagatgaaatgaagttttgccaatacgcacacaagtggagtctcctgtgaaaattttcaagcaaatgcttacatcattagcagctgcagtgaactccaatctatagttggattgaactgcatccatctcctgcactgttgtctgttctgatagtaactgcttataccaaatgcgttcccaagttggcaaataattgtaaaatcctagtctccaacaaggtttgccctctgcaatgttgctttccaactccacccttttttttttcatcattgcctgtaaatcccttcctactctgtaataaaagctgggttatttatcctgtaatttttt

SEQ ID NO: 109174 - DNA, 1897 bp, Glycine max
  Clone ID: PAT_MRT3847_69598C.1
cggctcgagcggctcgagtcaaagtagatttaatgtacagtttggaactttttatgttcaacggaaaagcaagacatcaggagtaactttcaactcaatctcaccttagatgaaagtcacattcaactcaaatgtaacaacgatttgccgagcatgcagttacaactttttgagggtgaacatcaatttagatggccaaacgtgaaaccaaacaccccttagttttcattcaaacattttttttttatgtgttttagtctttaaattttagatggcagaggttaaaatagattaaaaagcgcatgtgtaaggaataaaatgagtattatttagatgtaaagattaaaatataaggattttataagtatcaaattagtaattaaaaaaagttttaatttaatctttttaaataatgtttttttttctctctccgtatatcatgaacacaataatagacaaccccttttaaattaaatcaactttaggacaaaacttgacccttaaaaagagatagtaactccaactccaagtcacattggtgacaaagttagaaacaaggagaaagaaagaagatggcaggaaagaaaatcccagatgtgttgctgaattcaggacacaaaatgccagttataggcatgggaacttcagtggagaatcgtccatcaaatgagacccttgcttctatctatgttgaagccattgaggtgggttaccgtcattttgacactgctgcagtgtatggaacagaggaagccataggcctagccgtggccaaagccatagacaaaggccttataaagagtagagatgaagttttcatcacttcaaagccttggaacacagatgcacaccgtgaccttattgtcccagctcttaagaccacattaaagaagctggggacggagtatgtggatctttatctgattcattggccagtgaggctgagacatgatcttgaaaatcctactgtttttaccaaggaagatgtgctgccctttgatatagaagggacatggaaagctatggaagagtgttacaagttgggaatagcaaagtccattggcatatgcaattatggtatcaaaaaactcactaaactcttggaaatagccaccattcctcctgcagtcaatcaggtggaaatgaacccatcttggcagcaagggaaactcagggagttctgcaagcagaaaggaattcatgttagtgcttggtcagctcttggtgcttataagatattttggggctctggagctgtcatggagaatccaatcctccaagacatagcaaaggcaaaagggaagaccatagctcaggttgcacttagatgggtgtaccaacaagggtcaagtgccatggctaaaagcaccaacagcgagaggatgaagcagaacctggacatatttgattttgtgctgagtgaagaggatttagagaggatcagtcaggttccacaacgcaggcaatacacaggggacatatggctatctgaaaatgggtcttgcaagaccttggaagaactttgggatggagacgtttaagtatttcttcaaggataaaactatgttttgggatataaactatgaaaataagcaagatttgaattccatgttattaagatgtcttgtattattattatcattatggttggctataacttcatataaggacctggctgcccttagtatttatttcacaagtgcccttgattgagaccttgagtagaataagagtgtggcatgtttatcattggagtgaggttgtggtgcctcttccattcaaaggaaatataaaaaatatatatttgtcatcaaaaaaaataaaaaagaaaaaaaaaaaaaaaaaaaaaaaaaaaaataagcccgatggattttgcttagcttcttgcggcatctta

SEQ ID NO: 109175 - DNA, 533 bp, Glycine max
  Clone ID: PAT_MRT3847_69599C.1
cccacgcgtccgcccacgcgttcgcccacgcgtccggtgggaatcatcaaccgtggtaaatctgtattaaactgttgagtattgcaaagtactcttatgcagtttgtccaaaaaaaaaaaaaaaaaaaaaaaaaaaaaaaaaaaaaaaaaaaaaaaaaaaaaaaaaaaaaaaaaaaaaaaaaaaaaaaaaaaaaaaaaaaaaggggggcggccgttttaaagaaacccaaacttaccaccccgtggggggggccctttaaagtattccaagttaccccccccgttcttgcgacggccaatttttttaaaggggcgcccaaagtaaaatccctgggcccccctttaaaaacgggggggggggaaaaccctttttgtcccccagttaaatcccttagaagcccccccccttttcccctttggaatattgccaaaagggcccgaccaatgccctcccccaaagggggccccccccgagggggaagggggggggccccttggaggggcattaacccggggggggggggggttccccc

SEQ ID NO: 109176 - DNA, 258 bp, Glycine max
  Clone ID: PAT_MRT3847_6959C.1
gttggaaaagaatataatggggtattttagaaatttgggagccaatataggtgaagttattgttaatagtgttgaataagaaaaaagaaaaaaaaactggggggagagaaattgggacccaaaggggaatgctgacgtgacagcaataagacaagcttggaaaaagaggaagcgataaaaaaaggagattgtaaaatatatgggggttgtgaaccttggcccaaaaaaactgggggaagagaagggggtggaataaaa

SEQ ID NO: 109177 - DNA, 530 bp, Glycine max
  Clone ID: PAT_MRT3847_695C.1
acgagcccatataccacatggccacgcatggtatgtttattaggcccggcttgattgctgctaaccatgagagggccgggttagcacaagccggcgcgtgtaacaagtaatatgcagctgtaaccagggaataacaactgtaatgtactgctacctacgtggtaaaactaatggttgccgtggaacaggctaaggggtcatagggataacttgtgtgagcattggcggtaagttttggtaaaagtgccggggcgccacctaaatacaccggctgcgccgattcccatgcgacacataatagttggcggcgcgaaggtaaaagtgttaccaatggcggtgaagcttatatacgagcgcggggcgcatacgcgttagttggtatacctgctgaaattacggtgactgcagctaggaaggtgataacctagagtgtggcgtatagaaacatgtcgcagcagggagcgccgacaagggagcggcgttatgatatagtcgcaaacgcagtaaaccggctgcccgggtggacgggc

SEQ ID NO: 109178 - DNA, 487 bp, Glycine max
  Clone ID: PAT_MRT3847_69600C.1
ctgagcatcgtctagctatctcgatcgaactgtccaaggtcctgtcacatgttatgacggtaatggacgacgtgatgcatgggggaagacgaagactgtcatggctatagatagaagaagaacgatgacagaaggttataaaatggacagctaaaattggggcgggggccgagcgcggtgatggtggttagtgtaggagaaggctgtgtccaaacaacaaaccaaatgaatcaacaatgggctgtggtagatagaatgcgagtacggggactgggtggtaggagagggaggagggagagtggccagagagtgaaaagaagtgggccatcaggaggagggacccagccacctcaagaagcaaaaggcccacggggaatgaatgaaggtatcgaatgaaaacggtctcggataccggaagcaggagtatgcaacgaaaatgttaaagcgtagtgagacactgagagtgagcgggcatatggaataaggt

SEQ ID NO: 109179 - DNA, 210 bp, Glycine max
  Clone ID: PAT_MRT3847_69601C.1
aagattggacatgtttacgaaatgtaacattataagccagagtatccattgtgtgacatgacgaatatggggacaagagatccacgcggttgacaggttaaatgtcacctgtatatagcccgtatgaacttatcgacctcattacactagaatgaacttgtatactctggccatatatgtatccttataatatatcgtcattctttgcgg

SEQ ID NO: 109180 - DNA, 485 bp, Glycine max
  Clone ID: PAT_MRT3847_69602C.1
ccacaccacgaaaaccctcagttttaagcatgaacagttgggaagttttacatagctgaaaaaatagatggaactgtagcttttatgagcgctgctactaatactcttcacagagcatatggctctgtcatagtagtattattaatcaccagatgcaccaacagcaggctgccaacgaggaggcagcccctcagacaagcacctgagctgcagctagcctagcgatcgggaccctgaaaggggagcaagaaacgtaatccagcccagtcttggcgaaaaaagcaaccgatgaaggctctccaccatgttctccacaaatgcccaccttcaagttaggcctagctttgcggcccctctctgtagcaagcttaaccagctcgcccactcctctttggtcgagaacctcaaaggggtcatgctggaggatgccctgagccagataaatggggatgaacttccccacattatccctgctgtagccaaag

SEQ ID NO: 109181 - DNA, 328 bp, Glycine max
  Clone ID: PAT_MRT3847_69603C.1
ttttaacattatatcaatgatgggcatatatgaggcgcgactaatttggatactaaatataacaattaatggttaagtctgactcggtccaggatgtggctgaaagcatttttcattccaatttcttattaaaattgcaatgtcacctactatgatatgcctaatgtccgcgattaatatagaacattcacccaaatataatgattgcaagtaagcaatagatgtagaaaaactgaaaaaccgaggcttcaaacatacaactaatatgcgcgtatttatcatattggctttaacccaccaaaggggaacatgctcttttaaaattaaa

SEQ ID NO: 109182 - DNA, 180 bp, Glycine max
  Clone ID: PAT_MRT3847_69604C.1
tcagttcggctcgatatactcgttatcgtcggtgatggtggtacacgaaagaccacctttgtgaaaaggcatctcaccggagacttcgagaagaagtatgagccaaccatcggtgtggacgttcacccattcgatttcttcacaaactgtggacagatcgattctactgctgggatactg

SEQ ID NO: 109183 - DNA, 645 bp, Glycine max
  Clone ID: PAT_MRT3847_69605C.1
ccacgcgtccgcagagattcaggaggagccagagtgagtgatacagagaaagaagaaagatttaaaattggaagaggaacaattggaaggagaaaaccctaattggaggatgtgatttattgcataatcgatggaaaaaccctagattcggagcagggggcgcaatcgacgacgccgtagatgcttgttgcggttggagcgtcgtgggatctgaattggttcctgcaattgttgctctccgtcatcgtcgtggccattggggttcactacttcgtcaaggtcaccgcttccaaatacttcttggtcgacgccaatttcgaaggggaccaccaccacgccctcgccaccgacgccatgcccggtgccctcgctgccgccgatcctctctgtgccgtctgcgccacgccagcccctaagaagtgctcgcgctgcaaagccgctagatattgttcgcaagcatgtcagcagtctcactggatgtctgggcataagacagtgtgcaaggattttcgtgagaccagtgcaagaagctcggctcataatggggtaattaatcgtggatttaaggctactgctgctgcgggtaaaagcttattaacgatggccctgatacctggctgtggagcaggagcaatttccaggcca

SEQ ID NO: 109184 - DNA, 305 bp, Glycine max
  Clone ID: PAT_MRT3847_69606C.1
tccaacttctactttaaggtttctaattccaacccttccatcaactgctccgcatgtttaaaaactaatatgaccctccctatcacacatcttttcccctccattattcatcacatccatcattcttacaataaattcaaccttactacaaaaaccatcaacgacatacaacactccccacaatacaaggaataaaatgttcttcacaataaaaaagtcctatcaattcattttaaaaactaaatccacaactttcataaaattacattccctaactaaactgattaatcaccatacacaactac

SEQ ID NO: 109185 - DNA, 884 bp, Glycine max
  Clone ID: PAT_MRT3847_69607C.1
aaagaaaccctatatagtatatggtccttgttaatgctattaatattaattgtgatttggccttgttggatctgagttatggaaatggagaagaggaagaacaagagggtcatgagagaggaagaagagagtgaaagagtgaagaacaagagactaaagggtgtagaagaagaagatggtagtgatggtggtgttcccacggaggaggaggtggaagagttttttgccatactaagaaggatgagggtggcggtgaagtactttgatgacaaagggagtggtggcaaggagtggcggaaggccctcgagacggcggagctcacggtggaccaccgccacgacgtcgttgctgccgaagaggatgacaagccaaggaaaaagggtggtgaggtaattatcaatgagggctttgacttgaacgccgtcgcgccggaagccgcagagggcggtggcgcgtagagttaattgattggcgtctgggacgcacgcgctgtcggtataaccaccgtaagattgaaggtttgggtttctcaaacatgttaattagttgccttgatttctccgaagaacaaaacgaaaaatgattctacacgtctccctctctctctctctttgtccttttcggattaattaggttgtaataataaataatataggaggcttagcagtgctgttgattgatgaaattttaaatgatacaaaagtttgttattaactgttgtctttttttcttgtggaaatgacacattttcccttcatctctctgtattgaattatcttctctcccccatatatacaaattgaaggaacctatttggctatttccatgagatattgaagcattattgataaaaaataatccgaaaaggtcctgcggcgagagg

SEQ ID NO: 109186 - DNA, 261 bp, Glycine max
  Clone ID: PAT_MRT3847_69608C.1
tacggctgcgagaagacgacagaatgggatcacaacatcatagttagcactatagtaaaaaaacgacattcattcatctatggctacacttattgctcccagcaaccattctccccaagaagatgttgaagctctcagagacgcttttgaaggatggggaactgatgagaacactgtcatagtaattttcggtcatagaactgtgtatcactggcagctaatcaggagagtttatgaggtaatttacctcgaggatccttt

SEQ ID NO: 109187 - DNA, 225 bp, Glycine max
  Clone ID: PAT_MRT3847_69609C.1
caagatgcaattgtgaaccggggggggccaagtcacaatgggaaattcaactacgggtaagccaactcccctggcaagagatcctcaatgggagaattttaagaaaccaggatttgaggggttgaaagggaaaatggtgggcctttcgcgatttttgatgggatggttaaaccatcctggcctcctcaactccaggttgggcactgaatgggaaacatgcccaaa

SEQ ID NO: 109188 - DNA, 428 bp, Glycine max
  Clone ID: PAT_MRT3847_6960C.1
atgacagcatcaatcatgtgttttcataattatttataatgtaaagtatttttactacctacgagtacgatgaatatcgcaatttaaaaccatgatcaatagcaatactaatacattattgtcaaatgatttatttcattattacccacagctgctaaatgatagagtaaaagagatataacaaaatattgcctcctgaaaagtgaaaattcacaagatcttaccaaactggaagaacagggactcaagattgaaggccattgacaaagagagaagcaaaggtctccattgtaaaatacttggacacaaaaccaatctcaattccatctccatttttgctctctgaaagactaaacgctgcagttctgtcaatagacaccatctccactttatttggtcttccccaaccaaagtcactactataaacc

SEQ ID NO: 109189 - DNA, 250 bp, Glycine max
  Clone ID: PAT_MRT3847_69610C.1
atacaaccactttttccgcagacatctggagggcgaagctcggagcgttgaccagactgctcggactggagaatccctaacagtgacaaagaacccctccgaagaaagagcaaactggaacaacccgcaagaagggtgagatagaagcagcggagattgacacctggagagcacaccatacattggaaaagctgatcatcaggatgaaagcaccaaccaagacggtcacctttcagaaagagctcacagc

SEQ ID NO: 109190 - DNA, 280 bp, Glycine max
  Clone ID: PAT_MRT3847_69611C.1
gccgcttctgaagggacccatgcgcataccacgtttaccagcttttgtatcaagagacgtaggctgttggtcgaaatactagcattattgaggacatgttttcttaataacaaattggcagatgtactgatctgaacagccgttaaaggcatgcatcttttgcataaaaaaaaaaaaaagacgccggccaacaatagtgagctcctcacccctaataattaagaccggtcctgcagactgccaacgcttcctatagtgaggtctattaccactggccgac

SEQ ID NO: 109191 - DNA, 199 bp, Glycine max
  unsure (1)..(199): unsure at all n locations
  Clone ID: PAT_MRT3847_69612C.1
ggacctgcgctcctgaaccgcgttgaacacggcggctaaaatctccaaccaaaagtcaaataatgcctctaaggcggaccaccagagagcctacatggaagacacatgcnttnanttnctccacaaatacctggagaaggggaaggagacgctgcttcacctgtagcccccaaagacacacgtgactcaccaccccatc

SEQ ID NO: 109192 - DNA, 177 bp, Glycine max
  unsure (1)..(177): unsure at all n locations
  Clone ID: PAT_MRT3847_69613C.1
ttgggaatttttcgaaaccctaaaaagatgaacccctacgatagcagatattctgacgcctcttcttatcgcggccgacgttctgnattcgttgggcctattccgccgccgaacatcgttagcccggaagcgcggtatccttcgatgtccctggacccaacgggttccgatctgtac

SEQ ID NO: 109193 - DNA, 277 bp, Glycine max
  unsure (1)..(277): unsure at all n locations
  Clone ID: PAT_MRT3847_69614C.1
gatttcagtgnntgatnggtgttcanttgatctcatcagaatcgtcatcntcaattgaagaatatgccgatcannnacatnnccgtctgaaggccttaagaggcgactcaccccgacacgtgaangcggctttggcngagtgcagctcaaccttcatcttcgtgttcgccggntcaggctccggcatcgctacaacangctcaccganaacggcnctgncacncctgcnggcctcatctccgcctccatcgcccatgnantcgcctnttggngccgc

SEQ ID NO: 109194 - DNA, 318 bp, Glycine max
  Clone ID: PAT_MRT3847_69615C.1
ctgttcttgaaaggtaaagaattgacagatggtgtgatacttgtggaatgaaaaaacatcagtgatcttgagtaactaacaatccatccgtgttaaacgtgatcggatttgggtcagtaattaaatgtacgaaatacgaggtggcaccgactttaactgtggaatggtgtgcaacatagaatctcattgtcgcgaacacgatgatgaggtcaaagatagtagatgtttggaagacttcaatcacgggagcaatctgatcacgagaagaatggattggggtagttcactattgccaatgcctaattctcgcagggctga

SEQ ID NO: 109195 - DNA, 383 bp, Glycine max
  Clone ID: PAT_MRT3847_69616C.1
gaaatgtaaacaggcatagactgttctgagagatggagagagataccatgatgatactcgttgtactcactgccttctgcacatgactactacctgaagccaccgatcaagcagccattaacatgaaaggcctggaccggcaaaactgagggaaatacttactgtgtgtgtcagatgtagaaccataatagggaggaagatgagcagcctcaactgggaaagaaagatgccctctgactgccgcacaatctgcgcgattcgtatgacaaggggcactgagactttatgctagccccataccgtgtgaacgctatgatagagggctctactcgcaacattactgtcggaggtgacgcagttatacagtcttgcgctccgcactg

SEQ ID NO: 109196 - DNA, 458 bp, Glycine max
  Clone ID: PAT_MRT3847_69617C.1
tgcttttgtttatattcttttttttgtttcggcaccccacatttccaatgtaataaaaaaatccctgatccaacacaaccattttgggcacctatgctattcatcattcagcataaacgtggtcaaactgatctgaaccacctaagggagctcaaccttaagaccggtggcgccgtgcctaagtggcactaactgcgccgcaccgtaaagacgctcttgatagcattaggtatggccctgaccgccccaagtgcttggagtccattcttggaccatatcccatcctctcctgaacgaaaacttccctggagactacggacgggacactgctggataatcacttgaccctaaaaccttcgacaggaaccgggagctggacgtgacacacaggacatgggcaccgcttggtgcccttggctgaaccttttcacagatccttgatacaaaaggtgtgaaat

SEQ ID NO: 109197 - DNA, 498 bp, Glycine max
  Clone ID: PAT_MRT3847_69618C.1
tcgggtatatccttagctttgctcattttctgccaaatttcttaactttataacgaattcaaagaccccttttgggtaattttatttggggtatcgatgtcagtttattaactccttttgatgtgtgtttttctgttgctttacctacaaacgggtaagtgtgatttcagtttaacgtattggatttattttcagaagctatagttacaatttccacattcaaaacgtgactcttccattcttatcatgatctgctgtggaatgctatgaatcgataatttgtggtgtgctctaaataaattttgcagattattgttcaacgcttgaaggagaccaatcctatagctgctggcaggcttattttgagctgaaagatcctgaaaaagagtccccaaaagcagacatagagaggctgattctggagactggtggagtaaaaacccttaatggatgcttgcctgggattcaattctgcacaaacttaagaagggtgacttg

SEQ ID NO: 109198 - DNA, 251 bp, Glycine max
  Clone ID: PAT_MRT3847_69619C.1
ggctcgagcgctaaccaaaccaaagctctttttatggcttcggagcaacacgacgccgtgttgggcgaagaagacatggtcgacgaccacgacgagtcttaagaggactaatagtactaataacactacgactaagagaacgggccctctccctgcaccggtgtcgatgtgaccgttggcgaacccggttcccacgtttccaacggcggactgtggctttccaatttcgaagctctatcggagctgcacca

SEQ ID NO: 109199 - DNA, 243 bp, Glycine max
  Clone ID: PAT_MRT3847_6961C.1
ccgtcatgggactcagtctcatatcattgtcatggactccattggtgcccgctgacttctcatctgcggtcactgctgcactctgctttaatcgctggagatctagttgttgttgattgtgtttcatccgtatgtgtcctacctgattctgcttcgaagacaagaccttgggtgttagggttcaggcttgttcttactgtcaataagctggacatgtgcttccttgaactcgaagtcgatgga

SEQ ID NO: 109200 - DNA, 128 bp, Glycine max
  Clone ID: PAT_MRT3847_69620C.1
acgtacggatgcgaaaagaccacactaggaggattcctcattaactacgctttcctgtcactgctgtgtttcaccgaatttgggcctatagatcataaccaaatcgtgttctcttacattggcaaaca

SEQ ID NO: 109201 - DNA, 399 bp, Glycine max
  Clone ID: PAT_MRT3847_69621C.1
gcacctaccggtccttaacttgccagtctagccacccgttcatacacctgacagaagacgacagaattccatcctattttatactattgcttctattcgttctcatgcgtctctatatacctccggtggcgtttccccctttcatttttctctcaccttaaactgtattactactgtcccaactgatccttaacaaaactcctataactgcagcaccatttctttactacctcataaactccgactttaccaatacaccaattacatctacatcgatattatggacatcataattgcaccatttaatactcaattctctaatgctgacactcccacaatcgcctataacgatttaccccaatgtgttactaactgcacctgcaaccccttcacttacaa

SEQ ID NO: 109202 - DNA, 128 bp, Glycine max
  Clone ID: PAT_MRT3847_69623C.1
tcggaacgcgccgctcgaggtctcactggtgaccggttccacattgctacatgtggtgggtggggtgcatcatggcggaggtgactattcagggaaggaccctaccggggttgacagtcgtggtgcct

SEQ ID NO: 109203 - DNA, 1261 bp, Glycine max
  unsure (1)..(1261): unsure at all n locations
  Clone ID: PAT_MRT3847_69624C.1
aaattactttatagtaatgtgaatcngtaggaagtgagtcacatgttttcttccaatactgctgcttttccagacaggtatcttggtctttgttagtttgacttactagagttgtttacatatccccttgtgctgttcttggatcttgtacaatttaatgtaaaatcttttactggtgatgacactcatctactgttaataactgaaacagtttggcaattgcaaaagaaggtgagcttactattggcactattgatgatatacaaaaacttcatattcgctctattccgctgggggagcacgcacgacgtatctgccaccaggagcaatctaggacttttgctatttgtagtctgaaatacaacccagctagtggtgaagactcagaaatgcactttgtccgcttgctggatgaccagacttttgagttcatatcaatgagtatggttgcttcataattagctgctccttctcagatgacaataatgtgtattactgtgttggaactgcatatgtactgccagaggaaaatgaaccaaccaaagtaagttgagaaatttgtattttttcagcattgttctagtcaaagcttctgatatcctgcttcctttggcctttttaaaacatgtagggaagaattcttgtttttgctgttgaagatggaaaactacagctaattgccgagaaagagacaaaaggagctgtttattgcttgaatgcatttaatggtaaattgcttgctgctattaatcaaaaaattcagctgtataagtgggtgctccgggatgatggtacccatgaattgcagtctgaatgtggacatcatgggcacatcctagcactttatgtgcaaactagaggagattttattgtagttggtgatctgatgaagtcgatttccttgttaatctacaaggtaaattttaaactgttgtgacactagtttctgtctggttttgttaaatttcaactgttgtgctgcttatcgttttggatgaataactgattttttgtatatataatgagtacaccatgttcttttggaatgataagttgttccttattgatagcatgaagaaggtgctattgaggaaagagctcgtgactacaatgcaaattggatgtcagccgttgaaattgttgatgatgacatatatctaggtgcagaaaacagttttaatctgttcacagttcggaaaaatagtgaaggtgccactgatgaagagcgaggtcgtcttgaagtggttgcctttcccttttc

SEQ ID NO: 109204 - DNA, 351 bp, Glycine max
  unsure (1)..(351): unsure at all n locations
  Clone ID: PAT_MRT3847_69625C.1
gcgcgacgttttgatacgtactattcatgctgcgcgtgatacgacctcctctgatctgagctggttttctggattctgtactgcatacccgacgtgcanagaaaaatgccggacgaaatctagacggctcgtttgaatacgaagaggtgaacgagatgcgctatctgcaagccgagatttccgatacgatgaggttgtacccgccagtgccagttgacacgatggactgcctatacgacgacatattgacggacggaactagggttgggaaggcgtgcctcgagacttaccacacgtacgcgatgggcatgatgaatagcctgtctcacaatgactgtaccgaacttaatg

SEQ ID NO: 109205 - DNA, 102 bp, Glycine max
  Clone ID: PAT_MRT3847_69626C.1
ctcgagcgcgtttgtagtggaagctctacatacgcgcactgaattcaggagatctaggcccttactgtctgccaatcatatttgcgtaggctaaaagagaag

SEQ ID NO: 109206 - DNA, 317 bp, Glycine max
  Clone ID: PAT_MRT3847_69627C.1
attggaaaaaagggtcttttggttcccccccacccaaggggtttccgaagaaatttgggggaataaacaaaaaaaacccttgacttgttaaagggaccctaaattcaaatcccttgggaggggacttttgcaaccaaaaagcaaaaaactggggggtttttttcaagggggtcttggaacccacatttttgacccccaatcgaactgggtaacccgcatcccattcaaaactggccgaaaatgaccctgcctaataccccttcaaattaaccccttccttgatcgcttgaaaaaggaatttaaaaggggggccccgg

SEQ ID NO: 109207 - DNA, 281 bp, Glycine max
  Clone ID: PAT_MRT3847_69628C.1
tcgtatcgagtacaaggacgctagatgagggaggaacttggatcgggggcatgagggcttttaacagaattcaggattgggaggcacgttgccaaaacacagcagatggaaccagaatatggctcgaacgatgaagaaaagttaactcggagggctgttgaatagctcgtgtaggcatattgcggacccatcaaattcactgaatgcccaaagaggcactctcaaatgatatccctgagaactcaccatgagcagaccactgtgctatgaaataataaggc

SEQ ID NO: 109208 - DNA, 387 bp, Glycine max
  Clone ID: PAT_MRT3847_69629C.1
ggtctctcaaatttttccctcttcactttggaattgcttggtttccacttctttttgtttcttcttctgcttttgcaggagattgatttatattctctcttcctctgctatgtgaaatcccaacatcatccaattttatgcaatttttctgcttttgtatctctttgtttcattcaaggtcatgaaggacattctcttctgttttcacatgcatacacacaagtagtacatgtaatgtaacacacataagcataaaatttgcatgaccaagtcaatgcactaatattatcaatttatcatcttctttagaatcttctctgaccctgaaggccaatttcttcttctgaatcaccgtaacatatttcaaattctttctaccccaaaaga

SEQ ID NO: 109209 - DNA, 1097 bp, Glycine max
  Clone ID: PAT_MRT3847_6962C.1
gctgcatatctcacacaacatttctaaacgcttgtaaagatctccagctcctagtgatcctcctgaagttgttgtattcaacaatagctctctaaacgcttgtaaagatctccatctcccattgatcctcctgaagtttttgtattcaaccatggctacctatagttggtcaactgagatattttcatttttggttctaacgttgttgtcgacaagcagtcacacaatggttgctggagcacgcaatcttctcgaatcaaccttgtcaaaaccagaagtgccaacacttcccaaacctcatgagttgccaccattgccggaaatccctgaattgagaagcctaaagttcccgagttgcctaaagtatcagaaatacctaaagttcctaaattgcctaaagcaccagagatgtttaaagtctctgaattgccaaaactagagttgcctaaagtagctgagatatctaagattcttgaattgtctaagcctgagttgcctaagattcctaaattgcctaagattcatgaattgtctaaggtccctgaattgtctaatcctgagttgtctaaggtttctgactcgagccgaatcggctcgaggcctaaagtacctgaattgtctaaacccgagttgcctaaagtacctgagttgcctaaggttcgtgaattgcctaagcccgagttttctaaagtccccgaattacctaaggttcatgaattgcctaagcccgaaatacctaaaatacttgagtttcccaaggttcctcaatttcctaaagcattttcaaccagcaatccttgagtttgaattatgccttatgttgtcctgttctcaggtcgttactggctgcattccagtgccttgttcatcttgtttgatggatgtgatactatttatgcattttttcactagtgtataatatgttgtagctacttgagagtgattgtgtcggtgtgctagtattttgtgccatactataaattatgtttagtttgaagttgtttaaatcgattagttatatcattgtatactgatatacatctccttcatgtgttatattttgtgaatttaattagattgtaatttctgagtaaaaa

SEQ ID NO: 109210 - DNA, 479 bp, Glycine max
  Clone ID: PAT_MRT3847_69630C.1
tacggctgcgagaagacgacagaagggaggtatcttatttggaaagagagtgaaaataatatatatgatgtgatgtaatgtaaacttaaatttgtgaaacaagtcacattataatactagcgtaattacaataacatatctcttcttttataccttatatttttgggtatacttggcttatttgaatagatgaatattagtaaaattaccataaagtcccattatccttcttccccatgggaagtgttcatttttctttatttaatgccatcaacgagtcaatttcaactttcaagtgaagagaatcataaaatattcatcggtcggtaagttcacaagctgtatatgatattcattagcattgatttttcatttaggtggagagcttgacttggttggacctatccaacttctgctcaaaacaaagagaaaagcatatcaatgtataaagtcgatagtgcaagcagttaaaaacttta

SEQ ID NO: 109211 - DNA, 382 bp, Glycine max
  Clone ID: PAT_MRT3847_69631C.1
ggggccaaataaatggtaatgaaatttattttaataaaaggccaaaaatttttcccaaaagggccccctgaaatgaggtttttctttggagctggaggacaacgcatagatggtcagagctctcatgagctgacgcaaaaggcaactgcctaaacttgtgggggccaaagaaccctcctactctaaataaggggtccaaatagagactgcggaattaaatttgtagttttccaaggacaaaaatgacgatttttaagacgaatcccttggaatagttatagaaacaattcagaacttgatccacgtgagactcccaaccgaaaaaaacaggccctagccaatatgccctgtgctgaaattgaggaaaagttgtaggccaacc

SEQ ID NO: 109212 - DNA, 573 bp, Glycine max
  Clone ID: PAT_MRT3847_69632C.1
ctattatctctcagcgatatgcaacatttttcatgttcctgttgattgatgcggatggtgggtcactagacactcattattattgtaaagatcttaaaatatcgatgacggttggatattattattcgtagcgtcaagcaagtagttgtaaagattcaaagtattcataattttcattggtctggagtccaaatctgcctagggaaataattaatcttcacataattgcatccatacaagcaaaataaagattaatatttattctccatgggactatcatttattttttattgtcaatttttttatccgtagttactaagagtttacaacatttattgagcatgcatggatgaaaaccgagttagaccccttaatatttttattttgaatttgaaatagaaatgaaatgaagtagaattaatagattttttttttatataaatgatagatgtataaaataaataaaatagaaatgatatattatttaaatagataaaaaaaaaaaaaaaaaatatagagacgaaaaagtgaaaaagaaaaataaagaaccagaaaatgaaaaaaaaaagaaaa

SEQ ID NO: 109213 - DNA, 238 bp, Glycine max
  Clone ID: PAT_MRT3847_69633C.1
tattcattcaccttttttcttgctattcatccatatcatgggggctacttttctttctaaccttacacacgctctatatcaacattaacgttcagaactttgaccaggtaacagaggtacgacgcggtatgctccttgacttacaacaattgggactgcggttcgtgtattttccactctttgaccatcactcttatgactatcaccatggtcgagtctcacccaatgcatcaccgaa

SEQ ID NO: 109214 - DNA, 327 bp, Glycine max
  unsure (1)..(327): unsure at all n locations
  Clone ID: PAT_MRT3847_69634C.1
gtgntttgacacnnnccncaggggcgcattaaaggagatattcaggcccgacgcacacgacccaacacaaaaccacacccgaggggcgcncncnccacgcgcaagcacaacaagggaacagaaacggaaggcgggcaccgacacccgacgaaggcggcggcagcaccangccacacgcagaggcaggggcagacgccnacaaaaagaacgcccccgaagaaacgaggggaccaggaacccccancaagcncgaaagggccaccgcagaccagagccagacaggacccacaagggggagcacacanagccgaggangaaagcacaaag

SEQ ID NO: 109215 - DNA, 1480 bp, Glycine max
  Clone ID: PAT_MRT3847_69635C.1
tgaggtttcatctaagacaactatgtcggaaaaaaacatgtcatggaatttaaagccttatgcacggagggacgatgtagatgcaatgattcgtgtgagagaatggtcagtgaaagcagtaaatgttagccagaaagctccccaatgcacccaatatcacaacattccggctgtattattttctaccggagggtatgctggtaaccacttccatgaattcactgacattgttattccactgtttttgactgctagacaattcaatggagaagtacaatttatcataactgataaacgtccttggtggatttcaaagcacaaaccacttcttaagaagctgtccaactatgagactatggacattgatggagatgatgaagttcattgcttcccaagggtgaccgtgggtctcaaacggtatcaaaaagagctaagcattgagcctcaaaagtattcctattctatgaaagacttcagggatcttttgagaagttcctatgcattgaagagagttgaagcaatgaaaatcagagatggtctacgtgggaagcctaggctcatgattctttcaagaaaaagatcaagatccttcactaatacagatgaaatagcaaaaatggctgcgagtttgggctttgatgtcattgttaaggaagcagggtggagcatgtggggctttgcaaatgttgtgaattcttgtgatgtgttattgggagttcatggtgctggtctcactaacatacttttccttccggaaaatgcagttttcatccaagttgtgccttacggagggtttacattggattggcttgctacaaatgactttggaaagccctctaaggatatgaacttaaagtacttggaatacaaaataggcttgaaagaaagcactcttatacaacaatacccgctagatcacatttttataaaggatcccccattggttgagaaaattggatgggaagaatttaagtctgtgtatttggacaaacaaaatgtaaagcttgatgttgataggtttaggcctacattgcagaaagcctttgagctattgcatcaataagtacggtttgtctttttgatccagtaagctggatgggagctttgagtattcacagttaggatcagatcacacttttgaatgcagtatttttctttttttactgatatttatctattgtttttcaataaggtgcatacagaacgaaggacaaagaagcctccatctgcaacgaaacttctgtttggaaaggaaaatgatattcgaaggacctgaagcgttttaggcaccacttttaggacatcttgtaatgacaaacattttaggctatgtcctgtgtttggctatgtcttgaagattaattttaggaaataatggtttttctttttcagaaattctctttgcaaaataatgatcattattgaagctatttaaaactaaaaaaaaaaaaaaaaaagccgagactagttctctcctggt

SEQ ID NO: 109216 - DNA, 266 bp, Glycine max
  Clone ID: PAT_MRT3847_69636C.1
ggcgagccgcgcgtgcgaccacgcgcgcgcgctgttgttagaagacgacagaaggggacaccacacgagccatctcggggtaaggttctgcacgctgtgctttcagcgagtgtgcttttttcgtttcaacaccccaattttcacacgctgcttctttagattcagaaatggcgcaagaaacccttttatttacataataatctgttaacaaaggtgacccccacaagcggtgcgaccacatatctgaggcacagcgccatgggtgc

SEQ ID NO: 109217 - DNA, 280 bp, Glycine max
  Clone ID: PAT_MRT3847_69637C.1
tttgattctgggcattgcaactgtgacatcaaaattgatggatcgctatccaaaattggttactacagaaaacgaagagggattgacacctttgcaaatgctgcttgctcgatgttcacttgtacgtcgagatattgtaagttcgttgtttaagggtatggaagaagagaaagagcctctcaactctgaacaattgtcaaaagtagtgttcgatgcagcaaaatcaggaaacattatgattttagaatgtcttttgaaatatcatccagatttgctattt

SEQ ID NO: 109218 - DNA, 254 bp, Glycine max
  Clone ID: PAT_MRT3847_69638C.1
taacgacacagctgctacaaaacaacagggggggtagatatatgatgactaacatttcagtaacttaccttagaacaaattccccctgattcctttttgaactatttcttagcacttactgcttcgttaacatcttctattacgaatgttaatcactttgaataactcacacgtctatctgatctatgaaactaactcttatacaacatctacatatctttataaataaggggaaggtgtgctcacttatccgg

SEQ ID NO: 109219 - DNA, 237 bp, Glycine max
  Clone ID: PAT_MRT3847_69639C.1
gcagcttatggcgctgttttgagggacttaccccctgcggagagtgctaatgtggacataatggccaaacacccactccagtgcacaaaacagacttgcaatcgcttgagcccactgagcagatatggtgggttggctggaggcttctctttctaagaccctgcctgtctgacagcctgcagctattctggtttgacactgacttaactacttgaaactttatttattgcaccatgt

SEQ ID NO: 109220 - DNA, 601 bp, Glycine max
  Clone ID: PAT_MRT3847_6963C.1
cccgcgtccgggaataatgtctccaatgccactcacacccacttgctttgctaacttgacaccaccatacccattattcattcccaacgcataactaaggacattctttctttcatcagatctgcaaaggaaaagaaaataaaaatgtcttagatagccaaaattagtcttgtgttgcagtgtgaaaaagggtagaagagcagaagaaacacctcgttccttgctgctgtttggaactggaaggaaaaattgtgaaatggaatttctacccattttgtcttccatttcccttttgttgtgtttggttttgtggcaaggaagtggtgaacctgttgaagataaggaggctttgcttgactttgtgaacaagttccctccttcaaggcctttgaattggaatgagagttcccccttgtgtgattcttggactggagtgacttgcaatgtagacaagtccaaagtaatagcaattaggttgccaggggttggatttcatggcagtattccacctgatactattagccgcctctcggcactgcaaactttgagcctcagatccaatgtaataactggccattttccttctgattttttcaatctc

SEQ ID NO: 109221 - DNA, 227 bp, Glycine max
  Clone ID: PAT_MRT3847_69640C.1
gaagcccggacccaccttccgagagagacttcggcctttgataccctgacgagaggagggtttacaatgttccccaaaccggtaggaagagctcaaggactacccaccaccagaccgtcggcgccggtgagcggcggtggacagcagaatgagacgccgacgcccgttgtgagcggcggagttcctaagagtaccactgggaacacatggtgcgaaggcgaaccccg

SEQ ID NO: 109222 - DNA, 241 bp, Glycine max
  Clone ID: PAT_MRT3847_69641C.1
tctaattcacctcgaggtgctaacataaaaatttcaatcatatttataaaattcactatttttttctttcagctactaatatctattccacaaattattcttaaaaggcagttagggcacacctatcaatcttataatacttcttcccaaatacacatctctatttaaaaattaccttttacaaatcctcccatttctataaaaaaatttcataccatccattaaaccaaaacttatatta

SEQ ID NO: 109223 - DNA, 425 bp, Glycine max
  Clone ID: PAT_MRT3847_69642C.1
caaagaggaaatttgaacacaaaccattaaaaggaggcaccccgggcccaaaagggacctcttctttttagaaagcagaaatccaaaaaacaaaagacaacacagggcattggggcccaaaaacaaagttgggctcaacccagggggccacagggggttcccacccacccggcccattaaaaagcccaaaaaaaggggcccctttgccaccggagaaaaaaccccttttttggaaacatacttgcagagaggaggggggagactgcaaactttgaccgaaaaccttcccccccgggttggaagacacaggggtacaaaatccccccccccattaggggaccccaccggcccggaaaagccccccccgcccatttactccccttgtaggggcagctcttggcgaccttggttccgggaggatcctt

SEQ ID NO: 109224 - DNA, 828 bp, Glycine max
  Clone ID: PAT_MRT3847_69643C.1
tcaaattagctccacgtatacacaaaattcaagcttctttctgtcctcttctttcccttgaaaaaggagaattcatagttgctggaagtgaggactcaaatgtctatttctatgatttaacgaagccaaagaatacatgtgtgaacaagctacagggtcatcggtttcctgtgatggatattgcctggaaccatggagaaaatttattggcttcatctgatttttacggcgtagtaattgtgtggaagagagaaagatcacatcaaaagagaaatacataacaacagaagtttaaagcgtttatagttgaggacttgtgaagatagctttctttgctttgttttcctttttctttcacttttaccattctccttttgtattttttttgtgctattatttttttttaatttttgctgcaatgtactttgtacccatgaagtgagaatcaattaatcaaccacagcctcacagtaaacggaggaaattatattcaaaaagtgttctgttttgcgaggaagaaaatgtattctcagacatgatagggattttgtatacgaattatgaggaatatattttggtttgacattgtcctctatgtaattttgtacaatcaaagaataaggaatttttgtctgaaaaaaaatttaaaaaaagcacgcaactataaaaaaaaaacaatctatacacacgcatgcgagacaagacaatctcttatatagagtctcactataaactaaactcagggcgcgtttttacacaagtcgagtgtgtaaaaactcgtggggtgtcacataatttaacgctgtgcaacatacacccctttctcca

SEQ ID NO: 109225 - DNA, 574 bp, Glycine max
  Clone ID: PAT_MRT3847_69644C.1
gaaacaatcatatgtccttaaccctgtgcaatagccaaggtcccatgcttagtttatattacataaaggcaagtcaacaaattagaattttcagctaactaaaaaagacaagaatggacactacagtatcataggatcttgtgaaacaaaactaatcaaatagaaaaggagcaagaagagaaatgcaattaaaagaacaagaatagaatgacattgtctccagcaagttttttttctccctttaattaagccacgactgaaggcatgtccttgagccatggatctagtggccttccaatggcatacacaatgaacccaatttcccttaccttcttaacatccacaacattccttccatcaaatataaatgttggcttctgcatgctgtcataaactttcttctaatcaagcttcttgaacgcatcccactcagtgagaatgcaagcaccatgtgcatccttcagtgcatcataagcatcccaaaccacagacaatagctttattgaagtagggcttggtggctgaagatgtgcaggagtggtccttatcaaacttcctcattgaaagatccttt

SEQ ID NO: 109226 - DNA, 558 bp, Glycine max
  Clone ID: PAT_MRT3847_69645C.1
ggtacagaggcttgagtctttgatctatcaaattctttataagaatacttttgaggattctgtacacacttgataaacatattagctattcataaaattcatccatttcttaacgctttgtttctcatcaaaattttggagtttcaaccgtctaggctctaaccagatttattatgaacttttaggtagataagattgcttgcaaatctatcaagtagcaagaagaaaaacttagaaaaccaacctgaaagcatgaacttttttctcctttaaaacagacggggaaagtgatgcacaaggaaacttaattcagccaagatggtcaaacatactttcatagtatacactctctgccccccaaaaattaagctatctgtgttaaatagtacaatcaaatatagaatgatctcatgttcaaaatctatgcagaatatatacatgaatatgatttagcatcaaattatgctgtttctttgttatcacggtgttgccaggcctgctatgaataatatgctttcgaagtggattcctgtttcggagagaagccaaacacttggc

SEQ ID NO: 109227 - DNA, 1454 bp, Glycine max
  Clone ID: PAT_MRT3847_69646C.1
tcgcgcaggtccacaagccggtccatgaacttaaaatgtaaaaatatgatagcatggttaggccgactacattgaatgatagcaaagaaaatattttgtaataacattaaaggaggcatgtttggattgttgaattgcccagtttatagcatggttaggcggactacattgaatgatagcaaagaaaatattttgtaataacattaaaggaggcgtgtttggattgttgaattgccgagtttagctgcagaaggtagagagagagagagatggagagcatagagcacagaacggtggaagtgaacggcataaagatgcatgttgcagagaaaggagaaggagcagtggtgttgttcttgcacggcttcccagaactctggtactcatggcgccaccagattctagctctgagctccctcggttaccgtgcggtggcacctgatctccgtggctacggtgacacagaggccccttctacggtgaacagctacacgtgttttcatctggtgggtgatatcattgctctcatcgactctctgggtgtggacaaagtgttcctggtggctcatgattggggtgccatcatcggttggtacctctgcttgttccgaccagacagaatcaaggcttatgtgtgcctcagtgtccccttccgccccttcctcggaagaaaccccaaacagaaaaccgttgactttttccattccttgtatggagatgactactacatctgcagattccaggaaccagggaagatggaagctgagatggctggcgttgacactgcgtatctgatgaagaacatacttacaacgcgcaaaaccggtccacccacttttccaaaaggggagtatggaactggatttaatccaggtactccagacaccttgccctcttggatctctcaagaagatcttgattattatgttactaaattcaacaagactggcttctctggaggcttgaactactacagaaacctcaatttaaattgggaactgacagcaccatggactggagcaggcatcgtagatgtaccggttaagttcatcacaggtggcgttgacttggtgtacacttctccggggatgaaggagtatatccacaacggtggtttcaagaaagatgtgccaactttagaggaagtggtggtgcaggaaggggttgcacacttcaacaaccaagaagcagcagaggacgtgagcaatcacatctacgacttcattaagaagttctgattctcatcagtgcttaatcattccattatgtccacaactttgtgccgttttctgtttcaatcaacccgaataaaatcataccgttttagtgcgcgtctagattgcaaatttggagtttgactcaagtatgtaatctttggtcaaaatgaatgttatcctgtatgatatcaatcaatattactttttatcaaataaaaaaaaaaaaaaagggcggcc

SEQ ID NO: 109228 - DNA, 265 bp, Glycine max
  Clone ID: PAT_MRT3847_69647C.1
ggacaggttacgtaactggcaccaacccttcgccgcacggtgggcgtggtgcattgccttctgaaggtggtagcccttcagacttgctcttcttagctggtggtggttctgctgtcttctagcttcttcttaactcttttttctttttactacgtttaagctaccttgttttcaaaataacaaaaacaaaagctttcttacttcataaattcacctttcgtccacttcttattttcccttaattaaaatgatgctcaaaatcaag

SEQ ID NO: 109229 - DNA, 328 bp, Glycine max
  Clone ID: PAT_MRT3847_69648C.1
attgtgggttaatttgtaaacccccctttaattttggccaaagtgggacccagccttaccttgttccgcgggaaaaaaaaacaccccataccatccaaaatcatcggggggaaagcggggaaaacccaatgtgcgatccctctttcattaatggggccgccccttttgtaaaaaaaaaagtcgggaaatctgtttcgccctctgggggaatgaatccaccaacaaacggggggccgcggtttttttatggggcgccctttcgcttgcaaaagaatggagtccccctctttttttgtctttgggggcaagggggaaaaatttaataaaa

SEQ ID NO: 109230 - DNA, 424 bp, Glycine max
  Clone ID: PAT_MRT3847_69649C.1
agcaagtcatgtttggagcaattgaccagctgctggcaaagactggtgtgaaggctaaggatattgggatcttggtggtcaattgcagcttgttcaaccccacaccttcactctgtgccatgattgtcaatcactacaagttgagagggaatgttttcagttataatcttggtggcatgggttgcagtgctggccttatctctattgaccttgccaagcacctcctccaggtttctcaaatttaatatatatgatctctttcaaatttcaaaactatatatttgcactatctgctgcctagaaattatattttattaatggtgttggaaaaattatcagatatataatatgagatattaagtgtacatatttctcattatcatcatcaatcattatctgataccaaattaaaatttctaatttt

SEQ ID NO: 109231 - DNA, 839 bp, Glycine max
  Clone ID: PAT_MRT3847_6964C.1
gaattcccgggatcgacccacgcgtccggttctaccgttcaccgttattctctctctcctcttcttagtggcgctgccatgcgtgtttctgttactctttgagacgttccaattctttctctctcactctcacggaggaataatgtctccaatgccactcacacccacttgctttgctaacttgacaccaccatacccattattcattcccaacgcataactactgcacaaggttaaacttaaaggctgttttgttttgtttcttttacgggacaaagaggacattctttctttcatcagatctgcaaaggaaaagaaaataaaaatgtcttagatagccaaaattagtcttgtgttgcagtgtgaaaaagggtagaagagcagaagaaacacctcgttccttgctgctgtttggaagtctaaagaaaaattgtgaaatggaatttctacccattttgtcttccatttcccttttgttgtgtttggttttgtggcaaggaagtggtgaacctgttgaagataaggaggctttgcttgactttgtgaacaagttccctccttcaaggcctttgaattggaatgagagttcccccttgtgtgattcttggactggagtgacttgcaatgtagacaagtccaaagtaatagcaattaggttgccaggggttggatttcatggcagtattccacctgatactattagccgcctctcggcactgcaaactttgagccttagatccaatgtaataactggccattttccttctgattttttcaatctcaagaacttgtcttttctctatcttcagttcaacaatatttctggtcctttgcctgac

SEQ ID NO: 109232 - DNA, 528 bp, Glycine max
  unsure (1)..(528): unsure at all n locations
  Clone ID: PAT_MRT3847_69650C.1
ccgccccttcctccccccctttaaattccaaattttaatcctttcctagaaagaaattccaaattaatgttaaaaaaaatgagaaccatatgatatcctaaatataccaggaggattcattcaataatttgatacaaaatagattaacctcattatgccttcatcctcctgatccaaaacttttttgaacaaattatcaatcattttccatctttggagaactgcgtgcggacgttggccctttttagtgtttcttgaggcatcttctctttttctctacttatataaaatgcactggaaactaagacgtgaattagaacaaaaggagcgtaaaggtatatataaatatatgttgaagatgttaattttggagagcaatggtgccagcaaatgacaatgaaatatcactttcttaattttacgtgttatttgatttgggctaattctggtccctacatattctcattttagttcgntagttacaaattaaatcaagaataatttcacatactgaaactgatttgaaaa

SEQ ID NO: 109233 - DNA, 405 bp, Glycine max
  unsure (1)..(405): unsure at all n locations
  Clone ID: PAT_MRT3847_69651C.1
atctgagctttttaagagactagtaagtaataattatatttacttttatatttcttaggaagaacattataatttacaatgggtgttcaaaaaacccataagtggatactgcacactgctcatccttgtttcttgctttggtttagccaggacattagttcatttttttagtgaacttagagcatctcttggctagttatggaccattttattgatatattgacattatttaacttaagattattctaggcatgagatttgatgttaagttgtgcctaatctgcacaacaagtttgaaatcacatgattattataaatgaaaaaccaattataaatcaggttccgtttttttaaaatgtgaatttcacagnccctaatttacaacaaattatgttctaaaaaagg

SEQ ID NO: 109234 - DNA, 259 bp, Glycine max
  unsure (1)..(259): unsure at all n locations
  Clone ID: PAT_MRT3847_69652C.1
atgtcgcangcacgcgtacgtaagctcggaattccgancgtgnatcnnctagagcngccnccnactagtgagcncgtcganncgggaataaatnccggaccggnaccnncaggcgnaccagcttncccnatagngantcgcntagagcttngcgaanncatggtcatagctgtttcctgtgtgaaatngttatccgctcacaattccacacaacatacgaanacanagaganatnttnnannnnngtntnnngantgng

SEQ ID NO: 109235 - DNA, 324 bp, Glycine max
  Clone ID: PAT_MRT3847_69653C.1
tcggttcgaggttttgagagtgtcgcctcctgctttgatcctcatataccaaaggatggaagaggttcacccaatcttgtaatgtacaacccactttcacaaaatccatacagatcatggagtcacttttttcgcaatgcactacatggcataggatggaatgatcaaagatatatcggggtgataccccgaacatggctactatttacagacaccaccatgcctatgcatattgtgaagaatttaattactatggtgtctcagacacccagtgtgtatttataaacatggaatgcatgaattacttgcctccgatctttattt

SEQ ID NO: 109236 - DNA, 628 bp, Glycine max
  unsure (1)..(628): unsure at all n locations
  Clone ID: PAT_MRT3847_69654C.1
gcaatatgggtatataagttttttatgtcacctagttaattggtttattatagagcataccttcataattaatgtcaatacaaatgttcatcttgaataacggtccacaagtgctttggctctatctggtgcaaagaacctagcttgtatgaacatcctttctgcatcaccaatatttttgttttcttttaggatgattcccttagctaagtatccacgaaaatcattagggtgagtagatatgagctgatcataaacagttacagcatcactgacatggccccaatctgagtaggctttccctagaagtaattcaacctgagaattgcaggaatataagaaaagctaaatatatagggaaaaaacaagcaaaaataagtacgaggtatgtatgtacattgagaatgctacatctcagaaaaatcctaaaaccgaaaaagattcagatgaagctaactaaatttttccttattgccacagatactccatttcattacttttaaatggcattaggttattagccctattcttcatgagattggtgaagggtgctgtgtttgccaatggcagatggtgattgatggcanatctgtaaacaggaacaggggggctgcataaaggcagccta

SEQ ID NO: 109237 - DNA, 340 bp, Glycine max
  Clone ID: PAT_MRT3847_69655C.1
ggagctccgtacgtaaattctccaccaatcaaacctgagcagtgatgattgtcatactcgctcaaatctctatagagacactaccatactcaagaataaatatacaattagttaactcttctcatacttacagagtatgctagacgcaaacatgcttctccgttacctcttccttctggggctcttctcaaccatgacaacatcgtcaacttccgcgatgtacatgttcatcgttgccagttgctcccagaccaagttcaagcagagttccacctatgagaatacagtccactcgctcatcacctctctcgtcaagtccgatgccttcggcacataaaaa

SEQ ID NO: 109238 - DNA, 492 bp, Glycine max
  unsure (1)..(492): unsure at all n locations
  Clone ID: PAT_MRT3847_69656C.1
cgagaaataaactatatcaaatctttaggtttcttatagaatcaaagttttgtttatactttgtaaattgtaatgtaagtgggagaaaaactaatctacgtagtatttcacttgatcgagctggattccaccccttgatacagatataactgtgtcttggacttatctattctatgatgttatgttgttatttcaaaagaatatgagcatccatatgtgatactgtcgtttgaatttgatacatgcgataacaacaacataaatccttcccttttactttcaaataaactgttaagagcaccttttctctccttcaaccaacagttctcgaaagcagtttaattaagactttaaggaatgggactttttagcagacaaatcaattttaataaattttccttcaaccccacaaccacatgtaaagtggagatagttagcgtttgnaagagaaaagagaagagaaaaccccaaaagaaggaactttgtaaaact

SEQ ID NO: 109239 - DNA, 162 bp, Glycine max
  unsure (1)..(162): unsure at all n locations
  Clone ID: PAT_MRT3847_69657C.1
ctttctcgtcctcagtgtcgagttattcccccctcaaatttcgtttnttctaaaaaaggaaagtaatgcgcgcgttctcacgtgnagcggcgcgnnnccatatntcggannatgcgagccttnatngccgantgcacnagganatngnactaganntacagg

SEQ ID NO: 109240 - DNA, 469 bp, Glycine max
  Clone ID: PAT_MRT3847_69658C.1
tttttttttttttttttttttttttttttttttttttttttttttttttttttgggttgtttttttttttttgggcccaaaaaaggggggtatttaacatccccctaaaaaaaaaaaaacccaccccccattaatttttttttttccaaagtttttaaaaaaaccctcccattgaccaattttctcccaacgttctaagacggggaaaagtttaattaacgggggggttattggaaaaacccccaattttttttcccccccccggggggggctttaaaagaaagcaggttccttttccaaaaaggttataaaaccgggggggggggggcccaccttaaaagaagagaaaatacaggtggggtgtaaaaaaattaatttgggcccccaaccccctggcccctggaaaattccccaagggggccccctttgccagaaaccggcgacccgcctttaatggtgccacctttgt

SEQ ID NO: 109241 - DNA, 828 bp, Glycine max
  Clone ID: PAT_MRT3847_69659C.1
tacttccttgcgactgctgctcatgatggtgttaagctttgggatctacgtaaattgaagaacttcaggaattttgctccatatgattcagaaacaccgacgagctccgtggagtttgatcacagtggatcctacctagcagttgctggctctgatataaggatttaccaagttgcaaatgtaaaatctgaatggaactgtatcaaaaccttccctgatttatccggaacagggaagaacacgtgtgtaaaatttggttcagattctaaatacatagcagtgggatcaatggaccggaatcttcggatattcggcttgcctggcgaagatgctcctactgagtcataaaatgcctcagttgcacaagccaaagtcttgctctggagtaaacagttgctacccgctattggtgcttggtctaaatatctatgatgagattggagaagttaatgaagataatggtttctttgattattcagtctcgctcctcacataccctgttgtgtatgtgggatggagcaaatgtacttttaaggcttttgtgcagcaacattaccatgccttgatcatggctgctaaccttaatgacagaagctgcaatattttccgtagtcatccgtagataattttgtaacgtcaattgtttaattagtgagataactgatttgtcggccattacttactatcggaattttatatggttgtaactattcttattcggggtgttttgttgatttattagacataattaaaaaaaagggtaatagacatcaacttttagtagacaggcttgtgataaacaatattgagaattcctttttcttttag

SEQ ID NO: 109242 - DNA, 939 bp, Glycine max
  Clone ID: PAT_MRT3847_6965C.1
caaaccccaaaaaaagaaaagatgaaagcaatgaaacgctgctcttcatcatcttcctcttcttattcttctgcttctgagtccaccccacaaagcaatcaaaataaaaatagtaataacttttgctacaaaataaaaggcccatggagtgccaaggaggatcggattctgaccggcctcgtggaggcccatggcccgagaaactgggcctcgataagccgtcacattaagggtcggtccgggaagtcctgccggcttcggtggtgtaaccaactgagtccaacggtggagcaccgacctttctccacgcgcgaggacgaggttatattacacgcgcacgcgcggttcgggaacaagtgggccaccatcgcgagaatgctaccgggccgaaccgacaatgccgtcaagaaccactggaacgccacgctcaagcggcgtcgttttggtgctgacgtggtggtggaggatgatccgttgaccgcgttgactctggcgccgcccgggagtggttgttgtggccgtggagaggagcggcggggagtttcgccggcggggttttgggatgcgatgcgggacgtggtggcgagggaagtgagagggtacgtgtcttcctcgttttctgacaacttggcctctaatgagggattatccaaatattaatgtttttttttcatgatttattaagggaatttatgtggtttagttattattggacttcaggacccataaggggaacagttcagtgtaaaatttgtattattgattaattaaaaatcaatttaaatatcatactactatttcatatgtaattattataaattttaattatgtaataattgattattaagtgatattataaatattagtatatgtaaatttttttagcgaatggtatatgtaaatatttaaatcaacttataataataatttcgtttgatt

SEQ ID NO: 109243 - DNA, 2411 bp, Glycine max
  Clone ID: PAT_MRT3847_69660C.1
ttcacgttggaattcacgcgtccgctttcgtttcgttcactgccgtttccctctctctcacactcacactcacactcctcccaaaaacccaaaaccctaactctctttcgcacactttctcacgctcgctgcagccatgaattgctccatctccggcgaagttccggaagagcccgtcgtgtctcggaactccggtctcctcttcgagaagcgtttgattgagcgacacatttcggattatgggaagtgtccaattactggagaaccacttactatggacgacattgtaccaatcaagacaggcaagatagtgaaacccagacctgttcaggcagctagcatccctggcatgcttggaatgttccaaaatgaatgggatggattgatgctatctaattttgcattggagcaacaattgcacacagcaagacaagagctgagtcatgctttgtatcatttttttatttccgatgaccctttgctcgcacacttcacaaaataatataaaaccttaacctatatgttcccctgcatgagctccactgtttatatttgaattaatctgtagcatgatgctgcttgccgagttattgcaagactaaaaaaggaacgagatgaagctaggtccttacttgcacattcagagacacatctcggattatgggaagtgtccaattactggagaaccacttactatgaatgacattgtaccaatcaagaaagatgaggatctggctcctggtgcaaagaaaattcatcctggaatatcttctagcataatttctgagctaactgattgcaatgctgctctttcccagcagagaaagaagcgacagattcctccaactttggctcctgtcgaagctctagaggcatatacccagatatctagtcatccctttcacaaaacaaacaaacaaggcattatatctcttgatatcctttattctaaggacttaattgcaactggaggtattgatacaaatgctgttatttttgaccgcccatcaggacagatattatctacactcagtggtcactctaaaaaggtgaccagtgtaaagtttgtagctcagggtgaatcattcctaactgcttcagcagataagacagttcgtctatggcaagggtcagatgatggtaactacaactgcaggcacatcttaaaggatcattcagctgaggtgcaagctgtcactgtccatgcaaccaataattactttgtgactgcttcacttgacggctcttggtgcttttatgaactttcttcagggacatgtctgactcaggtttatgacacttcaggttcttctgaagggtacacttctgcagcttttcatcctgatggtcttattcttggaaccggcaccacagaatctcttgtcaagatttgggacgtaaaaagtcaggcaaatgttgctaggtttgatggacatgctgggccagtaactgccatatctttctctgagaatggatacttccttgcgactgctgctcatgatggtgttaagctttgggatctacgtaaaactgaagaacttcaggaattttgctccatatgattcggaaacaccaacgagctccgtggagttcgaccacagtgggtcctacctagcagttgctggttctgatataaggatttaccaagtagcaaatgtgaaatctgaatggaactgtatcaaaaccttccctgatttatctggaacagggaagaacacgtgtgtaaaatttggtccagattctaaatacatagctgtgggatcaatggaccgaaatcttcggatattcggcttgcccggtgaagatgctcctactgagtcataaaatgcctcagttgtacaagccaaagtcttgctctggagtaaacagttgctacctgctattggtgcttggtctaaatatctatgatgagattggaaaagttaatgaaggtagtggtttctttgattattcagtcttgctcctcacatggcatgttgcgtatgtaggatggaacaaatgtactttcaggctttgtgcagcaacattacgatgccttgatcatggctgctaaccttagtgatagaaagctgcaatatttgccttagtcatcaaaacctcaaagcttatgttgtccgtagataattttgtaacgtcaattgtttaattagtgagataactgatttgtcggccaatacttactatcggaaatttatatggttgtagctattcttgttcggggtgttttgttgacattaaaagaaatgggtgatagacatcaacttcttctagtagacagcttatgatgaaaaacaattccttttgcttctggatattacgttaatagatacaaaacaaactataacgaataggaagtgatgacattgtttaccttgtccaacgtaaaaatatattcaagtttccatctgcca

SEQ ID NO: 109244 - DNA, 594 bp, Glycine max
  Clone ID: PAT_MRT3847_69661C.1
acgccggagaacagcccgagattgataaccatgctgatgaagtctcatcagccaaccatcctcctacccctgtagaggaaaactttgttactgagggttcaagatctgcatcaggttatagcaacagtccacgccatgcaaccattgcaagtgcaacaaatagttacttttttgatagaatttctgcaacatggccagaggaaaaacttcttctggctacaagaacccaaagccctcgtgtcagtatggatttctctaacggggtaagtaaaaaaatgtcagcctggggtatggtgatcgtaactgccggcctccgaggggaaattagaactttccaaaattttggactaccacttcggatataagaggtgaaagaatatgcatgcttgtgagcatggctgagaatgagttgatgatatcagctcagaaggcagtagattacaccttctccattagttggtgaaaacctgtacagaaaagtgggatgagaattgtaatattagcggggttccatttattttcttgctcttgtgcattggatgaaaataggttgccattccattcaggcactgaggggggataaaaggggtaaac

SEQ ID NO: 109245 - DNA, 368 bp, Glycine max
  Clone ID: PAT_MRT3847_69662C.1
ggaccaaggcgattttttttttagttttacatcaaaaaattttcaagtcacaaatcccaaggcccttcagtttgtaaatttacataacccaaaaattacttttaccccttcccattaccctttgggggaatacacttaaattttaaaaaacatttttttaacccccccccaatggggatccggccaaatcccgttattcacgagcagtttgggtaataacttactagggcgaaaaactttggaccttccaaggggggattatttttaaggttattcaagggaaaacccccaaagggcccacatgtaggagaggggccacaaaaaaaattggggggagacatccactcctttggggcttgaaaaagaaa

SEQ ID NO: 109246 - DNA, 624 bp, Glycine max
  unsure (1)..(624): unsure at all n locations
  Clone ID: PAT_MRT3847_69663C.1
gcctgcaggtacgggggcggaggtcccggggggacgccgcgggcgggatctgctggtgtttgcaacccggggtgaaagggggagcttctttctttcttccttctcatcacaaagagacaagcgttcttcctcaactaccctacccaacttcttattccactcatcactggctttgagattgagaccaccaaaattgggttttttttttctccttcactcntantgggggggggggagaaggggctgctttggggggagaattggggggngggctaatgggggaactggctanattcttctgcgaagggggaggcgnctcananctccaaatccacttctggggggggggtctcaaaaactactccttgcaggttatctattcggggatgcacgggaaaaancaatncgtcatgtcttcccacaccaaagggtcaggggggaatgttgggttgggggaatgttgaaggggtggggtggggtggggggggggatgggggggggaaaaaaaagggccggcgcggtggcggggggtggggggtgggggggagggggggcgggggggggggggcggggggagtggtgtgcggggcggcggcggcgcggtgggggggggggcgggggggg

SEQ ID NO: 109247 - DNA, 272 bp, Glycine max
  Clone ID: PAT_MRT3847_69664C.1
aaaaagcccaaaaccgtggccccttggttaaattcaaataaaggggggccttttttttggcaaaacaaaacaaaataactttttttttttacaaaacaaccttaacccaaaacttccccccgtttaaaaaaaccgggttttttttcgttggattaaatcccattacccttaaaacctttttgccctccaaacccttagggggcccttccttgccttttaagagcttaaccaccttccttggcggaaccggttttcttcttagggggctaggg

SEQ ID NO: 109248 - DNA, 325 bp, Glycine max
  Clone ID: PAT_MRT3847_69665C.1
ctgtgtctcaacacggcacatctagacatatggagggggaaaacaagattgctttaaccatatattaggatgcactctctatcagagcaacttaccgatccacagacttacgacttcactgaagccttactcttatcatacatgctcgactttcggtgcatcacatccaaggaactttgaactgttatacgttcattcggacaaaccccaactgaagcatatctccacgacatcatcaatccactggattctgatgagaatcgtacgctagacttcactgagttgctaactctcatggccattacgatgaatgacactgattctg

SEQ ID NO: 109249 - DNA, 421 bp, Glycine max
  Clone ID: PAT_MRT3847_69666C.1
ataaactgatcacgcggactgtctagcctcagggctactaaacaatgcacaacgacagctatgaaaggactatatctaggacggacatctaattgtatgccatgcatgtgagagagagatagaagcatatcttaagttacgtacgtagacaaccagaaattgaacctgatcgaacgaggactgtagcctaatcatgctattatgagttatgacctgatgatcaaaaactgttcgcatgaatcatagcagatatgtattacaatgaagcgcttctactatttcaaagtcaaattttggaccaatacgcctaggtctacacctggactgaaagatctacataaactgcaatttttaggatctgacaaggtgacctagtcttcatgctcatctacatgtactctctgtatagatacaactgtat

SEQ ID NO: 109250 - DNA, 525 bp, Glycine max
  Clone ID: PAT_MRT3847_69667C.1
agcagaaagtttcatgtcgccctatgtacatttttattacaaaatcgtgcatagctccgatttcttaacatcaaattcagatacaagcacatacgattgtgatttgtgagggatttctattgcacaaagaaataattccctcgccaaaagacttggggtaatcaaaagtgaaaaactatagaactaacctcaaaaacttcataacagtgtctccgaagaactgtcagcggcaggaaagactattatagtattattaacaggtaattttaatgaaaaccaacttcaagtgtaaaagaacctgtacggctgtactgaaaggtgtatcgtgacttcagcttaaaaaaatgggtaaggttaatgaaaactgacttaaagacctgtactaaatggtgtatcaagacttcagttaataaaaatctgaatcaaatgcttaatccaattggctactcttccatcacgctggcaccaagtataaaagtcacagaagaacaattgcagcatgtgggattgaaccggagtcagctt

SEQ ID NO: 109251 - DNA, 421 bp, Glycine max
  unsure (1)..(421): unsure at all n locations
  Clone ID: PAT_MRT3847_69668C.1
ttcggttacgcggccgcgccaaacacaacacacacgccggaggagctcgcaggaaccacccgcgccgacccacaaccggccacaacagcacacgaaaacaaaaccacaacaacacgggaaggcagagaccggaaccaacaccgaaacggaagccaaagccccacncacccagacggggngccaagaaacaaccaagaccagaccacagccggcggaaaacaaacgagagggcggaagaggcncggaacgcaccagcaggaggacagcggcaaaaagacgcagcagaaggaggaagagcccgaaacaaaaacaggagcaaccacaacggcgnacgcaacaacacaaaagccaccggcggagacgggaggggacagaaccagaccaaggagggggggcnagaaaaacccagaaaacaagggag

SEQ ID NO: 109252 - DNA, 319 bp, Glycine max
  Clone ID: PAT_MRT3847_69669C.1
ttgggttgattgatgtgcatgtttatgtgcttgtttatctgcttgcatggtcctcagaagatgatagaaggggagattgtaggcgaggtcgcgacatttgtcgagctcaagtacactaacaagtggaggtaaaaaaaaaaaaaaaaaaaaaaaaaaagtgtgtgtctcacaggagataaaactatatatatgtgtatatgagatcatacactccacacacagctattaaaaaacaaaacatcgcgtgtgggcccataaaatgcagatatcgaaaaaattgaggtgatataaactaacactgccgtagaatataatttcc

SEQ ID NO: 109253 - DNA, 315 bp, Glycine max
  Clone ID: PAT_MRT3847_6966C.1
caaaaaaaggccccggtttcttttaattcaaaaaaacggggggggaaaaaaaaaaggaaaatgtttccataaaaacccaccggcaaaccccgaaaaaaaaaagtaatagggccttttcttccccaaggcccaaataattttttgaaaaaaaaaatacctttttttaaacaaaccccagtaataacttttcctgggagcacccataaaggccctgggttaataaaaaccatggcggaaaaccagggttttttttggggcccccctcccttatttttaaacccaaattttaaattccccccccggggggcctttcaa

SEQ ID NO: 109254 - DNA, 495 bp, Glycine max
  Clone ID: PAT_MRT3847_69670C.1
aattcggctcgaggtttccctgccagaggaaactgagctggaggagcctgaggtcctgcctttcattggctgacacacctcctgtccactgtgtcactctccaagtgccagagaagtggaggcagatcgctaccccaggctgagatggcccccactgtgaaggccacgcctgtgggtgggcagccacctggtgccaccacagggcaccagggatgatcctgatgcggcaggcaggggagactcacagaaaaatctgcccagagcctaccctcaccagacaaactctgtgctcctccaaaacatcctttagatgcaaaataataataataataataaataaataaataaaaatccaaacccaagtcaaaaccttggctccagcatgaaaacacgtttacaggaaagtgttctcctgggtttgtgcccaccatggtgcgaatcctgacccaaggccttctgtctcccttcaaagggagacccttttggggaatgagt

SEQ ID NO: 109255 - DNA, 192 bp, Glycine max
  Clone ID: PAT_MRT3847_69671C.1
ctactctctttaacaccgctatctgtcccaatcttcaaatgccaagtgacaaaacagttggcggaggtgatgatgctttcaacactttcttcagtgagactggtgctggaaagcacttgccacattccttctttgttgatcttgcacccactgttattgattaagtgaagaccggaactttcccccaacttt

SEQ ID NO: 109256 - DNA, 407 bp, Glycine max
  Clone ID: PAT_MRT3847_69672C.1
atgttcagttttacatatttcatcttcaggatcggaacgcggggatatctgtggacgggtactataaagggagcttgtagacaactgtgtcgataccgcgcatgtctttcttcaccaaaagttgtacaataacgggttccaaaggggaggggaccaaaactgtcacaggcggaaaggggaaaccgccctcggaaatataacctaggccaacccacggccttccttgctcttcaatgatcgattgggcgtgcaagccctctttccggatgcggcgcgcctggcggaagaaggccaaagtctttgctcgttacctgacatatggatcttgtaacgggggtttaggcgtcagacttcagagacatgacatgctgctgtgtcaacggacaaaaagaggagttctgaagaag

SEQ ID NO: 109257 - DNA, 193 bp, Glycine max
  Clone ID: PAT_MRT3847_69673C.1
agaatattcatactcgcaatatcttgttctcattatataagggggagacaaaagaggacacgcacgtttagtgctagcacaacctatgggtgcatatacgaatatttattttttgggggaagcgcgcatatatacgaggataatgaccctttcagatttatatggattatcaagaacacttatttaacgattg

SEQ ID NO: 109258 - DNA, 274 bp, Glycine max
  Clone ID: PAT_MRT3847_69674C.1
gaaatatcaccatcaccacctagattcctaatttaaaccttcgcgacttggggggaataaaatccaaaaatccatttttacctttaattgaaaccaattccttccaaattgaaacctttaccaccctgacctttatttaaccaaaacccagtggaagccaaagaccttccttttgttttattaaaataaaaaccagttttgccagaaaaccattacttgttctttccttacaaaaaatcctaaaaaaaccaaacatttccatttaaattgttct

SEQ ID NO: 109259 - DNA, 346 bp, Glycine max
  Clone ID: PAT_MRT3847_69675C.1
accttcgacgggcctgaacatgctggccacggtctctaggtatatggcggtctataatccctaattactgttaacatagacagcactgaacgtgtatcccaaatcatgaacttccatagatcaaatgttatgctcctacaccctcagttgtggattaagaaaaacctctttttttttacggtgaagaatttgcttacacatatagatactgaaatactatgcattctttttttctttccaaatgtttattagttgcagacaacagtgaacatttaaaaaaaaatgtactcactcgtaactgttatgaaagcgtcttttgcatcagattaaacaaaatttaattctt

SEQ ID NO: 109260 - DNA, 355 bp, Glycine max
  unsure (1)..(355): unsure at all n locations
  Clone ID: PAT_MRT3847_69676C.1
aaaatccatttattgacccacaaccctcgccctttttacttacanncataccaaaaattcactattttacaaaataataattttaccacctttcatatttacaccaccattctccaacccatactacatacatcaacccaccacattaaaaaatcacctcccctctttccaatttctacacttaaccatcctaaaacactttctataatcccaccaacccattattaaatcaactttttctttccatacattaaatttcttacacttcctttcaacaaacttctttaacttcaaacaacctttacatatactctacaccattttaattttccattcccaataccccattacttct

SEQ ID NO: 109261 - DNA, 304 bp, Glycine max
  Clone ID: PAT_MRT3847_69677C.1
atgagacattactgagcatcgtctagctatctcgatcgaactgtccaaggtcctgtcacctatcgcccaactttgccccccacctgtcaccatcgccatctcaatctccatcctgttcatcccttgatcatgatctcgggatcaatgtagcgttccatattaatccatccgagcgacatgttcttcatagacgcgtggcatccgaagttatcgtgcacctaagacataaaccagccaaacgggtcgtagtccagggcactggcgtcgaatccagaatcggacgtccaaatccgcccagtgaagc

SEQ ID NO: 109262 - DNA, 200 bp, Glycine max
  Clone ID: PAT_MRT3847_69678C.1
gtgagggaatggtgttctcagattggaacttcaggctacatctcgttgctgggtgtcactactaatcgttatcatcatctcggttaagttctgtctcactgagtcacgcatgcatcacctctcttctatcagtctctcttgtgtatctatctcagtctgattcagtgcacttgcgtctctgatgtgtcgttctgacgttg

SEQ ID NO: 109263 - DNA, 642 bp, Glycine max
  Clone ID: PAT_MRT3847_69679C.1
cccacgcgtccgtacggctgcgagaagacgacagaaggggactgccaaatgggtaggcaaggtaatgatcctagtcctaccactgtgaactcctccattgctcttcttcaagaaaggtttagacagttggagaaggtgaaagaaagaagagaggggaaacaacttaaactcttgtcatttgagaccacctcctcatcatcacaaaactctcaacaacaaccaaggttggtggctccacataggccaactctccatgactctctttctcttggcctcaacttcacaaacaagcaaggtgatcatcacaacaccatgaacatgaaaccacctccatcctccaatttatggccacagggagcatcaacatcaagaaattttgatacctcagacgttgatacttcccttcatctgtaaatatatttactactgtttgtcttaatttgcttccccagctagtaccttgtataatagatgcataataaccctatgttcgatctccatcattttgtatcaataatcaaggaggatttgtatcagatatgcttttctttttttccccttgaagggatgtgaatgacatttgacattcgcaaaaaaaaatgatctttcctatacaaaaataactcgtcatatttatagacc

SEQ ID NO: 109264 - DNA, 500 bp, Glycine max
  Clone ID: PAT_MRT3847_6967C.1
ggctcgagggcctctgtgttttcttgtaccactgcctgcttcgataccaatactgttgatgacagaaaatcaagtttctttgagttcaaaccactcagcagatctaatatggttcctgcagacttcaacaaccatgtaagtaaacaatctactcaagtagaaggtccaggaaaaactcaatcatttgcttcctcaccattagtggaaagtgagatagcagttccttctaatgaattaagcctatcatcacctgtacaaaaggttagttctagtgctagtgctcctgttgatgttgacttggatgacattaaccacataggcaacacagctactgggcttcaagcatcacatgttgaggttagaggcaagtggactttcagttgcagctgagaaaacatctgatgatggatacaattggcgaaaatacgggcaaaagcttgctaaggaagttgattttcttgcagttatacaaatgtacacatcccactgtgagtgaaaaa

SEQ ID NO: 109265 - DNA, 538 bp, Glycine max
  Clone ID: PAT_MRT3847_69680C.1
ggctcgaggtcaatgagcagaggcagggagatagagcgcaaaattctacgtctccttcacggcggcaaaacccgcagccacctcaccgaaatccatggtcacttcctccgccatggcctccagcaatccaatcaaatcctcgcccacttcgtctccgtttgcgcctccctccgcagagtcccttacgccacgcgcctcttcgcccacacccacaaccccaacatcctcctcttcaacgccatcatcaaagcccattctctacacccacccttccacgcttccttctcctttttctccctcatgaaaacccgcgccatctcccccgacgagtacactctcgcgcctctcttcaagtccgcctccaacctccgctactacgttctcggcggatgcgtccacgcgcacgttgttcgactcgggttcacgcgccacgcctccgtccgcgtcgccgcgttggaggtctacgcgagttgcgagaggatgggcgatgccagcaaggtcttcgacgaaatgcgtgacccagacgtcgtcgtttgga

SEQ ID NO: 109266 - DNA, 465 bp, Glycine max
  Clone ID: PAT_MRT3847_69681C.1
ccccgcgtgcgagtataatgggagatttacattctaggatgaaatgggctctcctgtgggttctgctactctttacaaggccctagttaccgatgccgacaacgttctcccagagtctcttgattccttcaagagtgttgaaaacgctgagggaaatactggcccacaaaccaccagcatgatcactgttcttgcggatggcgaaacctagactgtgctgcgcaaaatagaatggattgatgacagccaactagggatacagttgcagcgcggtagtgtgtgctgcattgccagacactgctactcaagatcacattcgactccagactgtatgctggtacccagtggagggtctgactggaagctcactgtcaaatacgacgcaaaaggcgatcctgagcccctccaagacgaactcaaaactggcaatgccaacgctgatgctatattcacggaccttgaggc

SEQ ID NO: 109267 - DNA, 1525 bp, Glycine max
  Clone ID: PAT_MRT3847_69682C.1
ggagttcaacgtatactcagcattcagctcgaggaaaagtgtttcatttgtttctcccaagtcagaacacaacacaacacaactaaacaacaatgtcgatcgctttttccttcttcactccactctcttccaaatccgttccatccttttccctctctaccccttctctctgttttcgcctcactcccctccgccgccccaccgatcgcttttaccctctctgctcctccgccggaggacctggcggcggatccttcggaggccacggcggtcccggacacggaggacatggtggcggcggcggcggcggcggtcacgacaacgacgacaatgagagaaagaacgaggctttattggtggtggcggaggcggggaggtcgttggagagcgtgccggcggacctggcggcggcgataaaggacggcaagattccggcgtcggtggtgagtcgctttctcgaattggagaagtctccgttcttccggtggctgcttcagttcactgggttcagggagcgtcttctcgctgatgatctcttcctcgcaaaggttgctatggaatgcggcgttggcgtcttcaccaagactgctgctgagtacgaaaaaagaaaagaaaactttttcaatgagctcgaaattgtcttcgctgatgtggcgatggccataattgcagatttcatgttggtttatcttcctgcgcctaccgtagctcttagaccgccactcgcactcactgcagggcctgttgctaagtttttccatggctgccccgataatgcttttcaggttgctctctccggagcatcatattccttgatacagagggttggtgcaattgtgcgtaatggggctaagctttttgcagttggaactgcttcatcactggttgggacagctatgacaaatgccttcattaatgcaaagaaggcagttaacaagacttctgaaggggaaattgagaatgttcccgtattgtctaccagtgctgcctatggtgtctatatggcagtttctagcaacctcaggtatcaagtacttgctggaattattgaacagaggcttttggaacctttgttgcaccagcacaaacttatccttagtgcactttgttttgctgtgcggactggcaatacatatttgggttcattattgtgggtggattatgctcgttttgtaggggttcaataggcccaagaccaagattactacatgactctgatctttctctattgacaacatttttctcaacatgttcatttgttttagtagatctttacaaaagctatttattttctgcagaggtttggttgtaggactatctcaataggttttcgttctctatttttatttgctcattgctgagcactccgtattcttgtttttctcacaagtttccccattcaattgtgcaatgaggatgtggaaataatttatttgttgttatcaggacataatgtgacactcggtgaacagattcataacttttcttttaggataaaaaaaaaaagaacagcagcgacagtagc

SEQ ID NO: 109268 - DNA, 250 bp, Glycine max
  Clone ID: PAT_MRT3847_69683C.1
ctcgagccgtgaaagatgaaccttctacggtggaggcatattattggacaacactggctattggttcacactttttcaaagttctacaattcgcaacttgatgtgaagagctgcttgtgatacaggctgttaatggacaagatgaggtctctcggatgcagcaatctaaaggagcgattggcctattggtacaagcgctgtacatacacaacagccatagctgttgatgcatgtcaggggacaaaataga

SEQ ID NO: 109269 - DNA, 380 bp, Glycine max
  Clone ID: PAT_MRT3847_69684C.1
gtgtgttgttttttttttttttttttttttttttattttgttcacttgtgctgtgatctataaactactttttttggtggttcatgctttgtttttgtgaagaagggcttttttggcctaacacgggggaaaaaggcacataaaaggggcggattttttttttccttcaaagatcgaccaccaaatttaaaaccttccaccttgttctggtaaacacgccctcttataccaaaaaaactttttgggggtccgaaagggggaagcccccccttttaaaattggggcgctaaactataaaaagccaccccagggggtccaaaacctaataccaagccccactttttttttaaaaagaaaaaaaggggggcaaaatttaaccc

SEQ ID NO: 109270 - DNA, 155 bp, Glycine max
  Clone ID: PAT_MRT3847_69685C.1
cgcgctcccatctattccaattccatgactacaccaccgacttcttcctaatcttcacactggcaatcctccgggtgccaccctccctcctcctcctacttccccgattcctttcacctttatcaacccgcaaccactcactacgctttgcccta

SEQ ID NO: 109271 - DNA, 1033 bp, Glycine max
  Clone ID: PAT_MRT3847_69686C.1
ctcttattccacattttttcgctttgattctttctctttctctcttctttctctattctctctctttctatctcatttttttttatattaaatcttcaaaaaattgccagattccggccacaaattttctcgtttctctctgtctcctatcatatcgtcttcactctagcgtgccccatccgttccgtgtcaatttaccaatttacccctatatttttccaatttacttttttcacccgaagatataagataattaccgtttcgtgttattttatcttttaaaagaaaagaggaagtatagtagtgacgtggcatgcggatagagagccatgaataccaaaacgatgcgtctcccccctcgtcgcgtgttgacacctactggcacttccaataagcgcaaagagagagatgaaacattcgacaggcccaagcccatacccgccccacccctcaataaattacccaagcccgataggcccatctctttgcccctcaccgaggcgaagccgtcgtccaatcaactgctggcgggctacttggcccacgagtttctcacgaaagggactctactgggccagccgtgggccccacccaaaggaaagtcgttgtccgcatcgacggaggacggcggagaggaaggagaaccgaccaccacggcggcaacggcggcggcggcggagccgtgccggaaaacaccgccgaggcggcgggaaaggtacgcggaccgggccggtttgctgcagcgggggggcacccacttcccgggcggtgtgagcccctcccaactcgcccgttttttgtgatgactgatatgatctaacacaaaaacaaaaccccactgggagacacgtggaacgatcctattcgcactccctcgttctgtctcggggagagtaatttctctcctccgacactctctcttttttttttttttttgggttaaattcgaaagagggaaaattttctgatgcatgcaacttgtatgtatgtcatccctcttgatgtatgcattctcatgcgaaatacatgcttt

SEQ ID NO: 109272 - DNA, 321 bp, Glycine max
  Clone ID: PAT_MRT3847_69687C.1
actattcggtcgggaagggatagatctgctttggcgacttgttgagcttgccaattacccatcggaagacattcatagacggagactggaaagacccctagctaaagaataggaaatccatgatcaacccttccacccaacacaggatcgggcatatcccaacaaatacttaggaaaacgttgatcttgctgccactggcaccaaagatgtcctcatcccgcaacaagggcgccaaaagggcctccgctaccagctcctgtcgggctcgctacctacgcgccatctctggcatgaccacccagaaaaatcccgaactagca

SEQ ID NO: 109273 - DNA, 164 bp, Glycine max
  Clone ID: PAT_MRT3847_69688C.1
tttttgaaacaacaatcatctcgtttaatggagcaaaagatctaatgctttggtatttttctatggaaatatcataatttgcaatactgaaagaaaaagacaaatggtctctaaatgaccaacccctatttacactctgggaggatcgagcaacgaaacacata

SEQ ID NO: 109274 - DNA, 422 bp, Glycine max
  Clone ID: PAT_MRT3847_69689C.1
atggctgacgcgggcttactacaaggtaatggctcccttaatgatctcctccccagctgctaccaccgggaaccgggcccttgcctacgtgggtgctccattcaccgacctcaaatacatggctggcttacgcacgaggaataccaacactgacattacctccattgctagcaacggtggaagagtacaatgcatgcaagcgtggccaccaattggcaagaagaagttcgagactctttcctacttgccagacctggatgatgcccaattgaccaaggaagtcgcataccttctaaggaacggatggataccttgcttggcattcgagttgtagcacgggttccttgtaccgtgagcacatcacgtcacctggatactatgatagacgctactggacatgtcgaagctgtctatgtttggct

SEQ ID NO: 109275 - DNA, 277 bp, Glycine max
  unsure (1)..(277): unsure at all n locations
  Clone ID: PAT_MRT3847_6968C.1
attgcttcttgtttctttcatcattttcatggctacggnttttcttctgtatttttatatatatttaaatgaattgtcacacgttttttgttttttggtggcttctatggtggagaagggagtcatgtggtccaatcgtgaagaagaaaaattgtttgttacagtatagaaattttcctcagtgtcactgttccaagtctccatttttcctattggtttatttcttccatttccagttccgaaaagggtgtgtgatcattcaatgcangtgggttcg

SEQ ID NO: 109276 - DNA, 485 bp, Glycine max
  Clone ID: PAT_MRT3847_69690C.1
ctcgcgctttccccaactgaacctcgttgttgtgaatcgcgctgctgaatcaatcgttctcggtttgttctcgcgtaatctagtcgttcatcccaaaatggtttgcttggcttgtttgctgcccctttttctggttccgatcgtcaacatcctccctcttctctactattttataatgggaaaaatctatcgggtttttggttgggagtacaggaaaccggagagggctcctcctgtatgtccatacaagcctccaaccaacagggttagtaaagttgaggcagatgttgaacctgttccagcagatcctgttaagcctggaagtgtagatgtcaagcaggattaatctggggtagctattctataaggtttgacgggagtaaaatgtatgataacatctgatggttgatgtatgtttttaacttttattaaatatcttgtcttgtcatgaccattaaaaaataaaaaagatgcttggttggttt

SEQ ID NO: 109277 - DNA, 237 bp, Glycine max
  Clone ID: PAT_MRT3847_69691C.1
cggctcgagctcgagccgaatcggctcgagtacggctgcgagaagacgacagaccgaaggcacactaaaaccaaaaaaaaaaaaaaaaaagggggccaccgactagggccctcgctccccggggatttattccgggcggggaccttgagggggaacaagtttcccctaaggggatccttttaaggctttggggaaatcagggcaaaagctttccccggggggaatttttttcccgcc

SEQ ID NO: 109278 - DNA, 120 bp, Glycine max
  Clone ID: PAT_MRT3847_69692C.1
cttcttgaggacactgcacaactttttaacagcacctaccgtaccaaaagtattctcggtacatacatgcaccactcccttagaatgacacatatttcttgactatttccttaagccgca

SEQ ID NO: 109279 - DNA, 993 bp, Glycine max
  Clone ID: PAT_MRT3847_69693C.1
tgaagtacttaagagagcaatccacacagctgttgctatccttactgccctaatggctgcaacaaaagcaaccaggtcttccaatgttattcttgtaattgtgattggtgctcttggtttgtttattggatggttgatagaaatctcaacaaagtataggtccctttccttttcaattggaatctcatttaatttctctcactgtggctctataatcttgtcaagacacttttgagacggtaccactgggcatttgccttggctggttttcttgcattggccatggcagcaataagctggacacttgaaaccagtgaaacctactggttttggcatagcatttggcatattacaatatacacatcttctttcttcttcctttgttcaaaagcaaatattgaggatactgagaatcagcttcctacaaatggaaactatgaattgactcatcaggattcacttccaagaactggttagaataaagtaaatggaataccgagtaatggtttatggatacttgcatagtgtatacactcaatcaacacccttcatttatccctatctctattttcttatcacatcatatttcttactacatctacacttttctctcttgtatctctttctctgggtgtatgtatattgggtttgagtgtccataaatcatttttgttaaaaattttggtgttttgaggcaagttgtggagacggctcaagaatgtgtggctactgctattgaattttgatgccaaaaacaatgaccaagcaaagcagtctcttgtaaatcttgcagcataaggtttgtttctgccattctttataggataattttggcatgactgtgtctaggataaagaatcaaactacggatatatttttgtcataggatgaaggagctttgttcatgtaattatgatttagaagttaacttgcctttgaactgtatcatatttagagatctttcttataaaaataactcaacatgatagatct

SEQ ID NO: 109280 - DNA, 354 bp, Glycine max
  unsure (1)..(354): unsure at all n locations
  Clone ID: PAT_MRT3847_69694C.1
ttnnnnnnttttttttttttttttttttttgcacacgcatgtttttttcttaattatctcgatcatagattaattttacttattgggggcgacttattattaattaaaaaaaaatttccccggaaaaaataaatcatttttctttatgtaaatataaacataccgggcgatggtacatttttaaggtgggttggctagggtggggttaaaaaattaaatcaaaatggaaggaattaataacttggacttaataaccaaataataggggtgaaataatttggattcccccttttttaaataaccattcccttttttctggcattaaaaccagggaaaaataaatttggggaaaaa

SEQ ID NO: 109281 - DNA, 196 bp, Glycine max
  Clone ID: PAT_MRT3847_69695C.1
gttcggcacgaggaaactgttcgttcacacgatatatcctgagcatgaagacaaatctgactttgaccctcttgatgttactaaaacttggcctgaggacatgataccctagcagcctgatggtcgctgggtcctgaataaaaacatagataatttctttgctgagaatgaacaacttgcattttgccctgacata

SEQ ID NO: 109282 - DNA, 577 bp, Glycine max
  unsure (1)..(577): unsure at all n locations
  Clone ID: PAT_MRT3847_69696C.1
atgcattgaatctttaaaacggtcaactaatggaggcttcgagatcaatctaggcgatgtgcctacaatattgtaaggtttacaggatccattcactgcagttggcaagctggattcaggttccggctgaatctgaggcttgagttgaaatgcacgtcgatactttctcacaaaaacacaaacagggcaacatggatccttgcagtttatgaaatgatgaagcaacaccctggtatgatggcaacgaggatattggcaatggcgcagggtgcatctatctaagtgcttgcataacttctgtgcattagaacaaaagcgttctttgcatcgtccttcaggggcagaacaccgtcgtgcatgaagtagaaataaaagccacctctgttgattcctgtgcgccttttttatagcatttccagagtccagttgctcagctgagcctctagaaagaacagctcgaccaataatagatccatctgacgannnattattgcattgagcttcatcttgcccagatattctttgatgaaaatccatgtggagatgttgatcatgtgaaatactgtcaggtatgtgg

SEQ ID NO: 109283 - DNA, 347 bp, Glycine max
  Clone ID: PAT_MRT3847_69697C.1
gctcccactcatcccatattattaacttcaccatttcttatcatattccctccttttagctaaagttgattattatcatggtactgctcattccaacctctcttactctcacaagtcttacccttttctctatttaacctcttatcccaaacctcctcttctttctactcataactttcatcaactcttcttttattcattcacgcatcttattatatctaataattctttatgttatcttcataatctacaccaaaatcaatcattcttactattaatttcaatatttttacttcttcttcattttaataatcatattcataaattcagtctttttaatcaatctt

SEQ ID NO: 109284 - DNA, 214 bp, Glycine max
  Clone ID: PAT_MRT3847_69698C.1
agttcattcgcaagacacagtattttgagtagctttatttctttatggttgggatattatgtactggcgaattttaatgagccaccggtttccaaaatgtactgcgaaatttttttatggttggtacatttcttaaataatgtgccgaactactgatacaaacaaacttttgaactcttaccaaaatgaattgatgtttcacgatattgattta

SEQ ID NO: 109285 - DNA, 446 bp, Glycine max
  Clone ID: PAT_MRT3847_69699C.1
atgggtcatcatacggaggcagtgtaagtgttctgtcatttcaagtaatttggtctcaggggctggaagaactggaagtaagctcattgatttaggacatgacaaaacatggttcaaaacagatggtggtgatccagatactacatctgggcaaagaaatggtttcaatctcaagcgtagttattcaaatcgtgaagcaccaaagctcacgaatttggatgcacatcgtcagccaagacaaagcacaactgacatacggaacaatttgatgtcaggtaactggaaaacttctgaagaagaggagttcatgtggggtgagatgaacattggtttgactgatcatggagccaatgtatcaagcaatttgagcacagacacatggatggcagatgatgagaatttggaaggtgaagatcacctccaaatcacacgcccttttggagcaa

SEQ ID NO: 109286 - DNA, 267 bp, Glycine max
  unsure (1)..(267): unsure at all n locations
  Clone ID: PAT_MRT3847_6969C.1
aatgggaaaaanggaaaaaaactctgactatcagctgcacactaacttttattgtcatataacaaaaggaacctaacgcagatttcaagatcctcggaagttttgttcttttatatctttcccgaactggggtgggcccgtaaaaactgacttaaccaggatctatttggtttggggaatttgctgatcaagttctaggaagcaagaaaattcttgcagatgggcggtttatttttggaacgggcgaaaatggaagcagggagagcc

SEQ ID NO: 109287 - DNA, 1082 bp, Glycine max
  Clone ID: PAT_MRT3847_696C.1
tctcaagcctctctttaagattctctaccgttcaacgcaacactctcaattccatctactcttcgttcccaatatgacggagtgcatgacggacttggctcaagctgccgcatgccgaaacggcacgacggcggcacacttaaaagtgatttccatctttatgatttttgtgaccagcgtgacaggcgtatgtgcgcctgtcacactggcacgatactttcagggaaagtccctctacaacatagccatcttgttaatcaaatgctttgctgccggcgtaattcttgcaacctcattggtccacgtgttgccagacgcctttgctgcactctccgattgccaggtggcatcccagcatccctggaaggactttccctttgctggcctggtgacccttattggggtgctaatggccctgctggtagacactgttgctagctcgcacatggagcatgcacactacacgccggtggagacgcaggagaaggagggtggcggcggcggcagcacatggagcattgagcttgttggtggtggtgctgaagtgcagagggttgaagagttgatgaggttgaagcagagactggtgtcccaagtgttggagattggtataatttttcactctgttatcataggagtgactatggggatgtctcagaacgtttgcaccattaggccactcgttgttgctttgtcctttcatcagattttcgaaggcttgggtcttggtggctgcattgctcaggccggatttagctttggaactacagcgtacatgtgcttcatgttctctgtgacaacaccaatgggaataattttgggaatggtgttattctcaatgactggttatgatgatactaaccctaaagccttgatcatggaagggttactaggttcagtttcatcgggcatactaatttacatggctcttgttgaccttatagcagttgatttctttcataacaagcttatgaactctaatttgtacttgaaaaaggtgtcttttattgcattgactcttggctctgcttcaatgtcagttctagcactttgggcttgaacactgtcttgtgttcaaataa

SEQ ID NO: 109288 - DNA, 1304 bp, Glycine max
  Clone ID: PAT_MRT3847_69700C.1
cgacgtaagaatgtattctaatttgtcacttaatttgtaaatcaaacgaattcgttgattccatatcgattcgcatttgcgtacacccctgaccccttgatttctctcagttccgttctgcatcatagagtatggccagccacgatcttcgattcttcgagttgaacacaggcgctaagataccttccgttggtttgggaacgtggctcgctgaacctggcgttgttgctcgcgccttggccactgcaataaacgttggatatcggcatatagattgtgcgcaaatttatggcaatgaaaaggagattggtgctgccttgaagaagttatttgctgatggtgtagttaagcgtgaagatatgtttatcacctccaagctatggtgtaatgatcacttgccggaaaatgtcccagaggcatttgataaaactttacaagatttgcaactggactatttggatctctaccttatccattggccagtcagtgcgaaaaacgggaagcttaccaaacctgacatacctagcacatggagagcaatggaggcactctacaattctggcaaggctcaagctataggggtcagcaatttctctgtaaagaagcttcaggatttgttggatgtggcaagtgtgcctccagctgttaaccaagtggaattgcacccttcattacagcagccagaattgcatgctttctgtaaatccaagggagtgcacttatcaggctattcaccactgggaaaaggatacagtgaaagtaatattcttaaaaatccatttctgcacacaactgcagagaagttagggaagactgcagcacaaatagctcttagatggggactacaaatgggccacagtgtgcttcccaagagcacaaatgatgcaaggctcaaggaaaactttgatctctttgattggtccatacctgcagatttgcttgccaacttctctgacattaagcaggagagaatagttactggagatggtttttttagcaagacatctcccgggtacaaaacaattgaagaactctgggatgagtaatggacagtttccatattggccacatccccccctcttgcttaatgcaaaaatgagcctatctttatgattattgtaataatctacgatgtgtttataattttggacttgagatgtgtcaagggagatttcgagtttacattaataacgtgtcattttggaattcagttgtttgagtcttgaccttattgtgtgtttgacaaaactattgttagaagtctaatatcgtttagatcggaaaatgttagttattaatatgtt

SEQ ID NO: 109289 - DNA, 555 bp, Glycine max
  Clone ID: PAT_MRT3847_69701C.1
gaaaaggtcatgttgaactgcccaatgtaaaaatgacccaacccagcaaacacaaaactacaatgctatcgcctactcctcttgtatctatttataaaaggctaaagctacctctactttcttggttacaatacagcaatacattaggtccacatcctacaactacaacaccaggattttggattactttcttctaaactgaaaaattctaaggagataactgctactccgtgcaaacctacaatgtaagtgtattaattagccggtcatcgaaggtccattttaagaaactactgttaaacgaaaatcgaaaactacaggaacattagtcaagtaataatattgtttaaaaaattaaaaaaaaatatttgttgtataaaatgtaagagaatgtaagaaatgctatggaaaatataattttgcacatgtcaataaaaaaaattcttttaattttttaactaataattattaatatttgcctaaaaattaatatctctacagttttttcgtgactcgtgcattataccatcattggtggctttttcattttaaaaa

SEQ ID NO: 109290 - DNA, 542 bp, Glycine max
  Clone ID: PAT_MRT3847_69702C.1
tgctcatcagaacaaggacaacaccaaagttaggaagcctaacaagggcattagaagatcttcagattttcttatttcatacatagatattgtctacaaacaattcaggagaatttttcctatttacaaatgagattttctcttacacccttgtgttgttcaatctatttttggaaagttaattatgtaagataaatacatctaatatggcacttgtctgctgcactgcactgcacagcacagcacacaaaacctattagaaatttgctgcatggctttaatgggcatgggtggaagttaccaatgtcacttgtccttccaacatgatcgtctgatctgatattatgcatggtatcttggaacatgctatttagtctgatctggacactagtttttaacatttcaaccaaggatacgtttaggtagtgcaataatgtttttactctggcattgatctatcaatttccaggactgtgtcttttctttggtaaacatctgggaaaagtgatatgtattttttcccctctttaagcttgtcttga

SEQ ID NO: 109291 - DNA, 630 bp, Glycine max
  Clone ID: PAT_MRT3847_69703C.1
cccacgcgtccgtccacgcgttcgcccatgcgtccgaaaaattaatataaaaaaaaaaatgataattaaataaaaaaaaaaaaaaaaggggggatgatataaaaaaaaaaaaggttgcgaaatcttgagggcaaaagtttaaaaattggtgtggggttatataaattcaatttattgggcggctttatacaaagtaatggttggtaaatttgctgggtaactaaagttaattgcctggcgttacataactttttggccgggtagcgtattttctaataggccgtttgggatttgccttaaaagccgtttctaaacgtgattggaaaaaggaacgcgccctgaatgtggaatttaaccgacgttgttgcggcttattaagctagggggaagtggtgattacccacagattaaccgctcgctttttgtggtttattacaaaggttaatggaaatgttgtccgttttttacgggaaagttttaagggtttgtgtgttttttttttaaaaaggtggttttttttagggcttcaaattaaaaatatttggtttttttaagggtttaaatttgggggggtggggggtttttagaccggagatatatttttttggggggggggggttttttgggttt

SEQ ID NO: 109292 - DNA, 415 bp, Glycine max
  Clone ID: PAT_MRT3847_69704C.1
aaaaaaaaaagaggctggataaccttgggcctttaaaaagaacctttgggttaagggaaggccttttttttttaccagggtggaatggcccaaatgctttataacccccgggaaaccttctaccccaggaaaagacccaccttcagggaaatattttagttggacaaactatccggtccctaccccctactaagggctttggccaggagggatcaaaatttttggggttggaaacccaacctcaatccacccttaccatttttttaaggggcctgggggcctccctccccaaaaagggaaaaaaccgattggggaccccactcgggctgaataaaaccatttgcccttcaaaagttgtccccccggcccttaatgggggcaaagggacccacctgatgcggggacccagggggga

SEQ ID NO: 109293 - DNA, 306 bp, Glycine max
  Clone ID: PAT_MRT3847_69705C.1
aggggtttaaagataaaaaaaaaaaaaaaaacacaaaaaaaaaaaaccggcggcccaaaaggttcaaacctaacttagccttgaaggcaacttaaaacccctccaaaagggccaccaaaatcaaattaacgggcggtcgtttaaaaaggtcttaacgggaaaaaccctgccgtaaccaaactaaaccgccttgaagaaaatcccccttccgcaaccggccgtaaaaccaaaaaggcccgaacgattagcccttccaaaaatttgcgcaccttgaatggcaattgagacccgccctgtaacggggca

SEQ ID NO: 109294 - DNA, 223 bp, Glycine max
  Clone ID: PAT_MRT3847_69706C.1
gtcgactcacgcgtccgcccacgcgtccgaggaaatggaaaagaagaagagaaggtcctctctagctcctcttttatcgcgagcgtatttgttttgtttttctctctttgtcaaacagtttccctttccgagttccagtttttctcggagtgcccaaacacgcccttttgtctgaagttccttttagcttttgatccaccctttctttcttttcatgtgcttt

SEQ ID NO: 109295 - DNA, 299 bp, Glycine max
  Clone ID: PAT_MRT3847_69707C.1
gctcggaattcggctcgagctcccacttcctactacccttttgctttgtccattctacatttactcactaaagtggacgaggcaaaaaacattctttgctgctttctgtgaacaccctttggtttctctccttggattttgcatcgcgaaactcaggtatcacttctgagcatggtatcacttggagctatatatagtgtggactatgtgtacatgcttgctgttctatgggctggggtggggatatagttcaccatgatgatgatgcccccacaagacctggttgcgagaacaacttt

SEQ ID NO: 109296 - DNA, 426 bp, Glycine max
  Clone ID: PAT_MRT3847_69708C.1
cccacgcgtccgctcaagttttatgttattctcttcagtcttttatagcttttagtaatcttttaagttaatttgcagtagatagaaaattgctttttatcatcatcttggttccttccttgcctgccacaatgcgatctacggagtcatcaacttcttccattgtgattttatctttgcccctttcaactggcaagaatcacggcttgattcatgaggtttgctaggtctgcaccactgaatcccggagttctcatggcaatgacactaagagagacatccttgtcaagcttcttcatttcagtgagcaactgattcaatgtttgctctctttcatcatttcctccaactatacctgtacctcttagcctccctacatcatctatttcatcaatgaacttacttgtatctaatgtattaaaagaa

SEQ ID NO: 109297 - DNA, 323 bp, Glycine max
  unsure (1)..(323): unsure at all n locations
  Clone ID: PAT_MRT3847_69709C.1
nggatgntganaccananatganctgcnatatggggatgntgngnnnagtnantanntnnganaaggagagggtgtnccnagtnacgacnnagtaaagggaccangnanganccaagttgaangacncgttgaaagngagataccnatctcccgtgaatnncagntnnaaagtgatnacnnnncccntnggggnnnncaaantcnatatntgnatnngatttnagtgggntcanatnttnananaagnntgangccnatgggacatncgnnngaanncnatcgggnancccnannanatgatttngaaganctnggggaacac

SEQ ID NO: 109298 - DNA, 306 bp, Glycine max
  unsure (1)..(306): unsure at all n locations
  Clone ID: PAT_MRT3847_6970C.1
natcncangcncgcntacgtnagctcngaattcggctcgaccnacatatatannttatatgatgnaacnaaaaaaaatnntctctcaagattnatgctaganatntgnaatnntctcaaantatngngagtanacanttgtactangtgaatngcagtacttncacggaaaaaaaaaaaaanggncnccccncgtnnaggntnccngnnnccccnggnnntnnttccggggntggnccnnggggggnnncnanntnccccnngggggnnnnttnnannnntgntgnaannggggtnannggtgtnn

SEQ ID NO: 109299 - DNA, 178 bp, Glycine max
  Clone ID: PAT_MRT3847_69710C.1
cacgaaaaaagcgcgaacaacgtggtcagaaaccctagtgaaacagcgaaatgatcggtgggtagggtaatgtaacttggctatggttacgttctttgagatgacagtcttgatgaacagaaccattctgatgaattgctttccttgaaagttaatgcatgcttcgtatcttctgccc

SEQ ID NO: 109300 - DNA, 367 bp, Glycine max
  Clone ID: PAT_MRT3847_69711C.1
aattccgggcacgacctcacgcgtacgcgtacgcgtagcattgcgttcctattgatatttagtccgcattgtgctttagatgaaggtgagggcaaattaagaggggcttgagatcataacctgtgtgtttgcagcaatggctaagttctttgctgcgatgatcttgacactctatgccatgtccatactatacacaatgctgatgtctgctctggaacagagccgccacttcgtttacatcacgagcatatctagtcttggaagtgtcaactagtgcctatgcccatcacagtgctctagccgaagggacctgacctcatgccataagcccagcgtgggatgctgttataagtgcagcacgacatgc

SEQ ID NO: 109301 - DNA, 388 bp, Glycine max
  Clone ID: PAT_MRT3847_69712C.1
gtttttcgcggtaaaattctcgccggatttagtcttttcccgcgctcggtgcggcgtagagtgccggcggcggaggtctccttcgctcgctgagatatggaaggaggcgggaggcggatcacggtgagtccgcggccgtgctgcggccggcgcgtggtggcgaagaagaggcttcgtcaacagcgtcaagaagcttcagcgccgcgaaatcagctccaaccgcgaccgcgctttctccatgacggacgcgcaagagaggtttcgcaacattcgcttgcaggaagaatatgatacacatgatccaaaaggtccttcgtctgctgtattgcaatttctgagaaagaggtcaaagataattgagatcgttgcagcacgtgacattgttttt

SEQ ID NO: 109302 - DNA, 2104 bp, Glycine max
  Clone ID: PAT_MRT3847_69713C.1
cttttttttttttttttttttttttttttttttttttttttttttttttttttttgaacagagaaaagtgaacatttattcacatatttcactacatagagccgactccataaatgtaaatatagattacatcttcaatattgtggagaggtaccaacatactatcactttaatacaggggtgttgccacctacggattaaacttgcctaagacatgacaaaaaaactaaaaaacgaatgatacaataacacttaatggttacagctctcccaaaggttattattatcaggagaggactatcaccgcaaccatggataaatactaatgagaaaacacaaggcaagaataagcttaacagtgcattagttagaccagacatgaaccagaccgagcctattgccggtatagatctcgttgcgctcttcatcgtagaagagagcagtaatgtcttccaaggcttccgcaactgtgctcctaattctggaggaacgctttcgtttccctgaattgcaagcactacttgaacaattgtcatcgctgcaactgcattccttcaccatgggtaagccattacttgctcttatctttgcaagacacttgccagttaaaatgttgctgacattaatagaacctgcatttccttcggacaatgaatcatcagaatcggccttgcaatatgatatgataagatcctggtcactgggtatatatatgttgtttatattccaatcaggattgccacaagaggtgatcctcaaaagaagttacaagttctccacggaagttccacacagccacagttcggtttcgaaaaatcaaggataattgtttcccacatacacttctgaaagcttctgtttggttaaaaaatctcaggaaaaattgtttcagatatagaattattaattcaaaaagtggcatatattcgctttttttaataacagttagcttataattcctttcatcaagaatatggagattctcattttcatgattaacaagaagcttttcattgaattgttcaatgaaatccaccttcttattccgatgaaggagatggttgaacgatttcaaaacagtcccatcttctattgagaggattttcagtgggacatggctacttgatttagtaaaaatcaacaacatgatccctgggctgatcttaatctcttgtacatttttatctgaaatggagtacaacatggaatagtttttcaggtcaaacactttgtatatactatcttgtgcagagtatgtgagcaccttcccatttacatcatcaaactctacaaaacctggccactttaatgactcggattcaaaaagagcaaagccagcatccggtttaaccctccttatatattcaatccttgtacttcggcattttaaagaactgtaattgtctgatgcatagacagagactgtgataagtgagtcgttatttttattataaaacaaactccttataacttcatcaggactgacattcaagaagcatattctttcattggtctctcggctaaatgctgcacaaacaccggattgtgcaagtgcaaaaacaatgtcacgtgctgctacaatctcaattatctttgacctctttctcagaaatggcaatacaacagacgaaggaccttttggatcatgtgtatcatattcttcctgcaaacgaatgttgcgaaacctctcctgcgcgtccgtcatggagaaagcgcggtcgcggttggagctgatttcgcggcgctgaagcttcttgacgctgttgacgaatccgtcgaccagacgcggcctcttcttcgccaccacgcgccggccgcagcacggccgaggactcaccgtgatccgcctccctccgccttccatatctcagcgagcgaaggaaacctccgccgccgcaccgagagcgggaaacccctaaatccggcgagaattttaccgcgtgcggggatttagggttcggagagcgctggtcgcaaagtgcttactctaaactcttttcagttcaagttttcgatctcgttttcaaattttgggaagggaaacggaagaaaatgaaagaaaaagaatataatatttaacgcgaaagagacagcgtgcgtggag

SEQ ID NO: 109303 - DNA, 741 bp, Glycine max
  Clone ID: PAT_MRT3847_69714C.1
gcattccttcagacatgaatcatcagaatcagctttgcagtagatatgatagatcctggtcactggttatatatatattgtggtatgcagtcaggatgccacaagaggtgatcctcaaaagaagttacaagttctccacggaagttccacacagccacagttcgatttcgaaatgtcaggaataattggttctcatatagaaaaataaatgcagatggtgtcataaattcacttctgcaaacttctgtgtgttcaaaagtccgaacatcaagaatctggagattctcattttcttgctttacaagtagcttttcattgaattgttcaataaaatccaccttcttattccgatgaaggagatggttgaacgacttcaaaacagtaccatcttctattgaaaggattttcagcggaacatggctacttgctttagcaaaaatcaacaacatgattcccgggctgatcttaatctcttgtacatttttatctgccatggagtacaacatggaatagtttttcagctcaaacactttgtatatactatcttgtgcagagtatgtgagcaccttcccatttacatcatcgaactctacaaaacctggccactttaatgactcggattcaaaaagagcaaagccagcatccggtttaaccctccttatatattcaatccttgtacttcggcattttaaagaactgtaattgtctgatgccggacgcgtgggtcgagccgtaatccgg

SEQ ID NO: 109304 - DNA, 490 bp, Glycine max
  unsure (1)..(490): unsure at all n locations
  Clone ID: PAT_MRT3847_69715C.1
ttcccgggctaaaatanaatcatcaaacaagagcaaaggagtctgtatagaaaccaggatcgcccaaagaaactataaaatgtagaaaaaactaatatattcttaaaaatttaatagttaatgtgatataatttcagaaagttgtgcatgaccaattgaccatagaacatcacatctatggatggaagtgttttctaaaagtaaaaataatacaagcacggtaagaaaaattacctgatcttaatctcttggacatttttatcagaaatagagtacagcattgtatagttttttaggtcaaataccttgtatatgctgtcttgagcagagtatgttaataccttcccatttacatcatcaaactctacaaaacctggccacttcagagactcagattcaaaaagagcaaagccagcatctggtgtacccctccttatatatctgacaatgacacaaaatcttagcatagaacacaattcaaacctgggca

SEQ ID NO: 109305 - DNA, 437 bp, Glycine max
  Clone ID: PAT_MRT3847_69716C.1
ggtgagagcagaagcatcagagtgagaagggggttggggttgctttagcttttctgggtttgggaatcgttgaaagacagtggagaaaagcctgcaagagaattcaagacctaaacatggtaaagcttaggaagtgttgatctgcatatatagattcatcattcatctttgtttttctatgcttctctcttctttttttaacttctctgccacaacacacaccatcagataaaccgtaccactactactactccatccatccaaattttccactctctctacctctattacactgagacaaaataaaaataaaaaaagtggtgtgtgtgtgtgtgagagagagagagagagagttgaaaagcacaaaaggggtgtgactttgtctatcttagacaaatgggctaagtgttaggtatttctttagctcttttttgcat

SEQ ID NO: 109306 - DNA, 517 bp, Glycine max
  Clone ID: PAT_MRT3847_69717C.1
cagacgaaggaccttttggatcatgtgtatcatattcttcttgcaagcgaatgttgcgaaacctctcttgcgcgtccgtcatggagaaagcgcggtcgcggttggagctgatttcgcggcgctgaagcttcttgacgctgttgacgaagccgtcgaccagacgcggcctcttcttcgccaccacgcgccggccgcagcacggccgcggactcaccgtgatccgcctcccgcctccttccatatctcagcgagcgaaggagacctccgccgccggcactctacgccgcaccgagcgcgggaaaagcctaaatccggcgagaattttaccgcgaaaaacggggaatttagggttcggagagcgctggtcgcaaagtgcttactctgactctcttagttcaagttttcgatctcgttttcaaatttttggaagggaaacggaagaaaataaaagaaaaaggaaaaaaagagaaaataaaacaatatttaacgcgagagacagcgggtgtcggacgcgtgg

SEQ ID NO: 109307 - DNA, 354 bp, Glycine max
  Clone ID: PAT_MRT3847_69718C.1
agagtgtctaatgtaaatgatcgagttttgttgggtgacaacaaattcaggagtggacaatctgaaatgtcaatggagatgactcggggtcctcggggtcattacaacaattttcttctacaaccatcacttgttaaggatgcacttgcaatcacaatatgttgagacgaatatcacctttcagatttccatactgactacgaaattgctaaatgttatgtgattagaatctttcaatgaagatgacgttcataagagtgttaaatataatgtttggacaagtactccaaatggaaataagaagttgaacgccgcattccttgatgcagaagctaaattgagacagacagggac

SEQ ID NO: 109308 - DNA, 1737 bp, Glycine max
  Clone ID: PAT_MRT3847_69719C.1
cacaaggcaagaataagcttaacagtgcattagttagaccagacatgaaccagaccgagcctattgccggtatagatctcgttgcgctcttcatcgtagaagagagcagtaatgtcttccaaggcttccgcaactgtgctcctaattctggaggaacgctttcgtttccctgaattgcaagcactacttgaacaattgtcatcgctgcaactgcattccttcaccatgggtaagccattacttgctcttatctttgcaagacacttgccagttaaaatgttgctgacattaatagaacctgcatttccttcggacaatgaatcatcagaatcggccttgcaatatgatatgataagatcctggtcactggttatatatatgttgtttgtattgcaatcaggatgccacaagaggtgatcctcaaaagaagttacaagttctccacggaagttccacacagccacagttcggtttcgaaatgtcaggaataattggttctcatatagaaaaataaatgcagatggtgtcataaattcgcttctgctaacttctgttagctcaaaagtccgtacatcaagaatttggagattctcattttcttgtttaacaagaagcttttcattgaattgttcaatgaaatccaccttcttattccgatgaaggagatggttgaacgatttcaaaacagtaccatcttctattgagaggattttcagtggaacatggctacttgctttagtaaaaatcaacaacatgattcccgggctaaaataaaatcatcaaacaagagcaaaggagtctgtatagaaaccaggatcgcccaaagaaactataaaatgtagaaaaaactaatatattcttaaaaatttaatagttaatgtgatataatttcagaaagttgtgcatgaccaattgaccatagaacatcacatctatggatggaagtgttttctaaaagtaaaaataatacaagcacggtaagaaaaattacctgatcttaatctcttggacatttttatcagaaatagagtacagcattgtatagttttttaggtcaaataccttgtatatgctgtcttgagcagagtatgttaataccttcccagttacatcccccaaaagttctcaatagcagatcagaataatcaatgtacccactatgaaaatccaataagaataacacagggcaacagtaaattcaatactacattcatcagttagaccagacatgaactagcccaagcctgttgcctgtatagatttcattgcgctcttcatcatagaagagagcagtaatgtcttccaaagcttctgcaactgtgctcctcatcttggagccatgttttctcttctttgaattacaacaatagctacgagaaggtttgtcactgcaactgcaattgttatccactggaaagctgttgcttgctcttattttggccagacacttgccagttaagatgttgctgacgttgatggaacctgcatttccttcagacaatgattcatcagaatcagctttacagtaggatatgataagatcctggtcactggttatatatatattgttggtgttgcagtcaggatgccacaagaggtgatcctcaaaagaagttaccagctctccacggaagttccacacagccacagttcgatttcgaaatgtcaggaacaattggttctcatatagaaaaataaatgcagagggtcatcggacccgccgcctgagcgccgcac

SEQ ID NO: 109309 - DNA, 680 bp, Glycine max
  Clone ID: PAT_MRT3847_6971C.1
ggctcgagaaattatggtagtcttccctacttaaattcccattctctctctctcttcctcatctcatctcatctcatctcgaacaccataaaagctctcgttgaacaacagacactttctagttcttgaagcaacaactccatcaatcccaagttagaaaccaaagcaacatgccaacataaagtaaataaccaagactcgctctgtcatcattgcgcttgaatccaaccaaaacaaaaccactcgtggcttccattatcggaagattctcattctcctccttataagaccttatctacacagcttgctagaatagatatggaaattgaatcggtcaagtgtgagtgctgtggcctcaaagaggattgcacccaagaatatatccgcgatgtgaaggctaagtttgacagcaaatggttatgtggtttgtgctcagaagcagtgagagatgaagttaacagagcgaaaaggccttttgctatggaggaagctgtgaaggctcacatgtcattctgtgggaagatcaaatcgaatcccgcagtaagagtcgctgatggcatgaggcagatgctaaggagaaggtcaactgacttgtcttcatcgtcaagcaagtacagtggcaggtcaaacaccacttctcaagtcactgattccttcacgttcccattgcacccatgaaa

SEQ ID NO: 109310 - DNA, 460 bp, Glycine max
  Clone ID: PAT_MRT3847_69720C.1
ggggggcgctaatttttacttcctcttttttaatgaaagggggacacttcttctttaatacattaaacaacttaataaacatatgggcacactgggcaaaacgatgacattggggggttctattttgggatcccttagcgaagatctactccgccttctataataatttctgggaggcgtgacaggggcaaataaactattcaatacttggggctggtccttcttgagttatgaggggtctcacgagggtcagaataatcagatgagtaagagtgcgcataatatctacttttttcgcttctatgagatccatcagcagcactagaatccttcaatgagtaacactggttttttctgggtctggtatccatatcactttcagggagcgcaaaaccctgggggggatgggggacttttgggtcattcttctattagatcatccttggggggatcaaaatct

SEQ ID NO: 109311 - DNA, 553 bp, Glycine max
  Clone ID: PAT_MRT3847_69721C.1
ctttatcgcgtttgcggacgcgtgggcggacgcgtgggcggacgcggggggagaacttctctttcagtattgtcaaattgctttttcaaaaatgccagctaaagctaatgcaattggtattgacctcggcacgacgtattcgtgtgttggagtcttccagcacggaaaggtggagatcatcgcgaacgaccaaggcaaccgcaccacgccgtcctatgtcgcgttcaccgacaccgaacgtttgatcggcgatgcggccaagaaccaggtggcgatgaacccatccaacaccgtgttcgacgccaaacgtctcatcggacgcaagttcgacgacccggcggtgcagtcggacatgaagcactggccgttcaaagtggtgcagggagagggtgctcgtccgaaagtgatggtggaagtcaaaggcgaggacaaagcgttcttccctgaggaggtttcgtccatggtgcttatcaagatgaaggagacggccgaggccttccttggccagactgtcacggatgcggtggtcacagtgcccgcttacttcaacgac

SEQ ID NO: 109312 - DNA, 282 bp, Glycine max
  Clone ID: PAT_MRT3847_69722C.1
gcaggctaccttactgtctatccctaatctttgatattcatctgtgcaccaagttccattgtattagagaaaacgctgactatatactccattgtggctggatataaggcgggtccaaccaatggcaacattacactggaaaacccctcaatggatattgctagtcttaacaatgctaaaaccagctatactgcctgggacaattaccagcaccatatctatgaaccaggccttaatgatatggtaaaacagtatcactgcatgaaccttttttatagcact

SEQ ID NO: 109313 - DNA, 277 bp, Glycine max
  Clone ID: PAT_MRT3847_69724C.1
aataactacattttccctatgtctttcgcccctactctacacaaaaatatattattagcgtggagaaggtgaatactgcgaagaatggagagcttatattgcctccggagttacgtttccacccgactgatgaagagctggttatgcaatacttggagcgcaaggatttctcctgacctgtgccagcctgtattattcctgagcttcatgtacgccagtgtgatccttgggatttgccacgtgatttggagcaagagagatacttatttagcaccaa

SEQ ID NO: 109314 - DNA, 418 bp, Glycine max
  Clone ID: PAT_MRT3847_69725C.1
gccctcttcctatgatacccagctctgttgaaaatcttgccactgataatgaaaaaggggtggtgcatcgccttggctctgactggaaccaactaccgccagctgggggtgcaggcgggcaggaaaaatgagcgtgtgatggccaccgagagagatcaagttcacatacctaatcacctcaactaggctacatgggaagatctgttagattatagtggtctacggccaacgaaacctgcgttcaatgaggatggtagatatcatatgtaagcgcaaaaaaagggagagattgtctgcacatgctcatttcctgaaaagcacgcatctattgattctgacatactaatcaaacagaccaaggtgaatgcagggacgggaacaacaggaagagatgaggtgtctattctgaactatgcaa

SEQ ID NO: 109315 - DNA, 227 bp, Glycine max
  Clone ID: PAT_MRT3847_69726C.1
ggctcgagctcaagccctgcctgcaattgttaatattgtcttcgcaacgcaacataagtactgggatcttgggggacacggcttgaagaataaaatagtagcgaacaacattccttgtctaactgctgggcctcccgtttacgttacggtatcttccctacgaagccctaaaccaacctgacggcgcaagagaagagcccggatttgttggagaccaccatcgtcga

SEQ ID NO: 109316 - DNA, 1193 bp, Glycine max
  Clone ID: PAT_MRT3847_69727C.1
tttttgatttagcaataaagattccgtattcaaatgctaatgatatcttggcataataaaggtatccatttcatatttaacagcattaagcttgcaaacttgcaacaatgcagtgagagagaaataaaccaaaaaagtaaaataaaagaaagaattggtccaggtttctcttattatatttctctcactttttccttgcattgctgcagtaactattgaaaaattgcaactcctcaaatacgactttcgcagaacattgcatactatagcagtcgagaagaacaactaacaataatgcctgtaaacagtggtcgaacgcaatccgatggtgtccttatttaacaacgaaagtctacatgtatgaccaacataagcaccatgggtccaaaagacaaaaacacaagcttcataacagtaggaggagattgcattcagcgaagtttacaggatgctatcctacaatcccaccttcgttacttagtgcgcactacgcataattccatgcaagtaaccaccagtcattatgagggacacaagtgacacaacacctgctggaaagacctttcctgatttcttgaaacgagaacccatcaccccaagaagtgcagcagatatgccaaggccaacagatgatgcgaaaacagggcttccaggtagctcagtataaacataatacagcagtgatgcagacaaacccccagccaaaagtgacttgttgctgccactcttgagataacccattacaccacccactccgacgagtgcagcataagctagagtgaatttctgagacattaacagagccattttcctcttgtcaccgtcagatccttcctcgcccttgctattatcacctcctccttctcctccacctccacctccacctccacctccaccgccgcctccgttaccgttggcaccgccgccgctattatcgagatcgggttgagttaggtcaagcgaagtagcggccttggagtcggaagtgacagcggcgtgcacgtgtgggttggaacgtgtcaaggaaccgaatgcagcagcagggaaatgagattgagagcgaaagagagagatattattggaagatcgagaaaagattgtgggcctagtaagagagaatgagcctgaaacaccgaacccagccacacccacagactctgccattgaccttctccgtttcttctcgagccatt

SEQ ID NO: 109317 - DNA, 1661 bp, Glycine max
  Clone ID: PAT_MRT3847_69728C.1
gcccgccctttttttttttttttttaaaaagaaagggcaaattaaaggtccttttttctcttatatatttctctcactctttccctgcatactgaaaaattaaaaacaattgcaactcctcaaatacgacttgcgcagaacattgcataacaatcatgcctgtaaacgatggccaaaccaacttcaaactccgatgtccttatttaacaacaaaagtccacatgtatgatcaacataagcatcaagggtctacaggacaaaaacacaagcttcacaacagcaggaagagattgcattcagcgaagtttacaatatactatcctacaatccaccttcgttacttagtgcgcactacgcataattccatgcaagtaaccaccagtcattatgagggacacaagtgacacaacacctgctggaaagaccttcccggatttcttgaaacgagaacccatcaccccaagaagtgcagcagatatgccaaggccaacagatgaagcaaaaacaggccttcctggtagctcagtataaacaaaatacagcagtgatgcagacaaacccccagccaaaagtgacttgttgctgccactctttagataacccattacaccacccactccgacgagtgcagcataagctagagtgaatttctgagacatcaacagagccattttcctcttgtcaccgtccgatccttcctcgcccttgctatcatcacctcctccgcctcctccaccaccgccgccgccgttagcgtttccgttagcaccgccgccgctattatcgagatcgggttgagttaggtctagcgaagtagcggccttggagtcggaggagacagcggcgtacaggtgtgggttggaaggtgtcaaataaccaaatgcagcagcagggaaatgagattgagaggcaaagagagagatattaatgggagatcgataaaagattgtgggcctactaagagagaatgagccaagagttgaaactgaaacacccaaacactctgccattgacacccttctcctcccttctttcgatttctttcaaccattcattctctcacactttcttagagagttattaataataacttgacggtgcgccagattccccgtcattgagtaacgatcggcccaatcgattactttctggaagcgacaaccactggtcgaagagcttctcgatgaaattgaggttagacttgagagccaaaccggaaaactctggaagctgcaacaattcgaggtccaacgacgccgcatcagtgacgacctccatgttcatctaaaccaatctcgttcctctatctctcattcacagaccaaatcactcagcacgaagatcaacacgagtcctcaattttatttttcctttctcctttagaaaaaattgcagcaggttgaatttcaatgcctccgacgaatcgaagcctataacaaaaagatactatacccaaagggaacaaatgcggttgagatattcggattgggagttgcggattcagcctgaaccctagatttattcgtaattataatttcgaatcaataaattaacaacaaattatgtacggtgatggtgatctggtgaaagatgtggaatggatagaaagtgaaggaaaatgagagaaaattatttctcgagccattgggagagaagaagaa

SEQ ID NO: 109318 - DNA, 315 bp, Glycine max
  Clone ID: PAT_MRT3847_69729C.1
ccacctgaacaactcacctgctttcttatcccttccctacctccgttcacttaagacctatgttaaacttcaccaaacccctaccctctcgcggcttccatgtcacccttctcctcacaccctacaactaaaccttacttccaaaaaactattcccctcttctccaaactctactcctcccctaacctcagttccctaaccctaaccataacaatctcttatccatatcaaccttcattactcaccaccactaccctatcattattgactcatcccaatcccattccattcctactactactacttatatcaaat

SEQ ID NO: 109319 - DNA, 361 bp, Glycine max
  unsure (1)..(361): unsure at all n locations
  Clone ID: PAT_MRT3847_6972C.1
ctgcagtggaacatcagccatttctgaataattatatatgtaaaaatgattcatggatactggaatacacctagagattgaaaacgtgaagaatgacaagttacttaaataactccggtagaatcaataatatgacgtgaaaaaaaaaactgaaaaaaatggcgcctccatatttaactcctcaacgtttatacaggccccaaagggaaacaattgaacggacacaaacaccatgacatacagaaaataaactatttcccaaattaggtttaaggctctgggtttacttgcactgttatacatgctgacaagggcattctgacangatttgaacaactgtggcctctttttcctggatgct

SEQ ID NO: 109320 - DNA, 480 bp, Glycine max
  Clone ID: PAT_MRT3847_69730C.1
cgagaagacgacagaaggggtgatatcattttatttggtaattgaagtgaatgtgaaccttttacccatgcgattttttttaccaatatatttttatatattttatttatttatatatatgtcggggtagaaggtgtcacatacagggtagaaggagaagagcacaaggcaaaatgtgttctacttctctttgggtgagttctacttggttttgaagtgacacaatgactacgaaaggctttttacttcaatgtaatgacgaacaatgagagtgtgtgtggtgattgttcgatggcgagggagtggtgtgttagagatagggagagcaacatgaagaacatgaagactaaagcttgaaacttggagaaaagcttgaagatgttttttcttttacatgcccaactccctcgagtggaatttgtattagttgttatattgaatgttgcatcttagtccatatcatatcttttgggcattatg

SEQ ID NO: 109321 - DNA, 354 bp, Glycine max
  Clone ID: PAT_MRT3847_69731C.1
cccacgcgtccgctcagacactgcgttgactgatatgttaagaaaatcaaatgatgagggaaaattggctataaaaaaaaaaaagggacgagacaaaaaaaaaaaaagaaaatgaccggcacaaacaaagaaacccaaccgaaaagagacaataaaggacaagggcgggccctccttaggcccccatcaaggttgaaccccagccggcatagaggatacctggcttggccaacccaacttacttcaatggcacacttcctggagacaatggatgtgaccctcagggactagctgaggacctagagaactagaggtgggacattcaagccagttcgcagaatggacgttgggcca

SEQ ID NO: 109322 - DNA, 248 bp, Glycine max
  Clone ID: PAT_MRT3847_69732C.1
ccctcgcgtccgcgaggcaaccctaggtagaaaaatgtagatatgttgctgtgtggcttggtgatttgaagaaacgtaaacaacatctcgcagcgtggatgatcgtgttctatcccacccacacagagcacaactgatcacacatatccatcttctaatgcccaaaaaacctgatccacctaattgacacgatacccgttaactttataaagaacacactcacacccctggaactgctactacaaaca

SEQ ID NO: 109323 - DNA, 273 bp, Glycine max
  Clone ID: PAT_MRT3847_69733C.1
tggatcctctagagcggccgccggggccggctctcacaggatctatgatggtcaaatcgtccaccttgaccccgccaacctcatatgaggctaaggacccatgtgaatcatgtgatatatgccgaacctagcacggttgcaccaagcctatcctcaggacgtacagctagtccatgacgatgtcctggtgttggtcctgcacgcgcaaagctgcacgaggtacgccagactctgctttatgcgatgaattgtcctctacaacgtctgcgtcac

SEQ ID NO: 109324 - DNA, 260 bp, Glycine max
  Clone ID: PAT_MRT3847_69734C.1
atctcatcttctttatggaactgaacacccttctattgtaagaatgatgttggatagtggctgttccacttatatgatctcatgatggagcctggctatgtttataaaatctggctgactaaattcaatgtagttcctccgtcactcactttccttctttggatgccaacaccctttgtagttaatgctcactcaaaagaagacaataaggactgtgtctggaaccttccaaaccactatgtaatgatgtgaacctctat

SEQ ID NO: 109325 - DNA, 195 bp, Glycine max
  Clone ID: PAT_MRT3847_69735C.1
tgggagggttagattcgttgatgttgttctaaaacgtcgacacattctccgtcgccacaacagcaatggctccgaacaaaggtgtgaaacgttcggttgacagcacacaataagaacgttcacgaaaacgtgacgaatcctttgttcgagaagcgtccgaagcaattcgggatcggaggcgcactgccgtcgaat

SEQ ID NO: 109326 - DNA, 546 bp, Glycine max
  Clone ID: PAT_MRT3847_69736C.1
aagggcagggaaaacccccatcaaaaaaaaaaacccgcaaaaaaaacgaaaaaacccaaaacccggaaaaaaaaaaaaaccatttaaacaaaaacgggtcaaagagattaaatcaaaaaccaaaaaaaacaacagatcttaaaattctttaaaaaaaaaaaccccctaaaaaaccaaggggggaaaacgaggggtccaccggcccccttgatctttttctaagggaactgggaaaaaagctgggccttgacaaaaaaaggggggtttggaggaaaaacccctttacccaaaaccttaaagaaaccgaacggggggacatcgaacaagggggccttgggggggggggccttgtctttggcccccggggggaggagggaccacaacttggcaatggtgaagaacggattgaaaaatttggggcaaagtttggggaaaaaacccatgcccaccctcccaaaaaaaccaggagggtccttggcaaaaaggatacgggggggaagcatgccaccggggttaccggaacccccgggatgctgggggggcttt

SEQ ID NO: 109327 - DNA, 159 bp, Glycine max
  Clone ID: PAT_MRT3847_69737C.1
acgcttacgcttttgggaagaagaaaatgaaggccatagtgataactaggccaggaggtcccgaagcgctccaacttgaggaatttcaagatccttaagtctgctattaccagcttttaatatttagttcatgcccttacctttttcacagccctttcc

SEQ ID NO: 109328 - DNA, 332 bp, Glycine max
  Clone ID: PAT_MRT3847_69738C.1
ttttacaggaactcccatgcttgtcggttcactaaatataggctgtgtctcactggatacttccatctgaattgactcaagaaatccagataacagcttactctgataccctatccttaactttgaacttactgaaccaaggcctaacgatgtgtgaaggggctccgaagccttattacatatatatgctggccaagagagatgaactatgacatgtctagacgacatgtagagctccctgtcaaaactatatcctatggttctctaaataccacgaggtgcaggcgaactagtctacctacaacatgagatccgatcaccgtttattatca

SEQ ID NO: 109329 - DNA, 343 bp, Glycine max
  Clone ID: PAT_MRT3847_69739C.1
cgaacacgcctccgctcggtcacgcaaaccatgcttctggttttctttccctcggagcctccaatcgctgccagcacagatggctgcttgcgaagaatcataaaccactcaaacgggcgtcaatgcgttaagagcagacttcttactacatattggatcaggagccagaccaagtgcacatattgtaccaagagtgtcacatgctaagtcgccctgaagaagatggtaccatgacaatggggactactactctggaaattaataaacagatactctatatggactacacaagctatagggtggacattctgagtgctgataccgcacacttcattcaaggatt

SEQ ID NO: 109330 - DNA, 136 bp, Glycine max
  Clone ID: PAT_MRT3847_6973C.1
gggccaacgagccttatgctttgtgagggctggcaagtggctcagccaaccgtgtccaacttaactttcggatgcgacaaggttccacatccgatctaattgaagcccggtcgactttaacaaagacagaattata

SEQ ID NO: 109331 - DNA, 542 bp, Glycine max
  Clone ID: PAT_MRT3847_69740C.1
ctaggaggggtgctcatgtaggaaatgataatgtgggttctggtgctagtggtaatgttaatgctaatgctgcctctgctgtgctggctggtgcgaggggggagtctagtaagaaggctgcattgggtggtttgaggaggcggggggcaggaaacttggggaagttggatttgaatgtggagtttagcaatgaggtggaggagccttcccgtggagtgcacaaccgcgaagggaatgctgctggacatgctgaggataatattgaagggattgggttttttgaaggccttgatgagttcctcagtagcttgcccattctcaatgttgtggcagatgataaggcttaaaaacatctttaaatggcaatatctgggatgtggcgatacctgttaggtccttggatttaggtaaactaccatgtatgtttgtgttcgttatgcaaaaagaagatgagctatagtgaattcttgtcactgttaaattatataataatttgcggcaataatctccttactttggttttgaactatttgaggaggatt

SEQ ID NO: 109332 - DNA, 787 bp, Glycine max
  Clone ID: PAT_MRT3847_69741C.1
ggcagggaccacaattacctattgaggagaaacaaaggcattgggcactagcgtctcctggctaatggtataatccaggatagtttgatgccgaaagatggcaatgatggtttttttccaaccactggaaatgaactaaaacctgaagctataacttcaaatcgcaagtatcgtgtaagagtgttagtatgcgccccatcaaactctgcccttgatgagattgtgttgagggttttcaatggagggctacatgatgaaaatgaccatgtttattgccctaaaattgtgcggattggtctcaaagcacatcattctatcaaggctgtttccctggatgaacttatgaaacaaaaacgttccagtgccaacaaatcatctaccaataaacagagtaacaacggtcccgcaggaagtaatgatgatagtctccgggctgcaattttagatgaggccacaattgtcttctcaactctcagctttagtggttcccatgttttcagtaaactaaaccgcagctttgatgttgtgattatagatgaagcagcacaagctgtggagcctgcgactcttgttcctttagccaatcaatgcaaaaaagtttttctggttggcgatccagctcaactgccagctactgtaatttcagacgttgctaagaatcatggatatggcacaagcttatttgaaagattgaagcaggctggttatccagttaaaatgttgaagactcaatacagaatgcatcctgagataagaagctttccctccaggagttttatgaagactc

SEQ ID NO: 109333 - DNA, 346 bp, Glycine max
  Clone ID: PAT_MRT3847_69742C.1
tttcccctgtcatcaccattcgttccacttttctttcttcctattccattttttttccaccaagtttgaagctttccagtttttcaaccacaccgatcttcttcttgtcactaatttagagtacaaatcgaaaccgtagccataagcaaaacacaagacaatacagatcgaaattttcagactccacactccctttattcttcacctccaaggttccggaaaggaattgaaattgggaacgaaattctgaggatgctttggggaaaatagtgaaaaaaaaggggggaaaggaggtatatttattaatttagttgggtatatttaacaattgccttgacctaatcca

SEQ ID NO: 109334 - DNA, 839 bp, Glycine max
  Clone ID: PAT_MRT3847_69743C.1
aattcggctcgaggcttcattgtttacacgaagccaagggcaaacccaatccaataaacaacactgttcagagacccgtgagtcttcgtcagttccaattcgttaccgcgaaaatgaacgaacccacgagaaaataccgcaagaagaacgaagaaggatcaagatcaacccagaagaataacaagaagaaagaactaaagagcatcctcacttcgctcttgttcgtggatgcaggagagaaaaatgaagaacaacacaagaaaaaggaggacttgatggacggttactacagcgaggtggaagaatccaattacccgaaaaagagaaagaaactcgccggcggtgactcggggagtctccggcgagtctgggtgaaggaacgttccggagcgtggtgggaggagtgtaacaaacccgaatttccggaacaagaattcaaaaaagccttcagaatgggaaggctcacttttgaagcgatttgcgaggagctgaattcggtgatagcgaaggaagacacgacgctgagaaccgccattccggtgaaacaaagggtggcggtttgtctgtggcggttggccaccggcgaccctctgagcgtggtttccagaagattcggtttgggtatatccacttgccacaaactggttctcgaggtctgcactgccataaagacagtgcttatgccaaagtacttgcaatggccaaatgtcgttaccttaagggacatcaagggtgagttcgagaacatttctggtatttccaacgttgtggggtccatgttcacttcgcatgttcccatcatagctcctaagatgagtgtttctgcttacttcaacaag

SEQ ID NO: 109335 - DNA, 775 bp, Glycine max
  unsure (1)..(775): unsure at all n locations
  Clone ID: PAT_MRT3847_69744C.1
attcccgggnnntcgacccacgcccggacgcgaaacacaaatgtagtattgttcccctaggcgtcttaaattctatcttcgagcttgcctctgccaactacatttgaattttgcgcaacctcattcttatttgttatattaaattaaattgatccaggggaaatcagaaatactctgattgacttatatatggatcttattaattgaaacgaaattgagttgtctgtagcgacgatgagttgcttttcgtgctttgtttctcgtgggaaagatgtgagaagggttgaaattgacaatggctctcgatctgctacttcttcttctgaggggaaggggaagaagagtgtgagtaacaaaggaactagtacggcagcggctagttttggttttcgcgaactcgcagaggcaacgaggggtttcaaggaagtgaacttacttggggaaggtggttttggaatggtttacaagggtcgtctttcaacgggagagtatgttgccgttaaacaattgattcatgatggtaggcaaggttttcatgagtttgtgacggaggttcttatgttgagcctgctgcacgattctaatcttgtcaagttaattggctactgcactgatggagatcaaaggcttttggtttacgagtacatgcccatgggttcactcgaagaccatctttttgatcctcacccagacaaagaacccctaagttggagtactcgaatgaagattgctgttggagctgctcgtggcctttgatatctccattgtaaagcag

SEQ ID NO: 109336 - DNA, 261 bp, Glycine max
  unsure (1)..(261): unsure at all n locations
  Clone ID: PAT_MRT3847_69745C.1
caaaaaaaaaaaataaaaaaaaaaactaaaaatttaaaaaaaacaaaactaaaatcaaaacaccggaggctcttaacaaccgcggcagactncatactacctatgattaatctactaatttatatactccccaactatccaaactccaacaatcccaacaaaacccttatcatttccctcccctataccaattacaccaacataaccagctcaacatgaaaccaaagataacgtccctctttctctttttggaggttcagg

SEQ ID NO: 109337 - DNA, 2005 bp, Glycine max
  Clone ID: PAT_MRT3847_69746C.1
ccacgaagctcgggatgggagtgagttcttccggaactaacagacaaaacacaacacaaattcagattgtttcctacgcgtcttaaattttatcttcgaggttgcatttgaactttgcgcaacctcattattattaaattaaattcattgatccctcgcctagagaggggaaatccagaaatactctgattgacttatatacggatcttatttttttttattatttaatttaaacgaaatttagttgtctgtagcgccgatgagttgcttttcgtgctttgtttctcgccggaaagatgtgagaagggttgaaattgacaatggctctcgatctgctaccgctactgctacttcttcttctgagagtgaaaggaagagggaatcctcagaggggaaggggaagaagagtgtgagtagtagcagtaacaaaggaagtacggcagcggcaagtttcggttttcgcgaactggcagaggcaacgaggggtttcaaggaagtgaacttactcggggaaggtggttttggaagggtttacaagggtcgtcttgcaacgggagagtatgttgccgtgaaacaattgagtcatgatggtcggcaaggttttcaggagtttgtgacggaggttcttatgttgagcctgctgcacaattctaatcttgtcaagttaattggctactgcactgatggagatcaaaggcttttggtttatgagtacatgcccatgggttcacttgaagaccatctatttgatcctcacccagacaaagaaccactaagttggagtactcgaatgaagattgctgttggagctgctcgtggccttgaatatctccattgtaaagcagatccacctgttatctacagggacttgaaatctgcaaacatcttgttagataatgaattcaacccaaaactgtcagattttgggcttgctaaacttggacctgttggagacaatacccatgtttcaaccagagtgatgggaacatatggttactgtgcgccagagtatgccatgagcggcaaattaactcttaaatctgatatatatagctttggtgtggttttgttggagttgatcactggacgtagggcaatagatactaatagaagaccaggagagcaaaacttggtttcatggtctcgtcaatttttcagtgaccggaaaaagtttgtacaaatggttgaccctctgttacacgaaaacttccccgtgcgctgtttgcatcaggcaatggctataactgctatgtgtatccaggagcaaccgaaattccgtccacttattggtgatattgttgttgcactggaatacctagcttctcatagtaatccctgaagtccatagacatggtgggcgcagctcaccacaacaacctccttttgaaatggacaggaattaatattcaaaggtatctgattctagcttgagctcccatttctgtatgattctgggtaatgatttccttaccggtttggtcagtgtaagctaccaacttggctatttaaagtgtcatatgttattgctttaattaacttattgccacagcagtagtgaagataaacttcttgatatagcactagtaaacatgtggattgatttaattgcaatggatgagtttatgcttatttagacagtgtcatatgttattgctttaattaacttattcccgacattgattttgcaacaccctagaccagactggagctggagtgttattgagtgacggtagctctgatataaaataaatgaaagttatggtatatatagagagagcggggatatatgcttgagattgtgcttatacggtactttcttcttttctctcgggtcttgttttaaggataaattagcggcaatatgggtgtagcttgtacctatttttttatttttttattttataactagcttgtacctatcctggtgatgccttgttgagctttagaccaaaactgaagctttttgttataaagtactgttatttaatatttacacaactccctc

SEQ ID NO: 109338 - DNA, 2844 bp, Glycine max
  Clone ID: PAT_MRT3847_69747C.1
cagtcatccaagccaaaatacgcccccttgccaggaaccacttatatgtggcgtattttggcttggatgactgtttcaagatcaaaatgttcgtcagggaacccctctttcatttcattttcgttttctctctcttctttctttctctttaaacgccgaccaacgacgccgacacgacacacgtttcgatggtggtgaagatgttgcggtggaggctcgtggcccacactcgtcccgaagaagtacgaggttaaggtcgtcgtgaaaaccctcactctccagggctgcgatctggtgcgtgcgtcagcagagcaaggcttcatgtttcggataaagtgtaagggtccaaagcttcgactaagctcgctgagacgcatcgcagtgctccgatctccaaagagagtcgaaggggtagaaaagcgtgcccaagcaatgggggacctcacgttgatgctggtagctggcagattattttttcaccctcacaatagaatatgcctcttattgctggattagcactttctcgcacatccttcattaaaggcgcaaagagaaatataccttgactttggactgcaactcagagttttacagaatttccattgttgcttgatcaacagaaaatgggattgaccatgacactcaaattgtcgcagaagtatgttgtgagagtgactatcaaacccaggatgtctataggggggagggagcttccaaagaatgcagagaaagcagcttgacagcaatcactattagaggattgcgaggagatgtcaattccgctttttcgtcattaactcaatccccgattggatgatatggttgagaaagagtttctctagacggtggtgtcccagcctcgtgttgtgcctccagtagttgctgtacggtccattacgaaagcagagactgtcgcccatgaggtagatgggagttacgcataatgtttgtacgagggttgatgatagtgattacattttgctatttgacatggcttttcataatgagtgcgatgagattagtcgtgatgggaaagagggcgcttgcattggcgaaatgtaaattagtaatggtacatggaaatatccttttgctcacctttcgagttgaatatgattgactttacatcattgacactttgggagagagactttatgaagggtgcaaccaggcatatatcttgaaatttgacagcaacacaatgatgtacaaaacgccaaatgttgctcattcatcagacgacaagacatccaatgaccagcaaactgtaccagaaatctgagctcctaattctagtcgggccccactgttgaagaacgcttatggggatgctggtggtgatgacatagattatgatcgcagtcagcttagctcagaagaatccctttcacttgggaagactgaggatgattcgtctgcaaatcgatcatcagtgtctgaattcggggatgacaattttgctgttgggagttgggagcagaaagaagtaacgagtcgtgatggtcacatgaaacttcagacacaggtcttctttgcttcaattgatcagcgcactgaacgtgcagcaggtgagagtgcatgtaccgctcttgttgcggtgattgctgactggttccaaaacaatcgtgatcttatgccaataaagtcccagtttgatagtcttattcgtgaaggctcattagaatggaggaacttatgtgaaaaccagacctacagggagcgattccctgacaaacattttgatcttgaaacagttgtccaagccaaaatacgccccctttctgtggttcctggcaagtccttcattggattttttcatccagaaggaatggatgaagggagatttgattttctgcacggggccatgtcttttgataacatctgggatgagattagtcatgctggacgggagtgcactaacaatgatgaaccccaactatatattattagttggaatgaccatttcttcatcctcaaagttgaagctgatgcttactgcatcattgacactttgggggagaggctctatgaaggatgcaatcaggcgtatatcttgaaatttgacagcgacacagtaatatacaaaatgcaagatgttgctcgaggttctggcaaaaaaacagccagtgatcttcaaactgttgcagaagtattagagcagaatgaaaggcagatccagccaatcaatggtaaagaaatggattcttctgtggagacagaagaacagttgaagagtgaccaagaagaggaggttgtgtgcagagggaaggaagcatgcaaagaatacattaaaagcttcttggcagcaatccctattagagaattgcaagcagatgtcaagaaaggtttaatatcatcaactcaaacaccatttcatcataggctacaaattgagtttcactacactcagttgttgcagtcttgtgttgcacctccagtagtggctgaaccatccatgactgtgccagagactcttgctcttgcagtaactgaggtttccgcataattgtactactgtaaattgaagaaaatgcgcgtctattctaacttattttactactttaaccattgatgttcttctgattttgaagtgaatttaattataacatatggaggctcgtataagcttttggtgcgagcaatgagtgagctgagcttttatttgcgcagttctgtttggcacttgccttgttttatatatacctgtaatctttcttgggaaggttattctgtaaatggctctgtaatttcctttttcaagtgagtgcatacttttggcatctgaaatgtaagttctaaacagattctactcttaaatggcaggtaactttagtttttacggac

SEQ ID NO: 109339 - DNA, 396 bp, Glycine max
  Clone ID: PAT_MRT3847_69748C.1
gaaagaagtagacggctttgtagttttctaacacttgcaaggtccagcagctgtttgacaacaattgccactgtcccctcctctcctcctctcctccgtgtttcttaggtcaaatccaaccaagctcccttgtctccacctctctttcctcgttccctccgaccgatttttaattacgattgcttcctactcctgttcctgcattttcaacttccatcactctctcacaggtctcagattcttcattcttcacacaacacagatttctctttgatgggttccatctcgcacgtgatcaccacaactcttcctcacctaccgtctacacgctccctcggattcccaatctcccactccaattcgcgtcttctctcactgccacccaccagagtcgcc

SEQ ID NO: 109340 - DNA, 260 bp, Glycine max
  Clone ID: PAT_MRT3847_69749C.1
ggctcgaggtgagacttcgagctcactactttgttttcaggaccaagaatcagtgccacggcaggactttttttttagaacctgctacccaccactccagcgcaaagaggagctcccaccgggaaggaactacgaggaagactactcgctagagagactggaaatggccgccgactgccaaggcccaaacggccggcccaaatagacgatgaggacggctgtccgataaaaaaaaataggccagggctaactgaaagggc

SEQ ID NO: 109341 - DNA, 699 bp, Glycine max
  Clone ID: PAT_MRT3847_6974C.1
ataatttgttcatgtttgttcctccacaataacaattttcaaaaaaatcactatatattatgatgagaaatttatacattcaaaattgacaggtcatctctatgttaaaagtgatgtatatggatttggcgttgttctgctagaaatgctaacaggtagggcagctctagacacaaatcagcccgcgggtatgcagaatttggtggagtgcactatgtcatgtctacatgacaaaaagagactgaaagagataatagacccaaggatgaacgagcaatattcattaagggctgcatttcaaatagctcaacttgttttaaaatgtttagaaactgacccaaagaaacgaccgtctacaaaagaggttttgggaaccctagaaaaagctcgagccataaaatacaaacccaaaggaaagaaagtctgtcaaacaagtcagcgtcggtcaccatcgattcattacaacaatggctaccccaaatcacgaactaattctcctccacaataatacactatctaccatttatttttcagttacattgttagtcaatttcttaaggattcaataagtcttcaattatactttatgtgcatataggtacttttttttgttgtaaactttagaatgcatgttcaaatttatagcatactcagtcatgttttatgcaaaaaaaaatttatgggactgcctgtattgta

SEQ ID NO: 109342 - DNA, 451 bp, Glycine max
  Clone ID: PAT_MRT3847_69750C.1
tataataattatttaaaagttatatcaaattattaacaatcacttctggatgcttgatagtgaaatgtttttgtatgataagcatttaactcacaatacataagttgtcatatactataaactatgacttatgttaaatatgttaaactgaaaaccatgtgaatggagagatctacagtaacatattcttttttatgcttttatttactaatctcaccaattcaactgctataaactatgacttatgttaaatatgttacactgaaaaccaggtgaatggagagatctacaatcatgaagaactcaggaaacagttgcctaatcacaccttccgtacaggaagtgactgtgatgttattgctcacctgtatgaggagcacggagaaaactttgtggacatgcttgatggtatattttcgtttgttctgctagatactcgtgacaacagttt

SEQ ID NO: 109343 - DNA, 262 bp, Glycine max
  Clone ID: PAT_MRT3847_69751C.1
tttttccacttgtttaaaggtcttaggcatgactgcccataaaattatcactcatcctgacgtctttttgctggcctttatgtgatttattgttgttctcaactactttttcaatacacatatttatttctttgttacttgtccatacatattttcagattgtttgtaggtttttacaattagtttacatgagaggtcaagaaaaaacatacacgtgttatcaggttgcggacgatttgatctgttgcctttcatggattac

SEQ ID NO: 109344 - DNA, 470 bp, Glycine max
  Clone ID: PAT_MRT3847_69752C.1
gaaaaaataaatgtttttatttttcaaaaaaaaaaaaaaaaaaaaaaaaaaaaaaaaaaaaaaaaaaaaaaaaaaaaaaaaaaaaaaaaaaaaaaaaaaaaaaaaaaaagacaaaaaataaaaaaaaaacaaatggggcggccgcttaaaagaaacaaactaacctatctatagtttacaactccatatattttcttataacgtcactaaaaaaaaattaaatggccaaaactttaaaacttccaaacttaaaaaactttccccatatccaatttaatccacttggcccaaaacccattttccccaccatcgtaaaaacttcaaaaaacccgcacagatacactttctaaaaagttccatcacttaaatggaaattggaacccccccttaattggaccattaacctcggagctcattagttaccccccacctaaacccttaaattttcaattccctaacttccctttttt

SEQ ID NO: 109345 - DNA, 518 bp, Glycine max
  Clone ID: PAT_MRT3847_69753C.1
cccacgcgtccgtattgctcctggggacaaccttaaccattggccacaaaaactagagttcggctaccagtgactacttgtaattttccttccgatctctggtgttggaattcctgataacacaaaagatggctgaattattcatcttcagcatcgctgagtctctcataacaaagcttgcttctcattctttccaagaagcttctcgggtggtgggtttgtacgaccatctccgagaccttgaaaagactctctcattagtcaaggcagtgctgttagatgctgagcaaaagcaggagcataaccatgagctgcaggaatggctgaggcagctcaaaagtgtcttctatgacgccgaagatgtgttggatgaattcgaatgccaaacactgcgaaagcaagtgctcaaagctcatggtaccatcaaagacgaggtaagccacttcttctcaagttctaatccacttgtttttcgttccaagatggctcaacaaatcaaagatgtcagcaagaggcta

SEQ ID NO: 109346 - DNA, 360 bp, Glycine max
  Clone ID: PAT_MRT3847_69754C.1
gttaactcttgatgattattctggttttattgaaagaatttttttttaaaaaaaggcaaaccttaagggttctattccccgctggcattaaaggtttggttatctacaaattcaagagccccaaaccaaaggaatttggttttggccccccccccccgggaaaacaagagggggggaaagggacggacctccaagatttgtattgaaacactgttattgttttgggtgacccggacaaaaaatcataatttttgtgggggtgattattaatgaaatgttgctcccaaacaacccaggagctttggttgctcaaattctaaaaatgaaaagattgttgaaggcgggccccggacctacaac

SEQ ID NO: 109347 - DNA, 1660 bp, Glycine max
  unsure (1)..(1660): unsure at all n locations
  Clone ID: PAT_MRT3847_69755C.1
ggattgggaacgttatatacatgaactgctgaggatccagataccccagaactacaagatcaaagaaagcatcttcagcacctgtcagattctgtttcaactgattgtgatggtatgaatgaaaatacttctcaccgaattgctagattttcctgctctggttcaaatttggaaggtaaatttgatttagcagatttcaagtctcttgatcgacttctcactgaaaaggttggctggcaggatcaagccatatgtgctatcagtcaaactttgtccctttgtaaatctggtgcaggaaagcgtagaggctcaaatggtagagcagacatatggttggctttccttggacccgatagacttggaaaaaggaaaattgcttcagttcttgcagagactatatttggaaaccctgaaagcctaatctctgtggatcttggcttccaggacagcttttacccattgaactcggtttttgaataccaaaaatcacgttgttatgatgtgcttaggaggaagacaattttggattatattgctggggagttgagtaaaaagccacattctgttgtctttcttgaaaatgtagataaagctgatgttttggtgcagaatagtttgttgcaggcattaagaacaggaaaattttcatattcgcatggaagggcgattagcatcaataacactatctttgttgtaacctcaactgtctgtaaaggtaatgactcttttgttttggaatccgctaagatgttttctgaggaaagaatgcttgaagccaaaagatgccaaatgcaattattaattggacgtgcttctgaggatgccaaaagaattggtggcacaaatgttaaggttgtacccagaaaagggttttccaaatcatcatctctgaacaaaagaaagcaggctgatattagtgactccaaggagggagcaacaagcaagatgcagaaacaagacagcgaggcatctcgatcctttctagatctaaatatgcctgtagaggatggtgaagagggtgtcaatgacaatgaccatgaaagtgaatccatgtcagaaaacacagacgcctggttgagtgatttctttgatcaaattgacgagaaagtggtttttaagccattcaatttcaatgagcttgctgaggaagtattgaaaagaattggcatgctatttcaaaggacattcggctcagagcttcagctggaaattgatcatgaggtaatagcatacatactcgcagctgcttggttatcagacaagaaaaatgcagtggaggattggattgaacatgttcttggcaaaggcttcgttgaagctcagcagaagtaccatcctgcagctcaatatgtagtgaaactggttaattgtgaatccatttttgtggaagagcaagcccctgatgtatgccttccagctagaattaacatggactaaattttttgctctctttgtattgttgtaatcagttgtaaaatgtagcttttaggatatatatagcatttggtagttggtagcggtgttcagctaattaatctcactatttttgttttctttaaatcattgtgttgtaatttctatgataaatgaatgtgtaattttctatatggtatacttatttaatgcatcttttcttatccccctccgtcaatannnnnaa

SEQ ID NO: 109348 - DNA, 465 bp, Glycine max
  Clone ID: PAT_MRT3847_69756C.1
cggctcgttctcgatccttatcggctcgaggctggagcggtccaacgccgcgaaccggaacatgcctgggtgtggaccgggttcgtcctcggaccggacccggacctccgtggtcaacgggctcaagaagaagctgaaggatgctatggagagttttaacgagattcgccagcttgtgtcctcggagtaccgcgagaccgtgcagcggcggtacttcaccgtcaccggcgagaatcccgatgacaagactctcgatctcttgatctccactggtgagagtgagactttccttcagaaggccattcaagagcaaggaaggggtagaattctggacaccatcacggagattcaagagaggcatgatgctgtcaaagagatagaaaagaatctcaaggagttgcaccaagtgttccttgacatgacagtgttggtgcaacatcaaggtgagcaattggatgatattga

SEQ ID NO: 109349 - DNA, 1510 bp, Glycine max
  Clone ID: PAT_MRT3847_69757C.1
tcaattttctgccaccatcgtcccaaaaccatttcaagacactacacacacactcccacaccaacccaatcaaatcttcgttcgaatccttttctctttatcgttcaccgcatcccaaactcaccagatccgtcgtcgattcggttttcccgctttctatttttcgtttcccattttctcccggaacgtgaagttctcgctctgatctcacgtgagagttttggaacctgatgagtgcgtatatgtgggtgtatcgtagtgaaggcgtgttttgagttatcgtcggtgttgaaggaatcatgttctggagggaccgtgagagagagaacaaagagttgaacggtggggtcctatgtggcctggtcagagtcctcgttgttggtgattctggtgttgggaagacttctttagttaacctgattgtaaaaggttctccaattgctcgccctcctcaaacaattggttgttcagttgatgtgaagcatattacttatggaaattcaggcagctcttccagtagtcttaagggtgattctgagagagacttcttcgttgaactgtgggatgtctcaggacatgaacggtacaaagattgccggtctctgttttattcacagattaatggtgtaatttttgttcatgatctttcacaaagaagaacaaagactagcttgcagaagtgggcagctgagattgctgccactgggacattttcagctcctttgggatctggtggtcctggtggccttcctgttccttatattgttattggtaacaaagctgatattgctgcaaaagatggtccaagaggaagcagtgggaatcttgttgatgttgcacgccaatgggttgagaagcagggtttgcttccttccagtgaggagcttcctttgactgagagttttcctagtaatgggggccttattgctgctgccaaagaagcaaggcatgacaaggaggctgtggtgaaatttttccgcaagttgatcaggagaagatatttctcagatgaaatacaaataccttcaccagcatggtccattccttctgttcagagacaagctcagcgtatagatgaaaatttcacagaagatgatcaatcttataatacaagtgatccttacaagtataacatgcttcccccacttccagcacaacgaaatctaacgccgccacccacactctatcctcaacagccagtttcggtgtcggaaaactatagtttccctagattttccttgtcaggctcctcagaaatcagtactgtggcgagaacaaagcgatcagatattaatgtctgaagatctgtgtatttggtaattagtcattgctaatacatgaatgtatacttgcatggaacaaagttatatgcttgtttaaattctttgttcctattgtaacttgtcaattgattcattcgtttttaagaggctttctcagtagacggaggagctacttgttcagagtttggggagaatttaaatgatacatactcgattattataaaaaa

SEQ ID NO: 109350 - DNA, 610 bp, Glycine max
  unsure (1)..(610): unsure at all n locations
  Clone ID: PAT_MRT3847_69758C.1
tcaatgttcgttcatcccttcaattttcaacccaatcaaatcttcgtctgaatcctcttctctttctcgttcaccgcatcccaaactcctcagatccgtcgtcgattcggttttcccgctttctaatttttcgttttccattttctcccgggatgcgtgagaagttcttgctctgtctgatctcggcgtgattctcacgtgacatgggttttggaacctgacgagtgcatgtatgcgtgtgtgtggtagtgaaggcgtgttttgagttttcgtcgtcggcgaagagagaatcatgttctggagggaccgtgagagggagaacaaggagttgaacggtggggtcctttgtggccaggtcagagtcctcgttgttggtgattcaggtgttgggaagacttctttagttaacctgattgtaaaaggttcttcaattgctcgccctcctcaaacaattggttgttcagttgatgtgaagcatattacttatggaaattcaggcagctcttccagtagccctaaaggtgattctgagagagacttcttcgctgaactgtgggatgtctcaggacatgaacggtacanagattgcccgtccctgttttattcacag

SEQ ID NO: 109351 - DNA, 421 bp, Glycine max
  Clone ID: PAT_MRT3847_69759C.1
cttaaaagtagacgagcttcccctcttgctttactctgtttctcttcacttcttttggtaatcattctatagcgtgtgtgttgtgagcacatgaagattctctcaagggctcaagctctgaagtttcggtctcttcccaatcttacatcctacaatattttaattgacatgctttgtaaggcaggagaacttgaagctgctctgaaagttcaggactccatgaaagaggctggcttattccctaatatcattaccgtaaatattatgatcgatcgactgtgtaaagctcaaagacttgatgaagcttgctccatatttttaggattggatcataaagtttgcacccctgactcagtaacattttgttcactcattgatggcttgggcagacacggcaaggtgaatgatgcctatatgcttt

SEQ ID NO: 109352 - DNA, 606 bp, Glycine max
  Clone ID: PAT_MRT3847_6975C.1
ggccgccctttctttgtatggtggtgccatactttttttgtccctggaaacaccaaagatgcatggtctagtgcgggagaagttgggattttggaacttgacaacaccggtctgtcctccaccgatgacctgggcctctcccaacactataacgtacgatttctggggcctttgactatagacatgccccacgctataggtttacttggacacctttcctatcaccggacctggactttaacttgatcttaaaaaaggagctgctaccatctttctcgaggaactggaacgggatccccaaagcatcgtttggattgtacctgttgttgccaccttgcttaaaccacaacggctcgatggaataacttgggccttaagggaaaggccctgattaccacctgaagggataatgcttaatgagcttggccacagaaaggtccctcccaaaagagcctgtgggcttcccaaccaatgtccttggaggagatgataacctctccaatactacaagcaaggtagataccatggcctgtgaatgggaaggtggccaattgaaacaattacgccgtgaaccctatagggaaaggggccaaagtggggccctga

SEQ ID NO: 109353 - DNA, 221 bp, Glycine max
  Clone ID: PAT_MRT3847_69760C.1
cccacgcgtccgcccacgcgtccgcccacgcgttcgccagttacaatttaacattaacatcggcctaaacgccaaaccccccatgcccttttgatcccatcccacaattcaatgccctaacctaaccttccaaactacaaacccgttcggcagtttcccgtgctggacctcatcttgggggcgttctttggcctggggttcctctttttcatgctcgtctt

SEQ ID NO: 109354 - DNA, 333 bp, Glycine max
  Clone ID: PAT_MRT3847_69761C.1
catagtatgtggttcatgaggggactctcagggcatcaccagattgaagtctgtaggagtctctgtcgtcgttgttcaccaaggaaagaatggcagtcccgttaaggataacgatgaggtaatcagcgtcagcatggttggggagaaggaggggaataagggaagaaagggtcctttgtcttcaattttgagggctttttactgaataagtatgtactaaaatgtatgctgtaatagctcatagtgagcgaggaaagtctcgggctatgtaactatgactagagcttcaactatgaataaataaatcgacagcatatgatgcttttgtttttt

SEQ ID NO: 109355 - DNA, 316 bp, Glycine max
  unsure (1)..(316): unsure at all n locations
  Clone ID: PAT_MRT3847_69762C.1
wgtcgcangcacgcgtacgtaagctcggaattcggctcgagcacacaacaaattnctagagcgnnananngagannagagnnanannagcngatccnccatggnntccaccaaggancgcgaanactttgtctacaccgccaagctcgccgaacaanccgaacgctannaagaaanggtggaagcaatgnagaatgnngcgaagtgaacgtgnaattgacgntcgcngagccganncttctgtcggnanggtanaagaacgtngtgngtgctcgcacngcttcntggnggantntancgncgnttgnncacanana

SEQ ID NO: 109356 - DNA, 378 bp, Glycine max
  unsure (1)..(378): unsure at all n locations
  Clone ID: PAT_MRT3847_69763C.1
aaagggccgaccacgcggacgnacaggcgtaaaaacggtttttttacgactttttgggacgacggaaaatggggctaatcgggggacataccctaatttcctctggagattattactngangacatgcaacctttagttatccgttttgacgtactagtcgttcttcgaagcacaataaatgaagtccctatacgtctcggaaatcaaaaggaaacatgcttgcgctatccaggatatttcttaatgttagctaatagtctataatagatgtttttgcgcaatcctcgagtttccgtaacttcttcgaaagctaaaaaatattaattacataattcacttagattcttagccttgcgcaagggaaataagtatctata

SEQ ID NO: 109357 - DNA, 270 bp, Glycine max
  Clone ID: PAT_MRT3847_69764C.1
cccactctccgtttacgcgtccggtggagctgatatataattatcaactgtatgctggcatattgtgttcgaattttgatctcaaaacaattatatcaggcacaatacaaaagaattaaacgaggattggttttaatcacattgcctataattttaattcgaaaagatgtaatgtctttccacagaccttttgcattatagaaatgggcttggatattatttttagctattttattcttcaaaaatgtgaacataattaccttttgtttc

SEQ ID NO: 109358 - DNA, 275 bp, Glycine max
  Clone ID: PAT_MRT3847_69765C.1
accagaaggggctagagaaggaaaacaaggagttcttcaaggcctattcgaagagtaaagcagagagagcttcgaagacagaagttaggcaaaagatacacaagatggtttcagaatcacattcttccagttccaacgaacgagtttaggttaaatttttatgaatgaaagaaagttgccacacgtggtttgtttctgtaataacatccaaatctaagggtcaaataagtcaacatgaccgctgggcaaaagtatgtgttgggggaagaaacaga

SEQ ID NO: 109359 - DNA, 485 bp, Glycine max
  Clone ID: PAT_MRT3847_69766C.1
tccaggtgatccaagacaatccaacaacaatgttcagatctttagctcaagttcccaagtcatgatgcctcatcctctcatccaatctcttcattcaaccaattcaactcttaatcgacgcattccaacatcatttagttccaaacttcttgattcagataacaacaatgatcgtagccaaccaaataagggtagtagtactactcgttcttgaagctcctcatcgtggttccttcctgatgcaaacgatgtgaataactcttaatcctggacattcttttcatcaattattcaagaggctaaagcacatgatttaaattttctcactcagccgtgaatgtgagttttgtaggtatggcaatgctatacatatacaatatttatatttgaacttttaagtaatcgctgtggttgcagctattaattattagctagatgtcttgttgattaatcgtccgaggtataatataaaataatctggaata

SEQ ID NO: 109360 - DNA, 1579 bp, Glycine max
  unsure (1)..(1579): unsure at all n locations
  Clone ID: PAT_MRT3847_69767C.1
ttttttttttttttttttttttttttttttcgtgttaaattttttaaatattatgcactatgatagttactagtatagtcatagaatagaccatccctttcaatttcaacagaaaatacaaccaacctaaaaccataagatattatgcactaagatagttaatatcatagtcatagactatccctttcaatttcaacagaaaatacaacttttgaggagcattaagttcttcaagggtcctacaaagaccatggcaaccatgaactacccttcaagagtgacctgttcatatcaccaagatgatgacgaaatattacacaagctgcatttgacatatctttaaataaacaccatgccatgaataattttcatcgactgctatataatactgcttgacagacacttctgcataataccttttgactaagaggctcaactaaaattgagatttgtcaagactgtcaaagtatggatgatcaagtgctgccttagcagatattctctcagaaggattatacttgagcattttcgaaagaaggtcgactccatcaggtcctaaggaaggcacattctttgccaagctctgaggttcccagcctgggtacacatgccaatcacgcagagaagtaactcctggccaattctcctctgttggagttcccaacatcttgaatatgtgaatgagctgctggaactcagaatcccccggaaacaaagcttgcctcctcaccatttcggcaaagatgcagccaacagaccagatatcaaccccagtggagtaatgggtagagccaaggagaacctcgggggcacggtaccagagagtaacgatctcgtgagtgtagctcttgagagggacggtgaaggcgcggccgaggccgagatcagcgatcttaagaatacccttgtgctggtcaaggagaaggttctgcggcttgagatcgcggtggaggacaccgtggctgtggcagtgagccacgcccttgcagagctggaagaggaagctctggatgaggggaggagggaggggcctgggattggggcccttgcggtgggaatcgatgaacttcttgagatcggtgtcgagatactcgaaaacaaggtaaaggatgggcttggtgagggggttggaggaggatttctgggacttggggaccttgtcgacgtgttcgacggagaggaggcggacgatgtagatggattgggagagaagctgaaggagagacacctcgcgtagtgcggtgggagggacaccctcctcgtccatctccagacgcgtcttcttcagagccaccaggctcccactcgccttctcccgagccttgtacactttcccgtatgttccttctcccaccttctccagcttctcgtacttttccatttctccgaccaaattagggctaaggatttcagatttcagatttttatcaactattataacgtaacggacacttccagatctagccgcgccctctccttttcaaattctctttctcttttcatttttttttttaanttatacttctacggacgcgtgggtcgaccncgggaattnccggaccggatacctggcaggcgt

SEQ ID NO: 109361 - DNA, 457 bp, Glycine max
  Clone ID: PAT_MRT3847_69768C.1
tcttttcaccttaatgacctctggacccttctgttctcctcccgttacatccttctcttccaatgctttgaacaaccctatctccttcttcttccccaacccaaaaatttcctcaggaatgttcaacattgtatctgacaaaaacaagaaacaaagtgtccatacccctcaaaccgactctcacaaaatgaagggacttgcctatgcactcccagaataactatcggacatcacctcatcgatcttctccgcgacactcccaattccaatctcctgcagatgcatatcactcactatagctgccctcagatcctaccaacatcttaccactgtacttcgccaggacttaaacgactacatggatgctttttacattgctccatcctgtaacgacagacttgcctgtcacatcatcaataacatcctgaccatgtcctacataaatgtccctcgcatt

SEQ ID NO: 109362 - DNA, 712 bp, Glycine max
  unsure (1)..(712): unsure at all n locations
  Clone ID: PAT_MRT3847_69769C.1
cggacgcgtgggactgttctagtcgcgagcggccgctcgcgatctagaagtttagatcgcgagcggcgctcgtcgtcttnctgtcttcgcgtccgcggtcgcgtgggtcgcccgggttttctggccggtcctgcggcgtcctgctttcctttgtggtcgtttgggggtggggtgttttttttttttttttttttttttttttttttttttttgttttgtttttttttttttgtttttttttcggtccttttgttttttttttttttttttttgtttttttgtttttttttttttttttttttttttttttttgtttttttttgttttttttttttttttttttgtttttttgttttttttttcntttttttttttttttttgtttttttttttttttttttgttttttttttttttttgtgttggttttttttttttttttttttttttttttttgttttttttttgtttttttttttgggggggggtcgcttgttttttttttgtttttttgttttgctttgttttttttttttttttttttttttttttttttggttttttttgtttttttttttgttttttttttttttttttttttgtttttttttttttttgtttgttgttgttttttttttttttttgtttttttttttgtttttttttttttttttgtgtttgtttttttttttgttttttttttttttttgttt

SEQ ID NO: 109363 - DNA, 433 bp, Glycine max
  Clone ID: PAT_MRT3847_6976C.1
gcatcgcacacctacgtaatctcgtaaagcacctctagccaacctcttctaagtaaagcgttatacaagataaattggtgccttctcagtcaccgatagagaggaacaggataggagccaacttatccaacaaggcaaatgctcactgagcatccaattcatcatcagaccacactctcacctttcattgcactggtgaatggaagactcattacgatgcttgcaaagaaacctacacattgattggtattgatatgacagctgcatagtgggggccttgcaaagccatagacccaattgttccatagtatgctgcaaagttcaccagcgcgggacccatcaaaattgatgaggatgagtttatggcggtctgttaagaattccacgtgccttcaatgcccacattcgtattggtttagaacggaaaaggtgt

SEQ ID NO: 109364 - DNA, 527 bp, Glycine max
  Clone ID: PAT_MRT3847_69770C.1
cttttgttaaacaggctggctgtgacttcggctcccttataaaaaaaaaaaaagagatgggaatttggaatagcgggggaacggtgggtaggcaaggtgaaagagtggtgtgggaagtacaacatcgtgggaggacctgtggagaagatagttgagaagcggtttaggaagaattatcaccctgcttgggcagcagcatttatacttgatccactttacttgattaaggatgcaagtgggaagtatcttcctccgtataagtgtttgacgcgcgaacaggagaaggacgtagataagttactgaccaggctggcttcgcgagaagaggctcatgttgtgttgatggagctgatgaagtggagatcagaggggcttgatccgctatatgcacaggctgttcagatgaaacaaagggatccagtaaccgggaagatgaaagttgcaaatccgttaagtagtagacttgtctgggaaacttgtttgactgagtttaaatcacttgggaagattgcagtgagactcatttt

SEQ ID NO: 109365 - DNA, 1044 bp, Glycine max
  Clone ID: PAT_MRT3847_69771C.1
aaaaaagtaattccctatttatataagttattttaaaagatttttaaaaaaagggatttatccaaatttaaatgttacagcatgcattaagggtccattttttaaaccaatagaacagcttattagataacgatgacgaatggggtatggtaaattggcaattgcaagctcaaatagaaagtttcgataaatgatattctcctcttcctgatttaaacccagtttggaaagccaatccaaaagttcattcctgatttaaaacattactttgacaagagtagaagagttctacgcaatgttcagaagaaaaaaaaaagggtcctacgaatatcagcaaaagatttcacaaattgctgaatatagacatgtcttgtcctccatgttgcggggaagaaaacataaatcaaaatgatttgattaattccagatttttaaaactcatattaatatacgaattttgaaaaaaaaatattaaatatacgtggattagcaactactatcgcctatgactattgactagctttatacaatgaactaagtttgaaaattgaaaatacaaaataaaagatagcatagtcaatcaaccaaaatttaaaagatagttatacaaaaataaaaaaaaaccaaaacaatagaaaaaaagataggataggtgacatttacatgtctttcttttcaacatacaatatatgttgacatttgtttcgtacagataatatatgttgatataaaaatataaaatgcaatatatctaatataatttcattacctctaataccaatactctttcagacactttcttttcaatattttatgtgattaaattaagagataaaatcattaatgataaataagacctatcaaatcatcaagcaagtagtgaaaagaaaatgtgagagagagatagagttttgttgacatttctctaatttaaaatgttaatgtaattttagataaattgttgctcgggttaaatctaaattcccctcttgatttcataaataataaaaaatattcatcccaatatttcattttatatactgc

SEQ ID NO: 109366 - DNA, 413 bp, Glycine max
  Clone ID: PAT_MRT3847_69772C.1
gcgaacagctaactaggaatgcggccgcgacccaacatgcggggttttgtcctgtactctctatagcgagcaggactttacttgcccttctcgggaagtcaggtcccgtagcttcataaaccagaactggttcaacaggcataggaagctgagcgctaggatcaacattgcccgtagagctagttaggttttatgtgcactccttttaccacacccccagacaacaagagtaaggcggaactgcatcatttgtgcacctaagctactgctcccgatcactgataatctcaaaccaagacatccatagtcgagggttgagaactggtaccacagacaggggagggagaatcacataatggcttgatcgagcgcgctccaatgggccacactccggagcatggcatgctctgtga

SEQ ID NO: 109367 - DNA, 237 bp, Glycine max
  Clone ID: PAT_MRT3847_69773C.1
agctgccaccctgctatttcaatcccactatagtgtttttgggctcactcactctgtgctgcaattcaagattgataactatgattgagctaaatggaagcttaggccattcaacagggttaaacttcaatactttctatatacttttttcaccctaaagattgcccccttcacttaattgttgtcaatcttgtcttgctctgccaatgggaatttttttggttatttatattctat

SEQ ID NO: 109368 - DNA, 124 bp, Glycine max
  Clone ID: PAT_MRT3847_69774C.1
gccacatggagcgatcttcactttgcaatagcaagagatgtatcattactcaatgcaatttctccaccatagctctaaccctgaaacgggtaaggacacgggaattatgggtggtctttgatgc

SEQ ID NO: 109369 - DNA, 169 bp, Glycine max
  unsure (1)..(169): unsure at all n locations
  Clone ID: PAT_MRT3847_69775C.1
tcgcatgcacgcgtacgtaaagctcgggaattcggctcgagtgcttgtnncacnacnacaggangttaatgcntagcnagtacaatngngagcttgtgcggaatnttaaaatgtnaactgttncatcanncattttcctcgtacaatncagagganagctccaaaaaaa

SEQ ID NO: 109370 - DNA, 136 bp, Glycine max
  unsure (1)..(136): unsure at all n locations
  Clone ID: PAT_MRT3847_69776C.1
tgctcctcatagcatttgggatgggcctgaccgtcccaaggactgtggtccatgctcggagcaaattgcgtcataccggaccggagaatgccctgatgactacagatggnacactgctgggttatcaggtgacccg

SEQ ID NO: 109371 - DNA, 449 bp, Glycine max
  Clone ID: PAT_MRT3847_69777C.1
ggcctatgtgacagttctccactcttcagaagcttatgtgtgtggtgcaatagctctagcacaaagcatccttcaacacaacaacaacaacaacaacaacaacaacaacaacaacaactacaccaaattagacctactcctccttgctgatgaatccattggttacaaatctataaggggtctaaaagctgcagggtggaagatcaaacgcatcaaacgtatcttaaacccctatgcccaaaagggttcatacaacgagtggaactatagcaggttacgtatatggcaactcaccatgtatgacaaaatcattttcctagatgctgatcttctagttttgaagagcattgatggtctctttgcttaccctcaattatctgcttcacctaatgacttctccttgttcaagtcggggttaatggtcattgaaccatccacgtgtatgtttg

SEQ ID NO: 109372 - DNA, 757 bp, Glycine max
  unsure (1)..(757): unsure at all n locations
  Clone ID: PAT_MRT3847_69778C.1
ctttttttgaagatgttttggtgaatggtaaaccattggactgctggagtcccggaagtgtttagtggttcacatgtgtatggatgtgctcatggaagtcgtgacgtgagaagtggtgtttgtgggcaagttctcatcaagaagctgcatgaggaaattgagcttcgaggtttgaaggatcagatgaccagaaagttgctaatggggaggagactggcaaggtcaagaaaaacatcaccgttgaaagcgaccaatctgagcagcaaagaaaacgtgggtggttgttgccagggtgttaatggagtttcttgttgcagaagtgcaagtcttgagcaaaacaaggagattgaagaaacacctgaaacacataagaaggggagcaaaatctgttcgaattggcctcaactgcagcagcgtgatattcgcacagctgttggtgtgcttggagctgtagcagttgttgttgtggcttacaaactgtacagaagggcagcgtaggttactctctaaaccatgttttttaggttgcttggaagtttattacccaatattttttttttgtcgaggttcaataaatttaagaaacaatcacgaaaactactattaccaagtcatacatagacacttccgcatgttgcatggaaggatagttaaagtctagcacagatgtagtgatgaaaactttatcatcttttttgaagctcacagaatatgattatgctgctgaatgtttaaatatgnttgngtctctttactt

SEQ ID NO: 109373 - DNA, 1587 bp, Glycine max
  Clone ID: PAT_MRT3847_69779C.1
ctcgtttcgaccgtcgttgcgtgtctcgcatgcctgcgtccgccgcagtcacggctgcgagaagacgacagaagggggctcccattatatctgacgaatcaccgccaaaaggtgtgtagtttaagtgtgaatccctttccctctctactcttctttcactttccatttccatttccattttttctggttcactttctcgatggcctccgagaaccccaccgccgacgacgccgtcaacggcttcaatcggccggaaatgttctcggaaaacctcgccggcaccgtcgacgcctacgaccgccacgtgttcctctgctacaagagtcacctgtcctggcccccgcgcatcgaggcctccgacgccgatcccttccccaagcgcgtcgccgccaccttcaaagcccgcaagaacgacttgcccctcaagacgaaaatcaccgtgtgcgaggtgcgtgaggaggctggcttcctcgacggtgacgtgttgattttccccgacatgatcaaatacaggggtttggaggaatcaaatgttgatagctttttcgaagatgttttggtgaatggtaaagcatggactgatggaatgcccaggtggccttacggaggtgtttagtggttcacatgtcatggaagtcgtgacgtgagatgtggtgtttgtgggccagttctcatcaagaagctgcatgaggaaattgagcttcgaggtttgaaggatcagatatctgttactgcttgttctcatattggtgggcataagtatgctgggaatgtaatcatatacagcccaagagcagatggaaaaattatgggtcactggtatggctatgttactcctaatgatgttcctgatttgttggaccaacatattgcaaagggagaggtcatccaacgacttttgaggggccaaatggggccatctgttgcagatggcaaggaagcagatgaccagaaagttgctaatggggaggagactggcaaggtcaagaaaaacaatcacgttgaaagcgacaatctgagcagcaaagaaaacgtgggtggttgttgccagggtgttaatggagtttcttgttgcagaagtgcaagtcttgagcaaaacaaggagattgaagaaacacctgaaacacataagaaggggagcaaaatctgttcgaattggcctcaactgcagcagcgtgatattcgcacagctgttggtgtgcttggagctgtagcagttgttgttgtggcttacaaactgtacagaagggcagcgtaggttactctctaaaccatgttttttaggttgcttggaagtttattacccaatatttttttttgtcgaggttcaataaatttaagaaacaatcacgaaaactactattaccaagtcatacatagacacttccgcatgttgcatggaaggatagttaaagtctagcaacagatgtagtgatgaaaactttatcatcttttttgaagctcacagaattatgattatgctgctgaatgtttaattatgttgtgtttctttacttttactggtattcaattaagaatttaattttagctgactgcgttgtcctgtaaagaagtgtgtgacgctaa

SEQ ID NO: 109374 - DNA, 435 bp, Glycine max
  Clone ID: PAT_MRT3847_6977C.1
tttctatttttgcacctggtgagagtatcatggggggggtttttaagtatgtggggggcctaaaacatattgaaatgcctgaaagaactggattcaaatttcaacatatgagcttgaaggtgaaaggattaattgatttcattcctgaactgtctgaagagcataatgaccaagaagcagtggagcagattttgcgagttgcttttctagatccagagtgtacctggactgatttggaaaaactgaaccgacaggagaatgatgcttatgctgcccttgaggcacgcaagaaacctgcataagatgcatggcctaaaataatccctgtaggactcgtcatagacctatgcaaagataggagggaacgatacctttcaacgtagcaaggtgaagtggctgtagattctgtgttcagcgatggacacgaatatacct

SEQ ID NO: 109375 - DNA, 861 bp, Glycine max
  Clone ID: PAT_MRT3847_69780C.1
cggacgcgtgggaaacactaggcgcattgcgcaccctctccgctcccataacggctgcgagaagacgacagaagggggtgttaagtgtgaatccctttccctctctactcttcactttccatttccatttttttctggttttctttctccatggcctccgccgccgccgtcgccgccgaagacgacgctgtcaacggctccactcggtcggagatgtactcggaaaacctcgccggcactgtcgacgcctacgaccgacacgtgttcctctgctacaagagctacgtgtcctggccggcacgcatcgaggcatccgacgccgatcccttccccaagcgcgtcgccgccaccttcaaagcccgcaagaacgacttgcccctcaagacgaaaatcacggtgtgcgaggcgcgcgaggaggctggcttcgccgacggtgacgtgttgattttccccgacatgatcaaatacaggggtttggaggaatcaaatgttgatggcttttttgaagatgttttggtgaatggtaaaccatggactgctggagtcccgggaggtgtttagtggttcacatgtgtatgtatgtgctcatggaagtcgtgacgtgagatgtggtgtttgtgggccagttctcatcaagaagctgcatgaggaaattgagcttcgaggtttgaaggatcagatatctgttactgcttgttctcatattggtgggcataagtatgctgggaatggtatcatatacagcccaagagcagatggaaaaattatggggtcactgggtatgggctatgttactcctaatgatgttcctgatttgttggaccaacatattgcaaagggagaggtcatccaacgactttt

SEQ ID NO: 109376 - DNA, 313 bp, Glycine max
  Clone ID: PAT_MRT3847_69781C.1
aaaaaaccaattttggcaacttttgaaccctggaaaaaattttttgggatcttaaacaagctttacatttttttgctctaccccccctggtgaatatgaaaaaccgggccctggggactttttccaaaaataaatctaaaatttttaaggggcccataggggggaaaaacaaaagtccaaagggtccttttttgagagaccaaattctcccattcccatggggaccaacaaaatctggttgaatcatgattttgaacttgcaatccccaggggaggggtttttgtcggggacaacaaaaagaccggggaattt

SEQ ID NO: 109377 - DNA, 452 bp, Glycine max
  Clone ID: PAT_MRT3847_69782C.1
ccggaattcgacgccacgcatcagacgtccgctcacgcgttcgggataggtcttgtaggcgtgtttcatgctgatattggccattggaagttgggtttctcaacatctaaaccattaggaaactctctcatatccaagttgcaagcttggaaacatggttatcatatgttgtatggatttgtccaagttctaaatgctttggaacatggatgaggttagcgtgcatgtaaatagatgttggatcgtgattgacatgtctcacaaagttgcggattctcttacaagatggggaacaacttcttctaattatgatcagacttggagtcttcctcctaatggtgttctcttagcccttgggagagatgctttaagttccacttagtttctatttagtacttttatttccaaatgtacctaaaaaagattcctgtatatacaactaacgtctgtat

SEQ ID NO: 109378 - DNA, 454 bp, Glycine max
  Clone ID: PAT_MRT3847_69783C.1
ggctcgaggagtctttgtctggtgctgggtcagaagcttctgcgacaccatcttcaggcgggctaactcctacagctgggaaaactaatgaaactgagatgatgtggcattaccaggatccatcgggataagtgcaggtaccatttaccatcgtgcagctacgcacatggagtaacacacgatacttagctgctgattagatgatatggagaaccactgagacgcatgacgaacctatgctcttaacagatgctcatgacagggaatgtatgtacggaaccatcagtggtggataatgcacaatcggagcttgatttacagttacccatcatcatactctaggaagtctccacaacacggtataccaggtcaagttgtagaaagactgacattagatcaaaatgctgcatctttgaattgacataccagtctggggactccgagactaaccaca

SEQ ID NO: 109379 - DNA, 587 bp, Glycine max
  unsure (1)..(587): unsure at all n locations
  Clone ID: PAT_MRT3847_69784C.1
ctggaaccgggttcgctgcagctgctggcaagagctctggaagcggaggtgtcattgcgggcattgctgcattggctgctggcgtctggggtgccaaggagcttggctacatcaactttggggggaaagagggtatcagcctgcctcaaatctcggagcccaagcgtgactacggtgctgtgcgcagggccattgagggtgtgctcgatgcccctgagggatatgacgatggcagctatggccctgtgcttgtgaggctggcctggcacgccagcggcacctatgacaaggcaacaaacacaggagggagcaacggagccaccatgaggtgggctcctgagagtgagcatgcagccaacgccggcctccaggtcgctcgcgaccttctggaacccatcaagaagcagttcccttggatcagctatgcagacctgtgnaccctggctggcgctgtagcagttgaagcgatgggaggtcctgagattgcttggaggcccggccgcaaagaccacgacagcggcacatactgcccaccagacatgaggttgcctgatgccgcaaagggagctccacatggtgagggagat

SEQ ID NO: 109380 - DNA, 369 bp, Glycine max
  Clone ID: PAT_MRT3847_69785C.1
acgcttatctttacgaacagacataaaatgacgctgtagattggaaaaagaatcctacacaaaagcacaacgcgcgtgcggaaaaaccacaaaaaaagacatgcatggcgatggaacacaaatcgtgagaaaatttaactgaaaaggaagatcaaaaaaaacccaaaaagattgacgccacactgagacaaagaaaagagaccaaatacaatgaggaaaaaggacagacggaaacaaaatagagcaaaatgccacttgatgacgacgaaactcacaaaggatccatgagggatctaaaaaattctcaaaataaaaccgaacttgctaaaaacaaaggaggaggaaccaaactgagtaatgaacctatag

SEQ ID NO: 109381 - DNA, 430 bp, Glycine max
  Clone ID: PAT_MRT3847_69786C.1
aaaaaaacaattgggaacgggtttaacccttcaaaaacaaaaagggggtttcccccaagaaaaaaggggcccccccgaataatttcccccaaaaaaaaccccattaaccaaaaaaaaacccccccggggggggcccgaggaaaaaaaaccccaggaaaccccggggggaagcctgccttgggaaaagggcccccaaaaaaccccccgggggggtaaacccccggggagccttcaggggccgggaaaaccccaaaccctttaaaaaatttgaaaaccgctcaggcccccctttgggaggcctttttttggaaccctttttgggaaaaaccccttttggggcccaaaagggaaaaaaaacctcccccccccaaacaaaaaccttgggagaagggccccgaaattgggggggaacaaatccggaggggaaaaa

SEQ ID NO: 109382 - DNA, 399 bp, Glycine max
  Clone ID: PAT_MRT3847_69787C.1
tcggtcatggacaagcactctcaccttgagaatgcgcccgaggccatcgacattgccggctttcgcgtctttggcctgtacccagaggatgctgagttctacacaaattaccccgaggagaagcgaaagaaggtcttccgaaaggttgacgttcgccttgtccccatgcttgcagcgctgtacttgatttgccacattgatcgtgccaatattggtaacgccaagattgagggcatggttgaggacttgggcatgtcgggagtgcagtacaacactgttctctccatcttcttcatcccttacgtcctcctcgaagtccccagcaacattctcctcaagaagttcaagcgcccttccatgtacctcggtatcctcactcttggctggggtatcattatg

SEQ ID NO: 109383 - DNA, 2274 bp, Glycine max
  Clone ID: PAT_MRT3847_69788C.1
taataagtaacaaaatcaataaattgggggtataagataaaaataacgaccacatttagagtaaaaaagtagaggatcaagtgtgctaaggaacaaaaattgtaagaacagcattagaatatcaaaggatgatcgtgaaaattgtcactctcaattttgaacataggaagcccgagtcattcaatttaatatgacatttgaagtgagaatgttcttgctgccatacattttgacaaaaactatcagtttgaaaagatagtagtgaatacagatgcttgaccaaagctcacaccaaattgttcccatatttgcccatgagcaaaatttggttacaataaacaagttatcccagttatcactcgtgccagacaaatgtgtggaacaagtagtaagagcataaaacagttctttgagcagcataggaattatgaacaaaagcatttcctggaagattttcatgttgaagcactgagagcacgttctatttcctccaatgatcgaccctttgtttcaacaacattaccagctatgtacaaaacagcaagaacacagacagccgagaatcccaagtacacggagctgataccaaacttgtttacaacactcaagaagtagaggccgatgacgaagttggagatccaatgtgtgcctaatgacaaagaaactgcttttgctctaattctagaagcaaatatctccggtagaagaagggcaggcacaggaccagcaccaagagagaaggataggacatagagaacagtcccaagaacagcaagggtgccagagtatggagcaagaaccttccatgtaaaagacagagaaagaagcaacatagaagcagccatcccactaaagcttgtgataaggagacttttccttccttgtttgtccattaaggaggaagcaatacaagttccaaaaacatttgatgcgccaaccaaggcacttgctgcaacatcagaagcaattccagcactacggcgacacagaagttgaataataccctaagcatttattccagccaactgctggaacaagaaaagtgctgccccaacactgacaactttccaatatcgactactaaacagatcaagccaccctgcttcaggttctgatgaaccttgacttgctgttgttaagtcattcataactgcagcaactctttcttgtccatagagtgttttaatagccttttcagcttcagagattttgccttgctgaacaagccagcgtggactttctggagaaattgccattcctagtgctaacagcacagatggaactattgcaatgccaaacattgaccgccaccatatagggtttcctgccagaggcagcccagccaccagtgccagaagaatcccaatgcatataaaaagttgattaacagatcctagcgcaccacgaatttcagttggtgaaatctcagatatgtatagtggtactatagcagatgtaacaccaattcctataccagcaagtaagcgaccaatgatcattggctgaacactctgggctgtagcaccaagaaatgctccaattgctagagggattgaggctaattgaaaagtcctagttcttccaaattggtcagccaatgatccaccagtaaatgaaccaacagtggcaccagcaagtaatgtgctgacaatccagccttgtagaacagtattttcagtgattccaagatccttagcaaggtattcaagggcaccatttaccaccccgagatgataaccaaataaaatggctccgaggcaagcaacaccaacatatggtagaacatttccagaagatttgccctgaggagtagctggaacaacatcttcaatgtttccatcagaagccataaccctcactgatctgggcttaacggagggcccgaaaatgccaccaaaaccaattctagcactagttagttcagtttccatagtgacagaaccaagccttaacccgcaaagatcagtattattctttgtcatgcacactcttctgggtctcagaacactcccatttctgaactctccaaaacccaccaacccccttcgctcttgaaccccaaaagtggctccttcaacaccaaaagttgatgcctgcatgctttctcgtaaaagggtgacaaagaaatttggaaagggtgaggaaatttgtgtacttctgagtgttgacgttcacactttagaacatgcaattttttttatcgggatttgtgttttctgatggaaggaaggggcttcgaaaggatcgctactaagtgaaccaaacgacaaagat

SEQ ID NO: 109384 - DNA, 373 bp, Glycine max
  Clone ID: PAT_MRT3847_69789C.1
gttgcactattatttgaaggctacaccatgaaggtatgatgattttcctataaaaatatgctcatatagccaggatcaacaatttaaacaagaaatgtgcacaagtgaataaatagtacaaattttttagattcatattattctttgatgatacatacggtcttgatgcttgtctaatttctagtgctgcctcattttctcataacctttttcagtttacttttcagcagaatagcttttttgtggcagccccctaagtactcacaagcatctcgataaagtgaaatttgatcaacaaattagctaaatttactgccatctttgtcctacctgaaccttatctgattgttttgtgtgccagattcgccaagtc

SEQ ID NO: 109385 - DNA, 226 bp, Glycine max
  unsure (1)..(226): unsure at all n locations
  Clone ID: PAT_MRT3847_6978C.1
gctctttctgatctctctccccctctctctaacaactaaccctcgctgtcagctggttccaattcaccatgaccagtgatgatgcccagctcccattaggatcagcaagagggacgaggacgtagctcggtgccaggacagcggatttagcctagagaacaantcaccaacccataggaagttagtagcttcaacctagaaaatggccaatnnactagtggagagt

SEQ ID NO: 109386 - DNA, 1495 bp, Glycine max
  Clone ID: PAT_MRT3847_69790C.1
gggcactcgtccttgcactcatacgtacgttcgccagtgaccaccgaaggggagggagcgaaggtatgaagccttcaacaggctgagaatattccaagttgtaagtgtcgcttttcttggtggactattgtggtggcatactccagagtcacacattgatgatcgggttgccttgctctttttcttttctgttttctggggattctaccctctctacaatgcagttttcacattccctcaagagaggagaatgctgatcaaggaacggtcttcgggaatgtaccgcctttcttcctactttctggctagaacaatagaagacttgcctctggagcttgcactaccaactgcatttgtcttcataatctattggatgggagggcttaaacctgatcctatgacttttatcctttcactactatggattctttacagttttgttgtctctcaaagccttggtttagcttttggtgctattttgatggaggttaaacaggcaactactctagcttctgtgacaacccttgtgtttctcattgctggagggtactatatacaacagattcctccattcatagtgtggctcaagtacttgagctacagctactactgttacaagctgcttttaggtgtccagtacaatgaaaatgactattatgaatgctcaacgggggagctgtgcaaagttgcagactttcctcctatcaaatcaatgggcttgaatcatttgtgggttgatgtgtgcattatggccatgatgttggtgggttatcgactagttgcttatttagcactgcatagagttaggtagattaaaattatggcggagctcccatacacagcacgagaacttggaagagtttttgcacatgtcaactgaggaataatgctagaatagtagacttttgatggaactcatgtaatgaatcttttcaactctccctgactgagttggatgtacaagacttctttttaatagatttagagaatactaactctaagtttctatcttggacaaacaattcaggcacagaaacaagaagaggcatatttatgttctgcaaagcattggtataaatataatggtttttctgaagttaaatgacataattagttggaagaaaagcaatactaacaatgtcatgatgcattgcagggattgacccgggctccaagcatgcaactgaacaaagtgagggactggaacatgagataaagcaagtgagagaatctctcatctctgcttatgagaagaatatagctacaaggctgaaagttgaggtttgcaggctggaagctaacaactacaatatcacaaaagatgcttgtgcaagtaggtcctctattttttttaagggaaaaacaatcacaagaaataaagtttctctctattattagtcttagtggtctgaaatgtctttattgatgaattatttcaatatcaaattatgagactgtgtactgctgattgggttctcatcctttatattatctt

SEQ ID NO: 109387 - DNA, 715 bp, Glycine max
  Clone ID: PAT_MRT3847_69791C.1
taatatgacatttgaagtgagaatgttcttgctgccatacattttgacaaaaactatcagtttgaaaagatagtagtgaatacagatgcttgaccaaagctcacaccaaattgttcccatatttgcccatgagcaaaatttggttacaataaacaagttatcccagttatcactcgtgccagacaaatgtgtggaacaagtagtaagagcataaaacagttctttgagcagcataggaattatgaacaaaagcatttcctggaagattttcatgttgaagcactgagagcacgttctatttcctccaatgatcgaccctttgtttcaacaacattaccagctatgtacaaaacagcaagaacacagacagccgagaatcccaagtacacggagctgataccaaacttgtttacaacactcaagaagtagaggccgatgacgaagttggagatccaatgtgtgcctaatgacaaagaaactgcttttgctctaattctagaagcaaatatctccggtagaagaagggcaggcacaggaccagcaccaagagagaaggataggacatagagaacagtcccaagaacagcaagggtgccagagtatggagcaagaaccttccatgtaaaagacagagaaagaagcaacatagaagcagcctgggtgagacataaagaaaaggctgtcaattatacaaatgaaaacacacgatgttttg

SEQ ID NO: 109388 - DNA, 1732 bp, Glycine max
  unsure (1)..(1732): unsure at all n locations
  Clone ID: PAT_MRT3847_69792C.1
tggttgccgccaactcttgttgactactctcgccacctgtttcactcttcttcaattcatatcatatcaatttgcttcatagcttaaataaaatatttattatgattataccatgaaaattatcaatgcctgatagaaatgccatgattcgaattcattctattttgggtttttagtaacggtcttgaagctttattccgcttaggcgaagtcagtttcgaagatcgtagttttatttgcagaaaaaggttcatattaatcgcagctttttcaaattcagaaaccagctgggaaaggagacttctaatttaggcgacactttctctaaacgattctatttggagcaacagttagatcgccaagaggcgtgcatgaaaggcttaattctgtacatcaaagttggggatgagatcaactctttcaaagttcaaaggagaccagcttgtgattacaatcgaaaacaagaatgcatctcttttagctcttccttacaacacacaataaccattttaggctttattagagttagtctcaatgaacactccaacaacggcattatctccaagcctgcttctaccactataaacataaatattaaactaaaaatcaatccaagaggacacaagatcaagaatgaagacgagcttttcctaagattaaaacctccgaagacaaaaaagaaaataaaaaaaagagcagggacgataatattaaaaagcaggcaacaaatagtaattatatgtaagtcaccaaaagtgattcagaaaagaggctccaaaagctgctacccctaggtttgctgccattggaggataactatttgacggcaacaacgatgccttcgacgacaatcccttagagacaaatctttggtctgcctgccactatgtatagattctgcagggttgataattcctgggttgacccatttcctttacaactactctactaccttaactccatggaatctttgaggctgcaagttttggagggtcgaatattgatccatcagcttgggaggataagaagcgtgcccgtgaatctcgtttccccgctcaggtacgagtgataactaggaaaacttgtgaaccactggaggaagattccttcaggccaatccttcaccactatgatggtcccaagttccgtcttgagctgaatgtgcccgaggcgttgtctcttctggatatttttgcagaacaagacaccttcaatgacacttttaaggctttgccggcataaaaggagattaatagcaaaataatacaacaagaagaatatcactcacagagacaatagataattagaggtttgggttggtttgaaagttattaagtatggacttaagaagagagtccgaaagacaaaacaaaatgaatataacggaggacgcttggatattcaacaacctatatatatattactagtacttttgtatagaggatggtctattatactcatattattaagagagaatagaataaggatgaactatttttgcatatgggttcttgtacaaaaactacaaattggcgacaaatggaagcctatatgttgtagcttgtgttgtgttcagaaggaactcaaaatatagtggagaagtgtgaaaccatggtggtccatttcagtgttattcatacattatatacgtgtgctttaaacattaatatgctttaaagtttttataacccaaaaaaaaaaaaaaaaaaaaaaaaaaaaaaaaaaangaaaa

SEQ ID NO: 109389 - DNA, 696 bp, Glycine max
  Clone ID: PAT_MRT3847_69793C.1
acaattcatactgatgataacattggttgttagtgtaaaattcttttacactaattaatggtatcggtatgaagtatgatttattactttgtggatgcttaagatgcttcataaatgatgattgcaggtacgagtgataactaggaaaacttgtgaaccactggaggaagattccttcaggccaatccttcaccactatgatggtcccaagttccgtcttgagctgaatgtgcccgaggtattttatttttatcttgctgaatattggtcccatttgaaagaagatactaacatggttcagtgtttttatttttcctggtccgctaaactctatcgctttttgggtttataggcgttgtctcttctggatatttttgcagaacaagacaccttcaatgacactttcgaggctttgccggcataaaaggagattaatagcaaataatgcaacaagaatatcactcacagagacaatagataattagaggtttcggttggtttgaaagttatattaagtatggacttaagaagagagtccgaaagacaaaacaaaatgaatatatagcggagggcgcttggatattcaacaacctatatataatgtattactggtacttttgtatagaggatggtccattataagtattatacacatatatactaagagaatagaataagaatgaactatttttgcaa

SEQ ID NO: 109390 - DNA, 784 bp, Glycine max
  Clone ID: PAT_MRT3847_69794C.1
tttgaatgacttaacaacaccaagtcaaggttcatcagaacctgtagcagggtggcttgatctgtttagtagtcgatattggaaaggtatcctaaatttcagttaaagctaattctaggtttggtaacaccatggacaaaaataattttcgctgataatgctaacctgcatctttggaggctttttcataaaaattccctttctttaagggtgtttatgtaaggaggttcgacgtaaaattcataatattttgataattatatcttgaatgatgtttcgtgaaaatcagttctcccggttcaacctaaacccaatgcatagatcaggtttgataaccaatgagacttccattagatgtttgatttcatttaggcccttttctatacctgatatatttgtatgaagatttattatttaccaataatcttatcattgttcatgttttaatttcactgacaacttgtttttcgtttactatatagttgattaaatgaattcttatatgaaatagtatagcacttccttaaaatatgccttgtttcagttgtcagtgttggggcagcacttttcttgttccagcagttggctggaataaatgctgtagtgtattattcaacttctgtgttccgtagtgctggaattgcttctgatgttgcagcaagtgccttggttggcgcatcaaatgtttttggttagtatttttattcttaaaaatgtttattgtgcattcagtaaaagaaggttattgtatatgttccacaaacatgatatttttttctgattg

SEQ ID NO: 109391 - DNA, 135 bp, Glycine max
  Clone ID: PAT_MRT3847_69795C.1
gctatgactagatattgcaggtttttgctctttggttttgaggaggatgagcttggttttgagaggggaagtcacaagaagcctaagaggaggttgattactcaggacatagctgaaacgtttttgactgttcct

SEQ ID NO: 109392 - DNA, 327 bp, Glycine max
  Clone ID: PAT_MRT3847_69796C.1
ggctcgaggtgatgcttggatcagcgactatgttgtttttgcaacggggattcagccttctgaacgtctgccaccatccattcggagataaatgctgctatcaggacatgacgcggtgggtcatgaccaagtgcatagcctagacggacgactgctattgatctatgtggcctgatcacggaggatttcatcagggtgcattatgtgtactaaaggagccctgagctagggattcactgggaaacacacaacacccgaaagaaaactgtggctctcaggaacaactctaccgactgtggtgatttacagacaagccttccggttttt

SEQ ID NO: 109393 - DNA, 774 bp, Glycine max
  unsure (1)..(774): unsure at all n locations
  Clone ID: PAT_MRT3847_69797C.1
ttacgaattcgagctctgtacccggggatcctctagagtcgacctgcagacaaacataacactcaatctaaattacaggcacaaagactaattaattgcaccacactgtacagactaattcaagacttgctgataactttctttaagaaaaagaaaaagaatccaacagtgtaccagaaaatcacaatagaaaagtcaaaagccacctcaatttccagcaagattccgtaaccgtacttcttcctgacaaataaacaaaaaggaaagatcattaaactgagaattcaaggcaacacaggtcttaaaaacattccagagaccaaaagcttcatataaagaaccacgctctaaactttggatttctgatgctctaactaatctatttcaaccaacattccaccataaaattcaatcataataagtttccattaattgcatccaccaattagaaactaaatacataataataaaaagactccacacaaccaccactgtgcttcaacagtgaacacaaggncttgtaaaaatagtcggaaaaaaaaaggaagaacaatctatgagtaaagtatgaaaaactactcgatcatcttgtaagttcatttaaaactagttcgtgtaaaagatttccacatacgcagcgtgacgcactaatcacgccccgtacccacaaacacctttattattcacagttcanaacataaatcaaagccaaatactgagaacaataagctatttcgattccatttttcatacgacttccaaacaattaaaaat

SEQ ID NO: 109394 - DNA, 578 bp, Glycine max
  Clone ID: PAT_MRT3847_69798C.1
actctagaatgaacttatatactttaaccatacatataaatatctctttattcttttttcaatctcaatttcattaatggaaaattttaccaaaccatagatggtgacattttccaggaagattttggctcaaaaacatgacccaacaagtcaaagaaaatgaacttaaaacaactgaaaaaatagacttgttgatccatctccgaaggtccgcagatcagctggttttaccaatgccctgcataatggacaagttcgttctctctcaaacctgaaaaacaaatgtatctttgttggttaagagagaactgataagtacggacgactatgaacaaatcaaaatacaatctaaatgactcctgtacaagtcaaaggcatctacatacttatcatagacagttattgataggtagaaacaattgatgaatataaacgttgagaaaataaaagcttttcatagagtcggagtcctaaattttgaggaaagtacttctgaccatgaagcgcacagaatagtagcagagtgcactttctagaaaaattttcatttccatcagcatcacatttttttcttcact

SEQ ID NO: 109395 - DNA, 957 bp, Glycine max
  Clone ID: PAT_MRT3847_69799C.1
ggctcgagagattatatgtaattaatatattaccaattatcaatatttttttatcaaaattttatttcgtgttcacactactccttttgctttgactagtgtttcgcaggtagtaaaaaaggatataaaaagatcccagagagaaaataagaactttatagctcaaacctcaggaaaaagaaaaaggggttcctaattactgtgcagagcttgtagccatggcattcatagagaaagctgtgtttttcttgatgatgatgatgacagctttccaagtttcacatgcagctgtgcacaaggttggggactctgctggttggaccatcattggtaatatagattacaagaagtgggctgctactaagaacttccaagttggtgacactatcatttttgaatataatgcgaagttccacaacgtgatgcgagtgacgcatgctatgtacaagtcatgcaatgcatcatcccctttgacgaccatgagcacaggcaatgacaccataaagataaccaactatggtcaccacttcttcttgtgtggcatccctggtcactgccaagcaggacagaaggttgatattaacgtggtgaaggtatctgctgcagctgcaccgtcaccaacatcagcaatggcctctccagttccacctgccaatgtacctgcaccttctcctaacaatgcagccccattcattgttgtaaagggagctggtattgctttaatgacactgcttgcacttgctctttctagctatgcttgatagggaattttctattttgtacttgttagttcttaaaagtttgggggttatgcggccatttggattttttttttttatgggggggcatgtcaacaaatttttataaagttttataatcaggatccttcgcctaaatgaaaggcatccctgtaaacgtttttcaaagccaagatttttttcctttttccccgggaac

SEQ ID NO: 109396 - DNA, 625 bp, Glycine max
  Clone ID: PAT_MRT3847_6979C.1
taaaaaggtcaaaatgaaaccgtagatcacaaagctcgaagagcagtgtaaggtacaatgatttatagtagatcacaaaaatctatagtatatgtacaaatatatacaacactgacttgggaccacatagctgaataacattgtggtttacatgttgccaagctaaagcttcagaaagtagcctatctccaccaaagtaagaaagaaaattagaagtccatacaaaacaaaaagttggaaaagactaatacccctgacaataggggaagaaatggtgttccaatcccatttttgaacttgagaataagcaatgtcaaggcactgaaataaagataacaagacagcttcgcaaataatacgagtaaaaatatcaaaagaatgcaatgaaagtcctataagcctactagacagcagctatcacatgtttgttacttaggcaagacaaaggggcaatggaataaccaaaattggctattttcatgatttccctttcccagtagtagctgcttcccgttgattacgaaaatggctgagaagctgttgtgccttttcctttgctcttggtgtcccggatatcgataatgccaccaggggagggacagctcggacgcgtgggtcgccccgg

SEQ ID NO: 109397 - DNA, 526 bp, Glycine max
  Clone ID: PAT_MRT3847_697C.1
aacatgaatatgattattatagacaccttctaacatactctaaccatgatttcttacatgagagcctaaatcatctaatattgcttttaatcccttaaaagttatattaaataatttgcattatttatatcaaaattaattgtcacaaaatttattatttaaatttacatgcgtgttaaatatgcattagaaaattttagtgttatttataacaacattatatattttataatgcattagctgagtttattagagcgctaacaacctaaaagtcataggttcaagttttatttgggtcattaattttaaattaatttgacacaaatatttttcaaagatatagggtttatggaagggcaattttggaaaaatgaaaaattgctggttgcacctagcaacaccctatcaacaaacgtgaagggcaagagggttgggtttgtgacctgtgtcgcaaagcaagcaatgagagctacgatcaaactcagacctgcgttagccatggtggtggtggaggcggtggtttcga

SEQ ID NO: 109398 - DNA, 348 bp, Glycine max
  Clone ID: PAT_MRT3847_69800C.1
cccacacgttctccatgatgaaggaagggctactttacatctactacatttcgggttagagcatgcaagcttttgcgcattccccttcccttgcacagcttcagaagaaggggttctaggttatgtacatggactatgctatcgacgagagttcataatagtcagcttatggcattcttctgtatgaagtttgcttcaggtacttcaacttgcctaatattatgcacaagcgctgacttcatgatatactctggcgctataaacgtgttatagagcaggctttaccacgtggtaaaggatgtactatgtgacaaagagactacaggaagacttggaagaagcaatttt

SEQ ID NO: 109399 - DNA, 346 bp, Glycine max
  Clone ID: PAT_MRT3847_69801C.1
tttttaattaaagccccattgacagatttatgaacttagggtaacgaatgtcactataatttagcaacatctttcagacatgtttacatgtttaaacccgtgtgggccaatgaattcgacgctgacttgcgagactcgataaacataacggtgagactgtctacatgttagagacctaaatgtgatttcactacgggccgtctggacataaaatgtgcctatgtaggccattattcgaacgccctcataaacacaaaggttgttgaagcagaccgcatcagtcctatgcaccaagggcaagctcttaaggggggaattatgcattatgggatccaacgatggccac

SEQ ID NO: 109400 - DNA, 394 bp, Glycine max
  Clone ID: PAT_MRT3847_69802C.1
caaaacccacgaaggggccaggtacttttcaaaaatagaggctaagagtccccccatctgaaaggcgtggaggggcctgatcctagatgccaaccatgccgtatcaccggaccattataggaaggcctggctaagaagtccacttgggaggggaaagaaaaagcccttgctgacgccccaaattacgttattgacggactgagctcaagacgtttttgcccccacccatttgtttaaaagaggggcccttttttaaaaacacagaagggggcatagcctgaatagcccaagctggaaaaacaccctttaatgggtccacatccacctttaggaataccccccttgggaaactttttaccaacgcatccaatataggggcatggaaacggcttgg

SEQ ID NO: 109401 - DNA, 313 bp, Glycine max
  Clone ID: PAT_MRT3847_69803C.1
ttcttctaatcctgtgacgtcattcatcacttatccttactatcctcttccttcacaatcataatcatactaaacatccttcctattttaaaacattttttatatctttttttaatcacctatcatactttaattattcaatcctctctatactctatcaactactattcaacatacattcttctcatatatctctccacaatacactaccccatttatatctcctttttttaactcaatctacaacattatttacttttttctttaacctttatataccctaacttaaccaccttcttatccaatttcttat

SEQ ID NO: 109402 - DNA, 464 bp, Glycine max
  Clone ID: PAT_MRT3847_69804C.1
tcactttttatttcttaacccaacacttctatttttctgggggggattgtttcagggagttgttccctttgttcccccacccgaaaactaaagaaaaataatcgggcatctgctccccaccccttacccaaaatcatccttcaaaagggggaggggaaaattaccacaacccggttccccagaattggcctaatgcccaaactaagcccaaaattcatgggcgggaggggtctttaaaggccgcccccggccggtaaggttcaatcatttctccaaatatccccccctgggggccccccacccgcaggggccgatgaatcctccctctctttggttaccccaatcccaccaccgccctggctaggtgcagctcctgcggggcccaccgcaggcccctccacccctggggggcttttcctccccacaaaaatgaaccccaagaaaaccggcccgaagcccacccc

SEQ ID NO: 109403 - DNA, 996 bp, Glycine max
  Clone ID: PAT_MRT3847_69805C.1
ctcaccccttatccatagctctaagcaattcccatacagcttcccaagctctttcatcatctacaactcttcccaatctcccagtagctcagctgcaactgcatatcaccacaatggccgcagagacagaaaacacgcttcagaaggtcgactctctgactgaccaccaagatggcgccgctaagaagggccaccgcagagtcagctccatggctgctgatgtctaccggatcgaggatctagaaaaggaaggcaagaagattgagatcgcaatcgaaacccagaagctgaattggaagctgaacaagtcaccatccactgtcgaagacccatcagtcttgaaaatgccactcaccgagcccaagctcaagtccatcgccctgcacttcccgctaggcctagcatgtcaccgcacggaacatgaaaaggtgtcaccatcaaggatgcactagatgccatccacaagcagttcatgacgcgcgcagatgacgagttcgaagagccgtacctcatgggcttcgagtgggacccagaagagtgctacacccgcttttcgtccaccagtcggccgtcccgacggtaaagaacgatttcggctcaagcaagaagaagaagaagaacaaggccgagggagaggagggttcctaaatgaacgactcgcccccttccctgacttcgacttctacacacagcctcagtcatacttctgtgcttcggcaacggtatgtgcggggtatggatatgcactcgggtgctggtcaatcttcatatcgatatgggaagagcgagcgcgtctgctgtgatggcgtggctggtatactgtatgcctgcattggcagacggtgtacttgctgtggctatcgagtggtggatatgcgtcgtggaaccgttcgcgggatgctcgctggaaaggcagtatctgctcatgtatgctctcgggcactctttcgggttgctgaaaagcacctgacataatgagaagacctgactatcgtg

SEQ ID NO: 109404 - DNA, 428 bp, Glycine max
  Clone ID: PAT_MRT3847_69806C.1
ggctcgagggcagatacaggagagtgttttttcgtgagatcgccctgccttgtgcagcctgaatgttcatgtactcggactcccaaaacgcaggtagggctacatacctaccaacaacacgaatggggcgagcataatgcacagccatcacgaacttgtggactcgatagcattgtatctcgaggatgacgtgggttgttgacgagaccgtcaggaaagagaatggtgtgccttaatgaaagcccacaaaggaagttagcataagaaaaactatttgcaactccacatcacctgaccgggagcgctaactaagtgaaatagctggcagggaatcaggatatgagggctgatgacattgtaaccatcaacaccgatgcgggggccatgatcagaactgtaagtatgaagaggatgattacaacaggaca

SEQ ID NO: 109405 - DNA, 775 bp, Glycine max
  unsure (1)..(775): unsure at all n locations
  Clone ID: PAT_MRT3847_69807C.1
tnnnnnnntttttttttttttccgtaaactactctgttatggaatttttattattcaaataatactgaaaacaaatgaaggaggccataataaattgtagcctctagtaaaatgcctataaataatcctcgagaattaaaacaaatacatttaaaaatacatgacaattgccaaatgatgaaaaaggcgctacctttcacgttatatatatatatatatattcctgggacccatttagatgaaatcatacgctttaattcccattgtcaataccacagattacacggccatgatgagcgtcccttgaacaaacagctgcatcaccagactacagaaggtgatgccttgtatcggccaccttaagttccaacaagaaaagaaaaacacatcaacaaaaatgctatggatgacctcaatcaaacatccttccaaagagtgtagtgcattgaaaaaaacctttacaacagcacaaagtgtgcatatgcataaaaggggcttcagattatttccttatcgttgagaagacgagcttcttgtcatgagagagaaaaatacagtttattgcataggaacctaccatttcctgtgcaagatccaccggtttcataaatatgtgattagtttacccaccactacctgtgcagggttcaccagcttttctaaataggtgattgggtctttctctctcgtcgtaacttgccagaggagattctccagttctaaggggaaaatgagaaggatccaattgtatatttctatataactcaactagact

SEQ ID NO: 109406 - DNA, 104 bp, Glycine max
  Clone ID: PAT_MRT3847_69808C.1
catatgtttaggtgtatgttgattagagcaccgacagtggtgaaggttagggaatgtcctgggacatcattggactccatctactctggtttgaaatattggga

SEQ ID NO: 109407 - DNA, 672 bp, Glycine max
  unsure (1)..(672): unsure at all n locations
  Clone ID: PAT_MRT3847_69809C.1
attaatntttgggtttacgagctcattagttggcggccgcccttanaanaatagttggggggcaaaacaaacatttcatacacagtgcaggaaaataacaaactacattatagtttacatgtacaacaaacacacttgcaacaccctgtgcatgaatcaactgacaatttgatttgccccttcattatggtttggagtttaagttcatgcaacatttcatgctaattttgcacacaagaaaaaaaagggtatttttttcttcattaattaaatgcatggatagactaaaacatgcacaagcatagattagacttcagcaaaaggatggagtctagccgcagggaaacattgcaagggatgtgccctaggaagggccattcctggtccctcttccatgtcaaccattcccttcccttcttcaccaaccttccattcaaaacactgaatcattccagctagggtgttgggaataatctgcaaagctagtgaagcaccagggcagcttcttctcccagctccaaatgacaaaagttcaaaatgctgccccttcagatccaaaggactctgtccctcttcgttaaggaacctctctggcttaaactcaagtggattttcccaatagttagggtccctaccaatggcccacacatttacaaacaaagtggtcaatgc

SEQ ID NO: 109408 - DNA, 236 bp, Glycine max
  Clone ID: PAT_MRT3847_6980C.1
agagaaaactgtaagtaatattactagggaggattatatggatatgggctgtaagcgacgcaaaaacgacattgggtcaaaagctaatcacggtacgcacaccttatgttgataagactaactcccgaagtggcggatatggtttgaccaactagggtgtacagcaataattaggatatacgcttctagcaattataataatgacgtattgggaagggggtgatttatggtttaag

SEQ ID NO: 109409 - DNA, 465 bp, Glycine max
  Clone ID: PAT_MRT3847_69810C.1
acattttctaatatgcgcatctgaggcgagtttctgggtagttgtcacctctttgagccttttatattcttcctccgctgtgcgtcgcttatgttccagggcctcgacttcactccgtttctcatccatggcctctttaatgttgtccaacaggttccgtctttccagatccgcgtcaataccacgctttctccgctcgtttatctccttgcggagtgcctggagattactgcgaacaatacctcgaaggtccaagttcaacagatgtgctggatgatagccagtgaaaggctcggctagaagcctatctgcttctggagagatcctgctaggaatgccaccaatctgcgatgtggagaaactacgctcgttcacatttaggcccagctcatattcttgtccgttcgcattgacggcagttgacgggatgagactgttctggtatccagcgtattgtaggtcttg

SEQ ID NO: 109410 - DNA, 665 bp, Glycine max
  Clone ID: PAT_MRT3847_69811C.1
tcggcccccacgcgtccgcccacgcgtccggtttgaagaaaaatgaatctaaaggattcaaagttgatttgctctttcatactgcttaattttcttttcttcagttgttttgcagctgataatctcccgtgccctccaaaatctactatcccaccttcctcttcaccgcagaaatgccccaaagacacgctcaagtttggtgtgtgtggaagttggttaggcttggttaaagaagtaattgggacaaaaccaagtgaagagtgctgcatccttttgaaaggtctcgctgatcttgaagcagcactgtgtttgtgcacagctattaaagccaatgtgttgggagctgtcaaggtcaaagtgcatgttgctgttagtttgcttgttaatgcttgtggaaagaaggttccatctggatttgtatgtgcttagaatttagagatactgtctctgtcttttcggtatttgtcatagttgcttttagttaaataatttaaatgcatattggacttcaatttgtttggggatactgaagttgacaaagctgtatatatcttccgaacatgttgaactctaaatttgatcaatgtataattcgattctcgtaaaaaaaaaaaaaaaaactcgagactagaaaaaaaaaaaaaaaaaaaaaaaaaaaaaaaaaa

SEQ ID NO: 109411 - DNA, 1885 bp, Glycine max
  unsure (1)..(1885): unsure at all n locations
  Clone ID: PAT_MRT3847_69812C.1
ggtgaaaggatggaaactaggcattaacggggggattccttttgtttttattcccctgaattcccataagcggcgtttaaaaatatgggggtcatattcccaccgggtttagtagcattatgggaggtccatgatcattgctgatgaataagtttgatagccactagattatgactgtgagtgaaggggaaacatgtctttctgctaatgaatcttgtcccacaaatgctttacagaatgattgtatgatgctatttcccccctcatcatctttggagagggtatactttggtttttttgtccaccgttatactttatttaaactcttgctaggcataaattatccgtggggttatttaacccaaaattattatttgcagctgtatgtggtcgggatcttgtcaatttggacctttaaatgactttgtcttaattatttcatagccctacgcgatcaagatccttctgcatcatctcccttcatataacatcgtctctcccgatttgcttatatctctccaccattgagtcctgtcttggactgaaaaaagccagattgtggtggaagcatgtcgaacctcttctgtttttgaagttcaggctgacaaaataaggagagagatatgattggtaggagaaagatgaagccctggtggtaagattagtaatgtaagtggatctcagaccctagggctgatggcgagacgagttccaaactttattctgaggagaattaacaataacaatgctggtttattagaaggttcaaagaggtgaatttttttgtgatttgaataattccatatctccattccgctagcgagggttctgctgaattaggtaacctgttttcagagcatactgatgaagttagaaagttgatcaacagatgtcatttaaagcacttgtttgaagaatattcttcagggaaatgtgttgcttaccacaacagtccacaacaacatacagaactgtggcagtacttccaacgtgcaacaatcaaccgaggctcaaccaccacatcaacatcaacagcagcagtgtttgcactcatcagagaacggggtggggagtctgagaatgttgaaagaggatgaggatgaggacgatgattcggaggagttttctgatgaggatgaagaggaatcaggagaaggaggatcaaggggtatggaggaggatgaaaatgatgtgatgaggaggagagcaaggaataagggagggtttggtgtttcataatcatcacagatgatgcagcaattgagtggtgaagtgagtggtgtgttgcaagacggagggaagagtgcttgggagaaaaaacagtggatgaagaagagggttgtgcagttggaggagcagcaggtgagttatcaaatgcaggcgtttgagttggaaaagcagcggttgaagtgggccaggtttagcagcaagaaggagagggaaatggagaaagacaagcttcaaaatgaaaggaggaggttggaaatagagagaatggtcttgctacttcgccataaggagcttgaattggtcaatgttcagcagcagcagcatcaacaacaacattcttctacctaggccagaagaaattactgtgtaaattttatgtatggtagttgaaattataagagcatatgtagactaggcgaaatagatgaaaatgattgttcattttctgggctcattctatgtaatttcaaatatatagtatgcttgtttgtagacagttttttctttcttgtgttaactgttaaataaatatatagcatgttttactatatctttacatccttcgagttctaaaaaacatgctttgatgtattacttttaattttgtttttagctatgcttaagtaaatctgtcacttcctccttcaagtnngat

SEQ ID NO: 109412 - DNA, 563 bp, Glycine max
  Clone ID: PAT_MRT3847_69813C.1
ggaaaaatttgtctgatttatctgtgtgttagtttttttttattattatttcgacacctatcaagtgttataggtgagcaacagaatgtttggtccagtaagatcttagtttcttatttgatgatattccttgtttttgattgactccacatgtgatgacagtaatgtagatgaatgaaggtatgaaaatgcagggctctgtgattattggaagtaatttgtttaaaagatgtgatcttttctttacttgtacgaaatggaaatatctttattataaatatatatactcatatacctctatttttttgttgtttggaaagaaaagtgggatttctatcaaaaatgctgtgcaaactgccaaatttcatgtcaaaattccgcatgtctttttggggcatgggtagtagttaatttacatatccctttttcacaaatctgtgccaatgtatcgtgactgtacctattgtcatttagttgtttttcatgtgtacataatcagtcacataacatcagtcatattatcatttatgattgtacatagtacttgctgtaggcaaaaccct

SEQ ID NO: 109413 - DNA, 591 bp, Glycine max
  Clone ID: PAT_MRT3847_69814C.1
ggacgatgattcggatgagttttctgatgaggatgaagatgaatcaggagaaggaggatcaaggggtatggaggaggatgaaaatgatcatgtgatgaggaagagtgcttgggagaaaaagcagtggatgaagaagaaggtggtgcagttggaggagcagcaggtgagttatcaaatgcaagcgtttgagatggaaaagcagcggttgaagtgggcgaggtttagcagcaagaaggagagggaaatggagaaagataagcttcaaaatgaaaggaagaggttggaaatagaaagaatggtcttgctacttcgccataaggagcttgaattggttaatgttcagcagcagcatcaacagcaacattcttctacctagctaggctagaagaaattactgtgtaaattttatgtatggttaattgaaattttaagagcatatgtagactaggcgaaatagatgaaaatgattgttcattttctgggttcattctatgtaatttccaaatatatagtatgcttgtttgtagacagttttttttttcttgtgttaactgttaactaattaatatctttacatcttcgagttctaaa

SEQ ID NO: 109414 - DNA, 528 bp, Glycine max
  Clone ID: PAT_MRT3847_69815C.1
gatgtgcggtcaggactggttggagaatggaaattgggttggtgggtctgttccaggtaatcctagcaactggaggacgagtgagaatgctagtgtttttggaggagatgagcattgtttgacggagaggtcttattgtggtcttttgtttttggtttgcaagcttttgacatctttcttcaagagcattagatggctctggggaaaggcttttacagttagttcaagggaagaatgcccttctgatgctgaggcactcttagctaaaaggggtgaaaatgaggcaagcctcaatgaaagtagaggggaaaaagcacgtaggaaagctgaggagaaaaggcaggctatgctagagaaagaactattggaggaggaagaagagaaaacagaaggagggagggtttaaggttatgtgggggagcgtagggaaactggagagatgtaaaaagtgggaagctgaataaagatcacagcaggatcatcataatctcattaaggagaaaggaccggtcagaagagaagcttgaa

SEQ ID NO: 109415 - DNA, 411 bp, Glycine max
  Clone ID: PAT_MRT3847_69816C.1
cgcaaaccattacagaaacttgaactgatacgcgctccatctatgtttctgttccaggagttgcatcgtcagtagtacaggtacaatacccaacaccaaattttgtcgctatacaggtcacgagaaaccgcactcgctccttggagacatgagaaacgaatagttgaagaggcaagtggcaaagctgcaagagggggatgctgaggcaatggacactgagaacgaagctagtagtgcagaggtatgcagcagggaagcctatagacactgatgaggagataacgaaggagatgctagggaatgcggcatagacggaagatgaagaggacgagtctgattctgattgtgaggaaatagatgacactgatagtgatgatgaagaagatcttgatgctgagttaatgggaggaa

SEQ ID NO: 109416 - DNA, 350 bp, Glycine max
  Clone ID: PAT_MRT3847_69817C.1
tagctgctcaatgtgtgcgtcgtggagtagctatctgtctttatacaaacattgtcctcgcagtatatggctggcggcagaaacggacgcactgaactgaggtgctgatctgttacgcgctgtccttcccgcccatgagcttcagcgttgcgctatgtagacggttggcatttggcctctttagtctctatctacttaatggttaccatgcgctattatcgccaatgcacttatctcacatataggatgcgtgctgtgaccatggtctgcatgagatagaacactcagtgccagtgttttgaagctataccttgtcaccagtaaccctaactggacctccctctcgtttg

SEQ ID NO: 109417 - DNA, 349 bp, Glycine max
  Clone ID: PAT_MRT3847_69818C.1
atgttgttctttttttgctgggggttgggtttttttctttaaaaggtacacccaaatcccccatttttgaacccggggtaaaaatttgctaaaaatttggaacacccccccccttgggcccccccccatcaaaagtggggtttggcccccgccctttttatcttttattggggaaaaaacctggggggaggcttggggggcccccccccaaaaaagggggcccttattataggcggggggggggctccagaaatcccccccgctgccttggggggaaacatctacgtcccgctcgcccggaaaattgccccgggcgcccatacaagcggggggggctttggcccccaaa

SEQ ID NO: 109418 - DNA, 418 bp, Glycine max
  Clone ID: PAT_MRT3847_69819C.1
gggggacgaatataaaacatgtaataccctaataaatgggacaagaaacccagccttttttttattaaaattaacaatcaatagggccttcaaaggtaataaaacagtccccctcggaaattttcccgggacaaaattacgatgtcaaaaggcgggaaactaaatttccaattccaattcaaaggcaaaaatggcgtggattggaaaactttatttacgaccccggggttcctccttttccttttctcgctttttggaaagcctttaaaaaacaccctttgttttacattggggacaattcgacaaattatagtaagggggggctacataaactaacccactccggtttgggggccaggcaatttgagggatgcaagaaccccccctggttgtttttcactggaaaaaaaatgtcccg

SEQ ID NO: 109419 - DNA, 573 bp, Glycine max
  Clone ID: PAT_MRT3847_6981C.1
acggctgggagaagcgacagaagggggagtttacgctaaaccctaaacctcacagcacacagagtttcgctttcggttagtttctccgccgtcgcagtagcactcacagcttcgctaggttaaatggcaatgcctgttaatgatgatacactggttgaggctgaaactgaagatcagagagaagaaatgtcatcatctgaatcagagcaggatgaagatgtgaaattaactgaaccatctaaaaatgcagtgtataacagagatgctctactagataaacttggagacatcagttggccagagaatgtggaatggatacacaaactctctgttgatgttgatcaagagcaagaagtagatgtcaatgatgacttggcacgagaacttgcgttttacacacaggcattggagggaactaaagaggcctttgagaaatttcagtcaatgggtctccctttcctgagacctgcagactattatgcagaaatggtgaagacagatggccacatgggaaaaggggaaagggcggctattagcagagaagcgaaagatggaagaggctgatgagagaag

SEQ ID NO: 109420 - DNA, 413 bp, Glycine max
  unsure (1)..(413): unsure at all n locations
  Clone ID: PAT_MRT3847_69820C.1
aggaaacaaaagaattgagaaaaaggggggagaanncacagccaagccngaacgcactattaaaggagnncaagagaaagaggaggagagggagagggaggctttttagattccctcgntgagggggtgganagacccaagaaaaacnagngaaagaaaaaccnggagggaggcggggggagcaccaccacgcgncccnacccggggaaaggaagagcaganaacccgcgggagaggaaaggggaaggaagagcaaccggcagacgcacaaggcgagcaggcgagagacgcaggggagcaaggccgaaacgccgcaagcagcgagggaggagcgagggaaaaagccgggagaagaagaaaagagcaagagggggacgaggaagaaaaccacgacccccgcagcagacgggaaa

SEQ ID NO: 109421 - DNA, 234 bp, Glycine max
  Clone ID: PAT_MRT3847_69821C.1
cccctaaatttttcctcttcttaaatttaagccctccatccaccataaacaccagcagtgttagccctaactcacaaacccatttttttcaagttttagcaccacttttgatgaagtcgtcacaaaagcaactgttttggctaaattattagtattattgttggtaattttttacagggatggaggatataacaccagtaccagcaacagctacaacaacagccaaaaacgcaa

SEQ ID NO: 109422 - DNA, 293 bp, Glycine max
  Clone ID: PAT_MRT3847_69822C.1
ctttgtaatatttcttcttcttcttctacccttcaataggaatattccgtgcaaataccaccaacagcatcatgaccaccaacaagaagaacatgattggcgtcatgggtctattgctttataggaatttggcttgcaaattcatatacccttcatttttatccaagaaggtctccatggatgcgctatcgaagcagttggagaacatgatgtctgtgatctatcctgatactgtcagacatatacagcactataacaatggcatgtaacaagtatgtgggacgcattgctta

SEQ ID NO: 109423 - DNA, 2131 bp, Glycine max
  Clone ID: PAT_MRT3847_69823C.1
tgcgagaagacgacagaaggggaagtttatctctattaatatttgatatcagactattagattggtgacttcatttgtagaactaaagacatagagagtagataaatatttaatggttgtttatgattattaagtagcttattcgtaactcattctcaatacccttgctttaagaatcattgctatcagatgagttgagaacatgggtttcaagtatttgctggttgtgacgtgtgtgtgtgcttggtttggatccttggttgttacaacttcttctggtgatgggttaatgagggttagtctaaaaaggaggagtttagatattagcagtcttaattctgcaaagatcaaggaggttgttaatcatttaaaagcagatggagtgtatctgaagaattatcttgatgcacagtattttggcgaaattggtattgggtcacctccacaaagcttcagagttgtgtttgatactggaagctcgaacctgtgggtcccttctgccaaatgtgtcttgtctattgcttgctatttccattccaagtatagatcgaagctatctaacacctatacgaaaataggaacaccttgcaagatcccttatggccgtgggcacattcctggcttcatcagccaagataatataagagttggggacatcatcatcaaagatcaacaatttgctgagattacaaaggaaggaccgctggcgtttttagcaatgcattttgatgggatacttggacttggattccagaataagtcagtgggacaagtcacaccagtgtggtacaatatgatagaacaagggcacgtgagtcaaaagattttctccctttggctaaaccaagaccctgtggcaaaggtagggggtgagattgtctttggtggcattgactggaggcactttaagggtgaccacacttatgttccacttactcaaaaggattattggcagattgaggtgggagatattctaattgcaaacaatccaacagggctatgtgagggtggctgtgctgctattattgactcagggacctctttgattgccggtccaacaaaaattgtgactcaaattaaccgtgccattggagcagaaggatatgtgagttatgaatgtaaaaacatcatccataactacggtgattcaatatgggaatatataatttctgggttaaagcctgaaattatttgtgttgacattggactctgctcgcgtaatagaacatttataacaaatgatgttattgaaacagctacacataatgaaagttggggcgagtcacgaacaaaggagagccccttgtgtactttttgtgacatgattgtcttttggatgcaagttcagcttaagcaaaagaatacaaaggaaaaaatattaaaatatgtggatgagctgtgtgagaagcttcccaatcccgtgggacaaacatttatagactgcaatgatattgcaaacatgccacaaattacattcaccattggaaacaaatcatttcctctctctccagaacagtatatgctaagaattgaagaaggttgcaacactgtctgctatggtggttttgttcctctagatgtgccagctccacaaggtcccctctgggttcttggagatcttttcttgggggcttatcacacagtgtttgattatggcaatctccgtattggatttgctgaagctgcgtagtcaaaatttggtggtgttattacaatgccaaattgtttgtaggaaaaaaaaaagagaaagaaataaaggtttataggattttgcagcatttaaaaaccgcagaccctcggaatttcagtgctgcagggtctcttgtaaatgttgattagtaatttggtatacttcatgaataaaaattgtcccatgtaaacaaaaagctaagtttgtcatggtaatgcgactgcagagataaaaggtttaaaggtttaaaattaaatgcaccagccgggaatcgaacccgggtctgtaccgtggcagggtactattctaccactagaccactggtgcagtttgcttgtattccatatcttttgtatatattcaaaacaaaacagtggcgtaaagttaattgatcacttattaaaaaataaattttattaaaataaaaatattataaattag

SEQ ID NO: 109424 - DNA, 1814 bp, Glycine max
  Clone ID: PAT_MRT3847_69824C.1
cacggccgcgggatccgactgctgggctgctacccattggtctggctgctgctgatctgtacaaaaagcaccagcaatccttatctgcagccagcatcatgctccttatggaattatatccatctactgcctcacatgctcgtgagaggaagcagtgagtcaatcctactgaagaagttgcagaaagcttgctctgtcctggaaatatctggccctcccatggttcattttgaaaatgagtccttccagaatcacctcaactttctacaaaatatacatctccatgatcattttgtcattgttcaccttcttcagtatctgtgcataccgaaggaagcacatgggatactgagacttattcagtattagcaccctcgctaatcgatttatttgccaccttctttgatgtggtgaggtctcagctacctggcgtggtatcagtactgacagggttcattagaagtcctgttcagggtccagctagtactggagttgctggattagtgcgtctcacaggtgaccttggtaacaggctttcagcagaagaatggaaagagatttttctatgtttgaagggggcagccctgtcaacagtgccaggattcatgaaggtcttgagaaccatgaataatattgaggtgcctcacatttcacagtcttctgctgacttagtaagttcttctgatcatgacttgaacaatgatgaatttgatgatgacaatctgcaaacggccacatatgttgtgtcaagaatgaagaaccatatggctatgcatctacttattgtacaggttgcaactgatctgtacaaaaagcaccagcaatccttatgtgcagccagcatcaaagtccttattgaattatattcatctattgctttacatgctcgtgagatgaacagagagtcaatcctactgaagaagttgcagaaagcttgctctgtcctggaaatatctggccctcccatggttcattttgaaaatgagtccttccagaatcacctcaactttctacaaaatatacatctccatgatcattttgtgcatgatgagatagagctagaacaagagttagttgctgtgtgtgaaaccgtattggacatatacctaaattgtgctggttccagttccacttttcacaagtctgataccatgccagcgccacatcgaaaactccctctgagctcagcaaagaaggaagagatagctgctaggacatctttagtcatctcagcattgcaaggattggctggtctgaaaaaggattcattcaggaggtatattccacggttctttcacttactggtagatctcgtgaggagtgaacacacctctggagaagttcaacatgccctgagtaatatgttccgttcatctgttggccaaattataatggattgagttttagttttggcatactttggttttggacgttgctgaatatcaatcagcattttccttataagctaaagaacgagccattacatggtcatatcttgatttactcaccattgttgtgtagtgttactcttggttttttgtgattgtatgtgctattaatgtaaatgataaatttatttcaagcagaatactaaagtaccacagatagatagcgaagaaactaagttaggcagccgctggcagtctacgacttggcctaacttgtcccttttcaccaatggagactgagtcctagtggaaggagatactctctcctaaggaaccgaaacaatagtcttgttccttttcagatgttgtttaaggttgtgacataggaattaagatatataattaatattctttttttagattgtt

SEQ ID NO: 109425 - DNA, 252 bp, Glycine max
  Clone ID: PAT_MRT3847_69825C.1
gtgatgagcctgaaaagcagcaagaggagaatgaggaatggtttcatgtgccactctgaggcatcaactgcagtgtgcattgctgggtctgtggttgtgcctaggacaaggagtaggaggcatcagagaagtgtttctcttgatggtacaaggttgatcaactatgccaagtactccaaacttgttgactccagcactagcagcaggttcaattcagctcacaagaaatgtgactctgactctgtctctgta

SEQ ID NO: 109426 - DNA, 780 bp, Glycine max
  Clone ID: PAT_MRT3847_69826C.1
atggctttagcatatcctaacccccgagttaaagagcaaacacaaaacacaagtaaaattcaatcttgccttgaggacattctcagcctggacaggtgtgtccccataaaccagtttgtggaccaaggtgttatcgaaggtaatttcgatgcttctattgtggatgggaaaggtacaggacttggggttatttttagaaatgagtttggtgaagtcaaggctgctgctacaaagtttttgcccatttgtgttgaggttcatattgctgaagcactggtgtttcgatgggctattgaatctgctgcttacctaatgctaaatccagtggtttttgagtctgattgtcttcgcttagtttctgcttggtcctctagaaactccaattctaacagctactttgcgggtatcatcaaagattgtgcagttctgctttcaaattcttcttttaaggttttaacccatatgaatagatctgctaatagggcagctgacggtgctaagttagcttttttggcttttgaatcctattggattggggatgtccctcctcagatcggtgattttgttcaggatggtgtaaggcctgatggccatttttcgttcttcatatactcatcccaccacaaaggcagaagagaaagtaagactgaatggagtggcgtgcatggttcacctggtgaaattcttgccatgttaggtcaatctggaagtggcaaaacatctttgctagcagcattgggaagccagcttggagagaaactcaagcataacttacaatag

SEQ ID NO: 109427 - DNA, 249 bp, Glycine max
  Clone ID: PAT_MRT3847_69827C.1
tgctgccattttctaaaaggattcatacttgaagattaaacaaaggaaatactggctaccgaatactgcaaaccttacccgggaagaaataataaccaactcgcgctaggctatatcatggccaatccgtggactcatgattatcggattcataaccacgcttaccgagccgaacaggcgcatctgatgttgtgctccaccattctctacagcgacttatacatctacaacagctcattatacgctttg

SEQ ID NO: 109428 - DNA, 702 bp, Glycine max
  unsure (1)..(702): unsure at all n locations
  Clone ID: PAT_MRT3847_69828C.1
cgcgtacgtnngcttggattctcgagagcggccgccctttttttctttttttttttttttttttttttttttttttttgggggggcccctgtcggccggccttcccttctccgcgggttnntcccgggaggcctttgttcttttcagttccctcggctgctacaaactgaggtggccttttggcccggactcttggggcggggcgttttttgtcgtgcgcggcccngaagaccccgggcgggaccttttccggggtccgccccggggcccgccggccccaattcgggcccttaaaacttcttctggccttctctattccatccccctttccttccncctctttctctttctcccccccntncgcccggcccctcggggcggcttcctctttgttttttttttgggactccccggcccctcctctcnngcccccctcgtggggctttctcccttggtgggccgttggttggcctgtcccgctgaacgccttgggggtgcccgcctttggcccgctggcccgggtggccccgggggccggggcgggggggccccggccgcccccgcccaaccccggggcgcggccccccccccctgcggagaccctgggagcgcccttctgttcctccccggcccctcggccccggggggggtcttcccttcggggttcccttggcccccttggcccggggcgccaccccgggg

SEQ ID NO: 109429 - DNA, 810 bp, Glycine max
  Clone ID: PAT_MRT3847_69829C.1
atggctgaagcgctccatgtgcaaaactccccctcgaaccaaggtgttatcgaaggtaatttcgatgcttctattgtggatgggaaaggtacaggacttggggttatttttagaaatgagtttggtgaagtcaaggctgctgctacaaagtttttgcccatttgtgttgaggttcatattgctgaagcactggtgtttcgatgggctattgaatctgctgcttacctaatgctaaatccagtggtttttgagtctgattgtcttcgcttagtttctgcttggtcctctagaaactccaattctaacagctactttgcgggtatcatcaaagattgtgcagttctgctttcaaattcttcttttaaggttttaacccatatgaatagatctgctaatagggcagctgacggtgctaagttagcttttttggcttttgaatcctattggattggggatgtccctcctcagatcggtgattttgttcaggatggtgtaaggcctgatggccatttttcgttcttcatatactcatcccaggggcatatatttaagacgttatcaaaaggtgcagggggggatttcaaagatggagcaggagaggccaaacatagagtctccaactacttacaaatcaacagtgcaggaggaaaccacaaaggcagaagagaaagtaagactgaatggagtggcgtgcatggttcacctggtgaaattcttgccatgttaggtcaatctggaagtggcaaaacatctttgctagcagcattgggaagccagcttggagagaaactcaagcataacttacaatag

SEQ ID NO: 109430 - DNA, 3521 bp, Glycine max
  Clone ID: PAT_MRT3847_6982C.1
ctgcgagaagacgacagaagggggcgcgagtttacgctaaaccctaaacctcacagcacacagagtttcgctttcggttagtttctccaccgtcgcagtagcactcacagcttcgctaggttaaatggcaatgcctcttaatgatgatacactggttgaggctgaaactgaagatcagagagaagaaatgtcatcatctgaatcagagcaggatgaagatgtgaaattaatgaagcatctaaaaatatttgcggttctgcctgcaaattttcttccccaacaacatttgcggttctgcctgcaaattttcttcccctcaatctatattactcaggtggtgttcctgttcccctcaagcacccctgagattcattcccaaaaagcttaaaaaattctattcaattcaaattctaaatttaatttccatttcgttttcgttttctgttttgatttgatcttccaatggcgtccgatggcttcaccgacaagaacaccgtgttcagaaagctcaaggcgaagtccgaaaataagatgtgtttcgattgcaatgcgaagaaccctacctgggcgtccgtcacgtatgggatcttcctctgcatcgattgctccgccgttcaccgcagtctcggcgtgcacatcagcttcgtgaggtctacaaatttagactcatggagtcctgagcaactaaaaacgatgagctttggaggaaacaatcgtgcacatggtttctttaagcaacatggttggactgatggtggtaaaatagaggctaaatacacatctagagctgcagatttgtataggcaaattctttcaaaggaagtagcaaaaagtatggctgaggatggaggcttgccttcatcacctgttgcttctcagtctgcccagggggttaatgggcttccagaagtcaagaccaatgaagtgccaaaagaaaacactctggagaagccagaaaagcctgagagcacttcttcacctagagcttcacattcagtaatttcaggtactgttaagaaacctatcggtgctaaaaaagcagtgaagagtggggggcttggcgctcgtaaactcactaaaaagccaagtgagtctctctatgagcagaagcctgaggaaccccctgctccagttccatcttcaacaaacagtatgcctgctgggccatctccgacatctcggtttgaatatgtagaaaatgtccaatcatctgacttgaacactggaggttctcattttcttagtcatgtgtctccaccaaagtcatcaagcttctttgcagactttggaatggatggtggctttccaaagaaatctgggccaagttcctccaaagtgcaaattcaggaaactgacgaagcaagaaggaagttctcaaatgctaaatctatttcttcatctcaattttttggagatcagaacaaagctgcagatgtggattctcaagctactttgtctaagttttcgggttcaagtgccatctccagcgctgatctttttggtgactcaagagacaacaacatcgatcttactgctggtgacctcatcaatcgattatctttccaggcacaacaggatctctcttcccttaagaacattgcaggagagactggaaagaagctcagctcactggcctccacattgatgacagatcttcaggaccgaatcctctaaaatgtgtatgctctgtatttaagagaatctttggagtttgttacatatgccagccaattatgtttcaaatgtaatagaagagttcaatatacaattcttttagaaaataagatgctatattttcaggcttgtcatataggcgggtgtttctattttgtataacaggtactattagatgttgctaatgttttagatttctttctttttttgggttagacgataccagattgtgggtgaactcgtgaactctagtacgtttggatagagaattttaagtgaggaaagtaatttataagaaaatttaaattttagtaataaattacctttatacaaccattggaggtattacttgacatcagaactatcatcgtttatcatggtaagttcaattaaaactgaaattatataaccatgaaatcactggagtgctactgatagaaactaacttaaactagataggaccatttagaatttgcctattttaatagtaattaaaactgaattagtataatcatgaagtaagcaatgttacagtcatgggctgactaaaagatattatgtttgggcacattaatgttgctaccaaatcttaatagttgttaaaactggtagttaaatcaatgattggttgaaagatttacctttagttaaattaatgattggttgaaagatactgattggttaaaactgttctatttcttattttgaaaattatatctacatggttgatattcctgttacctgtaaacatttttttattatctcgcttaaatagatgtggccaatcatctataaaacatctatttttttttttaagaaattcatttaacctgcaccatattttgctttgctatgtatccataagattcaggaaactgaagaagcaagaagaagttctcaaatgctaaatctatttcttcatctcaatttttcaggcatgcaaagcagtgtataacagagatgctctactagataaacttggagacatcagttggccagagaatgtggaatggatacacaaactctctgctgatgttgatcaagagcaagaagtagatgtcaatgatgacttggcacgagaacttgcgttttacacacaggcattggagggaactaaggaagcatttgagaaatttcagtcaatgggtctgcctttcctgagacctgcagactattatgcagaaatggcgaagacagatggccacatggtaaaggtgaaaggtcggctattagcagagaagcgaaagatggaagaggctgacgagagaagaaaggctagggaggccaagagattggccaaagagattcaggctcagaaattaaaagaaagggctaagcagaaaaaggaggacattgaatctgttaagaaatggaggaagcagcggcaacaaagtgggtatgctgacaatggcaaagatgcagatatgggttttgactttgaggatggaaaagtatttgagaggtcaaataagaaaaggccaggggtgtctccaggggatcgttcaggagggaaggcaaagctagcctttggtaaaggaaagaaacagaagaaaagagatggtaagaattccaaatttggttttggaggcaagaagggaatgaaaaagcagaatactgctgacaccaccgatgattttggtaaatataacaagggtgctgtttctggaaacaagagaaagaggtaaaatgcaatcttctttgatctgttttgaggacgtgatgtcatggaagagcctaaggatgtatcttaggaattttcatatacttttttaattttattatttggatggatttatggtaacttcataagctttatcgacaattataaattcttaaatatctcctat

SEQ ID NO: 109431 - DNA, 197 bp, Glycine max
  Clone ID: PAT_MRT3847_69830C.1
gcttgcctgaggatccaaagtaattgtctgttctaccttgttgtgaataagcccgccagctttctgtcaaaggatattcaaactttatgtgtaatattaattctgctttcacttatacttgtctaatatcaaacgggggcttgataaaaaaataccttttttccctctgggaccaccaccccctcccaaaataaaag

SEQ ID NO: 109432 - DNA, 960 bp, Glycine max
  Clone ID: PAT_MRT3847_69831C.1
tacggcgcaagaagaccacagaaggggaaagaaaagtcgcatatccattgtgcgcacccaaatactacaagcatttcatttatttttccattccttataaaacccgaaaacaaaaaccacgcaatggtcacgtccaacaccaacaacaccatcctcaaaatctccaaactcgcgatcctcctcgttttgttcgcttcagtctgcaacgtcgctatgtcggactccaccgccaaacccctcgaccagcacgccaccacgggctctgaccctactgcgccagcggttcacatcgtgtacaccgagagaccacagaacgaggagcctgaggcctaccacatcagaaccctcacttcagtccttggcagtgaggaggctgcaaaggaagctttgttgtatagttacaagtctgcagccagtgggttctcagctaagcttactccggagcaggttgaacagatttcaaagctaccaggtgttcttcaagttgttcctagcaggacatatcagctccatggaccaaataacctgcagtagagaatgttcacctaaagttgtatcggttaaaccgttatctatgccatgtataaactaaactagtgtggctctagacttgtgccaataagaacatggaattaatatataataatacattactaatatttgtgctatatgtttatcaatgtgtcatgtattcaaagtggcaccaatggaccctgtgttgtgcttgtgcatattatcctgtaaaaccattgagaacttgttttgatgctttgagatgtaaatcctagtcaccgaggttgtgaccattaacttaattcggttcatttggtattaaacgtacgttgttaacctcctactgattttccccatggagctccccgttggcccatataacctgcaaattttttactactttacaatgtgcagagctaccaggtgttcttcaagttgttcctagca

SEQ ID NO: 109433 - DNA, 337 bp, Glycine max
  Clone ID: PAT_MRT3847_69832C.1
gcccccaaccacgcggagtaaccctgatttgctcacggtaattggcaaatattccaagacgcacgtataccacagcacgcgcatctgggccatcaaggccaaaaacagaggtgttttgcccctccacgatcccaagcccaaatcctaagaccccgccccaaacccggccaaggtctaccccgagctatgacgcgaagaaccccctcgagaataccacaaaagcaaacccgcaaaactcacgggtagccttactccaaccaccgttcagaacccgcttgctcccgacgtcaagggaaatatcgctcctttcctgaagccaactccctctgcgatggtt

SEQ ID NO: 109434 - DNA, 447 bp, Glycine max
  Clone ID: PAT_MRT3847_69833C.1
ggtcggtaaagtaaatttcgaaaaagacggggtagaactaaaaaattagagaggcactttatatgtagcttacttactggcctcctcacctctaaacataaagttgaaagcgagtgactgaaaaccggcgctcatgaggacttcgtctctgccgacggagactgaggaggagtggcggaggcggaaagacatgcagacgctgcgtcggatggaagcgaaaagacgccggtcggagaagcagaggggatcccgggaggtcgccggcgccggcgaggaggtggaggcagggaggagtgtggcaatgggattcaataagttcggttcttcggcggaggcgcggtgccgccgccgccggggtggggtgtgccaggaaagcaagttgttcttggtgatgtgatggggaagggaaaggggtttcaaggattgtttgggcaaccatcttctcac

SEQ ID NO: 109435 - DNA, 262 bp, Glycine max
  Clone ID: PAT_MRT3847_69834C.1
tcgagcgagaagcctgtgaaggaagccatggcccgattccgcaagaacctcgaggccattgtcagcgtgattgctgagcgcaacaagaagaagcagctgccatattactacttgtccccagaccggattccgaacagtgtggccatctgagcacactgccagtctcactgtgggaaggccagctcccagccagatggactccagcctgcctggcaggctgtctggccaggcctcttggcagtcacatctcttcctccgaggc

SEQ ID NO: 109436 - DNA, 278 bp, Glycine max
  Clone ID: PAT_MRT3847_69835C.1
gctcgggaaagggatcgtcgtcctctgacaccagcttgcgatcaacctcccaagccccaccggttcgatttctcgaaccccaaccttcaactctacaggaccaagggggttggtgcggtgacccaagccggactgaggacacacaaggcatgaaacacccgcaagcccgaacacgacaggtctatgagcgtggacaaaagttcctgacagagccatcaaagaattgggtgcgtggattaagtcatgggctaagatccagtttaaggggagcactgagg

SEQ ID NO: 109437 - DNA, 224 bp, Glycine max
  Clone ID: PAT_MRT3847_69836C.1
ttcttattataacataacatgatttgcttgtgtaggttgaagcattgtttgaactgataaaggggcttatcaaggattctgatgggatccctaatgatgagctggatgaagatgatttcaaagaggagcagaactctgtttcccgtctaatccagatgctttataatgatgatccagaagaaatgtttaagatcattgatactgtgaggaagccacaattaacc

SEQ ID NO: 109438 - DNA, 406 bp, Glycine max
  Clone ID: PAT_MRT3847_69837C.1
cacaggtgtccggtttaatatacttaatttttattctctctttgttgttgtcgtttgacacaatgcgtctctcgttcacctctgcagcaatcgctgctgtgctcggcggaagccaattagcctctgctgccgccgtcctccaccttgcgcccgccgtcccgccctcagaaatcgcaaagttctcaggtcccaagccgctcacgctcgatgaagctctgcggggcgttaagaatgtcaagattgagcagccgtttgacaaccagccccaatcccaatcaaatgagcctcatggcgacatgcgccaaccccaagatccgcgtggaatgggacgcattccccactgccgaccgacgagcatacggtaatgctatccgctgtctgctcaaccgggcgccgtctggagcat

SEQ ID NO: 109439 - DNA, 480 bp, Glycine max
  Clone ID: PAT_MRT3847_69838C.1
catggaccacaaaaaacattatgtccatgcaattaacatcaggcatccgaaaaataaaataaaaaaattgcttaaagcaaagggtcaaaagacccccccgcacagggataaataaaggccaacggtgggccacaagcaggttgggactttttcatatcaacactggaagggacccgctgaaaacaaaaatagaatggctctgaccctaggccctcacttaaattaaaactatctaagttctaaaacccaagaggggcattcttcgaaaagtgggaatttctgaggaaaagctatgttaaaaaaaattggcattttttaacaaaattcactggcatcttccttgcacctaaaggagcctgcacatacacattgttaagccaaaggggcagttttcacctgagggcaccgggaacacaccaaatcttgcagctggaatagccgttctctttgtcttacagttggaaaaagagcattttccat

SEQ ID NO: 109440 - DNA, 343 bp, Glycine max
  Clone ID: PAT_MRT3847_69839C.1
aatgttgaatatataccaatttttgtattattgggtttataactgtcaaaacaacaactgttttttctccattgtagttggaggtacccatcacgtgcaataaaacaatatcttctcgctcatctaatgagaccgcatgacatatgccacacttctgtatcatgaacctatgtgattactcccttctttaagaagattccctttttctatataaaaatattttatgatgctttgaaccatataccaagatgcccccacttgttaatatatgcttttacgggcgagcaggctcttgcgtgtgctaaaaatgtgctgttttgatttgccccacccacagaccact

SEQ ID NO: 109441 - DNA, 1569 bp, Glycine max
  Clone ID: PAT_MRT3847_6983C.1
ttacggctgcgagaagacgacagaagggggcggttctgcctgcaaattttcttcccctcaatcgtatattgctcaggtggtgttcctgttcccccccaagcacccctgagattcgttcgcaaaaagcttaataagaacaaaaaataaaaataatattcttcgttattatttcatttcaatttcgttttcgttttcgttttctgttttgatttgatcttccaatggcgtccgatggctttaccgacaagaacaccgtgttcagaaagctcaaggcgaagtctgaaaataagatgtgtttcgattgcaatgcgaagaaccctacctgggcgtccgtcacgtatgggatctttctctgcatcgattgctccgccgtacaccgcagtctcggcgtgcacatcagcttcgtgaggtctacaaatttagactcatggagtcctgagcaactaaaaacaatgagctttggaggaaacaatcatgcaatagatttctttcaagatcatgtaaggagctccatagagaacttcaaagcttgagggacatcagatctgaattacttactccgtctaaagattcaagaaagaggagggacatgactgatgttcgaattctttacagccaccacttggatgaagatattgttaagcatcagaagaagattttagcacggcttggagtttctgtggcttcctccattgcagatgcaacccatttcatagctaatcaatttgtgcgtacaaggaatatgttagaagctattgcttttggtaaaccggtggtcacacacttatggattgaaagctgtggtcaagctagctgttttattgatgagagaaattacatattgagggatgtgaaaaaggaaaaggagttaggtttcagcatgccagtttcactagcacatgcaatccagcatcctcttttaaagggtcgaagagtattggttaccacaaatactaaacctagtaaagagattgtttcaaatttagcgagagcagttcagggccaggtagtggagaaagtaggaagatctgttttcaagggcaatacaattgcagataatctactgatcttatcttgtgaagaagattatgcctcttgtgtgccttttcttgaaaagggggcaatggtgtacagttcagaactgttgctgaatggcatagttactcagaagctggagtatcaagaggcatcgactttttgcagacaatgtgaagaaaactcgttccaccttatggttgaaaagagatgacagaacatttattcctgtgactaaatgtaattagagtggctccatttttacttttcctcttgatcatttgtagtttaggtcatgtagatattttccaaaacacattttctaagtccccctctccgtaatatatttattatgtagaaatctttgaaaggtgtttttgctcttttctttcagtttgcccccttctgcgataatgttgtgacaattgtgatttgtgagtgatgctcgtaagacccgagggtataaatctgtggtagccgtggacatggcttgtgtttgtctgatgaaataacgtagtatgttgcattggtggt

SEQ ID NO: 109442 - DNA, 1048 bp, Glycine max
  Clone ID: PAT_MRT3847_69840C.1
taagactcaatttttttaaatccaaggatttatctaaccgggaaactcctggtgttttcaagcaatacaagtactttcttatacgggttgggaagcagcgactacgagaagctaggatccaagccattgattatcttattttgttacttgctggagcctgcttaggatcactttccaaatcaagtgaccaaacatttggtgcagctgggtacacccatacggtgattggtgtatctcttctgtgcaaaatagcggccttgagatcattttctctggataaattacactattggagggagagtgattctggcatgagcagcttggcttatttcctctctaaagacacaattgatcattttaatacactgatcaagcctgtggtgtatctttctatgttctatttcttcaccaatccgagatcaacttttgcagataattatgttgtgctgctttgtcttgtatactgtgtcactggcatagcatatgcattgtccatattttttgaacctggtgcagcccagctgtggtcagtacttctgccagttgttttgactctcattgcaacacaaccaaaagatagtaaagttttgaagaatatagctaatttatgctactctaagtgggctttacaagccttagttgttgcaaatgctgaaaggtatcagggagtgtggctcataactcgttgtggttcacttttgaaaagtggctataatcttcatgattggagtttgtgcatatctatcctcattctaatgggtgtaatttgccgggctatagcatttttctgtatggtcaccttccgaaagaagtaaaggccaaacttcaggctaccaaattttacgtctaacaaatctgagttgtacaaattggagaggccagcatgaccacttataggaatttcattaggattctcatgatttgaagaatgtctgataatttttttggggctgatactggttattggcctttatacattttagatgtgatcaattagtcatgtcattgttgcatggccatatttagtggttatgtttctttttttaaa

SEQ ID NO: 109443 - DNA, 300 bp, Glycine max
  unsure (1)..(300): unsure at all n locations
  Clone ID: PAT_MRT3847_69841C.1
gaaatgctgagacaagtgtngcganaatgttactcacttcatcgncncgcagtgnatgtgtacgcagtgccgcggtttatcggagnangcttngatctncttctacgtcgtcagagtcattgacgnnacaatcnccatcgaccgtgctncctttacaatcaacngagcatnctcacaancacnnngattcgaatcggcaacactcaaggataatcagttcgggagcctattcgtagtanacngncgagttgaaatctaactgtntactcacgangttggannagnattnccncncgagta

SEQ ID NO: 109444 - DNA, 730 bp, Glycine max
  Clone ID: PAT_MRT3847_69842C.1
aattcggctcgaggaaagaaagaaggagatgcatggcattggcctattgagagtgaaggaacatggtttcccacaataagccttacactgtagccaccctcttctttctcgcattgttccttatctccatcttcttcttcttctccaccagaacaactcttcaccccgctccctccatccactcagatctctacatccacctccagccactttctccgcctccgcccctccaacctctttctccgcctcctcctccttttccgtccccacactcctcctccgccaccactgaaacccaacctgagcctgttggtgacattgaggatgtcgcggacaatgccaccgacgccgaatctgatgcccagcctgtaacggagaatatcgccgaggacgtatcgttgagtttgaaggtgtgcgatttgttcacgggaacgtgggtgaaggatgaaagttacccgatttaccaaccgggttcttgcccttacgtggacgaggcttacgattgcaaagttaacggaagaaccgacaccctctacaccaattggcgctggaaacctgatgcctgtgatcttcccaggtttaatgccacagacttcttggtgagactgaaaggtaaaaaactaatgctggttggagattctatgaaccggaatcaatttgagtccattctgtgcatactacgtgaaggcctgcacaataagagcagaatgtatgaggtacacggacacaa

SEQ ID NO: 109445 - DNA, 810 bp, Glycine max
  unsure (1)..(810): unsure at all n locations
  Clone ID: PAT_MRT3847_69843C.1
tttttatatatataaactgaaggagactttatccacaatacttcccaaaagagaaattaaannnntaagnngagaaaagaagaagagagagagcattatttatgaagagggtggttgaggacaattaagagaaagaaagaaagatattaagaactataacatctatagcaatgcaagcaaattactttgcttacacatacatacatctcatcatctcactggtaaaggcttcatgcataggaagagattattgaaatttcttgagtttgtctctgactttagaacttttatgtcgctggtaatattatgttgaacaagaaaaatgtttgatgcacattccaaatgctatccaatatttggaaagaaacaaaatataaatatgattgataaaatttatgataagatagaaagaaaaaaataaaaagaaataagagatattcatcagacttttaaaacaaaagggtggtaacaaatgattagtggttgaataattactaaactagacatcaacaatgcaattttgtgaaagctgaaacttgatggcgggaccggcgaatccaacggcgtcgtcccgatcactggcgaccctgaggtatgccggacagttgacattaatatggtaatttccggaaacccaagttccaaccttccacttcactcttccgctgactttgacgttaaccagaattcctccggaggttctgtcctgctggaggatctggagagtgaaagaggagatggggacggcggaggcgtagaggtagggggaccagacggcggtttctcggtggccctggtaggtggcgggga

SEQ ID NO: 109446 - DNA, 765 bp, Glycine max
  Clone ID: PAT_MRT3847_69844C.1
gtaattttctctctctctctctacgattttttttgaatctttttgattcgcttctggcttttttgactctaaattgggacgaaaagtcgagccttcgaagaaacgcagaaactcataaaccatcgctgactccgcaattttcgtcggttcctcacacactctctgatttctccgcgatgcgattcgatgaagtggttctgaattcggagcaagagtttttgtttctgcggaagtgtatcagcttaagaaactgcgtttagggtttctgtttttggtggtgttgttgtgatggcggatgctgacgtggacctttcggaactgttctctggtaatgccgacgaagacgacgacatgttttatatagatattcagaccgtccagaaggttcttgatgaagacgatgattgttactttcaggaggtagggtttcttctttgccaaaaacagagactcaaattccgaatgctgtcactgtgtaaggtttctctgaaaaccgaatcagttattgaacatatgccgaatgaagtatcttgtgatagaagaattgaagcttctgtgcagtggcaacgctaattttttttcctttttttcttttttcaaatttatttatttgttttactttttttgagctgaagatgtaatctgcacagaatccgaaggccagttcttttttttttaccactaataattaattttacttagataactattgtttaatttgctactgtattttgattatttattgtctagttcatctaaattaag

SEQ ID NO: 109447 - DNA, 435 bp, Glycine max
  Clone ID: PAT_MRT3847_69845C.1
ctaggctggggcatgcagataccttgttttgttttgttggtgaggagtagaagttggacttgtggttatgccgttttgcaaaggtaaaaaacaaaaagggtatgttagagaactaagaagagagcaccacagaaacaatgcgcgccattcctgtttccccagaatcacactgcgttttcctattccctcaaccaacaaccccttccttctcttctaattccattgccataacccactccttccacccttttcatttcaagccccaccattccctatccactcccaaaccatgctccttcaagttcagatctttgttatactgtgcttccaaatccgaccccaccactttggaagatgatgaggtgtcagaagagtccttagttgaggatggggtgtgcatagaggtgatgaagctggaaaagaactcgcgcagaa

SEQ ID NO: 109448 - DNA, 447 bp, Glycine max
  Clone ID: PAT_MRT3847_69846C.1
aaaactataaaacatccatatcaaacaattcattaatttttaaattaacacaaccaggctaccagttaagcacaatggcagatcgggcacccaaaaataaaattttgcaaaaaaagaccaaacccgaacccttgcgaataaaaacaacaacataaaagccgaaaaagccaggggatttttttttttttttttaaccatcctataggaacaaaatggggccaatccttatgggcctaaggggtttttttgggggtaaaggaaattcattttctcgtacaaccaaagggaaagtagggagagggaaaggtgaacctcgtccttgccccaacgaggtttggaccgaagcacgtgcgggagggcaggccacaaaaaaaaaaaaaaaaaaaaaggcgcgtggggcttggaaagaggccaaaggtaaagcgcgtggaaacaacggaagcctcc

SEQ ID NO: 109449 - DNA, 371 bp, Glycine max
  Clone ID: PAT_MRT3847_69847C.1
ggcttatttggccccggcaagactgactacgtataacatcctgatgaactcactgagggagcaccaaaccggggaacagagcactacgactacgacaggatgcacactgcagggcgtgcgagaccaattcaatgactaacacaactacggacgataagaacggaaagaagctaagctacaaggacgggaactacatctacaagaaaaaccaaggaaacatggggcaagccgacgggcaagggctacaacgacttgatgcacggcaacccacacatgtgcaggggaaggcgaccatgtctcgactgacccgtgtgtaccactaacggtacgacagacagatcgggggctcaccacggatggatccatgacta

SEQ ID NO: 109450 - DNA, 519 bp, Glycine max
  Clone ID: PAT_MRT3847_69848C.1
caaaaaaggagcttcatttaaaaacaactcttcgcctaataattaattaaatttagctaaattaaattacaaaatgcgtatactcagttctagcaagataaagtatcaaattttttcaagtgatgatgatatgaggcatttagccattcattcatagagtgttttcgcagattgaactctactttttttgctttcattctttgacagtttcgcaattgacttctcattagcggataatgcctttgctattgctttcatctttcggacattttttgatctcttcataggccttcctttctgcttcatcttcctgttataatggtagcaccagaaaccgtgtttagaactcctgactccgatgtatccattgcttgaggttgttccgaaacggatgcgtcagtagtatccattgaaacgacaccgtttctcttcttcttgttgttcctgtttttcgccatggtccctgcgaaagaagaggtgtcggcgcgaagcagaaggttcagctgcgacgcgaaacgc

SEQ ID NO: 109451 - DNA, 186 bp, Glycine max
  Clone ID: PAT_MRT3847_69849C.1
aaaaaaaaaggggtcttttttaaattttaaagggggatccttttcaagattagatttccctcgggattaaaggaggaaattcacccaacctttcagcaaaacaatacctttttattaaaagggggaataaaaaaaaacccgcaaatcttttgcttcaccatcatgttggtaagctgaaagcggccc

SEQ ID NO: 109452 - DNA, 729 bp, Glycine max
  Clone ID: PAT_MRT3847_6984C.1
cccagattatccaaagagagaagaccggcttattatccaccccagcagcagcctgcttgccagccaggatgacgcgaagttgcctaaaatagacttttttgactattccaaattgactccacttgaccagcgctgcttcatccaagctgctgacctcctgatggctgatttcaagatgcttagcagccaggacatcaagtgggcccttcatgagctcaaaggacactatgcaatcacccgaaaggccttttccgatgccattaagaaatggcaggagttgtcacctgaaaccagtggaaaacggaaaaagaggaaagaaatgaatcagtattctttcatagatttcaagtttgaacaaggaaacataaaaatagaaaagaggatgttctttctggaaaacaagcgtcgacactgtaggtactatgaccatcaggccctccttccagctgtgaaacaggagcaggaattctatgagcagaaaattaaagagatggcagagcatgaagacttcttgctcgccctgcagatgaatgaagaacagtatcaaaaggatggccagctgattgaatgccgctgttgctatggggagtttccatttgaggagctgacacaatgcgccgatgctcacttgttctgcaaagaatgtctcatcagatatgcccaggaggcagtgtttgggatctggaaagtcagaactcagctgcatggaaggcagctgcacgtgctcct

SEQ ID NO: 109453 - DNA, 656 bp, Glycine max
  Clone ID: PAT_MRT3847_69850C.1
ccacgcgtccgataatatttacactgatattataaaaagtataactaaatttataaaaaaacatgaaacataatttttttaaaaaaatatttgttatacggataacttatacggattgctaatccatatgaataatacaaattgctaatccgtatgaaacttacagattgccaatacataagtttcgtacggattgccaatccgtatgtttattacatcacaggtccaacttgtagacaaaaaaaacttacctcctccgccattgcaccgcaatacccacaacgacgacaaccatgtactgcgaaccaccactgcgatagttcacctcgaccaaaccagccacaagatggaatgaggagctttgctgaaaggataagaaaatggcgcatgaagaaaaaaaaaaccaacaaacgtagaagaagaagtaacaagggtaaatttggaattttcaaaaattgttggtgtaaagaaatatgtttggtgtaggaagaaaatcccccaaaaaggattgacctaaatttgacccgattagggctagaaaaagttggcttgaaaaataattgggcctatttatgacatcaccctcactcaccaaacttgtttttagtcccacaatgacaacttattcccactactttttcacacactatagcaca

SEQ ID NO: 109454 - DNA, 143 bp, Glycine max
  Clone ID: PAT_MRT3847_69852C.1
cgaacagggaaagccacagtcctcaaaccatgatcagctccatataacacaatggctgcaagacatacaacaccaagtgagtagtgacatgcaaaccaactcatgcacaactgacatgattacaactatgttgcacacaaaac

SEQ ID NO: 109455 - DNA, 1995 bp, Glycine max
  Clone ID: PAT_MRT3847_69853C.1
cccagtgccgattcttcctcccaagaaaccttcccaactcctccacttccttagacttgcccacccttttcgctgcttcttgctatctcaccctcttgctaccattcacacttctctatctaccagataattttttaccagactacaactttatattttccagattgaactgtacttgcaaaaaaagatgctcacttatcttctctctcaactttcataggcctttcttattcttccttctaagaaaccacttcaaatcatcaacttccctagacttacacaccctttgggctgtaacaagcaatctgatcctcttgttatcattcagattgatttctcttctagcacctcgatcaaagggctaaaaaaatttgctacttattgcacttttcttttcatggtttgatacatcttattgattttagtgctatttcaaggggtgaatttgagacatgggtttgagttctaagcaggtttctagcagtggacttgattggaaacaaaccttgttggaggctcagaatttggaacttccaaagcctaatctgatgaggaaacaacagcagcagcagcagcaacaacaacaacaaactcagccgaattcagagtctttgaaatgtccaagatgtgactctaccaacaccaaattttgttactacaacaactacaacaagtctcagcctcgccatttctgcagggcttgcaagacgcactggtactaaagatgaaactctactccatgtaccagtagctagttggaggatcatcttggctgctataacatcaaaaacttaactatcacacaaagtcaccaccaccacaccaatttcacatcagcattctacttggacacaaacggtcacgtaccaacttgcactttgcgttgatccattcatcatcaattagaaggccaactctacattttcgaaacctcaagcagcttgattgataccaacaatgttttcgtagtgtcaactactcttctattctccactacttctaactatgctgaggaagaatttacagaaaaaaagaaaccaagcatcaatagatttatttaatcttctacgatataatgtagtccctacaacttcacatctgccattggagatagatgaaagccaaagcgttgttttccctttctcagccttaagcagaacttttgacacaatccctggttcagtagtgtcaacctctcttagatcctccaatgtttataactatggggaggatcagtttaaagcaatagaggaaccaaacatcaatagtactactgctactatagtgcctagcacaggtggcaccaacaacacacatcatccatgggagatagcagcagcaacaagtggtgttggcttgggaacttcttcaaattcaaactattggaattgggaggattttgattcattggtttcgactgatctaaaagatccttgggatgattcagatatcaaaccctgagaaccaaacaataagcaacaacacatcatggtagtgtccatagattagttatttaattcaattggggtgttatttgtgtttcatacaggttagtaaatgatcttgttttttttcaagatggggcatgagaagtatttggagctgtcatgttttagtttcagcttcagcttcaagcaaaagggtcccaaaattcctgacaattagttgcaacccactctgtttgcctctttgttcatctctcttatcatttcctctaatctctaataataaaatggtgtattaatgtatgcaaacattgcaaagtagtgtctagcattatttatcaatataggattttgttttttttattttttattttattttttggggagttttgtgagtgctttgtgatgggagtgatatagatatggggtctgctccagcactgctgaactgacagaatgtgattggaagattctttggacatgtatatatcttggaatgatattttatcatacagttttattgctcatgattcgttatcatctccaaaaa

SEQ ID NO: 109456 - DNA, 689 bp, Glycine max
  Clone ID: PAT_MRT3847_69854C.1
tccagtcaagtttagatgtgtttctgtgtaacaagcggcacaagcttccacgcgggagaaactctgtcacaatgcatagacgttgaggtgaagtcacagcctccatgtagagaagaatatttgggtgacgaagtcttttcatgacagacactcttggttgaaggacagtatcacatcatctgtgtattcatgcttcgagaaaaccttgacagcaacatccgatccataccacagagcatgatagacagttccacaagaaccttgcccaatttgttctccaattgtcaggtcctcccacaaaatttcataatccaagcaatcagtgtccacatcccctttattattgacagcaccactgccagcactcccacagctgctggcactacttgtgctgttaacattaaaagaggaccaggatcctgaagcctcattgttagtagggcgattactttcacctgcctggctttcttgcttcaagccagaagaaagaatcttctgattaactgattcattttcttgatcattctgtctccaggacccagcaacacgaacattcattgcatctgatccttctcgatcttttgttctccacggccatgataatgttttcctttgaatccaggcttcagccttaggtatgattttatgaatagattttccttcactctcatcaccagactctctcagag

SEQ ID NO: 109457 - DNA, 1338 bp, Glycine max
  Clone ID: PAT_MRT3847_69855C.1
cacgcaagtatagcaagacgcaacaatagcgttagcagaagagagccaaatccgtcttttgactcataagtaaccaaccgcttctttcaatcaactgaaagtctttatgttttcttaaggttactgtctgtctctgttttatatgtggcatgggcatgagatggatctgtattccatcatgtccatggaagaatagttaactactttccttttttggtgatttctaaggttctaatttataatatgggagtggaggagaacacccctaactccatttctacctcacaatgccacgaagaacaaagcaacaacaaaatcaacacgcatgtgctcttgaatgtctacgatctcacccctgtcaataattacgtctactggtttggatttggcatctttcactctggcattgaagtacatggtaaggagtatggttttggagcccatgacttcccagctagtggagtttttgaagtggagccaaggaaatgccctggattcatatatagatgttccatctctttgggtcaaaccaatatgaatccttctgaatttcgtacatttattgaaaacatggcttctgagtatcatggagatacctatcaccttataactaagaactgcaatcattttacagacgatctctcttatagattgactgggaaacaaatcccaggttgggtgaatcggcttgctaagctaggtgctttgtgcagctgtctacttcctgaaagtcttcaagtaacaagtgttaaacagctacctgaataccatgaatgctcggaagatgaatttgttgaatctctttcacctgccacaccccgtgagtcaacagaaatagatgaggagcaagaaaaacaccttcttttgccatcagatagaactgaggatgttcatttcgttaaagagacgcaagtgaaataagcggtgtctttgaggtgagaaataacacaggctgtcttcgcattgaatatttatccatttgatttgcagtgattcttttttctcaaagttttctcattcttccatggctttctacattctcttgggtttgggttcattcatggaaactgaagaatccattgttttgttgtgtataaaaggttctcaaatgaggctaatttgtttgtgtaatattatttttattttttttgagggacggaaagtggggcgaggtttgaggctcacaagtatttgtcatgtaaaattgtaaatgacatcagacatccacgtttgaaactgttttaagttatgaaatattagccagtttgtttgaggacatgatgaaaaaaacatcttcccgttgtgagcacgtcaacccgggaattaataccgaaccgg

SEQ ID NO: 109458 - DNA, 1148 bp, Glycine max
  Clone ID: PAT_MRT3847_69856C.1
cagaatttggaacttccaaagcctaatctgatgaggaaacaacaacaacaacaacaacaacaaactcagccgaattcagagtctttgaagtgtccaagatgtgactctaccaacacaaaattttgttactacaacaactacaacaagtctcagcctcgccatttctgcagggcttgcaagaggcactggaccaaaggtggaactctacgcaatgttccagttggtggtggaaggaagaacaagagggtaagaaaatcaatcactactccaattacaacatcttccaccacaacatcaatcacaaccaccacttctacttgcactgccacagtcacaacctcaattggcaacaacaacaacaacatggatgctatgttgggttgtaatagccacatgacaatccaaactcctcttgcggatgatcacaaaaacatgtcttcctctctctaccaagctctaattcgtccaccacctttgctgctacaacaacagaatctgatgaacaacacaagagacctagaaggcaaagattttggtattggtattggtaatggtaataatggtatctttcctagtttaactttgccttttcctattcatcatcaaagccaaagcctactcttccctttctcaacctcaagcagctcttttgataccaacccttgttcagtagtgtcaacttctcttagatcctccaatgtttataactatggggaggatcagtttaaagcaatagaggaaccaaccatcaatagtactattacaactactactatagtgcctagcaccaacaacacacatcatccatgggagatagcagcagcaacaagtggtgttggcttgggaacttcttcaaattcaaactattggaattgggaggattttgattcattggtctcaactgatctaaaagatccctgggatggttcagatatcaaaccttgagatcaaactatcagaaacacatcatggtagtgtccatagattagttatttaatttaattggggtgttttttgtgtttcatacaggttagtaagtggtcttgtgtttttttcaagatggggcatgagaagtatttggagctgtcatgttttagtttcagcttcagcttcaagcaaaagtgtcccaaaatattcctgattaatag

SEQ ID NO: 109459 - DNA, 293 bp, Glycine max
  Clone ID: PAT_MRT3847_69857C.1
tcttggcgttttttttttttttttttttttgggaaatcacaaatatagtgataaaaccatagggtggcggttgcatcagatgttcaatgcttccaaaacaaacggtttcctatattgatagcagactccacattactaatatttaattggagcttacatatgagtttacagtgggaacaatttaacacaggaccatgactaactctggaggtacttgaaaacaattaagtggaagggggtaaaaccaccattgccagtatttaaggcatcatccttagtttttcccatcccgg

SEQ ID NO: 109460 - DNA, 629 bp, Glycine max
  unsure (1)..(629): unsure at all n locations
  Clone ID: PAT_MRT3847_69858C.1
gtccgtttgtctccaagttatcataagcttaagatgctccgtgtgataagttggnaggccacgcgtccgtccaccttcgaagcgttctaattctgcggatgatggcagtgatggagattatgattatgatgatggtgatggtggtggtggtggtggcagtgtccgtcacatgaaggagcatcatcatgggcccaacaaggtggttcttggtgtggccatagcgctttcttccattgtctttctcgttgttttcctaatactgtgctccaagtgctgtcgctgaggaaaattttgatttacgcttttctgaatttagaatataggaattttggtaatttattcgaaatggttctttgtttaattcatttatttattatacgaattcgaaggtgcagaggaagagtgttgaaaaagaaatgagagattgccaaaatgtggcacccgatagaaacaggaggggaaaattaatgtgcgatttttgtttcacttgctatttttaatcattttcttgtgcggtgcaatcatttatatacaatgtatcatgatggtctttgccacttttgtaattagctgtgtattaatgtttatgagtagaagaggtggtggggatggatgtgcatgtggtatac

SEQ ID NO: 109461 - DNA, 321 bp, Glycine max
  Clone ID: PAT_MRT3847_69859C.1
aaacaaaaaaaatactctcaggtgtggagggcgcataataaatacaccaccaaacatggactggttcgacttcacaattggtttagtgtccatttaccagggtacaaaacatgaatgtaccaggtgaacagctcaggcttctaaacaaagggtaacacccttttcccgtgctaaagagcgtttcaacttgataagtggcgattaaatagaaagggttcttgatttccaaaacccctaaagttagctactctatattaacgaccatgcaagtttgtaaacgtgtgagatcacataaatcctttgtatggcaccatgcgaaac

SEQ ID NO: 109462 - DNA, 390 bp, Glycine max
  Clone ID: PAT_MRT3847_6985C.1
gaacacaaattgaatttgctgcgtttattactaataattatcggaaacacaacacctgggtacaactcacaaatgccactatgaatcaaaaagcaagcatacacgaccatattaatctatgaacaaatgagttaaagagatcactaaaaaaggactgaactttacacagttactcggcattgacatttcagagaataactttactgttaggaatagtccgggacttggacacaatctatatcaggacgtgctagatggacattaaacacatagaatacacctgatctgaattataaacattggatcatcatgaggacactgtcatacttttatttaatgaactgagacaggcatacatacgtataatttggattgacatcaagctagctt

SEQ ID NO: 109463 - DNA, 457 bp, Glycine max
  unsure (1)..(457): unsure at all n locations
  Clone ID: PAT_MRT3847_69860C.1
tttttacgcgttcgtaccaatgnanggcgctacagcgggccaaagtgcgcttacattattcaaatcaacggaacccccgcagactgatcaaaatttgctttacggcattttacaacgcgatcagttggtgctaagcgatgaatttgaaatctggacagctgcactccggcgggccgacgaagagtgccgtcaaaattccattgaacgttccgctgcaaatcgccgtgctgcgcttggcccggcactgtgcaaaactcgtgtgccactaatcacattaaagacatttgcgaaggaaattgttccctccggcattctgacattggaagaagtgatcagcgtgtaccagaatcattcccatcctgatcatctctgtggagtgcccgaattgtacccaatgaaatttccgagccatggacgcatntctgactggaacattgccaaaggcaacagagggaca

SEQ ID NO: 109464 - DNA, 405 bp, Glycine max
  unsure (1)..(405): unsure at all n locations
  Clone ID: PAT_MRT3847_69861C.1
tnnnaatatattttttttttttttggtggttttttttttttttttttttttttaacagggttagcaaaaataattcacattttttgggaaactttacttttttggtggggaacaattgggaagcccggaaaaaattaaccgaattttacaaaagattaacataggggtctccccccaactaaaagggaacccccaaagtaatcaaaaaatttccccacccccttgtgtaaaaacatcccaccgttttgaaatattttctatcccaatcctgggggggtggttaaaattccccccaaaacccaaccaaaaaatgccataaaggggatgaaccttatttggccaaaaaatcctagtcccccccttccaaaatttccaaccttccatagctcccaaaaagaaattcct

SEQ ID NO: 109465 - DNA, 780 bp, Glycine max
  Clone ID: PAT_MRT3847_69862C.1
gaaaacacaatgcatatttcgtaaataagtttttgttttgatctataaagagtgctagcggatgtgacaagcaaccaaaattgttgtcaggggataactagattgtttggacttagtcaatattcaagaaagagtaccaccgaaagaaaattaattgttcggttgagtgttggctgttgatgaaactaatctgcaatagtgcaattcatgaaggaaaagggacatattttgtaaacgtgttatatacttgatagatagacacataaatattatatctgcatcccttttctacaatttgttttctggtattatcaaatcttatggttgaccttataaaaatgcagaagtgaaaagattttattagaaaaaatatttattacataaaacaagttattttttaatagttttgttagatagtggtttgtgtttcttttctgtttattgttttatttccccatcaccatcattattttttaaatctaatgattataataaataattaattttaatcattaaatttaaaaaaaataaaaaaagagaagcaactctagtatatatgtgtaaataaaagactatgttaaagcaacttagttttttaatatcattaatttgaaataatgattacgagaactgtagagagtctgcaaattgtgaagaaaatactccaacaacaaacacctgcctatcattggtggtagttgttatgcactgcttcttaagatttttattatttttggcatgagatgttgtttgtccggaagattttattggttcctattt

SEQ ID NO: 109466 - DNA, 613 bp, Glycine max
  Clone ID: PAT_MRT3847_69863C.1
gtgccacgggcaggaaacattgggcatattactcgaattgttaacaaacttgttcacctggctcataatcgaaacctcatactgacatgtcttcagacaaacgttctactctctctgctgacataaatatgccaacagtacctgctgctggaaaacaagtgccacgggcaggaaacattgggcatattactcgaattgttaacaaacttgttcacctggctcataatcgaaacctcatactgacatgtcttcaggaaaatagtgagtggaatgaatggcaagcttcagttcttcaggagcgtaatgtggttgagaatgttcaccgttgggcttgtggacgtccgactgctttacaagataggatgagggatagtgatgatgatgaacttcatgacagagactatgatgttgcagctctagcaaataatttgaaccaggcttttagatataaaatttatgggaatgaggataacgaggaggaacgtggcaaccttgatcgagatgatgaggatgtctactttgataatgactctgcacaagtagtcatatcatccctcagactcagtgacgatcaagggagtagtctgtttacaaactccaactggtttgaatt

SEQ ID NO: 109467 - DNA, 367 bp, Glycine max
  Clone ID: PAT_MRT3847_69864C.1
ttttattcttttcttctttaaacatctaaccatacatttaatcatagccatcagattcaaaaataatatcccatccaaaatcattagaccctctgtagaaaacaatctttcccaaagtttttccagaaaatataatagattcactatctaaaccaacagcaagaaaaaatacacataagacatacgctaatttatcatcatataccatcagcaaatgagtaaaaccttcataaccagacttctacggaaaccatttgatatgaaagcctatgaaaccctgcaaagcattgacacataaacaagtgtgttcgaccaacgcagatccattcacctgaaaaacagcagtggaagccttctctgtggaaat

SEQ ID NO: 109468 - DNA, 176 bp, Glycine max
  Clone ID: PAT_MRT3847_69865C.1
aaaaacgcatttttgtaccttggacactggccgtttcttataagtggttatgacccattcccaactttttagcataaggttaaaaaaaaaaaacgccttgcgggaaaaaagggtgcgtgctttttggacactaaaaaacttctatatcgttatccaaagaaaccacaccgggcccc

SEQ ID NO: 109469 - DNA, 536 bp, Glycine max
  unsure (1)..(536): unsure at all n locations
  Clone ID: PAT_MRT3847_69866C.1
gcctaggcaacaatgtgaggtctatgccttctgtggtggatttgggagctgcactgagaatgccatgccatattgtaattgtttgaatggttatgagccaaagtcacaatctgattggaatcttacggattactcaggagggtgtgtgaagaagaccaagtttcaatgtgagaatccaaattcctctgacaaggaaaaggacaggttccttccaattctcaacatgaagttgcccaatcattcgcaatccataggagccgggactgttggggaatgtgaagcaaagtgcttaagtaactgttcttgtactgcatatgctcatgacaatagtggttgttcaatttggcatggtgatctcttgaatctgcagcagcttactcaagatgataatagtggccagactttgttcctcaggcttgcagcctctgagtttgatgattctaatagcaataaggggacagtcattggtgctgttgctggagctgntggtggtgtagaggctcttctaatactntttgtgtttgtgatgctgcggc

SEQ ID NO: 109470 - DNA, 439 bp, Glycine max
  Clone ID: PAT_MRT3847_69867C.1
cagttctcttcttttctctcttggcgacaccactgcaacactttccttttctattctcagagcgtttttagtgtttttcaagcaagcgagtacggtaccattctattctactccctcacgaactcatttgttgataaactgctacctcaaaagcagtgacaaagtggtggaagtttgatagacattatagttcaatttgttctgaatacccctcaaaaggtcttacattgttgctgcactatgaaattgtgcatagacctggatccaatggacccgaagccaaatcttaaccctgtccttactgatgccacacccttaacaaggtcaaggcttggtgtgccttctggtttgtcaccttactctcctaaaggggcaacctttccccatggtaccatgctggcaataccaaggaagaagacaggaattcttgatgattttc

SEQ ID NO: 109471 - DNA, 234 bp, Glycine max
  Clone ID: PAT_MRT3847_69868C.1
cccccattgtaaacactcatatcaatattataaatcattcaacattctacttccgcttctatcatccacggctggtaacttgaataaacacctcaggctctaccatttctcccttctttatcataacccatatcttctacaacaactatgaatccatgtatttctcatgttaatccaacccatcaactcatgttccaatttatatgattacttaagtactccaatccccaatct

SEQ ID NO: 109472 - DNA, 512 bp, Glycine max
  Clone ID: PAT_MRT3847_69869C.1
ttcgcaaacggcctgtgaaatagacctgttccaagtcactcttagacggaataggatgctgcgatgttcctttttatattttgataaagacaaaacaagtttaatggatcgtatgcaagtgagtcttgttataatgtttgtgtctttatcttttaaatcatgagagagaacatgcaaggatctatgcacatgtttgttttcacgtctgattagcaatcgacgtggaagctacaagttgcggcaacagattaaatgcacgtagtatccctatgatgtgaagccaaatagattctaaatttgttttaagtagatagtttgtgtgattggctcatttgtctgtgcatctaactctcttgattccgtcaatctcatcgcaaagggaagccaccctctcctgctgctgatactagtatcagcgtatcacctttgttatgagttgggtttgttgtttggttatcatgtatccaaaatgaaaaagaaaaacatttataaattacaggtgtttcgtttcg

SEQ ID NO: 109473 - DNA, 316 bp, Glycine max
  Clone ID: PAT_MRT3847_6986C.1
taaacctaattctaatttcttcatcgttctacacttctcctactaaatatggggatcgtctttaaatcttttaccactaataccatcaccctatatgtggaatcctccgtcaccatctatcactagaacgctaacattcactacaacgaaagatatactacctgaccatcatatactaatatgtgcatctaaactgcttgaggatttcctaaccctaacctactaccacatccaaactgaatccactattcacatctagcttcttctcatacttgacatgcaaatctttgttaagactttcactgacattaccatt

SEQ ID NO: 109474 - DNA, 778 bp, Glycine max
  unsure (1)..(778): unsure at all n locations
  Clone ID: PAT_MRT3847_69870C.1
ggctcgagggatcactctattcgattaagcgaagcacgtgacgagcctaatttacgctttacacccctacacttcccacaatttgttcctggagacgacgccgttccatcacaccctcagcggtcagagcatggcggcggaaccggtgagtgacggcggagccgcggcggagaaattgatcagcgggagagaagaatttggtgattcgtccaacttgttcagcgcgattctagcaatggtgctgtggctgggagctattcatttcaacatcgccctgatcctcctcgccgtgttcttccttcctctctccaaatcgctcttggttttcggttttctctttgggtttatggtgcttcctatcaacgagaagagcagatttggccgaagattgtcgaggttcatatgcaagcacgcttgcaattactttccgatcacgcttcacgtagaggatatgaaagcctttgatcctaaccgtgcttatgtttttgggtatgaaccacattcagttttgccaattggcattgttgcattggctgaccacacaggtttcatgcctcttccaaaagttaaagttcttgctagcagcacggtgttctacacaccatttttgagacacttatggacatggttgggtcttacaccagcaacaaagaaaaattntatctgcctgttagcatctggccataggtgcattttaatacctggtggagtgcaggaagcatttgacatgcaggatgggactgagattgctttgcttgaggcaagaagaggatttgtc

SEQ ID NO: 109475 - DNA, 646 bp, Glycine max
  Clone ID: PAT_MRT3847_69871C.1
agcaaataatagttgtactcttcatgctattgaacactttcctcaccaagctcaataggatgactttaggcacactcttcatattcataagaaaacggaaacaaatccaataatttcaattaggcctttggttaacagtacatattttccacaaaacggacctccactagacctgcaaatgaaaaaccctgctgctgcatttcgatggatcaggaaaatcactactggtagacctaaaaatctcaagcaaatacggcattggaatcttaatacgcaactatcacccctctccagctctgccttgctcaatcctctaataacagtttggattaagtgttttaaaatgtcaaagattttgaaatgtcaaacaattgaattcttattgaagcaatcaaattccatacaattgtaaaatgatatggttgaatatcaaactttgcaagcatttccaatggaattcagaacataggtattgggttcaaccaaatataacaaaaagctaaggaactagtagtgagcttatttaggagaactgtgacttggaaatgaaagtgcactagtttggagggcaacgactctatggggggctaagcatagaggtcttggcagaggagggttcaaaaatggagatgaagggacttgggct

SEQ ID NO: 109476 - DNA, 220 bp, Glycine max
  unsure (1)..(220): unsure at all n locations
  Clone ID: PAT_MRT3847_69872C.1
ggttttaacagggaggttgcancatcacccatgttttccttggtaaatcataattggggaatatggaacagaaactgtagtgtctgaatccatcataatagacacatttcttgatctacatctctggtttctcttttggtatcatgttgtagttatacaaaaaacagaagcaaattaattgagtttgatgataatatgataatgattgttgtgtattgag

SEQ ID NO: 109477 - DNA, 301 bp, Glycine max
  Clone ID: PAT_MRT3847_69873C.1
tgattttttaaattcgctgctctcacatctcatcaaccttaacctctcatactctacttatattgttatctcaatactacatattaatccgtttatcattaatcgaccttattatcaaatcatatactctcccataccatttatctatcccttttaaaccttcccaaaatttaacttattatttttccaccacacgccaatctccttgaaaatacatttaaatttattatttacccactatcccttttcattggatccattcaataatgatcaacaaatttcttttcttatctttttatac

SEQ ID NO: 109478 - DNA, 266 bp, Glycine max
  Clone ID: PAT_MRT3847_69874C.1
ttgacgcgtgggcaggaatttcactgggcgattctccggtcgtcggccggcgggactattaaattggcgtgggcggataacgatgaccggtactacactactaggggtttcggctgatgagaacggcttatgtcaccggcgactgcaactactgtgaggaacgtgccctagtttggcccaagctctacattactatttcatgctaggtgtaagaggtattcttttcttgcctatgaagtttttattagattttttcttttttctct

SEQ ID NO: 109479 - DNA, 441 bp, Glycine max
  Clone ID: PAT_MRT3847_69875C.1
ttatctgtaaaaatccagtccaagatatagcggatggagaaagctaacatatatccaaaaacatggactatgcagggagaggtgactgctgcaaagagaccaaagaatagggcattggaagtggatctggactttgagcataatgtgaggcctgctcctgtaatgactgaagaagttacagcttcaatcgaggatataatcaagaaaaggattatggaggggcactttaatgatgtgcaaaggctgcctaaattgacatctaaggtacctaaggacgttaaagagttgggtgacaattaaagcatacacggtcttgtctaactactggagcagaaataagtcttgatgacaaacaccactgctgatttattgtcattcaaagatgaacaaaaaaacaaggcaggcgtgctgtttaagacactccgtctgaaactggaagcc

SEQ ID NO: 109480 - DNA, 680 bp, Glycine max
  Clone ID: PAT_MRT3847_69876C.1
atggctggtaaggatgacagtggcataaaacgcatgaacctgattgcccgtgctgctgagtctattgctgatggggatatagtgaatgtacagattcgcagatatcgacagtggcagctctctcaaactagttctgttgctacaagcataattcctgcgtcattgttacacgggcagagggaaatacttgaacagggagagcgaaatttcaaccggtttggtgggtgtctgggaaagaactcaacaatgggcaaaaacttaaggcttttggatgatcttcatgttcacattcttgcttctcgtgaatctagttcgggaagggataccattcgcatggaataccttactcttcttaaagaaatgacagagcccctgccaaccctgcctaaggtggtttgaagtacacgtgttctttagttttaaacataccaaatgttttaagctgaaatgctgaacttgattgaatctcattgccctttttgaaatgatcaggctgaagcagttcagcaagttgtggaattgatgaatacatactctatcagtcaagaagattttgatactatagtaaagttatcaaaattcagggttccttgactataaaaaaaaaataatgagtatactacaaactcctctcaacgtgtggttaattttttgatattatatgaatcagggtcatccta

SEQ ID NO: 109481 - DNA, 156 bp, Glycine max
  unsure (1)..(156): unsure at all n locations
  Clone ID: PAT_MRT3847_69877C.1
ctaaaaacaaatttatatatatacatccctttcccacactttttccaccctcaaacacgtaactactatttcgaactccgccatggctgncatcaccggcaccggcacgtcatacttgtgttcgccccgcctcatcaacccgacaaccttaaacaa

SEQ ID NO: 109482 - DNA, 388 bp, Glycine max
  Clone ID: PAT_MRT3847_69878C.1
ctaatcatgacattttttgggtttagtttaatatttttatggggatgcaatgatgctaatgctaaacctctgcctaagacatattagcatagataatttaataattattttaaatagcctagctgaatgaaattaataaaaataataaaagttactatatttctttttgtatcaaaatgtagaatttgtattatgagcagatagctaccccagctttatgagaatatcatatacaacgataacaacagcaagaattcagccttatcctactaggaggtggctacaggaatcaatctgaactattgggctatagtgtgactactattgaacagcaaataactttcataagatactagaattttggtgctacaatctccatgaaaatatt

SEQ ID NO: 109483 - DNA, 726 bp, Glycine max
  Clone ID: PAT_MRT3847_69879C.1
ttggtacgacctcgcagtatcggtccggaattccgggtccaccacgtccgaacgaagggaacaaatcgacttgtgcactgctgtgcagagacagagagagagagtggtgctttgtgctgtggttgcagaccaccgttcgcattcgcaaggctcattctcctcctcctccaccgtgaatcagaattcataagcattcattgttttggcactcgctctacctctttctcactcgctcccatgctgtttgcataagcattcattcattctcgaagccgtttgtttcctcagtcagggagggaacatgacttccgtcacctccgtcgaactcaaccttctcgtctttcgctactttcaggaatcaggtttcacacatgctgcttttgcatttggaaacgaggctagtattaacaaaagccccattgatggaaagttgataccaccaggtgctcttattacacttgttcagaaggggctacagtacttggagatggaagcaaacttgagtaattgtgatgcagacctggatgaagacttttcattcttgcaacctttggatcttatcacaaaagatgtgcatgaacttaggaaaatggttaatgaaagaaggaaaatactacagaagaatagaaataaggaatctgaaaaggagaatgaaggtgggcgaggatggggtaaaagaaaagggaagacatgaaagggagaaagaatgtgaaagggatggaaaga

SEQ ID NO: 109484 - DNA, 340 bp, Glycine max
  Clone ID: PAT_MRT3847_6987C.1
gatccttttattgagctaattcaaaaccttgccactcacatattgcccggtggtgatgatagtcttgggaccgatgtacgagtgatggctgaggactgtttcgatagagttgatcaggaggattacacgagctaagtatccaccagtgcgtcccttaccggtctgtagcggtgatgactataacgcaagaattgctatagcctcgtctgatgaatatacttatgaccattctcacacaaatggtcaaaacgtacataagcgtttggtctctgccgatgataataatatgacacatgttccagctaccaatctcaagagacggttacaacgatctaatacc

SEQ ID NO: 109485 - DNA, 712 bp, Glycine max
  Clone ID: PAT_MRT3847_69880C.1
tgagtgatcaattacaataaaataaatgtcaatttttatcatcaggttagcaagacactaaaagagagaaatttttaacagacgaattctaatatttcatttacagtccaaatgtcatacaccatcccactatcaaattcttgaaccctgcaaaatgcaaacacaacactgcggcaacaaaccaacattgccagcatagccaagctctcaccgacacttgcaacatgccaagaagaatagtgttgagcagaacgaaggtggcaacaagcaggtgatagatgtcaggttccagtgagagagagggcgtggaggaaaagccaaaatacaggatgcctatcctttgttctccgtgtttttctttactttgggaacaaaaaggtataaagcagaacaagaacaactcaatcatgtttttcaatttataaaactgagtttgaaaacaggtaactatgaaacgagtttttttgtttgttttaaaacaaaaaaacaataaacaaacaggtcctatacttctcaagaatgagttctttcgaagagaacaacaaaacaattgaaatcaaatcaaaactataaactgcacaagccaaatcaatttacattcagcaaaaaaatatagaaaattcatcaaaaaaaaaagacaaatcaatttacatataacttgtccttaccatgaatattatctttaatgttacagaaaactccataaagcttt

SEQ ID NO: 109486 - DNA, 363 bp, Glycine max
  Clone ID: PAT_MRT3847_69881C.1
cttacgtgtggggtggtacttcaactttctacgcatagaggagagacaccatggacctattacaagccgcttagactaacacataatcatggactctgagtaccagggactgcttgctcgccactctgacctgcaggtgcctttacgtgacactcatcaagcctgtatgaggtctgcaatacggccggactagccgctagaacctgtctttcatgagatggacgtacataggagaaacctgttaaatgtataagtaggatccaagggtaattgtttgcctcacatataaagaggctgggctttataactaaggcccacaaacgaacctgcccatgctctatgatgaccatgctcgaggctgtg

SEQ ID NO: 109487 - DNA, 342 bp, Glycine max
  Clone ID: PAT_MRT3847_69882C.1
tttctcatatgataggtgggcctatatattatcattaattacttaattcttatctttaatgacaccacaaaatattctacctttaaagaattatatttgtctcacaactttttttataatatggagaatcattaaagaaaaaaattttttgctcataatattaaatgctcttcaaaaaaccctcttgctttaactattaaagaaacaaataggcatttaaactgaaagctcttacctatttgtttgcgtaattaaataatataaatttggcaccttttatagtagacaacctctctttcctttttatttaattataaaaatacacaacaaccactttttttc

SEQ ID NO: 109488 - DNA, 1299 bp, Glycine max
  Clone ID: PAT_MRT3847_69883C.1
gcgcccacgccgtccggaaaaaaaaaacagaattacacagaaactcaatcaaaataaaaatttattatggatcataggttacgttgttttgtgacaatacccaaaattccttttctattgctactttctctgattctcgtcttcagttacgttaacgcagccttcgacctcgctactatacccttcaacgatggctattctccgctcttcggagatagcaacgttgttcgctccgaggatggcaacggcgtacaactccgcctcgatcgctacacaggttcgggtttcatttcctccagtatgtaccagtatggattcttcagctcgagaatcaagttgccatcgaattatactgctggtatttgcgtggccttttatacatcaaacggtgatgtgttcgagaagtcccatgacgagttggactttgaattcctaggtaatgtcgccggaaaaccatggcggtttcagacgaacttgtacggcaacggtagcacaaaacgtggccgtgaggagcgttaccgtctgtggttcgatccaaccaaagaatttcacagatacagcatcctttggactgcaaagaatgtcatattttacattgatgaagttccaattagagaagtgttacgaagtgaggaaatgggaggtgactacccatcaaagccaatgtcattatacgccaccatatgggatgcatcaaattgggctacatccggtggaaaatacaaagtgaactataagtatgcaccttttgtgaccgaattcaaggacctagtcctaaagggttgctccgccgatcccatccaagaggtttccggcaccgagtcttgctccgaccaacacgctgatctcgaggctcaagactatgccgccgtaacccccatgcgccgcctcgccatgcagcggttccgccagcgttacatgtattattcatattgctatgatacattaaggtaccccgtgccacaacccgagtgtgtcattgtaccctcggaaaaacaaaggtttaaggagaccggaaggttgaaattcggtggcagccaccgcaggcaatctcgacggaggggccgtacaacaactccggtggatgataccgatcagggtgatatgtgatgattgatattgagatgtatataacagtgtccattttttatgtctttattggtcttttttttacattatatattatttatttgttgacaggcatacataaaccattcgatttatatatggtctttatttttttttttaatacatgtgttttggtgttatgctttgtgttagtatatagggggaatatat

SEQ ID NO: 109489 - DNA, 1328 bp, Glycine max
  Clone ID: PAT_MRT3847_69884C.1
caatatatattcttgtgtataaatatggaatagaatagagtgaagggagaaaactaaggagtggagagagaaaaaaaaaaaaaaacagaacaacacagaaactcaaaaccaaaataaaattattatggatcacattcataggttacgttgttttgggacaatacccaaaattccttttctattgctactttccctgcttctcttcagtttcgttaacgcatccttcgacctcgctactatacccttcaacgacggctattctccgctcttcggagctagcaacgttgttcgctccgaggatggatacggcgtacaactccgcctcgatcgctacacaggttcgggtttcatttcctccagtatgtaccagtatggattcttcagcgcgagaatcaagttaccatcgaattatagtgctggtatttgcgtggccttttatacatcaaacggtgatgtgttcgagaagtcccatgatgagttggactttgaattcctaggtaacgttgccggaaaaccatggcggtttcagacgaacttgtacggcaacggcagcacaaatcgtggccgtgaggagcggtaccgtctgtggttcgatccaaccaaagaattccacagatacagcatcctttggaccgcaaagaatgtcatattttacattgatgaagttccaattagagaagtgctacaaagtgaagaaatgggaggtgactacccatcaaagccaatgtcattatacgccaccatatgggatgcatcaaattgggccacatccggtggaaaatacaaagtgaactataagtatgcaccttttgtgaccgaattcaaggacctagtcctaaagggttgctccgccgatcccattcaagaggttaccggcaccaagtcttgctccgaccaacacgccgatctcgaggctcaagactatgccggcgtgacccccatgcgccgcctcaccatgcggcggttccgtcagcgttacatgtactattcatattgctatgatactttaaggtaccctgtgccacaacccgagtgtgtcattgtaccctccgagaaacaaaggtttaaggagaccggaaggttgaaatttggcggcagtcaccaccggcaatctcgacggaggggccgtacaacaactccggtggatcataccgatcagggtgatatgtgatgattgatattgagatgtatataatagtgtcaattttttagatctttatttgtggttttttttttttacattatatatttatttgccgacaggcataaataaaccaatcgatttatatatggtctttatttttgtttaataaatgtgttttggtgtt

SEQ ID NO: 109490 - DNA, 533 bp, Glycine max
  Clone ID: PAT_MRT3847_69885C.1
aaatgaggctacgcagttaaggagtgatgctggtggtgaggtggcaaatcagccagtgcatatgcctttgattttgcctaaagttcctggtcggttctactattattttggaaaaccattggaaacggaagggaggaaacaagaactgagagacgacaaacagaaatctcatgagttatatttacaagtgaaatctgaggttgagagatgtattgcgtatttaaaggtgaaaagagaaagcgacccctacagaggtatagggcctcgactattataccaggctacacatggtttcgagtctgaagttccaacatttgaaatttgattgttttgcacacacacccaaaaaaagaaggtaattttctaattggttctgaaggggcctttgcattccctaggttagagataaacaatgaatattagtttcaggattgttttcaggccgaaaaggcacgatttctgatagaaacattttacaattttacctggtttaaatcaataagagataaaatgccaataatagattaatgggg

SEQ ID NO: 109491 - DNA, 387 bp, Glycine max
  Clone ID: PAT_MRT3847_69886C.1
cagcaccattcctcattccatttcacagcatactgactgaaatcaggggggcgtaatgggaacgccatagcctttcgaaaccttcaaacccaacttttttctattttctatcaaccaactcaccttgcaccaatagtacggggataaccatgcagattgcatcataatccaacatcaccccttttgtggaaaactcacttccaggattcccacagaagaaaaaccagcgttttttgggaacccccttgttacaactcccgcccgaaaaaggagtgattgtgcctcattggtacaagtgtttttaacacacagcgacagtacacagcattttgatgcatgcaactggaccctgtcagaaccacattcctgggaatagatctttctaat

SEQ ID NO: 109492 - DNA, 363 bp, Glycine max
  Clone ID: PAT_MRT3847_69887C.1
ggcccaaatttcaatttttttttttggggaaaaaaaaaacggggtctgaaaaggaaaaaaaaccttgcccccacatatttgaaggttggcttgggcaaaggtaatgggtccgggattcacgggggaacccacccccccttttatcaaagggtggccctcccctgttaaacccccccaggacggggggaaacccttatttaacctcttccctccttttaaacccaccaagggccttattcccccaaggggccttaaattctgagcaaccccacttttccgggctttatgtgtcccccggataaacccacccccagggggtttatttcaggggggtggccccacaaatcccggggccgcttttgg

SEQ ID NO: 109493 - DNA, 2309 bp, Glycine max
  Clone ID: PAT_MRT3847_69888C.1
atcttatatctcgcgtcgcaatatattatagtattaccttcttaattatcacaaacgcgcttttcatattcgaatctcgcgccaacatggcggccaccggagcccgtctcttctccgctgcactcttgccgccgttatccgctgtcgccggacggaaaaacgaactcccgccggactccgattgcgactccgcgcctcgccgtgttcggtggaccaggttccgccggcgacggtggagaaagagaagcgtagggaagagaagaagaagcgacgcatgaacggttggaatgagtatttggagcggtcgaaggagttgatcaaaccggacggtggaccgccgcggtggttttcgccgttggagtgcgcttcgcgattggacaactcccctcttctgctctttttgccagggattgatggcgtggcacttggacttattttacatcatcagaaactgggaaggatttttgatatatggtgcttgcatattccagtcgctgatcggacaccatttacagacctagtaagaatagatgagggaacagttaggtcagaatataaacgttctccatactgacccaaatagcttgttggagaatctttaggagcttgccttgcactggctgttgcagcacttaaccctgatattgatcttgtactgattttggcgaacccagctacttcattcagcaggtcaaacttgctacttctaacaccattattggaagctttgcccgatccaatctctccggccctgcctaacattctcagatcgacaacaggtgaatctctgaggatggtgttagataatgtggtccaaggggctccctctacaaaatacagctggagagctagtgaaggattttactactttctcattatctttgcacgttcttgctgacatattaccaaaagaaacacttgtgtggaaactgaagatgctttcgaggggtagcacatcccatgatgtttatgagatctaaaaatggaaggttaccagatttatcttcttttgacaaattcagagttatgggtgctgtccctgtagcaccaactaacctcttcaagctcttttcttctaagtctcatgtcctattatatcctggagggatgcgcgaggctcttcatagaaagggtgaagaatacaagttattctggcctgaacaatctgagtttgtaaggatggcagcaagatttggagctaaaattgtacctttcgatccctttagaagccagaaaagtaatgaaataatactgtttgttgaaccttttctcaactttcatgctcttaagtttggaggataggacttttctaataggccttggtagtatacgagtgatggctggtggtgaggtggtaaatcagccagtgcatatgccattgattttgcctaacgttcctggtcggttctactatgattttggaaaaccattggaaatggagcacatcccatgatttttatgagaactaaaaaaggaaaattaccagatttatcttattttgacggactcagaatcatgggtgctgtgcctgtagcaccaaccaacctctacaagcttttttcttctaagtctcatgtcctattatatcctggagggatacgcgaggcttttcataggaagggtgaagaatacaagttattctggcctgaacaatccgagtttgtaaggatggcagcaagatttggagccaaaatagtaccttttggtgtagttggagaagatgacattggtcaagtagtttttgattatgacgacttggtgaaaattccttactttaggtcggaaatagaaagcctcacaaatgaggctacgcagttgaggagtgatgctggtggtgaggtggcaaatcaaccagtgcatatgcctttgattttgcctaaagttcctggtcggttctactattattttggaaaaccattggaaatgaaaggaagggaacaagaactgagagacaagcagaaatctcatgagttatatttacaagtgaaatctgaggtagagaaatgtattgcttatttaaaggagaaaagagaaagcgacccctacagaggtttagggcctcgcctattataccaggccagtcatggctttgagtctgatgttccaacatttgaaatttaaatgaaaaataaatatatttttttatgttctgaggcttgttttgcattccctaggttagaggcaaactatgaatattgccagtagtttcaggattgttttcgggccgaaaaggcatgatttcttaatagaaacattgtacaattttaccaagtttaaatcaataagagataaaatccaaataataaaaa

SEQ ID NO: 109494 - DNA, 322 bp, Glycine max
  unsure (1)..(322): unsure at all n locations
  Clone ID: PAT_MRT3847_69889C.1
caaacctcggtgcagtctccatgcaatactgtatgttaccgacccgacccctactctcttgctacaaggattcctggacctcactcaagtgagtcgcggctcacgcatctggaaactgatgctagcaatggctcagcaaccacgctgatccatgaccgagtattcatctccggcgacagtgcccgcggcatcatagcccacacactgataactgtggacggaaagatcaggttatcgggcgccactgttgccatagcggatctggtacacccctatatcnctaggcctcacaaaggacgaagaaatgtagatgtacatgttt

SEQ ID NO: 109495 - DNA, 720 bp, Glycine max
  unsure (1)..(720): unsure at all n locations
  Clone ID: PAT_MRT3847_6988C.1
gaaactggcnngaatgttacagtcacagatctgtcataaatttgatactacccctatagttctagatgtataaaactcttagtaatataatttatactgtagaatccaaaacgaacttggacaaatgatgaaaacattaactattacttctaaacaaatactgacacaagcaatcacaaacagaaagtgataggtaaatcttagacgcaggaaatgagctgtttcatatcaaaaagacgggaacggtatggtatccagttcatgtatcatttcagaaaatgatgacgtcaaaatagcatcggatttaagattcaggcagcaatctctcatcatttctgcaactgctacagtcaagtggcattggaatatagaacttcggaagccacttttggccacaaatttcacaccctttctaattcctgttccttaatgtgagacatgaccactaaattcaggagaagtttgggatttgttgtctcgatctcatgctgcttgaggttattcccataacttagtagttatgctggtattttagaaacatgtgttaagtgctaacgttacagttgtaaatttttatccctttctgtcctctctacctgacaataaacttgggtcttcggtgaccctcgtctccttattcttgttagtggtttgctatattgcagcgaatctgctacccactcgacctcaagatagataaaaataaccaacagaaaggga

SEQ ID NO: 109496 - DNA, 1723 bp, Glycine max
  Clone ID: PAT_MRT3847_69890C.1
accacactaggtcttgctagaactccccatttttcatcactaacttcaaacatggcttcgactgttggttctcacactggtcctatagctggatttcaggcgatttttccaaatcaacatgtttctgtgcaaccaccaccaccaagacagattttacagtattcgcatatgactcagacaagtcctttgggtcacattgggcccctaagaaatcctgtacaaaatttgtcaactccaaattcttcattttcatttcctgttactttaagccaagcaatgccaataggacaacatcagacatctgtgtcttcaatgcatctacctatatctggtatatcatcaccaccgatacctaaccagccattgacccatcttggtgtctcttctggcctgaacgaagcccctgtcactgttaaaatgtctgttggtcccagcaatatggggccagtggttccacctgcaagacctgtttctctacatcaacagccagatgttgcatttaagccaccgcagtcaaatatgtcaatgattacacgatctgccacctttcttccacatcaagtaggaatttcccctggacaaccatcttctttgagatcaatgcctgtaccaatacgtgcacctacacatttatctgcaaaccatttatcaggacctgtttcatttccttcacgtggaatatccccttcacttccattgcctcagcaagcaggaatacctaatcttgcttctggagttgctccttatcacacccatgtaaaaccaccagtcttggggacatcaaaatctggaaattttacttttcaatcacatctgcccaatgcagactatggtcaagtgttttctggaccaaacagtcaatcaggtgctacacaagagccaccttctggtccacgacctccaccatttgggtttgctgtgcctgatcagcctcgtcaaatctttccaaggacacaattccctggtcaagtggatcaagccgttccctttggggtaagattaggttccatctcgaactcaattccaccacccagacatgctgtatttccatatgctggtcaacctgcacctagatcgtcagtcccacaaatgggtatgaagaacttcatttctgcccctcaaatgccaaatttgaccaatgctggtgctcaaagaggcatgcctattcggcaaagctatcctcctcagatggcacggccagatatcccaatgcctctgaatcaaaagtttgtcaacaatccccccatggcttctggtaagatagcatatgctgcggaccaaatttatgatcccttttcacccacttctgcacctccacaacagaaaggtaatcctggaaaatgagggaattggatgtggctacagatacgtaaccgatagtgaaaaactcgagtcatgactgcagttttaggtaaacaggcgcaatactatttgtatagattaataatggtcatgttacaaaatcatatatgatttcttaccacagtttgagttgatttcaaccaatctttgcaggaatttggtcatctctccactatgtaaactacatttcatttggatttttcacttcgactaagttgcatttaagcttggtttcaatgattgatagtgttacgccatcggccgtgtcacacaaaattgttgacaattgtaacttctactactaatagttgaattttcaagtattgtccaatgaaaaagatactaatattcataccaaacc

SEQ ID NO: 109497 - DNA, 167 bp, Glycine max
  unsure (1)..(167): unsure at all n locations
  Clone ID: PAT_MRT3847_69891C.1
aagtcaatagatagttagcaatgtatgatatatgaaatgtgaagttgagcacattgtatgcagagttganaccggcaaactcggcctaactcgtgtcgagcattttctttttccgcgtttgctccattctttcattggtcttctggctcttaattattttctatctc

SEQ ID NO: 109498 - DNA, 427 bp, Glycine max
  Clone ID: PAT_MRT3847_69892C.1
tactgctgtgagaagacgacagaagggatattaaaaaaatagcaacatatattaaaaaagtgagaataaagaaacacatcctctatataatttcttgtgataaatgtgatatttggaatatggataaataaaccatgtaaaaatctaagcgactctctatgaaatacaaaagatatttttctaggagtgtgcgcccgatacacaatggggggaccatttagtatataaaaatggggttaatatcgccatatatataagagaacagggaaatatattatccaacacgcgaatataaatggcctttaaaacaccaccaataaataacatttgttataaaacaagctcgaattttatttttgttacctttttttaataatgaaaaacaattcgaaaaaagcaagtcaaccgctaaaactactacttcagg

SEQ ID NO: 109499 - DNA, 212 bp, Glycine max
  Clone ID: PAT_MRT3847_69893C.1
cggtcgactcgagcgctcgagggctgcgagaagacgacagaaggggacagcatatatatcaataatctattttatactatacctacattttgataattttactttgtagttgatagcccatgggttaccgtgggaagcttgaaggtgacatggactcaagtccaacggagacaagtaatggcaaacccttaagaattctactggaataatcc

SEQ ID NO: 109500 - DNA, 295 bp, Glycine max
  Clone ID: PAT_MRT3847_69894C.1
tggagatgaagtccaagacttaggtgaagggaccttcccttctgctccaggaatcgaaacaataagtagctctccaaaaaattgagcgagattgatttcagctggataagagacagagctgcttgctggcgttaaaaaagatggggattcaagcttgaaagtgatcgcgatctaagctagtgttctccttccttttgatcaccgtatgctggttcataatgttactgcacagggtcttaactatggttctagttcatccttagctcatgcttctgtccctttttatttgcagtct

SEQ ID NO: 109501 - DNA, 257 bp, Glycine max
  Clone ID: PAT_MRT3847_69895C.1
aaaatacatatgaaggatcaacttcctgtaactggcagtcagagaggggtttgccatcttctaagatgtgatcaaatacacgtactaattttcttttaagtcagtcatcgaagcagatagatcataattccattgttgtggacctctggtcaacctgactcaaaagttcaagtacctgcacttgtgggcttacacatcaacaaccgccactacatctgcccggtaattataaaacatgtcaagtggatggatgtggg

SEQ ID NO: 109502 - DNA, 795 bp, Glycine max
  Clone ID: PAT_MRT3847_69896C.1
gtcaccatctctctctctctcttttgatcatacgatttcgttttgcctaatctaaggaacaaattcaaacaaacaaggtcactcctcattcattcattcctcttttctttttctctgtcaagtgctgtctatcactcgttgttgatttcattccaacaacgtcaatttcacatttccttgtcttgttgtgatcactctttagtatttagcatacctgcaaagttgtactctttttttttccttccctttgttttgagctctcagattactcagcaatcacaatctctgttgtatcaggtttttcgatttggctgtgacccttatgaatcagtgtttgtttgtttgaattgaaatgcaatgagaaagcgccctgaccaaatggaaaaaggggcagcagcaaagaaccagaattcccgcctttgctgtttagcatccctttctgctttcttctggtttttgctcctttacttccattttgtggtactttcaggagatgataccaatgccaatagcagtagaaagaatagttataataatcatgttgatctagatcactcaaccctatcaacaacacctgtttctgttggttatgaacctcccccaatccatcaagtgcaagcctctcctagaaagattggcttacctgatcccgatgtgcggcggagtgatgctgacactgacacccctcgcgccgagccgatattcccttttatgagagcaatgagagcttctgaaatgagaacagatccgatccctgtggggggaggtacagtgatgggcatgcccttccctcca

SEQ ID NO: 109503 - DNA, 151 bp, Glycine max
  Clone ID: PAT_MRT3847_69897C.1
ataatatcatagcagaggcttttatctgcggttcaaaagtagttttttggataagaccaacgtgtcactcatttattgacttcaaaatagatgagtgacacgttggtcttatccattttgaagtcaataaatccattttggcttccattat

SEQ ID NO: 109504 - DNA, 329 bp, Glycine max
  Clone ID: PAT_MRT3847_69898C.1
gctataacctttcttttggggggacaaccggtaaacaaacatttgaaccgggaatgacttcacccccctctataaaaaaagggcaactttttttttcttttttttttccccagaaaatttcctttttcccaccctccttttttgtggttttggtcccccctcacccatgttttttttccaatttctctcaaccccccttttaatcccgggtccagccaaaaaccttttgttaacattcaaaaaccggttcccccttttccaatttttttgaggcccctaacttaacaaacccccccaccttaaccccctttacaggaagagggcccttt

SEQ ID NO: 109505 - DNA, 314 bp, Glycine max
  Clone ID: PAT_MRT3847_69899C.1
atactgttgttagaagactatagaagggggcagtgcttgattagaggccaggcaagccctactcaagcaccacacctttccttgttcacgctacccctttctgctcttcttctacctttcaagttttaaaagtataaagatggcagatacattcctatttactctagagtcggtgtacgagggacactctgacaagttctgagaccaaatttccgatgctagtccttgacgctttgtcttgagcaggacccagacagtaaagttgcctgtgaaacatgcaccataaccaactaggtcatgggtttttggagaaa

SEQ ID NO: 109506 - DNA, 265 bp, Glycine max
  Clone ID: PAT_MRT3847_6989C.1
gtagaaaaaatctataattgcaaaataatccttttaatacccatggggggaaatccactctccattacagatcgccttttttgactaaaaacgggtaaccctcaataaggggtttgggacccccacccatataccccctttttttgttgcccccccccccgaaaaaggaggggaccacaattctgtattccgccgatggggggttggctatgcaaaatttctatcatttctcatccctagccgcaaaaaaggggaagagggaatt

SEQ ID NO: 109507 - DNA, 358 bp, Glycine max
  Clone ID: PAT_MRT3847_698C.1
ccccacggatgggggatagctcaatcggaggggttttttggttgcgcgaatgaccctcagagatacaatggaacacataacacagggagtgatcaacctccacgtctctgattctcatagggatgattgacttctcgtctctaacaccaataagccacttttcttctacattaatctgccctacagatatatgcaacatgatgatgaggtccacctctcaactctaggaatggctatggccacagctagaactggagctccaattctgaaatacatcacacttcgctgctaaagagaaaatgatgacaaattctgttgccataaacgatcacttcatacgttgacctgcccccacggc

SEQ ID NO: 109508 - DNA, 373 bp, Glycine max
  Clone ID: PAT_MRT3847_69900C.1
aaccttcggcaggcgggagtgtctttaccaatatattctgaaaacaagtagggacccaagataaccttaatccataaaacaactgggatagttaacaacaaaacacccatagaacatcagaacaacctctgcatactaaaaacaattcttaaacatgggccttaacctcatcaatacgcggaacacgagggaaattagggtctacactggagagtggcttctgggcgccgctctcactcttcctaaagatagaaagatcgggggcatggacattaacaaagagaatgatgaatgaagtgtgcctagtgtgaagatagctggtgtggaccacataatggggtgcagagaaagtcctggtctacccagggttgat

SEQ ID NO: 109509 - DNA, 717 bp, Glycine max
  Clone ID: PAT_MRT3847_69901C.1
ccacgcgtccgcaaagatctctacgcctctgatttgcaattgcagccatgattgacagttcctcagccaccagcgatgatcaaaataaggagaagaagattgtcacccccaatctatcctcagccaccagcgatgatcaaaataaggagaagaagattgtcacccccaatctatccagttgtatatttgtggcagaggaaaactcggatacctcaatggtgagcgacccaagccagatactgctgatccatagtatgctgtttgggatgctgaaaactccatggtcatgacttggctggtaaactccatggaggaggacattagcaaaaattacatgtgctattccacagccaaagagctatgggatagtgtcacagaaatgtattctgaccttgggaataaatctcagatttatgaactcaccttgcaagccaaagaaattcggcaaggaggtaataatgtgacaaaatacttccactctttgaagcaggtttggcaggaccttgatctcttcaacacttacaagtggaactcagcaaaggatgccaaacaccatcaacagacaatggaagaaggtggaatatttcaatttctagcaggtctgaatgaggagctagatgaaggtcggggcaggatcattgggagagcaaccttacctttattgggggagggctttgctgaagtcagaagagaggaaactaggagaaccgtgatgat

SEQ ID NO: 109510 - DNA, 280 bp, Glycine max
  Clone ID: PAT_MRT3847_69902C.1
gaagcgcctgtttctcccggacaaagctcgccgtcttatcccgggggaggagcccctccaaacgaggcttaagaagcctcagaacgggatgctcaaagatatactcccataaaaccggctccgatttgttagcgacgttcaccaacatccggggttaccggctcaacgtattctggccgtggactgggtcatggtgcgagtctcccttcagaccttaactttgtttgggcctctccatgtttgtgcagacacggggtggctgatctagaccttggcctat

SEQ ID NO: 109511 - DNA, 136 bp, Glycine max
  Clone ID: PAT_MRT3847_69903C.1
gacaatctgcaatcagctacaatctatgatccttgcatggtgcgataatgtcggcgatgttggagcgactactcatgcatactgatagcctgatcttagcatacctgacgtgagtggccttgtccttcactcagat

SEQ ID NO: 109512 - DNA, 338 bp, Glycine max
  unsure (1)..(338): unsure at all n locations
  Clone ID: PAT_MRT3847_69904C.1
ttgcttcnnngagcaagatatgagcactttattctaagggagtttgctcagacnnataacaccaaagagcgacatattacgatactacatacctttgatgcttggaagctacatataccttttatgattatctctaaaggccaatcctgattgaagcttnnnntctccaagacctcattggacagagcaggggttgcgggagcaaacagcnnctcattcggagtcgtggatctcagagcaaacacccattnnagcactctcgaattgagccttaactggagcctctcccatgaccattgtctcggcggaggctgactcggagtagatcaagtctgagt

SEQ ID NO: 109513 - DNA, 300 bp, Glycine max
  Clone ID: PAT_MRT3847_69905C.1
ctgatgcgcgggcggacgcgtgggggacaacaggctcactgagaaaacaatatccacttgcagagatttggacatcctggctgtctattatacaaaagcaacccaatttagaaaatgcccaccgaattacatcaggcggcatccgcaaacctagctgattgaacatatcccaactcaacacactgctgaaattaaatataagcggaatccaagaaaaatccatattaccggcccattctacgacggcagacacaaacaccggacaaaacacgagaaaaaacatgcattgacagaagagga

SEQ ID NO: 109514 - DNA, 175 bp, Glycine max
  Clone ID: PAT_MRT3847_69906C.1
ggctcgagattatatactgcaagcagggagaatgtatgcttgcccataacttgtcgctgggagagcgtacctccggcttgtcaacgaacgccaatacctcatcgttcattaccgaccgattcctgcttgatgtccatacttgcctattttatgtcttttcagagtttgacctatc

SEQ ID NO: 109515 - DNA, 1163 bp, Glycine max
  Clone ID: PAT_MRT3847_69907C.1
gttttcgtctgtcagacaaaatttggcaccagctgccgccaccaagaggcatagctgaagaatactgtgagagaaagaaaaatgttaggaaaagagtgctacacaaacccgccatcaatcctaaattcctctagtgcggttggccatgttatcaatatcggtggtgttaattcttacgtcactggttcccctctctccatcctcgccataattctagtctctgatatttttggatttaaaccaccacttttaaggaacattgcagacaaggttgcagctactgggtattatgtcgtggttcctgacttcttcaatggggaaccctatgatcctgagaatgtgaaaaggccgaaagatgtttggttaaaagatcataatccggaaaaaggtattgaagttgcaaaacctgttattgaagccttaaaaagtaaaggtgtctctgctattggagctgctggtttttgttggggtgctaagaccgttaccaacctcgggaaatccaaacatatccaagtttctgtgctattacatccatcatatatcatagtggatgacatccgtggtgttgagattccaattgctatacttggagctgagaatgacagagttgcttttcctccaaagcttgcagaacaatttagacaagccctaaaggctaaacctcagattgatagttatgtaaaaatatttcctaacgtctcacacggttggacagtgaggtacgaccctaaagatccaaaagctgtagaggctgcagataaggctcatcaaatcatgataggttggtttcataaacatttaaagtgagaaatcttatgtgatgtttgatccaccagtgaagtctcacttaaataaaacaacggtggatcacagtgggtggccggcaataaatgctttcactaattgaaggcagattgtgctcctttgatctcgaaactgtaacggtttttgtggatttccattttcatttcctttacttagtcttgctatttcgatcctgttttgacaagaaaaatgtattgtggaaatgggaacaactagcagatcgatggttgtgcttttcttttcttttcttttaaattcatgtttccatctgcaacaaccttcttcagttcgtaacatcaaatgggccttttcttttattttggtttaaaaaaaaaaaa

SEQ ID NO: 109516 - DNA, 450 bp, Glycine max
  Clone ID: PAT_MRT3847_69908C.1
aaaagtggacttcctaaactaaaataagggggttccttacaacttccaacttttttttaggaaatttacgggttttggaaacctggcctaaattttggattttaattaacatcccagggttaacaaaaaaaaagattggaattaagggctgggtttaaaggcgcccccaaaatagacaaaaatggttcccaaaaaatttttcgggcggggacaactattgggggcccccccaatttttgtcaaatttccaaacccaggattggcaaaaaatcttgcttaggggttcgggttaacttaccttttcggttaatcggcccacccttgatccctcaacccaaaatggcttgactggtcaggccctttttcaacggggccttttggctgaaaaaaattttcttcttaaaaggatctcacccgcccaactttttccaatttaagttgaaaacttcc

SEQ ID NO: 109517 - DNA, 495 bp, Glycine max
  Clone ID: PAT_MRT3847_69909C.1
aattaatggcacaaaattccttgctacaaaaaatgtcggtaattgttttccacctccaactttagtgcatgattagaattccgttaaagcttgtccgcgagaattccaaacatgctctcaattttttttttataaaaaaaactgttttttttgtgtgtgcagattcatggtttcaagtggcttttatcctcactaccggaatcaacagtgcctttgttcttggatatcccgggaccgtgatggttcccctgggttggttcgggggtgtgattggtctaattcttgctaccgctgtatcactttatgcaaatgctctagttgcttatctccatgaattaggaggacaaaggcacattaggtatagagatcttgctggatttatatacggtaagccacattattagcttctgccatcatctcttcactttgtcaggtcatttccattcagcttatgttcggttttcattctcatttcaggtaagaaagcctataatc

SEQ ID NO: 109518 - DNA, 323 bp, Glycine max
  Clone ID: PAT_MRT3847_6990C.1
ccatgttggttgggttactggtgtgagtgggggtggcagctgcgagcgcggttccgcttggttttctgcgcggaaaggctccgcagtggggggggcgtgacaaaccccccctcttccgggccctggtcctacctttcagcttccaatggcagcctcaccctcttccttctccgctcccttgggtcatagctcgtttttccggcggcggcggcggtttgcgcggcaagcccctggttcctcaggcccccgccgtggatgacgacgacgtccctcgcccatgggttgtctgggaggacctgggggcggcggacaccgttcctctc

SEQ ID NO: 109519 - DNA, 883 bp, Glycine max
  Clone ID: PAT_MRT3847_69910C.1
tcaaaacctgtaaaaatcttcaaaaacggctgaaaaatgctgtgttttgatagaatccttggtggattatgacgagggcaggactgccttcacatctgaggaaggcggggttcttgcagttgtggaagttctcgaaccacgcgtccgccaaagtagggagcatgctgttggagcactgttgacaatgtgccaaagtgaccgatgtaaataccgggaaccaattcttagagaaggtgtcattccaggacttcttgagcttactgtccaaggaacaccgaagtctcagtcaaaagcacgcaccctcttgcagttactgagagagtctccttatccgagatctgaaattcaacctgatacccttgagaatatagtatgcaacatcatatctcagattgatggcgatgatcaatctggtaaggcaaagaagatgctggctgagatggtccaagtcagtatggaacagagtctgagacatttacagcaaagggctcttgtatgcaccccaagtgatcttcctatagctggctgtgctgcttctgaagtttcttcaaaatgatagttgccgctggccaactgtctttttttcactttttttgtctttgcaattgcggtttgtgaggtaaatttccatagtagaaaacgtaaaaaaaagaaaaaaaagaagaaggaataataatacatagtgaaggatgccagtcctggccattgtggaggtatcgagtgactggtaagtgtcaataaactaagttgtcattggtaaagagcaggattttgtagttggcctgtaaagaaactggtgtataaaatgacatacaagtagtaaaaactggtgtaagaatttacaacttttgattcaatttttgttttggggtctaccaatgat

SEQ ID NO: 109520 - DNA, 482 bp, Glycine max
  Clone ID: PAT_MRT3847_69911C.1
ggttgaaaacatatcaatttagttccttcttattgttctgctcttctttcttgcatctgtgtgagtattcttcgctcgctctctctctgtattgttcttctgtgtatttagtctctctaaatcccaatctttgccgacttattgatgggattttcttctttcttatttttggaacaggttaaaaactttatctctttaggaggccctcactctggtactgcttcagttcccatatgtggtgtgagtaccattgtggctttccagcatggtgccttgtatagattttggaaataccacatgctatattatcaattttctttgtgttgacaccaattgaatcagtcaccacaccaattatttcatacgaaggtcccgagggatacaaagaatattactctaaatgttagaattggaatcgaatgctgagtatctgtattatttactaaacttctaaggaaatagtagcaataatgactacaaac

SEQ ID NO: 109521 - DNA, 1610 bp, Glycine max
  Clone ID: PAT_MRT3847_69912C.1
gcgggcacactgagagtttccattcactgtctccctcttccacctccgacgccctcggtctcgagacgctttgcgtttctcctcagcctcttaaaaccaaacagattttattctctcaaatggagagtccccattcactgtctccctcttcctcctccgacggcgtcggcttcgagacggaggagccgcggacgccgctggccgtgcgccgcgcgctgcagctcctcaactccggcgatcccgacctgcgcctccaagctgctcgcgacatccggcgcctcacgaagacgtcacaacgttgtcggcgccagttatcccaggctgtcggtccactcgtttccatgctccgagtcgactcgcccgagtcacacgaacccgctctcctcgccttgctcaacctcgccgtcaaagacggaaagaataaaatcaatattgtggaggccggtgcattagaaccgataattagtttccttaagtctcagaatccaaatatgcaggagtctgcaactgcatctttgctcactctatctgcctcttcaaccaacaaaccaatcattagtgcttgtggtgtcattcctcttcttgtgcagatccttagagatggaagccatcaagctaaagctgatgcagtaatggctctctctaatttatcaacacacactaacaatctcagcatcattctcgagacaaacccaatcccttacatagttgatcttctcaaaacctgtaaaaaatcctcaaaaacggctgaaaaatgctgtgctttgatagaatccttggtggattatgacgagggcagaactgccttgacatctgaggaaggcggggttcttgcagttgtggaagttctcgaaagcggcacactccaaagtagggagcatgctgttggagcactgttgacaatgtgccaaagtgaccgatgtaaataccgggaaccaattcttagagaaggtgtcattccaggacttcttgagcttactgtccaaggaacaccgaagtctcagtcaaaagcacgcaccctcttgcagttactgagagagtctccttatccgagatctgaaattcaacctgatacccttgagaatatagtatgcaacatcatatctcagattgatggcgatgatcaatctggtaaggcaaagaagatgctggctgagatggtccaagtcagcatggaacagagtctgagacatttacagcaaagggctcttgtatgcaccccaagtgatcttcctatagctggctgtgctgcttctgaagtttcttcaaaatgatagttggggctcttcttaatttgtatcttttcaccctttttctcctctttttctttccagttggaactagcaacataaattttctgtaacatataaagagaaaagaaaactgaaaaagaaaataacagtaaaaaaatgccagtccaggccatcgtgaaggtatcgagtgactggtaattgtcaataaaaatgatgttgtgtgatgataagagcatggtttttctagttgatttgtaaaggaactgttgtataaaataatttgcagaagtagtaaaaactggtgtaagaatcttatcaacttttcttccaatttttgttttggggtctaccaatgat

SEQ ID NO: 109522 - DNA, 242 bp, Glycine max
  Clone ID: PAT_MRT3847_69913C.1
tctgagatccacggcttaaaaaggagcaacatggcgttatactcatcagatgtctgcattctgtacttgcacacatgagttgttatgtctcaatacgcagtaggagtacttctagcagcacgacccatggcgacatggtgacgccatcttgcatagagactagttactgtgggcaacagcgaacgaggcgaacatactctgatcatgatatatctctccaccatgtagcaaccttacctaac

SEQ ID NO: 109523 - DNA, 324 bp, Glycine max
  Clone ID: PAT_MRT3847_69914C.1
aagggaatgggttcacatttattttctctattgcccaggcacaaagaaaatctttttttataaaaccctacgggcgaaaacaccaaacattcacatatgaagtagcttttcgacaaaacaaacaaaccctttatggatttaaaaaaaacccacgtgcaaaaaaaaaagaaaagtttttttaaacggtaaaaccttcactaaaatttaagaaacaaggtatatccttttgtttccccgggcatgttcccattacactgctaaaccataaatttggaagggctaaaccaactgcccacattccactatcatcccgtggccaaattt

SEQ ID NO: 109524 - DNA, 256 bp, Glycine max
  Clone ID: PAT_MRT3847_69915C.1
atcaggggcaacgaaatacagcatacatatgatccaggtactgatgagcacattaccacgcaagttgtgagcatgattgcacatctgctatacagaccttgtcgtggtgatgagaaatagatgcgcgacaggatcacacatgctgttggctcttggtacaatggtggcgatcagcaagatagaagcatcgaggttctaatcactcctcccttctgggttaccgctcgcagttaccctcaatatcctgaataatgat

SEQ ID NO: 109525 - DNA, 300 bp, Glycine max
  Clone ID: PAT_MRT3847_69916C.1
gactgctacacctaagcaaacgcggttagatcggtggctaagcatacttcctagcggacatggttgctgcacttatcctcattcctaacggacttggtacgtaactcaaacccactgagacgcaaccagtgtactggcttacatcgttgcaacgaacactgtgcaaaccacagtggtatgctccaacagcaacgggacacaagccgtagccagcgtgctacaagccaccatatcagaagccaccatgcacgagacgaccatatgggaagtaccctccagacgacgacaacacccatgcct

SEQ ID NO: 109526 - DNA, 297 bp, Glycine max
  unsure (1)..(297): unsure at all n locations
  Clone ID: PAT_MRT3847_69917C.1
aatcgcacgnacgagtagntcgctntacntgtngctagagaagactnngacannanaattattgaagnagnananttncgnncaagggnatatcntgantcaagcnatgantccaggtcttgnanttntnggttnaatctncaggtcangngtaaccaggaatcggnaatcgaanntgccanggagtgnnttaanntgnnanngnngatgggtcctncagcngccaaggagntgngaanttntcatnacatnatcanagtttgtgcctnataggaccgtcnnanntggtanaaagcn

SEQ ID NO: 109527 - DNA, 753 bp, Glycine max
  Clone ID: PAT_MRT3847_69918C.1
cggccgtttgtcttccccaaaagcaaaaataaagagaagggttgatagggtgtgaggtcttactttccccgttaccacccaactcatactttccttccttgtctatccctcctgagctgttccagtttaatttggcctatcatcatgcaacaatttaatgtaatattatgccacactatgttatcatatatatggtatggcttcaaagaaactaattcaggaccttatcttaataccttgaccttagaacctctctcaatggggcttgttcaaatgtgcaagcaatttggagaccatggcttccaagagagtacaacaattggggtatattattttattttattgttttttttatatatatatatttttatcttggtgagaaatcaaagtagttcgtgcagcagcatggcccttaaggtatgtatggttagttgtaaagagtggccatagttaataaatcaatgttgctagtattcagaggaaattcaaaatccaacctatatgatatttctgttaaggcaatcaatttcgcttgtatcattgtgtgcagaatatttatgctgtgttgcagaacatctgtttcgttgttttatatgatgtttggctgagaaagtgtgcaacaactgcatacatattcttttagatctaagcaagagtttccctcgtgattgctccaatgtacaaatatccactgtattattggagttatctcttttctctctctctctaaaaaaaaaaaaaaaaatatataaa

SEQ ID NO: 109528 - DNA, 175 bp, Glycine max
  Clone ID: PAT_MRT3847_69919C.1
tgtgtcttttacttaaagttatgactgattgacgcggactcttaaatataaatgggggataaccacaaaaaatttcttttctccccctaaatgtacaatcataagcgatgtatacaatattactatcaaacatttgccatttagtggaagtgtatactattcaaaaagattatta

SEQ ID NO: 109529 - DNA, 613 bp, Glycine max
  Clone ID: PAT_MRT3847_6991C.1
ctgcattacctgttatacaagatgatttacagttgacatcgctgataacggaagaaaaacacagaaattgagaaggtgtatataccaaatgttatagtactacaaattctatgaagagagtctaacagagcacctgaagcatccctagtctagagaccaaatgtacaataacaacttcaaaaaaggcctaattacacaggaattatgaattaatactttggtatatatccatccttccccccaagtaataatacagaaaatgagttgtcaagtattcatttaatcctccttattatatattatatatttcataaatttttctaaacatttattgtgtatacttgacaactcattatgagtattatactcataatattaccatgacatgggatatactaatacagtcattaatactaataatactatgtattaggaagtagccggagaacccaccagagagaggtaaacctgactctgtatcactgtcttaccgattttgaaacccggcaccaccgtgaaacccaccctaagctcgccggagctggaatcggaggattcccctgaatgcgaaacgggttcttcggtgacactctccatgtacacctcagctcgt

SEQ ID NO: 109530 - DNA, 420 bp, Glycine max
  Clone ID: PAT_MRT3847_69920C.1
gacaaatgcagaagtacccaacagtcaatccaaggaaaatggtgggagtgatatagcaactgatggtgcacaaggttctggtgatgctaggaaccaagcacagttatatcaagattcgtccatattatatcattttagagacatgcagagaagacaggttgagtttataaaaaagagggttcttctcttggaaaaagggctcaatgctgagtaccagaaagaatactttggtgatccaaaatcaaatgaagcatcaaatgaagaacttaaaagtgaaaccaaggctactaatttcccaagtgataaattaggggacagtgacaccaaaatgattgatcaacttccgcaagtagaaacaatagcttcaaaagaaattgtggctgcatgtgatagtgatcccaatcaattggagttagctcg

SEQ ID NO: 109531 - DNA, 620 bp, Glycine max
  unsure (1)..(620): unsure at all n locations
  Clone ID: PAT_MRT3847_69921C.1
gcgagctgatggtgcacaaggttctggtgatgctaggaaccaagcacagttatatcaagactcgtccatattatatcattttagagacatgcagagaagacaggttgagtttataaaaaaaagagttcttctcttggaaaaagggctcaatgctgagtaccagaaagaatactttattatagatttgagctggcttaaccagagatctcttttttttagtcttgggtatgcatttgcgttaaatattcaaagggagagctttgtcacacatagtggttctaccttggtcgaacaagagtgcctccaatgacggatacctttggtctataccaaaaaatggtgatccaaaagcaaatgaagtaacaaatgaagaacttaaaagtgaaaccaaggctactaattttccaggtgataaattaggggacactgacacccaaatgattgatcaacttccgcaagtacaaacaatagcttcagaagaaatttcagctgaatgtgatagtgatcccactcgattggagttagttcgcctttcaacgagatgtgcaaggcagtggaggaagactccatggatttagttcanacttctttggcaagagaaccggcagagctcaatgtag

SEQ ID NO: 109532 - DNA, 412 bp, Glycine max
  Clone ID: PAT_MRT3847_69922C.1
cacacgcctccttctacgcgtactgaaaacactaaaacactggaatctaaaaacacatctattgagtctgcggtaaatatgttacaaaagctttgtaccaagcacatactactaagagaaataactgtcaaaaaagctcactcaataataattaccaaaatgacccgttttactagacattacaccataaatatggttctacaatttcaatatgcagcgccctacaactcttgtttgggggcggatagtggattctttattaacttaatattattccaatgctatcatgacatggtccctcattggggactcaatttgttctttggtttgaaaggcagaaaattaatttcatttataatttgtatcctttttatgctttttgcatttcttaaccctagaacttatgaattta

SEQ ID NO: 109533 - DNA, 509 bp, Glycine max
  Clone ID: PAT_MRT3847_69923C.1
gaatgctggctacttgatttatagctggatactagaaagcaccatgcactgacataggagttggatgatcttaatcatgtgcgaaacatgaaaaaattgggaaaggtgtacatcttaccgacttttatgagttcaactctcatactcattaagaacaccaaaatctgcactctccacattaaacgctcttgatgcatagtttctcctcctatactacgatgtgagacactggataccatggaatcaatctctcagaagtgtccagctgactctctgaatttataacagaaccaatgcttgaaaaaaaatatctgttatcaactgcaggacgatgatgcctttgtgtactacctaatggattgctaccgaaatatgcctcaactaacctttcagcagagaatagagctgaagaaagagcacaaaggggagttctatgggaacgcgatctatcaagcatgagcgactggaccctactactgctatcccctgcctaaccagtattaacattg

SEQ ID NO: 109534 - DNA, 403 bp, Glycine max
  Clone ID: PAT_MRT3847_69924C.1
ctcgaattcggtcgagcgagaagacgacaaaaggggggggttttgaaattttttttggattggttttttcccaatttcttcatcgcgcctggcaaatgaagtttgggtgctggcagtgaaacctttaaagatattggtattaaatggaaagttttccctatgcttaaaacaaaaacctttaaggttcttttaatccagaaccaggtggtcgtccatttctttaaatttgctaataaaattttggtttttgaattttcatttcttgtcgggggcctgagtttggaggtatggatctatatttttctaatctaactttttcaaattactactatgtaattattatcaaagctatttttggtaatgttaaggctgtaacaattaccataagcaattactgatttta

SEQ ID NO: 109535 - DNA, 329 bp, Glycine max
  Clone ID: PAT_MRT3847_69925C.1
ctgagtatgactgcacccgtctcagcgacttcattatcttggtcattcactactcatggggatcggaatcattttgcaaagcgcgaccattgccttccttaagacattctactatgtgcactacatcaccttatgagcacagatatatagcggatctcgttctcatagcgtattaactatgaaacacgtacattgatctaaaccgaccacatagcatactatgtcaacaaatgtctaacgcattcactcatattataacgacatggtatcttgagaatgctctccaatctacccatttcccaaaataatgcactcaatcaagtttctca

SEQ ID NO: 109536 - DNA, 680 bp, Glycine max
  Clone ID: PAT_MRT3847_69926C.1
ggagcaaatctattaagtataaatttttgaactaaaatttagctaacacaagcaaggggcccaaaaaacaataggttattaattcacatgaacacagggcaaagatcatggatcaaatttatcaactccaatgcttcacaaatgtacaaattaagggcgcttcaacgacttgccaatttttttatgcttcgtaaagttccaaaatgttttcttcttatttttccttaaatctatttttttctgatacctccggtttctatatatttctcgggcattcaaccacttggaataatttttccccgtcttacactcaaggaaatctgcaagttcatcataatcggacaattttttggggtcttctattatgcaattaaggaacattcccccgttgcagcttttctttgttccgacctctaagttataggaggggaaggaaaccgatggctcagcccttaaaaaatactttcagaaatttaaaaacactattttaaaactataaacaaacagctcttgtctacacccccctttaccctgattaatattagattctaataagtgaaggaatgcaatggccacaacctaaatgaccccaaagcaactctaaatggcatcacccaaactaagtgtaacactaatatgctaagctaaatggaatcccccaagatttgcgaaccccacgt

SEQ ID NO: 109537 - DNA, 340 bp, Glycine max
  Clone ID: PAT_MRT3847_69927C.1
cacaggttcaacttgttagggggatcaaaacattcctagattggaatatggcaaaactggtgttctagtcgaggaaagcaattgaggagctccttaagggcgtgattggccaaacaactagaggcatcaaggagttggaagatggacataacaacccatcatttgtgacaactggaggagtgctagtcttaccaactccttcgtcttgaaacacccactttgaatccatgatgtttcatgttcaagttggaattccagtctgaggactccaagagagcaattgcaagagctcatattaagacgtgagggtgctacagagagagaactgacaacatgggga

SEQ ID NO: 109538 - DNA, 514 bp, Glycine max
  Clone ID: PAT_MRT3847_69928C.1
aaagaattctgggaatttaagagggttggaaggtgtggatggtgggaaaatgaaattttctacatcagagagagttctaagagagattgtgtctgagtctatcccagccacggcattgacatttcaggagttcactgaagaagtcataacttcaattaaggaatacctgaaaggtctcattgaaatgcccgagaagaaaggagaactagagagcctccagaaccggctctgtcgaaaatctgacctcaccagagagactctttcaaagtgtcataagcagcaactggagattttggctgctatcaagaaggggcttgggagctttttgtacggctagttccaattcgcggagacagtggatgttttcttgtacatgaggtgtaaaaatgtcaaccgcaaaatcttgcttcctattgatgactgtgactgccagatgtgtttacgaaataaggggttagggcaagtcttgcatgtttgctccgggcgtgagctttgattgtgcaagggacacttc

SEQ ID NO: 109539 - DNA, 766 bp, Glycine max
  unsure (1)..(766): unsure at all n locations
  Clone ID: PAT_MRT3847_69929C.1
cggagcgaaggggtaagagaaattaccaccgcaacagttgaggtgtgttaatttctgacatccaaaacgaaacaaaaccccatcactgaactgagaaagaggctaccaacagacaccacctattttatgcctttcttcttcttctctcgacaatggtggataaaccaatgagcattcatcgaacccggttcccattctcgatcaccaagctcctcttctggtcgcttatcctactcagcttcattgtgctcttcttcttgggatctcccccgtcctccgcttccccttcccaccgccggcgctccctccgcggcggcgactgggagacctccgttcgcgaatccgccaagtccaaatccctccgcgtcctggtgaccggcgcagccggtttcgtggggacacacgtgttcatcgctctgaagcggcggggagacggcgtggtcggaatcgacaacttcaaccgctactacgaggcttccctgaagcgcgcccgcagcaacctcctcgcacagcacaaaatcttcgtggtggaaggcgacatcaacgacggctccctcttaaagtctctcttcaagctggggaagttcactcacgtgatgcacctggcgggccaagccggtgtgcgctacgccatgaagaaccctaagtcctacgttcacagcaacatcgcgggcctcgtcagcgtcctggaggctgcaagaacgcgaacccgcaaccggcggtgttgggcctatcagttcgntacggctaattcaatccctttaga

SEQ ID NO: 109540 - DNA, 2342 bp, Glycine max
  Clone ID: PAT_MRT3847_6992C.1
tttacgcgtccggaaaaccctaacaaaaacccgtagggggggagaagaagcttggtagttgcagtgcgtctcgtcccccgaagggggaaagcttcaatggggaaggcgaaggggaagcaccgtttggacaagtattaccacttagcgaaagagcacggttacaggtctcgagcctcatggaagctggtccagctcaactccaagttcggcttcctggaatcggcccgcgccgtgctggacctctgcgccgcccccggagggtggatgcagtggggtgggtcaagagcgtacccgtggaccacctggtgatcggcgtggacctcgcccccatcgcccccgtccgtggcgccatcgccatccaggaagacatcaccaggcccgagtgcaagtcccgcatcaagaagctcatgaacgaccacggctgccgcgccttcgacgtcatcttgcacgacggttcccccaacgtcggtggcgcctgggcccaggaagctatgagccagaacgccctcgttattgatgctgtcaagttggccactcagttcttagcccccaagggcaagtttgtaaccaaaattttcaggtcgcaagattacagttctgtggtgtattgtttgaagcagttgtttgagaaggttgaggtggataagcctgcggctagtcgttctgaatcagctgagatatatgttttggggcttaaatataaggcccctgccaagattcgatccgggcttcttgatgtgaagcatctctttcagggatctgtggaaccacagcctaaggtggtggatgtacttcgagatactaagcaaaaaaggcaccgtgatggctatgaagatggaaacacaactttgaggaagctgtcttcagctgcaaatttcatttggtcaaattctcctctggagatccttggttcagtcacttccataacctttactgatccagctgattcaccaatcaaggatcatgacctaactactgaagaggtaaaatctctctgcgatgatttaagggttctggggaagcaagacttcaagcatcttctaaagtggaggattcaaattagaaaagctctttcaccaactcaaaagcctgattctaccaccacagaacagtggggaactgagagagtgagtgagtggagtagcagaagagaagagggatctgtgtgtatctgagactgtgcatcatccctgttcctacggcttcttgaagacgacagggggtggttacctgcggtaatgttccactggagtcctcctttcaaaaagttcctagatgtgtatatacattctacaagcttgtatgaatatcgaggatgggattcaaaagcagccaacccaaaacatcgccgttttacatggggacttagagcagctgagagacatgtggtggacttctacatttctgatttccaatctggattgagagcattggttaaaacaggctatggtgcaagggtgactccttatgttgatgattccgttgttattgatgttaatccagccaataaagacatgtcccctgagtttcttcgatggttgggcgagagaaaactttctagcgatgatcgtataatgcaattaaaagaagggtacatcaaagaaggtagcacagttagtgtaatgggagttgttcaaagaaatgacaatgtgcttatgattgtccctccacctgagcctttgactaccggatgccaatgggccaaatgtatattccctgctagccttgagggtattgttttgagatgtgaagatacgtcaaagattgacgtcattccagtgtagtcatccttgatgttgttccagtgtagtcatatcctctctggtaacctcttaggtattcttctttaaaagatatgtcttcgcatatccaaaatgatggtggtggtggtggttgttgtttgtattttgtaagcatatacgtgttgttggtaagtgtgatgattctgccattgatatggtgatttctttttttcccccacactcaactcctagtttgttgtatagctaatggaaattcttattcgtttatttttcctgaggattttatactttttattggacgtggtttcatatagtgagaagttgtgtatttttggtgctgttgcggcattgatcacttggaacagttgttgtgggaggacagccattgttggtttcatttctcgttatcctgatgctgagcttcgaactgccaagaatgggcattttgtgaaagtttctgagggttgttacctgtggtaatgttccattggagtcctcctttcaaaaagttcctagatgtggatatactttctacaaactttgttgaatatctatggtgggattcaaaaacctccaacc

SEQ ID NO: 109541 - DNA, 375 bp, Glycine max
  Clone ID: PAT_MRT3847_69930C.1
cctcgagccgattcggctcgagcggctcgagaaaaaacttcgtataccaaatccgacgccgtaggtagatggattttgccagccatgatgaaccacctacctcgaatattcggccatagaaagaagcaagcctccgacaacatggacccgacgacaaagaacaagaagaagagtaagaagaagcagcagcccaaactcgagcgccgcaacgcctccaatcacttcgaatacgacgccggatcgtcgtgctcctggcgcggcggggacgagaaggacgcttccgtctcgacgtcgtcggagccgtcgtagtcgatgcattgcacacgctcgatggacctttacgaccgcacgagctttcgaattgaaggcgtggag

SEQ ID NO: 109542 - DNA, 343 bp, Glycine max
  unsure (1)..(343): unsure at all n locations
  Clone ID: PAT_MRT3847_69931C.1
agcatgtgtcccaggtgatttgaactgctcttgcattaggagaaatgaaggtgatttcccatacactggcaatggcattctcgtgagccggaagccattggttcatgaatgtggccccacatgtcagtgttttcctaactgcaaaaatcgagtgtcgcaaactggtttaaagcaccccatggaagtgttcagaacgaaggatagagggtggggtcttcgatcgctggatcctattcgtgctggtacttttatttgtgaatatgcaggagaagttgttgacagaggcaaggtaagtcagcttgtgaaggaaggaaatgaatatgtttttgatacncccgtattt

SEQ ID NO: 109543 - DNA, 281 bp, Glycine max
  Clone ID: PAT_MRT3847_69932C.1
aaagacaaaaaaccaaacgtgttactaatctcaaggaaatttaaattcgaggaaaaaaaatgttctagcctatggctaattatataaaggcgccagtcacatgaaacatgcggccttattgcccgcgcttgcacatgcaccatacagatgcccactcagggctgcttgagctccaggaacctacctgcttaaaggtttgaaacgacaaacggacacacactttcgtcaaataattccaacactgcagacacccaattgacggcatgaacgtcattgctttc

SEQ ID NO: 109544 - DNA, 540 bp, Glycine max
  Clone ID: PAT_MRT3847_69933C.1
tcctctagatcggccgcccttgtttgggtttttttttgcattttcaaatacctcgtttcctaactgggttgatacaactcggaatgcatattacataaacacacagagtgcaaaagaaacttgatgacacagtggagtgtatcacctcttgttcattctgaatcagaatcttgagcggttgaagacctaatcctcctgttcattgacatatcggtttcgtcgtcttcatcgtcctcatccttcttcttttcgtcgattatacctttcatcttgagtatattttccaacgctcttgttgaaaaatcatctttactgccaaggtcttgaaacccaactaaccggtcaacagcaatgcccttcttgaacaatatcacgcagggcaatgttttgattcctagtttcgtgacaaagaaaggagcattttcagcatcaagcttgatgaatttagttcccaaatagactggtgcaagggtcttcaaatgcttatccatgatcttgcaacgggaaaattcacggtggtagaaatggcagatgaccttt

SEQ ID NO: 109545 - DNA, 215 bp, Glycine max
  Clone ID: PAT_MRT3847_69934C.1
ttacaaaaaaatttgttatgcaaagacacctgttagatcgtgaaatttttctacgcccaaaggtctctctaaaaaaaactaaacatttaccctctttaaaaaattcaatcttttgtgtgacttttttggttgactggttgtataattatcttaatcttcattcgtctggtttttaatgaatttttcatgtctttaattattcttatttttttctt

SEQ ID NO: 109546 - DNA, 526 bp, Glycine max
  Clone ID: PAT_MRT3847_69935C.1
ctgtgaagaagagggaaatcacacaaccacgttatgggttaagaagcattgattctctggctgctataagggggttcctgtgtggttcgtttgattgttggtccagtagtattgcgacgctgaaattgtgaagaaagggttgcagtttagagaacgtttggggttaaacagcgtatttctttggttgcaaggggttcttgcggttactgcaactgtcaaaccaggggtattgcaacggagttgaaactcagggtatatgttgtcgaagtgcgtagggtgttcgaagccaaacattgtcgaagtccagaggagtatttttgttgtggggccatactgaccaatactcatatcgatgaatttattaagaatagtcccacgtcggataattcatgaacatgataagtgtttatatagttgggtagattatccccttatgaaccgatttttaagaaaccattcgaatgtctttgctgcactaaaaaggagttaatgatgttggtgttactgatgaactctatgtagtgtt

SEQ ID NO: 109547 - DNA, 160 bp, Glycine max
  unsure (1)..(160): unsure at all n locations
  Clone ID: PAT_MRT3847_69936C.1
gataanaataatacctttacantntttctcctttacattctgctacnaaccncaatnattncantnncntaaacctctcagacttcatntgtcagctttgagnccaatctgtgatggtgattctccgnagccggcanccntccgctncttncttntgaca

SEQ ID NO: 109548 - DNA, 514 bp, Glycine max
  Clone ID: PAT_MRT3847_69937C.1
aaattcctaccaagtttatcaaactgttcccaagcttttcgtgttcgaatcttcttcttccttttttgtccctttgaaaagctaaggaattgctgaattgggataatcaaatagaaccaccttgaagttgagacaagagtaatggcggccctatagtaattagacaatatcaggacaaattactattcaagagatattatgatcactatggatgtgaaaggtataaaatgggttggaaatatgtaccagaaatttgagaatatgttcctggaggtggaagacgtgatgtacgaggatacagttaaatacatagagaatcagatgcaagctgttggggaaagtgttaaaaagttatattcagaaattgtgggagatttacttcccccagaaaaggtaggcattgaattgcctatagataagcgtgcggatgctgggctctgtaggaagccattccatgtatataaggaaagacatgcccaagctgattcctttcttagaactgaggattcaagga

SEQ ID NO: 109549 - DNA, 692 bp, Glycine max
  unsure (1)..(692): unsure at all n locations
  Clone ID: PAT_MRT3847_69938C.1
aattcggctgtcctcgcaattcctcccaagtttatcaaactgttcccaagcttttcgtgttcgaatcttcttcttccttttttgtccctttgaaaagctaaggaattgctgaattggggtattacatgaaaccttctgcaagtggttcataagtttcctcttctctgttcttcttagaacaaataatcaaatagaaccacctcaagttgagacaagagtaatggcagccctatagtaattagacaatatcaggacaaattactattcaagagatattatgatcactatggatgtgaaaggtataaaatgggttggaaatatgtaccagaaatttgagaatatgttcctggaggtggaagacgtgatgtacgaggatacagttaaatacatagagaatcagatgcaagctgttggggaaagtgttaaaaagttatattcagaaattgtgggagatttacttcccccagaaaaggtaggcattgaattgcctatagataagcgtgcggatgctgggctctgtangaagccattccatgtatataaggaaagacatgcaaaagctgataccaagcaaagaactgaggattcaaggattgttcatggtgttgataatgttgcaacacttgctgctttatatgatggaacttccaaggctgatgcttcatccatgttatctttgaaaaaattctgtc

SEQ ID NO: 109550 - DNA, 1774 bp, Glycine max
  unsure (1)..(1774): unsure at all n locations
  Clone ID: PAT_MRT3847_69939C.1
aaaaaaacaacaaaaaaaggcacaagtcacaattccttccaagttttatcaaactgttcccaatcttttcgtgttcgaatcttcttcatctttttttgtcccttcgaaaagctaaggaattggtgaattggtgtatgacatgaagccttctgcaaggagttcatagattttctcttcttagaataatcaattagaaccaccttgaagttgagacaagagtaattgcagccttattttaattagacaatatcaggacaaatcactattcaagagatattatgatcactatggatgtaaaaggtataagatgggttggaaatatgtaccagaaatttgagaatatgttcctggaggcagaagacgtgatgtacgaggatacagttaaatacatagagaatcagatgcagactgttggggaaagtgttaaaaagttatattcagaaattgtgggagatttacttcccccagaaaaggtaagcattgaattgcctattgataattgtgcggatgctgggctctataagaagccattccatgtttataaggaaagacatgtaaaagctgataccaagcaaagaactgaagattcaagggattgttcatggtgttgataatgttgcaacacttgctgctttatatgatggaacttccaaggctgatgcttcatccatgttatctttgagaaatttctgtcaaagaaggcaaaatttagttcaccttcaagacagtatgttcgaagaatggatgttaaatcaaacgttggtattgatgaaaatccagtaaataaaaaaatggatgcgaccaagataatcaacaaaaccaatttggcagaaacagatgcatgccggacatcacaatcttatgagatctcaaataaaaatcaaaatcagaatcatggagttactattgcaaagccagcttcagcaaaagtggcaaggcttgcctctgacacagactgttcaaatgaaattgaaaatgctagtaccaaacagttccccaatgttccgcaactagttaaagcagctgaagagaaacccgttgataaaagttcttcctcctgtgtcccatttggagagccagttgaacaaggccatgaaaccatgcaagaagatcatctgaagcttgaggaagcctgtgttatggtgaatggagatgaaattcaattacctcccaaagaaggtggtaatttaaatactaaaaagaaaaaggcgcgacaaaccttttctttgtcaaagaagtctgccagaaagcaagagtataaggagcttgcagcatggcatatgaacagtgaaaaagtaaagggagattgcatggagaatttagatccaactttaccacaagataataaaaaattactgcttcctagtatgtctgaaccagaatgggagcttctctaattctaaatgccaggatgatcaagttgtgttgatacacaaaagccaatcctacaagtttggattcactcataagtccttgtggagattaagatgcccaactggaaatttaagatgctgaaatgatataaattcatacaatacttatgctatctttagttctttcctagctcctgaactttcctacacaacctttttctttttcctgctcacagaaaatagaaaagggtagctgtaattaggccattgaaatgagaatgtctaatagaataaaagaaactgttatctattttacanaaaaaaaaaaaaaaaaaaaaaaaaaaaaaaaaaaaaaaaaaaaaaaaaaaaaaaaaaaaaaaaaaaaaaaaaaaaaaaaaaaa

SEQ ID NO: 109551 - DNA, 1423 bp, Glycine max
  unsure (1)..(1423): unsure at all n locations
  Clone ID: PAT_MRT3847_6993C.1
aaaaccctaacaaaaacccgaaggggggaaagcttcaatggggaaggcgaaggggaagcaccgtttggacaagtattaccacttagcgaaagagcacggttacaggtctcgagcctcatggaagctggtccagctcaactccaagttcggcttcctggaatcggcccgcgccgtgctggacctctgcgccgcccccggagggtggatgcaggtgagtggnncccacgcgtccgttggggtaacaataaccttatcggttggatgcttcaacgaaagaaggagttgcgtaagagaggatggtatactggtatgctatggcgattggggatctgagagagtgagtgattggagcggctgaagagaagatgggatctgtgtgtatctgagtctgcgtcatcatcactgtctttaatgattcttcttgacagaacagcaaactggtgctttgaaaaagtctgatgggttctagattcccatctacatacagctcaagcaatggcctgtatgtatcagggcggcctgaacagccaaaagaaaaaactcccacaatgagctcagttgccatgccctatactggtggagacatcaaagaagtcgggagaattaggcaaaatgtttgatatcccaatggatggctctaaatctagaaaatccggtcccataagtaatgctccttcaaggacaggatcatttgcaggtgctgcttcacactctggacctatcatgcaaaatgctgcagctcgttctatttatatcacatctggtaatgtatcttctggaggcatgtctgcttcagtctcaatgaaaaagaccaactctggtccattgaataaacatggggagcctgtgaagaagtcatctggacctcaatctggtggagtcacacgccaaaattctggtccgattccacctgttcttcctacgactgtcttattacatctggtcctttaaattcatctggggctccaaggaaagtatctggtccattagaatttacaggatcaatgaaatcacatagttctgtaactcacaatccagccatgaccactcttagcctagatgatgaatattccttcaggaggaacttcccaaagccaatactgtggtctgtaattctgatttttattatgggattcattgctggtgcttttattcttggagctgtccacaatgccattctccttgttgttgtagtagttctttttggtgctgttgccgcattgttcacttggaacagttgttgtgggaggacagccattgttggtttcatttctcgttatcctgatgctgagcttagaactgccaagaatgggcaatttgtgaaggtttctggggttgttacctgtggtaatgttccattggagtcctcctttcaaaaagttcctagatgtgtgtatacttctacaagccttgtttgaatatc

SEQ ID NO: 109552 - DNA, 513 bp, Glycine max
  Clone ID: PAT_MRT3847_69940C.1
caaaaacaaacagacccgaaaggctggctccacctagataagggggcaccaaaagggggcccaaaacaatccccaaggggggggcccccccggaaaaaaaccgggaatttggggtcccaaaaaaaccaaaccccggccaaattttaaacacccaacccttaaaggggtttaaggcggttttggccaaggccaattaattggccccccagggaacccccttttttccccaaaaacccaaggggcttaaaaaaaaaaaaaccttagaaaaaaaaccccttccggggcccccaaaaatcctttttaaaaaacccagaacgccccaactaaggcccgccccccaaaaatccttttggccaggggaaaatccgggggcaaaaaagccccccccggggggggaagggcccacaagttagggccccaaaagagcccaacagggggggcctaaaaagcctttggaaaggaaagcacagaagggtttgggaaacgcaaaccagtctggaaatccggggcaat

SEQ ID NO: 109553 - DNA, 223 bp, Glycine max
  unsure (1)..(223): unsure at all n locations
  Clone ID: PAT_MRT3847_69941C.1
aggaaacagcggacgcggaagcgccagcaagcgcggaaacggacgcggaggacgcaagaggnacccagacgagagcaacacagagaaaaccaccacggagaacaaggacaagggagaggcaaatgattattatcaatttgagggggctgaaatggggggggcagcagaaaacgaaggccgcaaaagaggaccaaactgcgccgggaagcactgcactagcaag

SEQ ID NO: 109554 - DNA, 322 bp, Glycine max
  Clone ID: PAT_MRT3847_69942C.1
acaataatgatcatcacacaattttttttctctatacctctatataagcaagatttgcggactgagggggggggggcactatttaatccatcacttaaaactccagctgctatcatgtacaatatattggcttaataagatggatgccttctttttcaattatctcatcaattgatcaaaatgtcatttaccatccctacgggcaactgttcatatatataataagccaaatatcataaagcaactaaagattggccatataaccattgttgagcctccccttatcaatattgaaagcaatcttcctatatttcttgaaaca

SEQ ID NO: 109555 - DNA, 500 bp, Glycine max
  Clone ID: PAT_MRT3847_69943C.1
ccctgataaatacataatttccttgaacacccacaaaaataaagtattcacatcacactagccaccaaatgatagaaatccccatcgaaaacacccttgctctcctaacctaaagtaaggtaagacactttcatcctaggttagggttccaataaaaatatcatgtggctagctctaaggggctagcaaatgataaaagtaatatacattaggacagttgtttggccaatggcttaaaaatgaaaagaaagaaaaaagaatgcttagatcacatccatgaatcatatgttattataattagaaattcatgcaaaaccaactgtagaacatatcaacgaggacacgcaatataaaatttgtggtcgcacacggtcactaaagcttagggcctatttctatattaagatcaaatcagtgtttcgaaagttgttcttttaccaattccatgcaaaaaaacacctttgctctcctaacatgcagttgtttaaaatatgtataaa

SEQ ID NO: 109556 - DNA, 435 bp, Glycine max
  Clone ID: PAT_MRT3847_69944C.1
ctttttcccccctctatccctattgtataaattaaaatcattattatctgcatgccatatagtatctcttttgcaataaataataaatgcaaggggacaacaaagaagctgtattgctttcacttcctaacataatatctatgtcccagttgcttcttctgcagctcctcaaacactacaaaccacttcaagacaaaaacaacaccccataataataataatatcaacaccaacataaacagccacacctattgtgtcacaaaatttgagtctcatattttgtgctcttaatagtgtgaagaaaaattcccaccactcctgttgggaaaacatcacaattcacaagctggtaagaccaattaaaattttccgcagcctacatagtcggggtttacatgatgatggctttggtctattatgtgaattgaatggact

SEQ ID NO: 109557 - DNA, 128 bp, Glycine max
  Clone ID: PAT_MRT3847_69945C.1
cgcagcatggctcgtggtcccaagaagcatctgaagcgggtggcagctccaaagcattggatgctggataaattgaccggtgtgtttgctcctcgtccatccaccggtccccacaagttgagagagtg

SEQ ID NO: 109558 - DNA, 251 bp, Glycine max
  Clone ID: PAT_MRT3847_69946C.1
acgcgtacgtctgactaggacttcggcctccgtggaagcggtgtgtgagaaggaagatagtatatgggagatgtcacttcatggaataagatgagtcaaaaagaagttcactaccataggaagccatggttaagagcttgaaggtaggagaagaggagccgatggagagggagagtatttgcatgaaattttgtgtctgaaatgaggtcttaactttgaagtgtaatagtcatatggtgagatgatgaaaa

SEQ ID NO: 109559 - DNA, 609 bp, Glycine max
  Clone ID: PAT_MRT3847_69947C.1
ccacgcgtccgtaatttttgtacacacacacagattcccctctttcgaatttcgatactttgatcagatccacaacacttcttcatccatgacgcttggttcttcaggatccagtgtcgtggactgtacatgaaggaagaatttatcaattgaagctgttttgtgataaagactaccctgaaaagcccccgagcgtccggtttcattcacggatcaatatgacttgtgttaatcatgaaactggagtggttgaatcaaagaaatttggtcttcttgcaaattggcaacagaggtttaccatggaagatatactgacccagctgaagaaggaaatggcggcttcacataaccgcaagcttgtccaacctcctgaaggtactcactattagtgtccaagatcacactgatattggatcatattgcatttgcagtatgcaatatatagtatgtaatactctggatccttctaaattcaagaacatactggggaatgctcgaaagagcttcatctttacctacatagagttttgttgcaatacattgtcaactttgttgaagggatgctctctgattggtactaaatattggaagcaactcttaaaggagcgt

SEQ ID NO: 109560 - DNA, 1194 bp, Glycine max
  Clone ID: PAT_MRT3847_69948C.1
tcgggatcttcgtgatcccgacattaatttttgtacacacacacagattcccctctttcgaatttcgatactttgatcagatccacaacacttcttcatccatgacgcttggttcttcaggatccagtgtcgtggttccaaggaacttcagattgctggaggagcttgagaagggagaaaaaggaataggagatggcacagttagttatggaatggatgatggtgatgacatttacatgcgctcttggactggaaccattattggtccctataatactgtacatgaaggaagaatttatcaattgaagctgttttgtgataaagactaccctgaaaagcccccgagcgtccggtttcattcacggatcaatatgacttgtgttaatcatgaaactggagtggttgaatcaaagaaatttggtcttcttgcaaattggcaacagaggtttaccatggaagatatactgacccagctgaagaaggaaatggcggcttcacataaccgcaagcttgtccaacctcctgaaggtactcactattagtgtccaagatcacactgatattggatcatattgcatttgcagtatgcaatatatagtatgtaatactctggatccctctaaattcaagaacatactggggaatgctccaaagagcttcatctttacctccatagagttttgttgcaatacattgtcaactgtgttgaagggatgctctctgattggtcctaattattgaaagcaactcttaaagtagtgttcttttcttattaaaaaaaaaaaaaaaaaaaaaaaaaaaaaaaaaaaaaaaaaaaaaaaaaaaaaaaaaaaaaaaaaaataaaaaaagggggaggaaaaaaaaaaatccgtgcttaaaaaaaaaaaaaaaaaaaaaaaaaaaaaaggggggggccttttaaaagaacccaatttaacaacccgggggtgggaaggtaaaattttttttatggggccccaaaaaaaaaaaaaagggcccgggttttaaaacggggggaagggaaaaaccctgggggaacccaaattaaatcccttggaaaaaaacccccttttccccagtggggaaaaaaaaaaaaggcccccccccaaccccctttccaaaaagttccccccccaaatgggaaaagggaccccccctttaacggcccattaaacccggggggggggggggtt

SEQ ID NO: 109561 - DNA, 414 bp, Glycine max
  Clone ID: PAT_MRT3847_69949C.1
aacatgatcatttaaattttccggacaccgaggaacatatcaagtaatcccggaccggtgccctgaccgggtaatacctttccctatcctgagggctttcaaaacttggctataataagggcattgagaggggcggggaaaaatgggtatacgtttacaatggcacaaaacataccaccctcaaacataaaaagaaaaaactgggggggctaattaagtgagctaacctggggtgcttaaggagggatcaatgccccatttacaggcgggaaaccagtgcccccttttgaattaaaaaaaccgccaacccaccgggaaaggcaatttgccaaccgggcgcgagggggggtttgtttataggagggaaagggggaatttttttttgccctttaaagggtgaacctgaaaaagccc

SEQ ID NO: 109562 - DNA, 753 bp, Glycine max
  Clone ID: PAT_MRT3847_6994C.1
ggacaatttcagagctactcaagaatccaagggtgatgaagaaactccaaagggaattggaaactgtggtgggtatgaagaggaaggtgggggaatcagacctggacaagttgaagtattgggagatggttgtaaaggaaggcttgaggctccatccagtggcaccgttactattaccacaccactcgagggaagattgcatggttggagaatatttcatacctaaaaattcaagggtgatagtaaatgcatggacaattatgagagacccaagtgcttgggatgaggcagagaagttctggccagagagatttgagggaagcaacatagatgtgagagggaaagacttccggttcttaccttttgggtctggcagaagggtctgtccaggattgcaattgggcctaaacacagttctcctaacagtggcccaactggtgcattgctttgattggaagctaccaaataacatgttgccatgtgaattagacatgacagaggagtttggcctctcaatgcctagagcaaatcatctacttgtcattccaacatattatcgccttcatgatcaaagttgttagaagtccacgtggggttcatatgaataagatgcactggataataaactaccctttctctttcctttcttatcatcatcaatgtctctatcattgaaaaaattggtttttgttgtttatgcgaaactgttacgccattcgtgacgatttgaaaatagaggaatattattttaac

SEQ ID NO: 109563 - DNA, 758 bp, Glycine max
  unsure (1)..(758): unsure at all n locations
  Clone ID: PAT_MRT3847_69950C.1
atgttgtatgtccntcagataaggaagggtcatgatttttaatagtgacggattcttttaacaaaagtttcccactcttncgtgtcgattttcccatcttggtttaggtcagcttnccacgaaaagtcttgtcaagaattgtttctatgacatcatctgccaacttcatatccgactcaaaaagaagtgcaattaacatttgcttgacctcagggcgctctataaagccagtattgtgcaaatcatagagcctaaatgaaaaagctatcttgtcttctaatgatgcatttgggtggaaaacattcagagatctaacaaagtcttcgaagtcaatgactcccttcttcttgacatcaaataaatcaaagatccggtttgcaaaaaggttatcctttttcttgtttttgaagattgccaattggaattcttccttgcttatcagtccgtcatcgacaacagaactgctgatgctcctaaaaagctcaaacagtgcttcaacctcactgacagtaaaagctgtctctgccgcaagattaacagtattctcctgtgcaggaaactgcctcgctgacttagagtggaaacaacccattatagaggaaatgcaagtaatgcagcacagcacagtaccggtgctcgaacttaccctcttcaaaagcgtgttcagaaaattggcatcaaagtgagtgcggcgacggaggtggaaactagaaagaaaagggtagagagagaaacttggggtatacgcggagtttgca

SEQ ID NO: 109564 - DNA, 1971 bp, Glycine max
  Clone ID: PAT_MRT3847_69951C.1
gtgaatcgtcaattcattcatgacaaacggttttagaagttattttacattgcaactcttcaaaattctctattaaaaaatatcccttataaataaagggtttccaaacaggaactaacttgagatgtggctagaaaattttaatgcaaacgtcatttacaattttactgagtaaggctaactaatcaagcatagcacctattccattctcagtgtttgatacatccaattttcccaccaatcacataacctaaaaactctgtactttaagcagtaatctcatccacattagagttaaatataaaacttgggaaagatgttgttatgtccctcagataaggaagggtcatgatttttaatagtgacggattctttttaacaaaagtttcccactcttcggtgtcgattttcccatcttggtttaggtcagcttccacgaaagtcttgtcaagaattgtttctatgacatcatctgccaacttcatatccgactcaaaaagaagtgcaattaacatttgcttgacctcagggcgctctataaagccagtattgtgcaaatcatagagcctaaatgaaaaagctatcttgtcttctaatgatgcatttgggtggaaaacattcagagatctaacaaagtcttcgaagtcaatgactcccttcttcttgacatcaaataaatcaaagatccggtttgcaaaaaggttatcctttttcttgtttttgaagatctgccaattggaattcttccttgcttatcagtccgtcatcgacaacagagctgctgatgctctaaccagctcaaacagtgcttcaacctcactgacagtaaaagctgtctctgccgcaagattaacagtattgtcctgtgcaggaaactgcctcgccgacttagactgcaagcgcgtccttatagagagaatgatcccgacattaatttttgtacgggaaacacacaccgattcccctctttctgagatatttcgaatttcgatactttgatcagatccacaacactccttcatccatgacgcttggctcttcaggatccagtgtcgtggttccaaggaacttcagattgctggaggagcttgagaagggagaaaaaggaatcggagatggaacagttagctatggaatggatgatggtgacgacatttacatgcgctcttggactggaaccattattggcccctataatactgtacatgaaggaagaatttatcaattgaagttgttttgtgataaagactacccagaaaagcccccaagtgttcggtttcattcacgaatcaatatgacttgtgttaatcatgaaactggagtggttgaatcaaagaaatttggtcttcttgcaaattggcaacggaggtttaccatggaagatatactgacccagctgaagaaggaaatggcggcttcacataaccgcaagcttgtccaacctcctgaaggtactcactattagtgtccaagatcataccgatattggatcatattgcatttgcagtatgcaatatatagtatgtattactcttgatccttctaaattcaagaacatactggggaatgctcgaaagagcttcatctttacctccattgagttgttttgttgcaatacattttcaactgtgttgaagggatgctctttgatttgtcctaattattgaaagcaactcttaaagtagcgttcttttcttattataacagttcttcccgttttgatcttgcttctttcttaattcacttgctttctgacttttaatttagcggaggctatataaaaaagtgacaaatgctgtttggatgttttcgttaatgcaagtaatgcagcacagcacagtaccggtgctcgaacttaccctcttcaaaagcgtgttcagaaaattggcatcaaagtgagtgcggcgacgtcggtggtaactagaaagaaaagggtagagagagaaacttggggtatacgcggagtttgca

SEQ ID NO: 109565 - DNA, 1115 bp, Glycine max
  Clone ID: PAT_MRT3847_69952C.1
tttcaagaccaattgcactcacatgccatacctgaccataaagcagcagctggtgctatcagaggctatattaagttgaatgattctaacccaaagtccgcgcccggggtgggtcataacacgccccccttgcgccccacgaagattctttgacacacagagctgcttttggagaaatgtgcgtatattttggatcccagcacaaggtccgaggctgtcaagttgattgaggggtcagcaaataatcttgtgccaagaaatggagcgcttggaccaatcagggaatggacgcttaaagattgtatttcagttcattaacttcttgcagcagtccggggcgatcaggatgctgcatcaagatggaaaatgcgttgtgctgagcttttcccatactccacatacggtgagggaatttgcagctctgcctctcccaactctgcctttaaccagatacgtaagagcactgaaactgggagttctaaccattgggtgggtgatcacaatgcggaatccacatcaaatggcaaactagaggcattcaaagatctcactatctgacagggctaaaaaatggtttaccttgtttggactttggatgcttggtaatccaagctgctgcatttgaaaccccacctaaactaggctgcaattccgaacaaggttcatgctaagttttggtgccagtgttatcaaaagtcagatgtattttctttgctcgagttctccctctctaaactgacatgtattccatttgcaaatgtgtataattttaccgcaattatgttttagggttgaattttttatttgctcacccctttttttcccgagatgttaagagagaaggctccaaggatttgcaacttcgtccaagttttactaatttaggtcgcagggagagcttcagaaattttaagtttctggtcctgcattcggccagcacatatacacaccgagagcatgttgtactttcccctatttgttggcttatttatcatgtattaattatttaagttctctgaattttttttcttcaaatggtagaaaacatttggtgagagaaaaatggtcatattttgcaccgactgaagttggctgcgtattttctcacgcaatgt

SEQ ID NO: 109566 - DNA, 256 bp, Glycine max
  Clone ID: PAT_MRT3847_69953C.1
ttctgaagaagaggagttcatgtgggatgagattgacaatggtttgattgatcatggacccaatgtatcaaaaactttgagcacggacacatggatggcagatgttgaaaatttggaaggtgaagatcacctccaaattacacgcccttttggggcaaaggtcaatagagaaatatccactgttaagaatcaattacctggtttggggggccatccaccatcatcgtggcaattgcagaatctaaagccaggctac

SEQ ID NO: 109567 - DNA, 282 bp, Glycine max
  Clone ID: PAT_MRT3847_69954C.1
tgttcttccatcttttatcctcagacacataaaatatggggctttaagccaaggctttcagtaacgccacccggccaacaacaacaacaacaacgaaacttttacgaagaaaaacccaagcccgttacccggggtttgaacccctttggggaggactggcttaaaatttggaaattccttttttattggcggttttaaggctttggttttggtggggggggctccccctttaaaaaaaatcggcgggtttggggggtaaatacaaaatggaggggtttaaag

SEQ ID NO: 109568 - DNA, 467 bp, Glycine max
  Clone ID: PAT_MRT3847_69955C.1
ttttggggtcaagcacactatcaacttggatgatattaaagaatcacagccaacatgtagcacagattattgtgtattgagttacttgttggctgaccataaagatacgtagggtgcaccactgtgcccttgccggcattacgatgattagtggcgtgagttgcacaaggattttggaagggcccttgtgttcccatgagagagaggaaggagtgccactgcatgctatttctcacacctgataacgattttgctggcaatgaacagactatcaccttggatgaaattaaagaatcaacagccaacatgtagcacagattattgtgtattgagttacttgtccgttgatacaggctgtatgttttgaaagacaagtgaaaagaaaagtgtaacgataagtagggaatatatttggatttaccgaaaatgagatgtatcttttctaactgcattcctactttactcta

SEQ ID NO: 109569 - DNA, 217 bp, Glycine max
  Clone ID: PAT_MRT3847_69956C.1
cagacatgttaggtcagttttcagactgacgataaactctacgcctccttttcctcttaatttcattttctcttttcccctcccaaaaccttctcttttacatgcatacactcaaacctgtcttagtaaaacgacatgaccacatgaccactgactgggggttgaattccctagctctaacagggagggaatatgtgccgttagtaggtagctcaaa

SEQ ID NO: 109570 - DNA, 444 bp, Glycine max
  Clone ID: PAT_MRT3847_69957C.1
ggttattgttttttttttttttttttttttttttttttttttttttttttttttaaaaaaaagattctggccaaatttttataccccaaaacaaaaaacttttataaataaacaaactttttttacaaggggaacccaaaaaacccccccgggaaaagggggggctaaaaaccccctacggggacaaacagaaaacggattttatttggggggggggggggggcaagatttttgatacatcatccccaaaaacaccaacaacggtcctggggggagcggtttttacatggtactttaaaaggaaggggttttaaggggggataaaggcaattccttccaacacgggcccttagggctaaggcacagaaaaattcttggggattaaaagggggacacatttaagaatttattttaaaagccctacggatttgctgggacgcgggg

SEQ ID NO: 109571 - DNA, 203 bp, Glycine max
  Clone ID: PAT_MRT3847_69958C.1
gcaatcgtgatctgtacagctaacgtttacaatgggttctcgctacgaggtagcactgaagctctcaacagcacgcgatctcaagaatgtgcactgggcgtatggaccgaaccgtgcatacgtcatcgcattgggtcgacccaagcaacatgctctcgacgcgcgtggccgacagcggcgatactgacgcgaattagggacaa

SEQ ID NO: 109572 - DNA, 246 bp, Glycine max
  Clone ID: PAT_MRT3847_69959C.1
cccacgcgtcctcccacgcatccgtaaaaaaattaaaaatacataaaataatatagaaaaaagtgtaaaaaaataaaaaagataataccaaaataaaatataactaactactaccctttacaaatcaactaattacaaataccataccacatcatccctaatgttgtctaagccttcacgagtgttgaaaaccttgaaagtaactgtacccctacaaccatcactaacatcactttcctttaacat

SEQ ID NO: 109573 - DNA, 1728 bp, Glycine max
  unsure (1)..(1728): unsure at all n locations
  Clone ID: PAT_MRT3847_6995C.1
ctcgagccgtaaaaacaggatggtggtactgaagaatgcacatgcactcctaattttcacaatttccttcctcagccacacttgtagaagcaaaggggaaaaaaactaaggaaaggaacatagcattgctcttaatatcctaactcctagattcccatctctggcttctcaccttgcataatggctacaaaagtgaaacgcaagactttttcaattgctgcagcaacatggatggtcttgtgtatcatcactatgatctgcaatgtcagtttagcagatagaattttgaaagaaaaagaattaggaaatgatgttccgaaagagagacaaggaattctcaaagccattgtgaatttcttatgggaggaaggaaagtcttcctatgaacctgtttggccgaacatgaaatttggttggagaattatagtaggatcaatcattggatttttgggagcagcattgggcagcgttaggaggggtaggaggtggaggaatttttgtgcctatgctggctttgatcattggctttgaccccaagtcttctacggccatttctaagtgtatgattatgggtgcatctatatcaactgtatactacaatctgaggcttagacacccaacactagacatgccccttatagactatgacctggctttgattttccagcctatgctaatgctcggaataagcattggtgttatatgtaatgtcatgtttgctgattggatggtgacagttttgcttatcatcctattcatagctacatcaacaaaagctacatacaaaggcatagacacatggaaaaaggaaacaattgcaaaaaaggaagcatccaaactgttggaagcagaaccaaaatctggtgatgactacaagtcactaccgagtggtccaactgagtcactatttgaggaggcccctttactaaaaaatatttattggaaagaattatcactccttgcgtatgtttgggtggcttttttcattgttcagattgttaaggaatacaccaagccctgttccatccagttctggcttcttaattttttgcaggttcctgtcgcagtctctgttacactttttgaagccataggcttatacaaaggaactagagtgattgcatcaaagggaaaggaagtcaccaattggaagattcatcagatttgtctctactgttccactggaataatggctggtatggttggtggactgcttggtctaggaggtggtttcattttggggccattgtttctagaattgggaattcctcctcaggtagcaagtgccacatcaacttttgccatggttttttcatcctccatgtcagtggtgcaatactacttgttggatcgtttcccggtaccttatgcttcctactttgcattggttgcaaccatagctgccttcactggtcagcatgtggtgagaaaagtaattgtagttcttggccgagcatccatcatcatcttcatactagcattgaccattttcatcagcgcaatcagtttaggtggagtgggaatagagaatataatcgagaagatagaaaatcatgagtatatgggctttgaagatctttgcgctttgtcttaggtgtgccttattagtattaccatatagaataacattattcaaattggtgatatggtcacctatttgtccatttaaattcaagtaaagaaaagattgtgagttttaaattatattacttcatnntctattctgca

SEQ ID NO: 109574 - DNA, 255 bp, Glycine max
  Clone ID: PAT_MRT3847_69960C.1
ggaagatccccgtgcgctcaattacattcggttccatgtgccgtcgttttctgtcgcgagcgcagtttcgcagtttctcagtcagcagcatggcaggagcagtatgtggagtgagaaatgcggtagtgcaggatttggaaaggggttctcgggctcagtatcctggaatgcacgagagccatgaactgacgttgtcgttcatcaggttagtggactccatagtcaccatcgagttgctcgtaaccattcgtcgtc

SEQ ID NO: 109575 - DNA, 403 bp, Glycine max
  unsure (1)..(403): unsure at all n locations
  Clone ID: PAT_MRT3847_69961C.1
gggggagcggnnccagaagcaagcngaacggggcgaaaagaacanggggaagcnaacanncggnangcnnggcnggcnncnncnaaaggagaaccancnacaangangaactatggactaagncannanggannancnggaccaaagggggcgggggcannggngnncancnngcngcngnnacccgcccggacgccagngngcgnnanngngangnngacgaaaacggggnncgacacnnggcccnnngncgcgnaanaanggggaacanggaganncnccagccnggcaccggncagnnncancccagnagnngngaananganaanggggnagannccanngaangnccacganaccangnggngnggaanangaacangaacacccacancnanccgga

SEQ ID NO: 109576 - DNA, 525 bp, Glycine max
  Clone ID: PAT_MRT3847_69962C.1
tctacatgtcattaaactacattcgtttgttacaacatgaaagcgctttggagatttctctaacatcgggtattacgctctgtgtgctagactccttacgcatggctacatgctgacggttgaaggaacacacttattagtgtaggagagacacttactagggcagcagtatgcagtcggtcaaacaattcgagtcacttgccagataactggaactcctaccatggacgcatcgaattaacagctacgagagtggggatactatgcgtcgtccacgtaatccaacgaagtcaccgctataatacttagctcttcatatggcacgggtattacttcattgactcaacgtgcttggtcacaacggccctgaatatgtaactgagtgcccaatacctttcggtagctgatacacatacacagctaacctatcggtacaagaagggactctctggtggcgtacacactcatgatttgtgcgtgctacgctctatggagctcttctaatgccgcctctattgggacact

SEQ ID NO: 109577 - DNA, 411 bp, Glycine max
  Clone ID: PAT_MRT3847_69963C.1
gaacctctagagcgggcgctgttttttttttttttttttttttttttccaggaggttatggcacgggaaaaaagtataaatataggggcatcttggatgaaatggaacttactgcgatggttaataaaaaggatgtgtacgtactatacatgagaagcgcttaaaattacgtcctcccactgtctgcactgtttatacacttacctctggtgatggtaacaggcacgaaataaaccgttgcaatctcacaattcataaagtactcataccttcgcacacacaggacagggggagattttttccaacccctaataagtgctaccgaggggaaaattggggaaattttttgacaattttctgggacccgggggacattatttttaaaaacatggtggagggacctcctcctct

SEQ ID NO: 109578 - DNA, 220 bp, Glycine max
  Clone ID: PAT_MRT3847_69964C.1
ctgctcgagattgaccttacgcttcgataccaatggcatggcttggagcatccactgctgctgctacgcttggcatgtcataattgcttggatgaccccatgaacatcagtcgagccagaatgtgagctccatctgcgtctagtcctggctcgtacaagactgtggctcttttctccagtcagatggctacaccagcacctccaaaactagctgctgctg

SEQ ID NO: 109579 - DNA, 247 bp, Glycine max
  Clone ID: PAT_MRT3847_69965C.1
gcatgcacgcgtacgtaagctcggaattcggctcgagccagcatggctgccttagggacctggctatccataggtgtccggaggttgcacagtagtgcagtggcgcgggccggcagccagtggcgactccagcaagggctggctgccaatccttccggctatgggcccctcacggagcttcctgactggtctttcgcggatggccgctctgctcccccaatgaaaggccaacttcgaagagaagctc

SEQ ID NO: 109580 - DNA, 423 bp, Glycine max
  Clone ID: PAT_MRT3847_69966C.1
cgggccgacccacacgtcagggcacatggtgacgcaccgtaggccccaaacgcactgccaccacctcatcaggctgatccagctgggtcatttggcatggagcagtatttacagcacttggttcgccagcaggcggccaaccacagggggcaggtgcagacccatgagtgtctctaccagctcagcctcagtctgcagagacagggtttcgctccttttgcgtgccctactccagatcagtttagggctaaggttgcatggcccggagattggcctgaggcccaggcaggggaggcgcccacagaggctcccggcgccacggagaaggcccgtatggatgaggagacgacagatctactcgatttcttgggagggagcagagccacatgaccagaggacccccagattcatattttcttttat

SEQ ID NO: 109581 - DNA, 388 bp, Glycine max
  Clone ID: PAT_MRT3847_69967C.1
atgacttaaaattctcataatatatatattaaccagatcattccaataccgagatagagcctaggtgacgccatgcacaaaagtacaggcatatatatcatgggccaccacaggcaccagccaagtatgggcctattgaactttttattagggaccttttaatggccggattttgaaacctacactaacttaaggttttggtaatttatttagaatgagctaaccatgccatttgatgaatctttggggggcagaagagcccattcaaccaaattcccattaataaaaataccttggtggctgaattcttcttgaaaacccggtaacacttcaatggtacccatttttattattggagccctgaaggtcttaaagaaaagaagttggg

SEQ ID NO: 109582 - DNA, 323 bp, Glycine max
  Clone ID: PAT_MRT3847_69968C.1
ctatttttttttttttttttttatcattatttctgtgtgtgttagaaggtatcctcaagctcaccatagaaccctgactccttttaatcctcaaaaatgggggccgaatacactttatcagatttagaccttttcttaccatttttgggtgaccttggggcgaccttttccaaattagagacacttgatggcctgggaggattgatgcttaattcttctaaatctctatagacgggaaaaactattgacgtgatcagtttttccaagtcccgaattttaatatggttaaaataaagataaccgaattgcccatgaagaacacg

SEQ ID NO: 109583 - DNA, 190 bp, Glycine max
  Clone ID: PAT_MRT3847_69969C.1
agctgttatcccttaggtaactagtttgtataattcaaaagacctacttgacaaaatatattacgacctcgatgttggattaagaataattaatgaagaagaattcaattaaattaggtctgttcgacctttaaattcttacatgatctgagttcagaccggcgtaagccaggtcagtttatatcttttt

SEQ ID NO: 109584 - DNA, 243 bp, Glycine max
  Clone ID: PAT_MRT3847_6996C.1
ctttatattggggggccggcggggggcaaatacaacctttacttctaatatcccgagatatgaatcttgatatattatgtttttgggaaagggattagttatggagtaactgggggtttttgtctgttgattgaggggggtgcacaaacttttttttaaaggagaaagttactcagaggggggggggatataaaattacaaaattccggggtgtggggtgggtgggttgggggtgggggcggt

SEQ ID NO: 109585 - DNA, 516 bp, Glycine max
  Clone ID: PAT_MRT3847_69970C.1
tggtgaacatacaaattacaaaattttttgtttctttttctatacagaataaatggcagcagcatggtactcattttccattatcaaccgtacacagagtagtcaaaacaaggaagtgattgattgaaatttgaaaaagaagaagcaagaaacgtaagcaaagctggttccaaatcttcacaagtcggtggtggagagagaggacttgaatctaaaagaacctgctttagtttgcacaagcttcaagacagaggctacaattttcttgaacttgagagcaacattgttgagcttaggcgattcgggctctgtgaaagaatctagcttataggttgtgaggaagattttcctctgcttggctcttctgcgtctgtagctaatggacttgagaatgtggtcccttccactgctaggcacacccccaagagtttcatatttgtatctacggctgcgagagagggtggagctgcggagaaaggtggccatggtgggtggctatgcgaagttgcaactcgt

SEQ ID NO: 109586 - DNA, 484 bp, Glycine max
  Clone ID: PAT_MRT3847_69971C.1
cggaattcccgggtcgacccacgcgtccgattttgtctatatgctacctcctagcaggatcaattgggagacgtattgcattggattagacaagtgctcggccttgcgtgtggattcctttggggttccatacctttggttggaggcatatggtttatcctgtaagtgttttttttttctcccgggttagtatgtttatcttatagttgtatttggatattgactgtaattcattgatcttgtgatattgcaattttgcaaatcagataatggtcttgtttattgcttttgattgtctaccaaatgcatagatctaggaacatcttgtctggatgtcctgtgctggcgttgagatatttttggtagtctttggtcacatggcttaggattaacttttgattacaacatttgtgagacaaggaagtacatagtggaggagacagtgagtgttatgggaaaagaaagaatggaaagtgaccatgcg

SEQ ID NO: 109587 - DNA, 418 bp, Glycine max
  Clone ID: PAT_MRT3847_69972C.1
aaaaaaaaacaatagcaacaaaaaaatttaggggtttggggaaacaaaaacccaaaagggggggggggccccaaatttttccaggggccctttttcccccccccccccttttggtttggggggggctctaaaaaactttttaaagaccccagggaacccccactggccggggaaatccaacttttttttggggggggaaacccccctttaaaaccccagccccccctgagccaataagaggggaatatgccctggggccatagccaaaccagggcaaatttttcccccaaaaccaaaaggcttttttttccccccattgcccccggataagtaggctcccccccccccaaaaaggaacctatgggggtgaaacttaaaagggcttgcccctttttttggctctcgaaaaaggggaggg

SEQ ID NO: 109588 - DNA, 2028 bp, Glycine max
  Clone ID: PAT_MRT3847_69973C.1
atcttcaagtaatctctatggaaggatatgggacggctcgagaaaaataacaattatccacacgacacctagtaaccgggttctgcaaatttcgccacttgcagatgaaaagttctaaactttcccctcgttaaatcctaaccccagttttcttcctctcactttaagcactccccaatttgacaattttctcctctctcctcaaaatgggtgtgcgccactttctctctcctcaattggggtgtgaaagtttctacctttttttctttctatttttccattatctatgatagttttgcattgtttgttgtttggcttgcaatcttgttgcatgctggttgtttgtgttggtgtcccaattcactctcttagttcaggattcttgtaactagtaggaccttgcgtgcgtgtcgaactaccagcactgagattaattttcagagtccttcatagagcttgtcccaagaacgggttgctagaagggataggggatagtttgaaggtccttgatggaatgtcgggatccatcccattgatcaaaaatgtgagtgatgagagagagttcactgaaagtaattagggccatcaaagtgaagcagggccattgagcttgagaatcttccctatggtttgtctcaaaaacctgctgttttaaaggttagggattggtatgtggattctttccgtgatctcagagccttccccaacatcaagaatgtgaatgatgaacaagatttcactgaaatgatcaaggccatcaaagtgaggcacaacaatgtggtacccacaatggccttgggtgttcagcaattgaagaaacgtatggatccaaagattgtttatgaagatcttgttgagattcatcagtttctggaccgcttctacatgtcaaggattggaatccgtatgcttatcgggcagcatgttgagttgcacaatcccaatccatctccccatgttgtgggctatatacatacaaaaatgtctcctgtggaggtagcaaggaatgccagtgaggatgcacgtgctatatgttgtcgcgaatatggaagtgcccctgatgtgcatatttatggagatcctgattttacttttccgtatgttccagctcacttgcatcttatggtatttgagttggttaagaactcactgcgtgccgtacaagagcgttttatggattctgataaagttgcacctcccattagaataatagttgctgatggaatagaggatgttaccataaaggtctcagatgagggaggtggaattgcaagaagtggtttgcctaaaatttttacatatctatatagtactgccagaaacccattggatgagcattcggatcttggaataggtgataatgtgacaatggctggatatggatatggtcttcctattagtcgtctatatgctcggtattttggaggtgatcttcaaataatctctatggaaggatatggcactgatgcatatctccatttgtctcgtttgggagattcacaagaacctttgccctgaaagtacttttcagtcagagttaccttaagtaactcactaacattgtgctaaggaaaacacttgttagaataaaaaagtactatttgctgtcaatttttacattctaataatttgacagatttcctgtaaatatgtggtacataagattgtgcatggtgatgccccccttctttgccttcagatccagctttgggaatttgtcctttttatcttctgaaaaaaaatgaatatgctcttttatcctaaaaagaatcccggagaagcccccaattatgctgacgccagcaataaaaactatttctgtcaaagttttttctaattgtaacaatttgggacttgttatagaccaatatatttcctgctaggcatggagaacctaattaagaaaagtaaaaagaatttatcttaaagggtaacttttaaggatattttcatgttaactattttggggggaattactatttaataatatttttttaaaacgagagaaattaaatagagtttccgtcc

SEQ ID NO: 109589 - DNA, 1446 bp, Glycine max
  Clone ID: PAT_MRT3847_69974C.1
ccacgccgtaatcaacatttcgcagtgtggaggatcgtcttcttcatcccacccacacagagttcagttcagttaggatatctattttttaatggctaatagaccggatccggatattgatgatgattttcgtgagctttataaggagtacactggccccctggggactgctactacaaacatgcaagagagggcaaaatcaaataagaggtctaatgcagggtctgacgaggaggaggaagcccgggaccctaatgctgttccaactgatttcaccagccgagaagctaaggtttgggaggctaagtcaaaggctacggaaaggaattggaagaaaaggaaagaggaggaaatgatctgcaagctttgtggagaatcagggcatttcactcagggctgtccatctactctcggagcaaatcgaaagtctcaagatttctttgaaaggatacctgccagagacaaaaatgtacgggcacttttcacagagaaagttttaagcaagattgaaaaggatgttggctgcaaaattaagatggatgagaagtttattattgtcagtggtaaggatagattaattttggccaaaggtgttgatgctgtgcacaagattcgagaggagggtgatcaaaggggatcatctagttctcaaatgacccaatcaagatcacctgaaagaagtcctgttagtgctcggtttcaacgctctgagccccaaaggtctcattctggaccacgaaatacatctcagtttcaacaaaggtttggtaggcaagagcgggctgttgaagaccgtatcaggcgtgatgaaggttctcaagcaagatggaaaccaaacgcaaaaggccgcatgatatttttggtgaatttcataggcgtggagattttgcaaacacttacaacagacattaaactcatgtatatcattcaagtgcttatggaaatagtggagctagaggtcgttcaagccagtcaagatctccaagacatgccccttatacaggaaactcatataactcatttgagggtcgtaatcaaaacatgggtgcttataggaatgatgggtgggattctcatagaagagaaatctgtatccggcctggtcatcagtttgattacagcgcctccccacagactttagaagaattagagttggagtataagaatgaggcagcagagctaatgaaaattcgtgacagagaagaagatgaagaaaatttcaagcatcgtgagatatcatcttactgaaaaaatgaagtatcaagattcaaaaccttttggtattattgggaattaagttaaccaactgctaaagtagaattgtttcatgtgatgattttttaatttcagttatgttagtgagtcatagtgttaagtatcacctgctggtgctgatggttgtgagactaataaatggtacagggctgctggttgaaattaacctga

SEQ ID NO: 109590 - DNA, 890 bp, Glycine max
  unsure (1)..(890): unsure at all n locations
  Clone ID: PAT_MRT3847_69975C.1
gctcggtattctggaggtgatcttcaantaatctttatggaaggatatggcactgatgcatatctccatttgtctcgtttgggagattcacaagaacctttgcctgaaagtacttttcagtcagttaccgtaagtaactcagtaacattgtgctagggaaaacaccattgctagcataaaaaacaaaaagtactatttgctgtcaattttttacattctaataatttgacagatttcctgtaaatatgtggtacaaaagattgtgcatggtgatgaccccccttctttgccttcagatccagctttgggaatttgttctttttatcttctgaaaaaaaaatgaatatgcccttttatcctaaagtattgatgcgtatgggggcaggttaaagatggagatattccacatgattttaaaataaataaggtcatgctactgtgccttagcatgtgccccttattgagtaggggaacatttttgtgtggttcaacagcaatccaaataaattgcatctagatccctcttcaggatcaatttgtcactataacttgtcttcttccatttacaatttgggcaaacatggtcaccattccaacatcagcagggttatttattactatgatagcatttgataacaagtgactgtaaaatgggcttttgcaaaccaaatgcatcttaagcaatcatcttaatgcctctttgtttaaaattcttgatgcaaatgggaaaattgcgtttcctgcactttttaacagaacacacagtaacatggaagtgtacacttgccaaactataagagaagaaaataatatggagtatttttttagtgcttaacttttatagaagtttttgctgctatgttttttttttttttgaaaacaagtgattt

SEQ ID NO: 109591 - DNA, 282 bp, Glycine max
  Clone ID: PAT_MRT3847_69976C.1
atggcgatggtgggtatggattacaaagaatgtgcaatctcattggaaaagtgggatcccctttacccacaacaacctcctttgtaccttctggctgcagagcgtaatgaaatagttaatttgactgcagaggggatgaaagcaaagatccgagaatgggcaaaagctgttgcttcaagttccaagcaacaacgagtaacaaatgacaagggcaaagtgcatgaaaactctcagaaaaccttcacttataagttgttgaatggtcgattgggcctgcactga

SEQ ID NO: 109592 - DNA, 734 bp, Glycine max
  Clone ID: PAT_MRT3847_69977C.1
gtgccgcagaagttcgcatttacggggatcctgattttacttttccgtatgttccagctcacttgcatcttatggtatttgagttggttaagaactcgctgcgtgctgtccaagagcgttttatggactctgacgaagttgctcctcccattagaataataatagcagatggaatagaggatgttaccataaaggtctcagatgagggaggtggaataccaaggagtggtcttccaagaatttttacatatctctacagtacagccaaaaactcatcgtcagttgaacatgaaccttctgatattggaacaatggaaaatgtaactatggctggatatggttatggacttcctatttgccgcttgtatgctaggtattttggtggtgatcttcaagtaatctctatggaaggatatgggactgacgcatatctccatttgtctcgtttgggggattcgcaagaacctttgccctgaatcacggagaagcaccaaattatgctgacgccagcaataagaactatttctgtcaatgttttttctaattgtaacaatttgggacttgttatagaccaatatatttcctgctaggcatggagaacctaattaagaaaagtaaaaagaatttatcttagagtgtaacttttaaggatattttcatgttaactattttgggtgtaattactatttgataatatttttttaaaccggggggaattaaatggggtttcagtc

SEQ ID NO: 109593 - DNA, 181 bp, Glycine max
  Clone ID: PAT_MRT3847_69978C.1
gttatctatcgattgttcgtttggataattcaataaaggaagtggggcttgaccctattgttgagtatgctctgcctatctgaaaatttccacacctcttctaattgtcggactgatctgatacgtgagtgttcttttcaaaacttagagacagatgcagattggaagcgggcggtcttca

SEQ ID NO: 109594 - DNA, 411 bp, Glycine max
  Clone ID: PAT_MRT3847_69979C.1
atgtctattgaagctatggcgatggtgggtatggattacaaagaatgtgcaatctcattggaaaagtgggatcccctttacccacaacaacctcctttgtaccttctggctgcagagcgtaatgaaatagttaatttgactgcagaggggatgaaagcaaagatccgagaatgggcaaaagctgttgcttcaagttccaagcaacaacgagtaacaaatgacaagggcaaagtgcatgaacaaaacaaatgttgcctaagctttacccagaaattgaataccatgtttaattcaccagcatcgcatgctatgccaattagtgctatacacactaatttgacctcatcttttgaaaactctcagaaaaccttcacttataagttgttgaatggtcgattgggcctgcactga

SEQ ID NO: 109595 - DNA, 488 bp, Glycine max
  Clone ID: PAT_MRT3847_6997C.1
aaagaaaggattaaaataaagttcagattaaataacagggagtcaattccttacaaacccaaaagaaatttataaattacttaagaagaactacattaaaaacctgaaactaattcaaaagttccagctagataaacatgctaagaaaatgctaatttaatttggaggagggaagaaaatggcatcagcatttttttttgaacggaagagttgctcaagtcctgcatctacattgaaagatgcctgcagaaccgggggtgaaagagccttccacgccccaatacttccagcagggtgagtaaacacaggattgggggtggggatgatagagaaccactccaatccatcagaggcagcaatctttgagacaacaaaaaaccttggcacaatgaacaaattaccagccttcaaagttggttccaaaaacctggaaccatcagcaccaacaacctgggcacgaccactttctttgacgattgaggggacct

SEQ ID NO: 109596 - DNA, 145 bp, Glycine max
  Clone ID: PAT_MRT3847_69980C.1
gctttcgtggtatacttatcataccaatcctgaaaggggagttcgtagtatttttggtgcccctttcataggcgcaaggtccattcacgtggttacattcttcactaccaccacccaaatcgaacacaacatgaatttaacgatt

SEQ ID NO: 109597 - DNA, 562 bp, Glycine max
  Clone ID: PAT_MRT3847_69981C.1
tctcacttagcatcattatatatattcctcatcccaattgttgatcctagatacatagatagaaaacatgtctattgaagctatggcgatggtgggtatggattacaaagaatgtgcaatctcattggaaaagtgggatcccctttacccacaacaacctcctttgtaccttctggctgcagagcgtaatgaaatagttaatttgactgcagaggggatgaaagcaaagatccgagaatgggcaaaagctgttgcttcaagttccaagcaacaacgtgtaacaaatgacaagggcaaagtgcatgtatttagctagtactaatttgctaatttgttataggaacaaaacaaatgttgcctaagctttacccagaaattgaataccatgtttaattcaccagcatcgcatgctatgccaattagtgctatacacactaatttgacctcatcttttgtaagtctacgcactaatttgacatgcccagagtcatgcacctaatcttttaacgtcatcatcttgctagtatctctgtagccatctaattattaatgttaatgatac

SEQ ID NO: 109598 - DNA, 240 bp, Glycine max
  Clone ID: PAT_MRT3847_69982C.1
gctaatgaccgtaagatgcttgcttgcaacagccatccttagtgcatctgtatctccaaagaatcgcggcacaacaactacaacaacagttgctaccaacaatcaatcaagtagttgcagcgaaccttgctgcttacctccagcaacaacagtttcttccattcaatcaactagctggggtgaaccctgctatctacttgcaggcacaacagctactaccatttaaccaacttgtcggga

SEQ ID NO: 109599 - DNA, 275 bp, Glycine max
  Clone ID: PAT_MRT3847_69983C.1
gttccacgagatgcaaacatgagggctcatgctttcatttcattgaacaatgccaggggcttgcgttatgtgcactggcgcgcgtattatacctgcatgcggtgtgctgatatggaatcctcactagttgtgtgggcatcacagacgaaggcccaaaatgcctcgaggctaacacttactcttcacttgaagcaatttaattactatcgagcgctgcctccgtccaatcgcggacaacacagcttgtatatctgaccaactgggtattcgtctta

SEQ ID NO: 109600 - DNA, 233 bp, Glycine max
  unsure (1)..(233): unsure at all n locations
  Clone ID: PAT_MRT3847_69984C.1
cccccnncccccccccccnccccgcntaccttggtaccttcagttttacgagtccttagattcacacaagccctatcaaagcacatgaaaaatacaccatcgcgtcgcttcatgggtcctaactatcataactattctattagggctagaccggggatgctgcccacttactgaattagcgcctgaaggtgtttctgaagcggctccacgggctactgtttctatcaactgcc

SEQ ID NO: 109601 - DNA, 359 bp, Glycine max
  Clone ID: PAT_MRT3847_69985C.1
tgtattgtgggtgtctcctgaggacaatgcgagtttacggacacgagctttattatctaacgtgtcataatctggcaatgcaagacgcttatcttgtcgatctcgtcaatgtgtgacgagaattgtatttgcacagcccacaggaagctcgccaattgagaaggaaagctctctctcgaattgaatggctgcaaaaagctgatgtgcctaccatagcacagattgaagagttccattcaacgcagacgatgatgaatgctcctgattcagaatgatcatattgatttactgttgagcattgatttgttgggtttacaaggagcaggataagctatttcaaacaaaattgtttttgatga

SEQ ID NO: 109602 - DNA, 994 bp, Glycine max
  Clone ID: PAT_MRT3847_69986C.1
accggttcggacggctgcgagaagacgacagaagggggggcatttaaagctaaaattaattatttaagccgaaaagagcatccgactcgtgcttgctctctctgtggttttgggtctctctcactcacaggcacagcaacagcaccatggaaggcgcaacgatgttactgttgtcgccaatatcgagctgcaacgtgcgcagtaagcatttaaactactcactcagaaggcgtagctgttattcttctcccagggcactgaaaatagtgagcatggcgaaggagggaagcgacaccggcaacggcgtggtagaaaaagcagccatagcgggtggattgatctcaaccccagtaattgcttggtctctctatactctcaaaacaacagggtgcggtcttcccccaggaccaggtgggtcaattggagcattggagggtgtgagctacctcgtggtagtgggcatagtgggttggagcttgtacactaaagccaaaaccggttcgggacttcccaacggtcctttcgggttgttgggtgccgtggaaggattctcctatttggcattggttgcgattgtggtcgtgttcgggttgcaattccttgacaagggttacatccctggtcctctccccgccgatcagtgctttggctagctaccttcttcattcgcttctcttgctttcgataatgtaataataatgtcagccactacaattctatcctggatggataaggtcgcaccgtcttgtcttaggatgtcattttccactacctctgttactaaacaaattactttgcataaaaaaaaaacaaattactatgttaagggatgctggttgaattggtgagcgattataaatcccctcacacttttgattgattgcatgataaaaaaaaaaaaaacttattgctattatttttccgtgtaagagttcaggccattaatgaaaattactgtgtcatatcgttaaaaaaaaaaaaaaaaaaaaaaaaa

SEQ ID NO: 109603 - DNA, 357 bp, Glycine max
  Clone ID: PAT_MRT3847_69987C.1
gggccacccactcacatttgttatttccctctttacccccaaatgtcttccagcttctcaccccttgccatcttcctcctcctccttctggtccggtacacgtgcgaggcacgtgagccgttcgcgtgcgacccaaaaaatggcggcacgaagaagatggcgttttgcaaggtttcgctggcgatagcggagagggtgaaggatctgattggaaggttgacgctggaagagaaggtaaggcttctagtgaacaatgccgcggcagttccgaggcttgggatgaaagggtacgagtggtggtctgaggcactccatggtgtttcaaatctgggtcccgccgttaagtttaacgcacag

SEQ ID NO: 109604 - DNA, 458 bp, Glycine max
  Clone ID: PAT_MRT3847_69988C.1
caaaaacgatagagaaaaaatttcccttagccacctccaaccctcacggctaactctgtttttaacatgcgaaccttgaccgagaacactgctatcaatgtcttgatgaatttgaccgtgagggcggtcgcaaagcatcctttcacatccctgcgtctctccttccgctgtgcccttaacaccttttgagatggtcctcaccgcccaaagttctgcactcctttacgcgagcaaatcacataattccagagcggacagagagatctcgactcccgataggacaccgtgaggaacactcataacatcaccaccgctatcaagcccggggctctggacgagagtgacaagagcatgacgaagcggttgtcgccctgggaccaccctcagagaccctctttgaaattactgtacaacattaacgagcagctcctaggtgaaggcgcggacctcccttttac

SEQ ID NO: 109605 - DNA, 362 bp, Glycine max
  Clone ID: PAT_MRT3847_69989C.1
gttgatcatactctctttgtgtaaattgagtgattgtgcggtataaagacacgtgtgttgagcatatatatacagaccctaaggtggcgggcatgcttgtgagcatagatcagaccacattattgggagataaggttacatatagacgtatgtgggcctaataaaccaggtgataagcagtgtcatgtgtgtgcatagatagcaacatccaccctgataggacttggactccaccacactctgtctacagatcaagagcctgcataaacagaactgaatggagcactgacctcagactaggctttagcatctgttcttcttgtcaaacaggattacgcttgaattcaacaccaagggaggaa

SEQ ID NO: 109606 - DNA, 289 bp, Glycine max
  Clone ID: PAT_MRT3847_6998C.1
ccacaaccccaaaacttagtaccttttttaaaaacaagtatacaacagggatcccccaacatatttccaaaaggtttttgaaaacaaaggaaacaagtttttcgctaattccctccgcttttttttttttggggaaggggaacgggttttctcattgttataacggggggatctattgggagattcatgcttttggggctggggacgtttggagggttttccactccggcttttttttggggaagaacctttctttttcctttttgaccttgaacggggtttatttttt

SEQ ID NO: 109607 - DNA, 110 bp, Glycine max
  unsure (1)..(110): unsure at all n locations
  Clone ID: PAT_MRT3847_69990C.1
gccaagttctcagcaaccagctttaacatttgacacaaggctactggagtgagagaagctcatgagacttgtactactggnnggaaccgagaatgcacctggnctttggt

SEQ ID NO: 109608 - DNA, 424 bp, Glycine max
  Clone ID: PAT_MRT3847_69991C.1
ctacataagttttttttatccatctactactctatatttaagtctattctaaaaaaaatgtgcctcattctcctaatcttccattatatcttcttatcaatttacattcaattttaaactcactcttttacctctctacaactcatttttatccacaatcttttatataattcatcacttcatttaaacctctctcccttttttaaacctatttcaattcatcttaactcttaactactacctatattaaacttattaacattaattttatacatcttcactatacaaatccaatcacaaatcactctatctattaattctaaacaattattataataatcaacctttatcatttaattacactattaatataccttcacacatttacctttatttttcaattccacctcctatttttattttt

SEQ ID NO: 109609 - DNA, 243 bp, Glycine max
  Clone ID: PAT_MRT3847_69992C.1
cataagcgtacgtgtgagagagggtttagaaatgggaacactagtgggctgttgcagaactacataaatcactggggcaggacatgtgcttaaacgacccggtgggggctcatgctgtaccgatctcgattgctatcatgacatgatcatgagtgggagtactgtcctaagaagcgtgagagaggagctacattgaggaaatgcacttaagcaaggcaaacctcgggatgggtgcatctttgt

SEQ ID NO: 109610 - DNA, 184 bp, Glycine max
  Clone ID: PAT_MRT3847_69993C.1
actagcatcctttccagcaagacctccaggagatcctaacatagttgcatttccaagacctcgcaacatagttccattttcacctcgtggccgacgctccaaataagataaccattgcactgatgctggtactctatggaggagaattccactttcaccgctttgactcgggaccgccatgaaa

SEQ ID NO: 109611 - DNA, 353 bp, Glycine max
  Clone ID: PAT_MRT3847_69994C.1
ctaaaccaatttttttttttttacttgcattccttactgaaagaatccatggtgggaaacaagaatatagtaagcttgcgagatgcatacacaaggcgggttcacaggctcacacacttattgttgaatatgtgacagccaaaagctttgaaagggcaccaatatgaaatgcccgatgaggagacccctctataaaatacctagtggggcctggccgacggatttgaaaggaacccagggcttagacatcccggggaggagggaaccttatccagattgtgccaaccgaacccatcaatttggaacaggatgaccatgaacgatgcaatgctgttgcttgaacgacacatacc

SEQ ID NO: 109612 - DNA, 284 bp, Glycine max
  Clone ID: PAT_MRT3847_69995C.1
gctaagcttacggcctctcattcatttaccttttatatgatcacacttcacacccttgaatgactgcttcttacaccatgcgttactcctttctacacgacaacatatgttttgaagaacaaggacttccatggttcataaccttatatatgctcctcctggctctttctttctccgctgacatctgaatatccaggatctcatggtcacattgctttttgagttttcaacaagtgtttactcgccgattgttattttacccttattatatttccccttttgct

SEQ ID NO: 109613 - DNA, 879 bp, Glycine max
  Clone ID: PAT_MRT3847_69996C.1
ggctcgagctcgagccgaatcggctcgagggttcttgtattcttgtgccagcaaacaccctcgtctccacaccataaaaggaggagagtttcctggcttttgtcttcctctagttgcacaaatcccatcttttctgtctcaattacctctcctttaatttttttttccttagtttttttctgaacaaaattcatcttgctgcagctatctagcagcttcaacaagctgagtgaaacaaaacaaacaaacacttgtttgtaaaattgaataaagggaatattttcaacagattcttcccttttctttggctaccttcaatgtcaaacatcacaagttgtgatagtgggagcttctctacagagaataccagagaagatgcagcagttaaacaacagcaatctgagatgcttggtcagttccacagtccacattctcacacttcaactacaacaacaaataatagcaatggttccaacacaaattcacaaccacctgcacctgttaagaagaaaaggagcctaccaggaaatccagatccaagtgctgaagttattgctctatcaccgaccacactaatggccacaaacaggttcatatgtgaaatctgcaacaaagggtttcaaagagaccagaaccttcagttgcaccggcgaggccacaacttgccgtggaagctgaagcagagaacaagcacggaaattcgaaagatgatttatcgtgtgtccagatccttccgtgcgtccaccacaacccagcaagagcactcgggagatctcactggcatcaaaaagcacttctgcagaaagcacggcgagaagaattggatatgtgataagtgctcaaagaatacgctgttcaatctgactggaaagcccactc

SEQ ID NO: 109614 - DNA, 186 bp, Glycine max
  Clone ID: PAT_MRT3847_69997C.1
catagactcacttccaagttccaagctttggccattttttcccactgtttattggtgagttcctgtgtgtcattgtgttcaaacccttttgtgagaggcaaaagccaaaaagggtgacatttagtattaatttcttttttgttctgtgcctgtgattctgcttattcttgttagctttttccacac

SEQ ID NO: 109615 - DNA, 264 bp, Glycine max
  unsure (1)..(264): unsure at all n locations
  Clone ID: PAT_MRT3847_69998C.1
gattccagcaaattagnactctggctggcaatnaaacccccagctatnatgtnngggaaggcatctntaccatggcaatcataggatcaggactggnggntgnnngcccttctcattggaaacatacaaaactnncttcaggctctngggcgcaggaagctagaaatgncactnanacgatgngatgnngagcaanggatgagccatcggcgctaagcggaagaacnganaaggagagngcgacaggctgaacgttataactgg

SEQ ID NO: 109616 - DNA, 351 bp, Glycine max
  Clone ID: PAT_MRT3847_69999C.1
aaaccggggctaaaaaatttattgaaaccctggggggggggctaaccacaaaaatcaacgggttcaatttgtaaacccttagacatgaataacaaaaacaatttccctgggaaaacctacgggtttgaactttacacatcccccacccccaggaataacccccattttaaaactttcttctttttcaaaaatagaattgggtgcccctcctttttttcccccaaagttaaaattagaaaatttaaccccccgggggggaaacttaatcaagggttaatgggagttttggaacccctttaaaatgataaaacaaaattttttgggtgggtttctttggtgggaagggggttt

SEQ ID NO: 109617 - DNA, 340 bp, Glycine max
  unsure (1)..(340): unsure at all n locations
  Clone ID: PAT_MRT3847_6999C.1
gtgcaaagccaataagatacaagacaaggttacaataaagggatntgaaactctaataatgtcanatgaaagtacanaatcanatacagatcaagcnttcttaatctcctttctggagcaaccaattattgttttttttgatgcaaaagattttcatttatacaccgggggaggtgatgatggagaaaactgtccaagtccctttgggattaatcactttgttttacttgtgggttttggttcaacgagaagagtnnattnctggattgngaaaaattcatggggggnngatggggggnaagatgggtaccttttggtnccnnnnnaaccnggtgnntta

SEQ ID NO: 109618 - DNA, 695 bp, Glycine max
  Clone ID: PAT_MRT3847_699C.1
ccacgcgtccgggggaataatgggttgaacaggcaatctcgaataaatgttgcaaaatccaatagtcgaaacattggtcataagtgcagcgagaggttttatggttccaacagctggatgaacgacagatatgatttccattcatgcaattgtagcccgaataatagaaccaatagagttagttgggagacaaaacctgctagtaagtctgaatccacagtagatacatctaagcaattttatcgtggtagcaagtataatcatgtagacttcatgcatgagagtaatggaagaaccaaaggcagagtcatctcagggaactattccagcagggatttgcctcaatcaaagaaagtttgggagcctatggagtcacacaagtatgctcgtagtaatttagactctgatgtgacattggggtccacaggtcatggatttcagttcaatacagtaaggttttctgttgatgaagttggcggttcaggtgaaattgatgagggtgatagtaatttgaaaagaagcggaatgggtgaaggctgtcagaatgatcttgatgcagaagttggaggatcttgcagctccacagaaattgcatctgaggctggaatgtgtgtgatgggtggctctgcattgaataattcttctgatcccaatcaagggaacacttctagttctgataactgctcatcatgcct

SEQ ID NO: 109619 - DNA, 344 bp, Glycine max
  Clone ID: PAT_MRT3847_69C.1
caccaaggggagtggcttgattaacgctcgtatgttcaaaacgtgtattcatttagtaatggtgtaaccttccgttcggaccttcaacctcggaaactgagaaattgcatttcaatcaacatcggtcaggccggttttcaggtcggaaacgcctgctgggagctctactgcctcgaacacggcgttcaacctgatggccagatgccctgtgataagactgttggtggaggtgatgatgctttcaccaccttcttcagtgatactgcggctggtaagcacgtgcctggtgcgatttttgcagatctcgagcctactgtgattgatgaagttaggactgtgacata

SEQ ID NO: 109620 - DNA, 187 bp, Glycine max
  Clone ID: PAT_MRT3847_6C.1
gtagatttctattatttagggtcaactggacacatcttgttgtatttcattctttctgtgggctatttctgccataatcaccacctgtgccgtgggcactgagaatggtgctgccatggcccaccatatgaaaacacagtcctgccatgacctatggtatcttattggagctttgtcatgccatact

SEQ ID NO: 109621 - DNA, 322 bp, Glycine max
  Clone ID: PAT_MRT3847_70000C.1
gcacataactgggaatatttcatatcaatagaggattgcggcaaagccgcaaagatacaacattcattagggaaaacaggagttgggaaaaatatggggtgaggggttgaggaagaatcaagtgctcccagagcatgctagaacatctaaattttccacacacggttattgaaacaacccaatatagaaaactttacttaggaggattatcaaagctgttccgacgaactggcagaatctacatccttataccattcacttggcacgggccttacgggtgaattttgatgcaggaaccctgttggggagggcaggcttcact

SEQ ID NO: 109622 - DNA, 665 bp, Glycine max
  Clone ID: PAT_MRT3847_70001C.1
cacaaagcagctccttttcctgttccgttgagagaagatgggattttgggggacgcgggtgatggagattgtgaagaagcatgattctggagggctggtttggaagagaatcaagctcaccaccacccgaaaagccaatgctaagaagcgtcttcttcgggtttggcagaatgaagctgtcctcaaagcctgttctgccactcccaacgaacctcaacctacaccagtggctataccagtggccaggtacatttgaacgcgtgatacagtgaggagccatgtatttatttttcccatatttgggatattgatatctccttgggattttgtgccacatgaaggttaactaaccctactctgatctgaaactatgcaataatttcttcaaggcaaggatggttatgaaggagaaaacgtgactttgaggaggtacatttgtgttagtgaatttgggttttaacttaatcctacaaaacagacttgtaagtcgaggattactccccacctagtttatttcggctcatggctacctgcccctctaatgtgaccataacattaacctgttatgtgatttttggggggctatttttaaggttgaaaattttcaaatttaatagaaatcatgtcatgttcaattagttattcaaggttttgcttgattactc

SEQ ID NO: 109623 - DNA, 993 bp, Glycine max
  Clone ID: PAT_MRT3847_70002C.1
ctatggctatcggtaaaaacaagaagctcggcaagaagaagggtgccaagaagaaggtccaagaccctttccttagaaaggaatggtacgacgttaaggcccctgcccctttcactaacagagttgtcggaaagacctgtgtcaccagaactaccggcacaaagatcgctactgatgctttgaagggcagagttgtcgaatcctccctcgctgatttgaacaacaaccaagatgcctggagaaaggtcaagctcagcattgaagacatccaaggtaaaacttgcctcaccaacttccacgctatggatatgaccagagacaagctttgccaattcatcagaaagtggcaaacccttattgatgctcactgtgaagttaagacccaagacggatatgtcctcagagtcttcgttgtcgccttcactggtaagcaacccactcaagccagaaagacctcttacgctcaacaccaacaaatcaaggccatcagaaagaagatcgtcgaaatcatcaccaaggaagccagcagctccaaccttgctgatctcgttgccaagctcaaccacgttgaccaattccccaagctcatcaccaaggcttgccaattcatctatcctttgagcggtgccctcatcaagaaggtcaagaccctcaagaagcccaagttcgatatcgtcagattgaacgaattatacaaggaatccgctgttaagcccgctcctgaaaaaagaggtggtaagggtaaggctgctgatccccccgctgaaggtaccgacaccactaaccttttggcccaataagcctgaggtagttggagagtttagatatatcatatgtggtctatcgttttggaagtaactttttcataaaaatgtattctcgaagatatatatgtatgtggtgagacttgcaaaacacagattttaagaatagtttagaacttcaccagcagtaacaaaactaatttaactttccattgtgattacctaaaaa

SEQ ID NO: 109624 - DNA, 201 bp, Glycine max
  Clone ID: PAT_MRT3847_70003C.1
tcggttttgcgtgcgctataatttgactccacatttttcttccctatatgagcacataaattcctatacacaatcatatctcagggtagagagacaaagatcacacgcatctaatagtgatcaccagatgtgtcaacctcaaaatatggcttatcaactttgccaccttgtttagtattccttctttcccccaaggaagaa

SEQ ID NO: 109625 - DNA, 818 bp, Glycine max
  Clone ID: PAT_MRT3847_70004C.1
tacggctgcgagaagacgacagaaggggagggtacaatacaaccacaaagtcacaaacacaaatctgagtatagtggagtagggtttttttgcgtttgagagaagcatgagcaggagtttgggaattccggtgaagctgctccacgaggcttcggggcacgtggtgacggtggagctcaagagcggagaactctacagaggcagcatgatcgagtgcgaggacaactggaactgccaactcgagagcatcacctacactgccaaggatggcaaaacatcgcaacttgagcatgtttttattcgaggaagcaaagtcaggtttatggtcatcccagacatgctgaagaatgcgcctatgtttaagcgtttggatgcaagaatcaagggcaagggtgcatcacttggtgttggtaggggcagagcagttgcaatgcgagcaaaggctcaagctgctgggcgtggagctgcacctggaaggggtgtaccaccagtgcggaggtgatcaccattcatataatttgtattctccctgtctgttggacatgtttatgtgacaaagaaattcgaacagaaactgagtaaagacattacagattactctttatggatagtacttgatcccaaatttgttctcatcatctctagtattttgatctgcactgtgtactacttggctaggaggattttgtagaaggaatatttgttaaaatggtacaagatagtatcagttacataggggcagtttgacaactgttaatgctggtttagaactgttcgtggtaaattatgactcgtttgaaaaggaagcaattaatgaa

SEQ ID NO: 109626 - DNA, 371 bp, Glycine max
  Clone ID: PAT_MRT3847_70005C.1
cccgcgtccgattgactcttagtcacccaacactcgaatccttaccatctgctctatatgcccttatcaactgattgccgtggatccacagactcttatgcagacctcttctacttggctgactgggcgatgaccatgaatccacacctcgaggctgtcaagaataagagagcctagagccgcgaactcttctacgcctgggctaagcgaaacgctaaggagctcaatcaccaaaagaaggaattgatttagttgaaacgctaggccaatctatagggaggattctatgttgatccagaagatagacatcttgttcattgttcgcattctatgattcatgccatggttccccaatcaccgctgatcctgca

SEQ ID NO: 109627 - DNA, 841 bp, Glycine max
  Clone ID: PAT_MRT3847_70006C.1
gccaaatacggagtccacaaactatgcaggtaggttcagacttaaaataactgaacctgacaggctttgcagaatgggcttcacggattaggagctttgtgggactggctaattcacctgcccagctctacacacaagggtctgttcgatattgatcgtccaagacatgatagctcagtgaccaggagagggatcaagtactatgcataaagagtaatctgtaataaagtcttgatacgcaatttctgttcgaatttctttctcacataaacttctacaaaaatgagaacaaatttgggatcaagtactatccataaagagtaatctgtaatgtctttactcagtttctgttcgaatttctttgtcacataaacatgtccaacagacagggagaatacaaattatatgaatggtgatcacctccgcactggtggtacaccccttccaggtgcagctccacgcccagcagcttgagcctttgctcgcattgcaactgctctgccccttgattcttgcatccaaacgcttaaacataggcgcattcttcagcatgtctgggatgaccataaacctgactttgcttcctcgaataaaaacatgctcaagttgcgatgttttgccatccttggcagtgtaggtgatgctctcgagttggcagttccagttgtcctcgcactcgatcatgctgcctctgtagagttctccgctcttgagctccaccgtcaccacgtgccccgaagcctcgtggagcagcttcaccggaattcccaaactcctgctcatgcttctctcaaacgcaaaaaaaccctactccactatactcagatttgtgatgtcgcgg

SEQ ID NO: 109628 - DNA, 124 bp, Glycine max
  Clone ID: PAT_MRT3847_70007C.1
gcgcacccttttttcaggagttttttaaaaagctattccgggccccacatcgaggggtgaatatgaaggtaaatgtaggggggcgccaaatcgggcatggaacaagccttttgcatgtacttgc

SEQ ID NO: 109629 - DNA, 483 bp, Glycine max
  Clone ID: PAT_MRT3847_70008C.1
aagtggagtgattgatagggctcgagatgagatggatgttgatgggaacaagagaaagaatgggcatgctgtaggtggttcgaacaacttctttgcagatttataggattgttcacaagtgtgatgaccctattagtacatttgcgtgatttccttcctaatcaatatattcagacagacgctggagccacatgatgaactacctgaagtctcgttaaagcaggagatgatggacttgggccaatgatgcaacaaaatacagcttgtgttttttaagaaatttaaatgaaaattatcaagttcaggtcaaatatatgcttgatattcaattttgttgttaccctttcgaaaaagtaatttactataacaattcttgatcttgatctcaaattgataccttggtgcggcattacaaaggcaagtcttcaccgcctttttcttttcacactagaaatggaacagttgactgctgttgccgggtcc

SEQ ID NO: 109630 - DNA, 469 bp, Glycine max
  Clone ID: PAT_MRT3847_70009C.1
tacggctgcgagaagacgacagaagggtcttgcatcttactttagcatggccagagaagttataaggttagtttagtagttgaaggaaaaaggcccaaaaaagaaaaattcgtaggttcatatctttttctcctaacaaaattaataaattaacagttattgattaaaaaaaactttagcatgttaaatgcgaagcctgttttcagtatgcatatcaagtacttactgtaacacttcaggtattcaacaaatggaaaagaggtgcgagtggagaaaattacatgggtgaaaatgctcattccaaatccgagctatggttacaaatgcttgtacacttgccatgtggtcaaagtgaattggtggaatggtttctatattaagttggtatttatccattattacatgttcaactacaatagcttcacgtggaatccaagcaaaactacaactatgaaacctgactcattag

SEQ ID NO: 109631 - DNA, 180 bp, Glycine max
  Clone ID: PAT_MRT3847_7000C.1
acggctgcgagaagacgacagaagggctagtatacctatataactcctaaaaagagagagataaaaaaaggtgaagcgagaagcgatgtcgcacagaacagatattggaacaactccacagaacgtagcaaccaaatcaaggcacccagggctcctggtagatttggaagatttaacaat

SEQ ID NO: 109632 - DNA, 427 bp, Glycine max
  unsure (1)..(427): unsure at all n locations
  Clone ID: PAT_MRT3847_70010C.1
ccggggcgacccacgcgtccgtgattactctctttcngcgacgggggcgcggggggggagaagaaaaagaaggggaatcatcgtgccctcttttctcgagacaccaaatggcggaagcagaagttccgaattccgggtctctctctctcaaatggggctcttaacttcnccatggcngggccanggggaggaaggggggggggtangagggattatccgtcaaggggtgaggggaatagggggggtgggggtagggggacgtgacaaccgcgacagcaacagcaacaaccctccttccaggcgtcgttggggggggagtctatcccacaatatgggggaggaggagcttgcgcaccatgggggggggggcggaccactggggaatgtgggattccaggccgggcgggctatgcgttcataaatttca

SEQ ID NO: 109633 - DNA, 326 bp, Glycine max
  Clone ID: PAT_MRT3847_70011C.1
ccctcgcgttcggttcgtttatgcccattttcccatcaacgcacctcattttgtagcggtggtgcttgtcgtgatcagtgatatggattgtcaacgggggttaaggatggacctttggagacagaggttttatgtggaggagttcatgtcgaaagatgaattgatagcacgcctacgcttattgggagaacaaatgaactgggatataagactgtggggaacgaaagaataattggtggtgtgtgcggtggaggagaaagaggagtttgatgacacgtggtctaagatggacactggatcgagtttgacaatagggtgagtggtaa

SEQ ID NO: 109634 - DNA, 255 bp, Glycine max
  Clone ID: PAT_MRT3847_70012C.1
gccttttaggggagttttgcggcctttgtcccgtggtttctgaaatttatggaaaaaagatatgggccccggatccactggaagcttcttacttttttgaccttaaatgcggctataatcgagaatggaccttaaatattaaaaggcattaaaaaagttgggtcatttgaccaggatttttggaggtttgggaaccattagcctattattaggcgaattccattttcttgaccgggttctggtaaaaccaccaaa

SEQ ID NO: 109635 - DNA, 119 bp, Glycine max
  Clone ID: PAT_MRT3847_70013C.1
tgcaggtgattctagacatcttgagggtgcgggtgatcaagaacataaggggtccacatctaccgtaactggagaacacgctgggattggatcgagtgagaactaagacggtgaagaaa

SEQ ID NO: 109636 - DNA, 907 bp, Glycine max
  unsure (1)..(907): unsure at all n locations
  Clone ID: PAT_MRT3847_70014C.1
acgaggttttcttttgtgttgtctcaaactcaattattcaaagtcaatacaacggttcaggatcaagtaaacgtgcaccccaatttaagtctctgatttgtctctccacagatcacaacaacgctctcacgcactagtttgaccacttcgctgtttgcacttttggttcctcaccgatccacacaggttggagacacggagtggcagcagaaaaaaaataaaaataaaaaagctaccttttttatttattttgtgttgggggatgggaaaaagtgacccttatatttatataacggtaatttggaaatgagtggtagttaggaggctcagaaagactatccagcagaatttttcatgtggggttttggttaagtcaagtttcttcaagatcatagtcagagtgaggggataggaagacccagaagcgttttgagaaagcggcctcaataacttgcacttactttcaggacttcctgctagttgctgaacaacaagatacagactagaaatggatgaacttgctaataaaattccaggtgacttttatgctgtagatgaagcttttgaacaaccctactcactccaggggttctcaactaaagaaaatgatgtgcaagaaatatccctgcaagctttaacagatatagaccatcgcttagcctatttttctgagaaactggtgaacttgcatgtgctttatgtttatctattgggcgaggaaagtgatcttgaagcaatggattcaacgaataactgcatcctggaaaacttatttgagaaggcagngacattttgatctactgtctggcattttagattctgaggtaagagagctggacagtttcatggacactctncaagaagaaattgttgatgctcgtcataaaaattttcatgcaaacattta

SEQ ID NO: 109637 - DNA, 179 bp, Glycine max
  Clone ID: PAT_MRT3847_70015C.1
agattatgtaccgagagagtgaataaagttgatgggccggcttctacttatcccatcttgcctgcttattggcttcccaacaaagctatgagttgaccattcatggctccatggatgaacaatttcctgcataaaatgcctttgagctggctgagttcttatataaagatgcactgagc

SEQ ID NO: 109638 - DNA, 429 bp, Glycine max
  Clone ID: PAT_MRT3847_70016C.1
atgtcaaacaaacctgtatatcaaagattttttattcaagaatttttttttcttcaaggtactcatcaaattaatcagagtttagatcattttacaatatttgatttgtctaatcatgaagtccaggttagatgggtagctccgaatcatgggtgggtttgtctaaattttgatggagctacaaggagttcccaaaatatgacaggttgtggtgccttgctaagagatcataatgggaattggttgaagttacttctctttgactggcaagtccagattgtgcacatcttcatggaaggaaatagatgcgatgatgctctagcgaatttggcctttgaaacttctttttcttcatgttttatgtttgtacatataacaactttaattatctttttcataccgtggatatttatatacgtgtatttgtaa

SEQ ID NO: 109639 - DNA, 279 bp, Glycine max
  Clone ID: PAT_MRT3847_70017C.1
ggacaagtgtaatttacttggaaatttaataacgttataactttgataaacaatatgtatctccgcacttatataaaagaaatcgaagactattatttactccgcacttatttaggttgatattatatcttataaaatttattggaaactataaaattaggtgagactcggttaataaggagtgagactcacataatttgatgatttccaataaattaacacagaaacaatatgttcttaggatttcttaattatttaaggacgtattggaattggact

SEQ ID NO: 109640 - DNA, 256 bp, Glycine max
  unsure (1)..(256): unsure at all n locations
  Clone ID: PAT_MRT3847_70018C.1
agcgggcggccttcaaatttttttttttacaccaaataattaaactcaaattttactcaaagnatncacaatggaatggtggctatataatactcgtaactcctaaaataatacatataatgaattcacatcaaaattgatgcctcaaacttctacttttaacaatccaaatgcctaaattttttatattttaatttaacattatacagacctcccatgaacccatacttacctaaaaaaactatcttacccaaat

SEQ ID NO: 109641 - DNA, 216 bp, Glycine max
  Clone ID: PAT_MRT3847_70019C.1
tcatcgtcatataaacaaattccaacttaattaaaaaaaaaaaaaaatacttcctcccactacaaaactaatcaacccaataactaatctcccaactcatccccctctaaacacaccagctttacctcataaccaatacattaaaacttaccataatcatctacatacattcttcctatatcaaatcctaatccactcacaatttcacacaacata

SEQ ID NO: 109642 - DNA, 401 bp, Glycine max
  Clone ID: PAT_MRT3847_7001C.1
cgtcatcactgtatgacgtcctccttctttgggggggggggggggaaacccaaaccactaggaaaggggtagccgtgtaaaaatcgatggggttttcacaaagtgagcgccaaaaaatgaggggtcttgagtagctgcaacaaaacgtaatgagattcagtttgtgatataggcgaatacaaaggagcgttagagagtgcaatatcaatagtggtagactttatcacatattacaaggaggacggttgtgcgtgaggtgtatgtggttaaggcagacaacgaggtgactcaacatttcagaggtgcccgatagagttcgaaacacatacgatgtaggtcccatagctgaacgctttaggcccttcgaattacaacggtcaatagcaaaattgggggatgcg

SEQ ID NO: 109643 - DNA, 442 bp, Glycine max
  unsure (1)..(442): unsure at all n locations
  Clone ID: PAT_MRT3847_70020C.1
ggcaccaaaggcagagaagaacccagcggataagaagcccgcggaggagaagaagtccacggtgggagacaatgctccggcgganaaaaagccaaaggcctgaaagaaacttccgaatgatggatgcgccggcggataatggaagaagaagaagaaaaacaagaaaagcgtggagacatacaaaatctacatcttcaaggttctaaancangtcaaccctgacattgatatctcaagcaaggccatgggaatcataaacagcttcatcaacgacatcttcgagaagcttagcccaaaatcttctatacttgcccattacaacaataaacccaccatcacttcgaagaaaattcagaccactatcatgcttatgctacccaataaattaaccaancacaccatctctaaaggtaccaaagctatcaccaaattcactanctct

SEQ ID NO: 109644 - DNA, 439 bp, Glycine max
  Clone ID: PAT_MRT3847_70021C.1
gaagaagccaatagattagattaagaaagaaaaaggagaaaatagaaagaaaaataaaagagaagagaattcagtggaataatcgatgaaaaatttctctatataaagagatatccacacacaacacaaactcttcttcttctgtgcttcggtaactgcacagagaaaggaagaaaagagaagaagaagaagaaacattgcgaagcatagaacttagaaccaagcggaaggaggaatcggcggtgctcccccggcaatcgctcatcggcgccggcgaacttcagatcgcttctcttgcttctccgaggtttgtgccttgcggtttttttcagaggcatttgttgttggaaatcttgtagtacgggtttgtttggctcaccggtggaaaattgttatatatgggctgaggtgtgcttttcatgggaggtgtggaggatga

SEQ ID NO: 109645 - DNA, 466 bp, Glycine max
  Clone ID: PAT_MRT3847_70022C.1
acctcgtaagctggtatgggctaaggatacttcgatatgtctatttgtgactctttgcatgttatctgcacaggctgagccttccagggacattcacgtaccatgtgcggcgcatgtgacctctgaaaaagatttgcttcaactgtcacatccttttggagttccaccagagctaggaggacccttgccgaagatcaagctcttcttcaaatgccacacattactttatgctgataatgcttgacaatcatatgcatatgacactgccagacttcaaagactgcaagagcccctgtaacccctagaaccccacttggaatctctactttgactccaaagttcatcaccccttacggaagccctatgagaaaagtcttgacgttcacccagcttgagcctcctgatgcttggcttgcactcactgagtcaaggaatggccacacgtactatgctgctattgacaccc

SEQ ID NO: 109646 - DNA, 305 bp, Glycine max
  Clone ID: PAT_MRT3847_70023C.1
tcactaggacagcggccttcctgtcccgagtgttttgggaatacacaaagcattcgatatacaaaatgttggataaccctaaatatcgcgaactgaaatgcatgcatagcgcatagaactacgtgaaactttactgtcaaaaccactacaccatgaaagttctaaagagcgacctaatttttttgcagtgcgtgcctggaacctaggtatcatgaaagaaaaactagcatctcctctagaataccttcctgacatactgtgcaaataccagtgcctctgcccgaatccaaaaacgaatgcaaaca

SEQ ID NO: 109647 - DNA, 234 bp, Glycine max
  unsure (1)..(234): unsure at all n locations
  Clone ID: PAT_MRT3847_70024C.1
aacaaacaacaaaaaagcaacccgggaaacaaaaacaaaacgccgccaccagcggaggaacgacgccgaacaacaaaaggacagcacaagaacgggcgggcccaccacggggaccgacaacnccagcgagggaaagccgccaacagcaccgacgggccnggcagaagcgggaacaaccggaacaaacganggaagaagagcgaacgaggcaccgacaacggcgaaaggggcgga

SEQ ID NO: 109648 - DNA, 1105 bp, Glycine max
  Clone ID: PAT_MRT3847_70025C.1
gttttctgaggcgttgaattgcgcaagatctctttttgaagttcgcggcttccgtattgaagggtttggttgaggctgactggacatgtgctgttactacttttaaagtctgtttatgctgtagtagttattttgtctatattttagttataatgaacttaaccaagaaaggacccctaacggatgcaaagctattaagcccaaacaaggcaactactctgaatcctttggagtttttagcctccctgttccctggttttgcagcagaaagccttgcagaagcttactttgctaagatgtgatttacatctgaccactgagatgctcaatcagttagagcttcaagttgatggtggtttcaatcagaatctgaattcaaagactttgtctgctcccaatctcagtgcaatggactaccctgcacttacttcaccagatggccagactgcttcagtagatatgtggttgataatgtgcaacaaagtggcaatccttaccgatcatatgacagtgatgtgctgctttcaaatctgtctccagtcattggtcgcttcagtgcctcattatggtgatgctgcatacaagtttctgacacggtaaaaaaattcatcatgaacacatagacattgtagtcattcttgtatctgtatatgggaagtaatggcaatggtcaagtcaaaaaaaaaaaaaaaaaaaaaaaaaaaaaaaaaaaaaaaaaaaaaaaaaaaaaaaaaaaaaaaaaaaaaaaaaaagaggccccccaccaccaccattttttgcttcttttaaggaggaaataaccgcccgcgggggaataataatgatacatagttgcctccgggaaaaaattatcatccgctaacaccacaaaacaaaatacccgccggaataaaaaagaaaaaagccggggccgcctaagggggcaaccaaccaacattagtggggtggcgcttactgcccgtttagcagaaaaaaaacctgtcccgccagctttattaaagaatccaccaccccgcgagaggaggctgttggattatgggctcttcttccgcttccttaattaatgacttgctgcgctcggttggtcggctgcgggcggcgttat

SEQ ID NO: 109649 - DNA, 163 bp, Glycine max
  Clone ID: PAT_MRT3847_70026C.1
gacacttcagaatcctctggtaacccttattttatctattctctctctttcttttgtgttctaagcagctagagcgaggggagatgacgtatagtgcattcctctttcatcaggtttgcaatgcttgttggagtgatcgtctcagaggcttgtcattcgtgtg

SEQ ID NO: 109650 - DNA, 443 bp, Glycine max
  Clone ID: PAT_MRT3847_70027C.1
ggcggccgcccctacttgctattttgtaatcctcactacaaatactaaaacattcgttcagtattttggtactctgagcccgccttacataacataaggttcgttcaccagccgataataaccaagagccccctacctgcattctaattctcccccaaaacctgattttagaaccgaatgtaatacttgacactttaacatattacgggacattcctaggaggggcccgcgggacccagacagattaggcggatcggcctcgaagcacattaccggactcaacggatccggggaagccttcttgccttcatatggcgggggtcgttccctatatctgcgggtatgaatatcatcggtgctcgcctcaacaaaaccgatcaacgtatgctgatagcagcaacctgtgcagcctaaagactacaggatcggcaagagacttggaa

SEQ ID NO: 109651 - DNA, 421 bp, Glycine max
  Clone ID: PAT_MRT3847_70028C.1
accacgcgtccggacgacagaacggtccttcaccatcatacgatcatcactacaaaatttcccattaaatactggtatgtggaatggaccctaatttcatattatttcctcattaattatcaattattgcgcgctatttaactttctagcatagagtttaggcggcaccaatatactctctccaacctataattattatcgagatttctttttttatctcacaacagatcttattttaattttttaatataatattaattacatttttatttataatattaatggtaaacaaaaaatatataaataaattaataataatataaaattaatgttataaatacatttatgattattttttatttatgtaaagtaatctaaaatgactgatattttgtaactaagtagatatctttttcagaag

SEQ ID NO: 109652 - DNA, 487 bp, Glycine max
  Clone ID: PAT_MRT3847_70029C.1
cgaccatcatcgcacaccaaaatgagttctttagatctgttcgctccctctgcagagactcgtcgtctctcggttaagctcaccaatgatcaattagagaagatcggtatgacaaagcaggaggcagctgattttcaacgtctgagaaaccgtttcttggacaagccccttatggaatgggagagagtcaaacctcttcctgatgatttttgtaaatcggcagaagatctccctgaaccctccccagagaaggcaaaagagctgctcaacaagttggtttttgtccaactcaacggaggtcttggcacagccatgggcctgaaatccaccaaatcaggacttcagatcttgaaacagggaggatctgcttacactatcttagactgtaagatccttcaactagaggctctcaacaatcaatatggagtggacatccctctcgtactcatgaactctcccaagacgaacgaggaaactcttaaattgg

SEQ ID NO: 109653 - DNA, 439 bp, Glycine max
  Clone ID: PAT_MRT3847_7002C.1
aattcggttctagttttgatacctttagaggttcattttttgttttagaacaaactggataggttttcgggtggggagcattcatctctctatacaactcatatgaagaacattcttaatattctttctatcatgtccaattcaatcaaaagtatccccccctgggctactttcatcatagagcaactacgtccactagtgacggttcatcttcatccactgtcccaaagaagctttccaattgtgtgcattcagtttctaataggcatagtcccagtccttcatctcccaatctggctagaggataaatactggacccgtttgattcagagatccacggcggtttggatgttgcgtcccgaaatcagcgaagcctgattctgagtctaactcgtcgagggatcctgaactggaggaagagtatcacatactactgcct

SEQ ID NO: 109654 - DNA, 1669 bp, Glycine max
  Clone ID: PAT_MRT3847_70030C.1
cctctctcgcgctctctctctcccacgcgtccgtacgggcgagaagaacagaaggggcagagagtggttgtaagaaaaggaaatgaagaagaaggaaataatggtgatggttccgtatccggcacagggacacgttagtcccatgcaaaagctaggctgggaatttgtgaggcaggggttcgaggctgtgattgtgatccccaaatttattcacaggcagatagcagagcttcagaaaaatgatgagaatgagatgataaagtgggtggctctgccagatcatgaagaagaagaaggaagcaacccaccagaagatttcttcgccatagaatcggccatggagaacagcagcatcacaactcacttggaagcactgctccatagcctggccgcagagggaggtcacgtggcctgcttggtggttgacttattggcatcttgggccatacaagtatccgataggcttgccatcccttgtgctggcttttggcccgccatgttcgccacatacctcttcatttctgccatacctcactttctccaaactcgcctcatttcaaactctggacttccacaacacgagggaaaatttagccttgaacctgagctgccggtgatttcaactgaggatctgccatggcttgtgggaacagacgctgcaaggaaagcaagatttaaattttggaaaagaactttggagagatcaagtgctctgaaatggctcctggtgaattcctttcccgatgaaagcaaactggaattgggcaaacaacaagaagtttgctggaattccatatttgtggctttaaggccctatttgtaattgtagggctacccggtggcagaggaccagtctgtcaactgtgcctatgttgttcaggtttggagggtaggtttaaaactcaatggccttgaaccaaaggatgttgaagaaggacttgtaagggtcatacaagataaggaaatggatacccggttaaggatattgaatcaaagaatcatgggtaccaataataagacgggggctctcatgttgaaaaccttcctccaagatctcaagaaggcaagctctacagcaactacatgaattattactccatgcaggtctttctgaagaccctcacccaaaaaattatttctctatgttaaggcattgtaaaaatcagaagaataatcgacactccaccttgtctttaggctctgtgatcgccatgtctagttaactcactagaatctacgcatatttttatgagttattataataattttctcttttcaagtgtatttttatcagtgatcattcttaaatctctttgcctgtcggacccacaagataaggaaatggatacccggttaaggatattgaatcaaagaatcatgggtaccaataataagacgggggctctcatgttgaaaaccttcctccaagatctcaagaaggcaagctctacagcaactacatgaattattactccatgcaggtctttctgaagaccctcacccaaaaaattatttctctatgttaaggcattgtaaaaatcagaagaataatcgacactccaccttgtctttaggctctgtgatcgccatgtctagttaactcactagaatctacgcatatttttatgagttattataataattttctcttttcaagtgtatttttatc

SEQ ID NO: 109655 - DNA, 530 bp, Glycine max
  Clone ID: PAT_MRT3847_70031C.1
caaccccgcaaaaaggcccgggggaaataaatttgcttcaaaaaagcaaaagggtttaacgggggttccaattggggtttgcccaaaaacccaaggcgggacccccccttttgggcccaaaatggctttaaaaaaaaaaaacagggcccccggacccctaaaaaaggaggaaaaatccccaatcccaggcccccccccaaggacttttaggaggggaaatggccccccaaattaggcggccccttttttttttaaaaaacagggaaatgggggacatattcctttttaaaaaaaaatacatggcccctggaaacggggggaaaaaaaaacaaaaaaaagtggcccccaacccaccccccccttgacctacccccaaatggactatggggaaacgaaacaaaaagtattcttccccgagaccggacccttcaggggcatttttatccccccattaacaggctttttgggcactttggggggcataaaaaggggggcagaaaatgaaatcgtaactgaaactctcccatttt

SEQ ID NO: 109656 - DNA, 436 bp, Glycine max
  Clone ID: PAT_MRT3847_70032C.1
ggctcgagcataactagaatagagcaggattagcattgtctattacaaaacctatcggagcgcagggggctaatgctattgcagttcctgaaactgattgcgtacttgtggctaccggaaagctagatggcgttcttacatttcaaataacagcttgtctacttcatagatctggatctagactgcatgaaagtggaccttgtggacattgttaatcaaccgtcctcttcacaaaacgatcattgtcatgccaggtacgaaccatgagcgagcaactacatactatgagtgttgtcctcattggagcggacctattgaggcaagcatggatgccatgtgaacagacgagaagatcaacgttccacgataggaagaggcactacatgggatctgtgcggtatctctatacagcctggatgatgctaacggacttgtg

SEQ ID NO: 109657 - DNA, 275 bp, Glycine max
  Clone ID: PAT_MRT3847_70033C.1
cccctactattaaaaatttttaaaggggcctttcattgctttacataaaattaaccatgtagaaacaaaggaccgttcaaaccaaaaaaagttaaatgtcctgccagattaacattggggggaaatataaaccattgaatgttttgtcctcaggggtctttaaccgtttaagcaaacttttacatattgccccctcctccgttgaatcctccaaatttaattgaaatttagaatcacagttctttagactgactttttaggcttaatgggtcaaa

SEQ ID NO: 109658 - DNA, 488 bp, Glycine max
  unsure (1)..(488): unsure at all n locations
  Clone ID: PAT_MRT3847_70034C.1
ggagcattctgctgaggtaattacataacttcttatgctttacagtcgtgcaatttccacatttgagatttagattttcatattgaatgccaagttatgcccagcatcatgggacattgtaatcttagttatatattcagctctgcccatgttgaatttatattctttgatggtaggattcaacctttttcattcagcatatcaagctctgacatttaagaaaaggtctcaactctcaagtgcttcattctcatctggccatctacagcatgaattcctgtacatcattctatgatgtataatcgtatatatggaaacttaaaaatattatagtggatcatttggatggtaaaactcaaccattgtgttacacttggattgtagttgaaccagtttcttcattttttttcctttgaaacaattgcagaaggaacattgtgaacaacctatgttgaaattatgggcttttaggtattgagggaganatt

SEQ ID NO: 109659 - DNA, 766 bp, Glycine max
  unsure (1)..(766): unsure at all n locations
  Clone ID: PAT_MRT3847_70035C.1
agaaatnnnttacattatagaagtatgatgatannnttgaaaaataaaataaaaaattaaccaaatactatatgtttacatattaaagctaactttatctttatcactactacacctaccaaaaccaaaacaatccacccaaacaaaaaaacttctataggtatatttggatgactggaggaagctacataagaaggctaaactccagctgaagaagtgccaaggtccagctacaatctattgtctagttacaataatgtgaggtacaacaaccagaaccaaaagtattttaaagtaatttatgtagttaaattgatacagacagaagcgccggtgtatatactttgaaaatcttattgaaatatatatacataaacttagcaacctaatcttcaaccattttgccagagtcataaaaaacaatacctaaatcaataagcaaaagcttaagttcgatgaactgccatgtgagcatatgcacataaattgcaacatgaaaaaaatcagagaaaagcttttgtgtgtaacttaaagagactcactcactcactcaataaattgatatctgacaaagacgatctaaagaaaagaaattcatagatatggggttggaaggaaggactatcttaggaaaaaaggaaaagatatggatgacaccttatattatagaccacagtatatagctgagtgctactcgataacatggtttaatnnnattctaaannataaacaacgccccnnnttacatgcgtgccacagagcgtag

SEQ ID NO: 109660 - DNA, 499 bp, Glycine max
  Clone ID: PAT_MRT3847_70036C.1
tacggctgcgagaagacgacagaagggtggagccctttgtttcatggaaagcagctgatacgtacttcaaacgctcatgatgctaggaccttttggagtcagattgtgtgggtggtctccaaaaaagcctccacttttggctaaaatggaagcggcattgttgtgcatcgtgatgttatttaggtattacgacctcttaggaagtatcactttgatgatgcttgcgtctactttaccaaagatgttgatagttactccccatataatgtcttctcaagcctccaaccattcaatacgagagcacctacaattaggaaaatatgttagaagaatagatggtagctcatgtgaccaagctccatgaggctcaatagaagaagtttgacaaagatgttgttgttgttgttaaaaaagaagtttttgcctccatccaagttaaatcatttgctgaagttgttgacgacaccattgagtgtagggttatcattgatcttacaaa

SEQ ID NO: 109661 - DNA, 413 bp, Glycine max
  Clone ID: PAT_MRT3847_70037C.1
gggagccaaaagggggggggtattgagccaaaaaacccccggggaaaaaaaaacgccccccccaaaaaaaaaaaaactaaaaggtaaaagggcttttaagttcaggaaggaaaaaaattttgacaacaaaaaaagtcttaaaaaaaaaacaagcagggataaagcaaaggcaaatctaccgggaaaatctttgaaaaacaaacaagcatagcaaaaacccccaggggaaaactttgattcaaattttaggggcccaaaaaaaaaattcaaaggcccattggttttcccgaaaaaattcctttttttcctcgggggggaaggcatttttaagggtaaggggctggggaaattccccggggggcttccccttgaacaggggggctacgggtgggcggggaagggccaacaggctt

SEQ ID NO: 109662 - DNA, 440 bp, Glycine max
  Clone ID: PAT_MRT3847_70038C.1
attataacaccattatttgatgtcttcttaatctctaaacgcaaaaaaccatgctgcgcattatataattgggtgagctacaaaacattttctaacgatatcttctatctttacatacctcatttattctcatccattaattcaccacataatgatccaacgtactcgattcttgaacgaagcaatgacatacactatcatcttccaagtttttcacaaacaaacctatcatttcttctaataccttttccaacgtatatcatacacattcactctctcttattttccatctactgttttcagatttaggttcctaacactcacagatattcactctaacttccccctctaaatttttaacacttacctctatgctaaatctatagattaattttcaaccataattgaacaaattcctcactatatgtcttattaatata

SEQ ID NO: 109663 - DNA, 346 bp, Glycine max
  Clone ID: PAT_MRT3847_70039C.1
gggaaaacaaaaccctttttaagggaaaaaaaatgggaataagggggccccccccctgccattccctttagggaaaccctcccgttaaagggggaccctttttaagggggggccaaatcctaaaccgggttttaaaaaggttaaatccctttggcaacaaacaggttttaaactttaatttttaaacccggggggttcccccccctaaaaaaaaaaacaaaaccgccccaccattggcgaaaaaaataaattaaggggtttgaaaaagcaaaatttggtttggtttttaaaggaatttcccggcccctccccaacatggttgggataacatgttcaattacggggg

SEQ ID NO: 109664 - DNA, 238 bp, Glycine max
  unsure (1)..(238): unsure at all n locations
  Clone ID: PAT_MRT3847_7003C.1
tcatcaccatcanctaaaagcaaagatatcaactcatccactatacaagcagcttctaacancacacataacatacctccatataacaactcccatcaatcagcttccactcattaatactcaattatctcantctcaccatcttctacactcttatatctcacacaacactctgtctctctcccctcatcaccaccaagaacttaacagcttcctaccacaatatttaataatttta

SEQ ID NO: 109665 - DNA, 366 bp, Glycine max
  unsure (1)..(366): unsure at all n locations
  Clone ID: PAT_MRT3847_70040C.1
aactcccggctcggccgactcctcctaaatagttcactacgattatggcagctcgcattctatgcaggctactaagacactctctcaagaataacaatactatcaaagctgctccaaaacttaactcactattacgacaccctccagcaccaataaacactaacataatacctacactgcgcatatttacagaactaatcactgcacattttctaatacatctcacacacaacctcacatataagcaataatactaagctgcaataggtaacacatttacaacatattaaccctgctcataataatggattactaatgaaacttaaaaataaaacgatacattcacacatgcatnttaatacattc

SEQ ID NO: 109666 - DNA, 845 bp, Glycine max
  Clone ID: PAT_MRT3847_70041C.1
gcagcgtccggaaacaaactcgttttgtttggtttcacctcccgttcggggagttgaaagaaagaaaggaaggatgggagtgacaccgaaaattgctccttcgatgctctcttccgacttcgccaatttggcttccgaggctcagcgcatgctccacttcggcgccgattggctccacatggacatcatggatgggcattttgtccccaatttaactattggcgctccagttattgaaagtttgagaaagcacacaaagggatatttggattgtcaccttatggttacaaatcctcttgattatgttgagcccttggcaaaagctggtgcttctggttttacatttcatgtagagacatcaaaagataactgggaagaacttatccaaagaatcaagtcacatggcatgactcctggtgtagcattaaagtgtgatgactgtagaaccgggattcggaggacaaaaatttatgccagagatgatggataaagtacgtatacttaggaagaagtatccatcacttgacatagaggttgatggtggtttagggccttcaaccatagatgtggccgcatcagcaggggcaaactgcattgttgctggaagttcagtgtttggtgcccctgagccagttcaagtaatatccttactaaggaattctgttgagaaagcccagcaaaccttgatacagtaaaaaaaaaatgtcgttttaagttgcagtacacttcacaactttgcataaacaatatgcttaatgtttaacattttccataagttgaataaaagatcatgtgacttgataatgtttattcatatttctatatcaagtgtgcagttcataaat
